United States Patent Application Publication US 2011/0183924 A1 - sequence listing, part 263

SEQ ID NO: 737604 - protein, 532 aa, Homo sapiens
MADLEELSRLSPLPPGSPGSAARGRAEPPEEEEEEEEEEEEAEAEAVAALLLNGGSGGGGGGGGGGVGGGEAETMSEPSPESASQAGEDEDEEEDDEEEEDESSSSGGGEEESSAESLVGSSGGSSSDETRSLSPGAASSSSGDGDGKEGLEEPKGPRGSQGGGGGGSSSSSVVSSGGDEGYGTGGGGSSATSGGRRGSLEMSSDGEPLSRMDSEDSISSTIMDVDSTISSGRSTPAMMNGQGSTTSSSKNIAYNCCWDQCQACFNSSPDLADHIRSIHVDGQRGGVFVCLWKGCKVYNTPSTSQSWLQRHMLTHSGDKPFKCVVGGCNASFASQGGLARHVPTHFSQQNSSKVSSQPKAKEESPSKAGMNKRRKLKNKRRRSLPRPHDFFDAQTLDAIRHRAICFNLSAHIESLGKGHSVVFHSTVIAKRKEDSGKIKLLLHWMPEDILPDVWVNESERHQLKTKVVHLSKLPKDTALLLDPNIYSNNAAEEVEEMEFHFLLPQAGCAVGANLGSPQPPVPGFKRFFCLSF

SEQ ID NO: 737605 - protein, 499 aa, Homo sapiens
MADLEELSRLSPLPPGSPGSAARGRAEPPEEEEEEEEEEEEAEAEAVAALLLNGGSGGGGGGGGGGVGGGEAETMSEPSPESASQAGEDEDEEEDDEEEEDESSSSGGGEEESSAESLVGSSGGSSSDETRSLSPGAASSSSGDGDGKEGLEEPKGPRGSQGGGGGGSSSSSVVSSGGDEGYGTGGGGSSATSGGRRGSLEMSSDGEPLSRMDSEDSISSTIMDVDSTISSGRSTPAMMNGQGSTTSSSKNIAYNCCWDQCQACFNSSPDLADHIRSIHVDGQRGGVFVCLWKGCKVYNTPSTSQSWLQRHMLTHSGDKPFKCVVGGCNASFASQGGLARHVPTHFSQQNSSKVSSQPKAKEESPSKAGMNKRRKLKNKRRRSLPRPHDFFDAQTLDAIRHRAICFNLSAHIESLGKGHSVVFHSTVIAKRKEDSGKIKLLLHWMPEDINNAAEEVEEMEFHFLLPQAGCAVGANLGSPQPPVPGFKRFFCLSFLNSWD

SEQ ID NO: 737606 - protein, 102 aa, Homo sapiens
MNLFIMYMAGNTISIFPTMMVCMMAWRPIQALMAISATFKMLESSSQKFLQGLVYLIGNLMGLALAVYKCQSMGLLPTHASDWLAFIEPPERMEFSGGGLLL

SEQ ID NO: 737607 - protein, 143 aa, Homo sapiens
LVARSASASGTQIKPWLEYKDSYKGDKRCWDIALGPLKQIPMNLFIMYMAGNTISIFPTMMVCMMAWRPIQALMAISATFKMLESSSQKFLQGLVYLIGNLMGLALAVYKCQSMGLLPTHASDWLAFIEPPERMEFSGGGLLL

SEQ ID NO: 737608 - protein, 149 aa, Homo sapiens
MTAQGGLVANRGRRFKWAIELSGPGGGSRGRSDRGSGQGDSLYPVGYLDKQVPDTSVQETDRILVEKRCWDIALGPLKQIPMNLFIMYMAGNTISIFPTMMVCMMAWRPIQALMAISAKNGVQWWRTAFVNMRKQRLVPMYLGLIYILL

SEQ ID NO: 737609 - protein, 96 aa, Homo sapiens
  misc_feature (12)..(12): Xaa can be any naturally occurring amino acid
THTSFKIAKGNXPLRCWDIALGPLKQIPMNLFIMYMAGNTISIFPTMMVCMMAWRPIQALMAISAKNGVQWWRTAFVNMRKQRLVPMYLGLIYILL

SEQ ID NO: 737610 - protein, 102 aa, Homo sapiens; identical to SEQ ID NO: 737606

SEQ ID NO: 737611 - protein, 102 aa, Homo sapiens; identical to SEQ ID NO: 737606

SEQ ID NO: 737612 - protein, 102 aa, Homo sapiens; identical to SEQ ID NO: 737606

SEQ ID NO: 737613 - protein, 102 aa, Homo sapiens; identical to SEQ ID NO: 737606

SEQ ID NO: 737614 - protein, 102 aa, Homo sapiens; identical to SEQ ID NO: 737606

SEQ ID NO: 737615 - protein, 129 aa, Homo sapiens
  misc_feature (6)..(6): Xaa can be any naturally occurring amino acid
LSNTLXSKMKFAQRCWDIALGPLKQIPMNLFIMYMAGNTISIFPTMMVCMMAWRPIQALMAISATFKMLESSSQKFLQGLVYLIGNLMGLALAVYKCQSMGLLPTHASDWLAFIEPPERMEFSGGGLLL

SEQ ID NO: 737616 - protein, 129 aa, Homo sapiens
FFSTPPPQTTPLKRCWDIALGPLKQIPMNLFIMYMAGNTISIFPTMMVCMMAWRPIQALMAISATFKMLESSSQKFLQGLVYLIGNLMGLALAVYKCQSMGLLPTHASDWLAFIEPPERMEFSGGGLLL

SEQ ID NO: 737617 - protein, 158 aa, Homo sapiens
MNLFIMYMAGNTISIFPTMMVCMMAWRPIQALMAISATFKMLESSSQKFLQGLVYLIGNLMGLALAVYKCQSMGLLPTHASDWLAFIEPPETPPEALNGRGADKFRKMLDAKEQEMTEMRDVMQQQLAEYQELLDVKLALDMEINASGPFNASGPFNA

SEQ ID NO: 737618 - protein, 102 aa, Homo sapiens; identical to SEQ ID NO: 737606

SEQ ID NO: 737619 - protein, 102 aa, Homo sapiens; identical to SEQ ID NO: 737606

SEQ ID NO: 737620 - protein, 149 aa, Homo sapiens; identical to SEQ ID NO: 737608

SEQ ID NO: 737621 - protein, 208 aa, Homo sapiens
MVRGWVVVTPPGVVMGLAWTAMGGSTLFVETSLRRPQDKDAKGDKDGSLEVTGQLGEVMKESARIAYTFARAFLMQHAPANDYLVTSHIHLHVPEGATPKDGPSAGCTIVTALLSLAMGRPVRQNLAMTGEVSLTGKILPVGGIKEKTIAAKRAGVTCIVLPAENKKDFYDLAAFITEGLEVHFVEHYREIFDIAFPDEQAEALAVER

SEQ ID NO: 737622 - protein, 253 aa, Homo sapiens
DAWVDPRCRPEEPEAENKHKPRRKSKRGKKEAEDELSARHPAELAMEPTPELPAEVLMVEVENVVHEDFQVTEEVKALTAEIVKTIRDIIALNPLYRESVLQMMQAGQRVVDNPIYLSDMGAALTGAESHELQDVLEETNIPKRLYKALSLLKKEFELSKLQQRLGREVEEKIKQTHRKYLLQEQLKIIKKELGLEKDDKDAIEEKFRERLKELVVPKHVMDVVDEELSKLGLLDNHSSEFNVTRNYLDCSVQ

SEQ ID NO: 737623 - protein, 958 aa, Homo sapiens
ELCERQYGRAMAASTGYVRLWGAARCWVLRRPMLAAAGGRVPTAAGAWLLRGQRTCDASPPWALWGRGPAIGGQWRGFWEASSRGGGAFSGGEDASEGGAEEGAGGAGGSAGAGEGPVITALTPMTIPDVFPHLPLIAITRNPVFPRFIKIIEVKNKKLVELLRRKVRLAQPYVGVFLKRDDSNESDVVESLDEIYHTGTFAQIHEMQDLGDKLRMIVMGHRRVHISRQLEVEPEEPEAENKQEGGGGRAERQAPGGAGDGATPELPAEVLMVEVENVVHEDFQVTEEVKALTAEIVKTIRDIIALNPLYRESVLQMMQAGQRVVDNPIYLSDMGAALTGAESHELQDVLEETNIPKRLYKALSLLKKEFELSKLQQRLGREVEEKIKQTHRKYLLQEQLKIIKKELGLEKDDKDAIEEKFRERLKELVVPKHVMDVVDEELSKLGLLDNHSSEFNVTRNYLDWLTSIPWGKYSNENLDLARAQAVLEEDHYGMEDVKKRILEFIAVSQLRGSTQGKILCFYGPPGVGKTSIARSIARALNREYFRFSVGGMTDVAEIKGHRRTYVGAMPGKIIQCLKKTKTENPLILIDEVDKIGEATRGTRRRHCWSCWTRAECQLPGPLPGRARGLVQGAVHLHGNVTDTIPEPLRDRMEMINVSGYVAQEKLAIAERYLVPQARALCGLDESKAKLSSDVLTLLIKQYCRESGVRNLQKQVEKVLRKSAYKIVSGEAESVEVTPENLQDFVGKPVFTVERMYDVTPPGVVMGLAWTAMGGSTLFVETSLRRPQDKDAKGDKDGSLEVTGQLGEVMKESARIAYTFARAFLMQHAPANDYLVTSHIHLHVPEGATPKDGPSAGCTIVTALLSLAMGRPVRQNLAMTGEVSLTGKILPVGGIKEKTIAAKRAGVTCIVLPAENKKDFYDLAAFITEGLEVHFVEHYREIFDIAFPDEQAEALAVER

SEQ ID NO: 737624 - protein, 917 aa, Homo sapiens
MCEPEYGRAMAASTGYVRLWGAARCWVLRRPMLAAAGGRVPTAAGAWLLRGQRTCDASPPWALWGRGPAIGGQWRGFWEASSRGGGAFSGGEDASEGGAEEGAGGAGGSAGAGEGPVITALTPMTIPDVFPHLPLIAITRNPVFPRFIKIIEVKNKKLVELLRRKVRLAQPYVGVFLKRDDSNESDVVESLDEIYHTGTFAQIHEMQDLGDKLRMIVMGHRRVHISRQLEVEPEEPEAENKHKPRRKSKRGKKEAEDELSARHPAELAMEPTPELPAEVLMVEVENVVHEDFQVTEEVKALTAEIVKTIRDIIALNPLYRESVLQMMQAGQRVVDNPIYLSDMGAALTGAESHELQDVLEETNIPKRLYKALSLLKKEFELSKLQQRLGREVEEKIKQTHRKYLLQEQLKIIKKELGLEKDDKDAIEEKFRERLKELVVPKHVMDVVDEELSKLGLLDNHSSEFNVTRNYLDWLTSIPWGKYSNENLDLARAQAVLEEDHYGMEDVKKRILEFIAVSQLRGSTQGKILCFYGPPGVGKTSIARSIARALNREYFRFSVGGMTDVAEIKGHRRTYVGAMPGKIIQCLKKTKTENPLILIDEVDKIGEATRGTRRRHCWSCWTQEKLALQERYLVPQARALCGLDESKAKLSSDVLTLLIKQYCRESGVRNLQKQVEKVLRKSAYKIVSGEAESVEVTPENLQDFVGKPVFTVERMYDVTPPGVVMGLAWTAMGGSTLFVETSLRRPQDKDAKGDKDGSLEVTGQLGEVMKESARIAYTFARAFLMQHAPANDYLVTSHIHLHVPEGATPKDGPSAGCTIVTALLSLAMGRPVRQNLAMTGEVSLTGKILPVGGIKEKTIAAKRAGVTCIVLPAENKKDFYDLAAFITEGLEVHFVEHYREIFDIAFPDEQAEALAVER

SEQ ID NO: 737625 - protein, 681 aa, Homo sapiens
MCEPEYGRAMAASTGYVRLWGAARCWVLRRPMLAAAGGRVPTAAGAWLLRGQRTCDASPPWALWGRGPAIGGQWRGFWEASSRGGGAFSGGEDASEGGAEEGAGGAGGSAGAGEGPVITALTPMTIPDVFPHLPLIAITRNPVFPRFIKIIEVKNKKLVELLRRKVRLAQPYVGVFLKRDDSNESDVVESLDEIYHTGTFAQIHEMQDLGDKLRMIVMGHRRVHISRQLEVEPEEPEAENKHKPRRKSKRGKKEAEDELSARHPAELAMEPTPELPAEVLMVEVENVVHEDFQVTEEVKALTAEIVKTIRDIIALNPLYRESVLQMMQAGQRVVDNPIYLSDMGAALTGAESHELQDVLEETNIPKRLYKALSLLKKEFELSKLQQRLGREVEEKIKQTHRKYLLQEQLKIIKKELGLEKDDKDAIEEKFRERLKELVVPKHVMDVVDEELSKLGLLDNHSSEFNVTRNYLDWLTSIPWGKYSNENLDLARAQAVLEEDHYGMEDVKKRILEFIAVSQLRGSTQGKILCFYGPPGVGKTSIARSIARALNREYFRFSVGGMTDVAEIKGHRRTYVGAMPGKIIQCLKKTKTENPLILIDEVRAERPGEPYPGNAVCKDEASLPGPRDPRSQLRGAIAVIAGPDWHGRVPYNQEATHRRLASPRRVWVQSQSGYPKADLRYT

SEQ ID NO: 737626 - protein, 670 aa, Homo sapiens
MCEPEYGRAMAASTGYVRLWGAARCWVLRRPMLAAAGGRVPTAAGAWLLRGQRTCDASPPWALWGRGPAIGGQWRGFWEASSRGGGAFSGGEDASEGGAEEGAGGAGGSAGAGEGPVITALTPMTIPDVFPHLPLIAITRNPVFPRFIKIIEVKNKKLVELLRRKVRLAQPYVGVFLKRDDSNESDVVESLDEIYHTGTFAQIHEMQDLGDKLRMIVMGHRRVHISRQLEVEPEEPEAENKHKPRRKSKRGKKEAEDELSARHPAELAMEPTPELPAEVLMVEVENVVHEDFQVTEEVKALTAEIVKTIRDIIALNPLYRESVLQMMQAGQRVVDNPIYLSDMGAALTGAESHELQDVLEETNIPKRLYKALSLLKKEFELSKLQQRLGREVEEKIKQTHRKYLLQEQLKIIKKELGLEKDDKDAIEEKFRERLKELVVPKHVMDVVDEELSKLGLLDNHSSEFNVTRNYLDWLTSIPWGKYSNENLDLARAQAVLEEDHYGMEDVKKRILEFIAVSQLRGSTQGKILCFYGPPGVGKTSIARSIARALNREYFRFSGATPKDGPSAGCTIVTALLSLAMGRPVRQNLAMTGEVSLTGKILPVGGIKEKTIAAKRAGVTCIVLPAENKKDFYDLAAFITEGLEVHFVEHYREIFDIAFPDEQAEALAVER

SEQ ID NO: 737627 - protein, 465 aa, Homo sapiens
MEDVKKRILEFIAVSQLRGSTQGKILCFYGPPGVGKTSIARSIARALNREYFRFSVGGMTDVAEIKGHRRTYVGAMPGKIIQCLKKTKTENPLILIDEVDKIGEATRGTRRRHCWSCWTRAECQLPGPLPGRARGLVQGAVHLHGNVTDTIPEPLRDRMEMINVSGYVAQEKLAIAERYLVPQARALCGLDESKAKLSSDVLTLLIKQYCRESGVRNLQKQVEKVLRKSAYKIVSGEAESVEVTPENLQDFVGKPVFTVERMYDVTPPGVVMGLAWTAMGGSTLFVETSLRRPQDKDAKGDKDGSLEVTGQLGEVMKESARIAYTFARAFLMQHAPANDYLVTSHIHLHVPEGATPKDGPSAGCTIVTALLSLAMGRPVRQNLAMTGEVSLTGKILPVGGIKEKTIAAKRAGVTCIVLPAENKKDFYDLAAFITEGLEVHFVEHYREIFDIAFPDEQAEALAVER

SEQ ID NO: 737628 - protein, 968 aa, Homo sapiens
ELCERQYGRAMAASTGYVRLWGAARCWVLRRPMLAAAGGRVPTAAGAWLLRGQRTCDASPPWALWGRGPAIGGQWRGFWEASSRGGGAFSGGEDASEGGAEEGAGGAGGSAGAGEGPVITALTPMTIPDVFPHLPLIAITRNPVFPRFIKIIEVKNKKLVELLRRKVRLAQPYVGVFLKRDDSNESDVVESLDEIYHTGTFAQIHEMQDLGDKLRMIVMGHRRVHISRQLEVEPEEPEAENKHKPRRKSKRGKKEAEDELSARHPAELAMEPTPELPAEVLMVEVENVVHEDFQVTEEVKALTAEIVKTIRDIIALNPLYRESVLQMMQAGQRVVDNPIYLSDMGAALTGAESHELQDVLEETNIPKRLYKALSLLKKEFELSKLQQRLGREVEEKIKQTHRKYLLQEQLKIIKKELGLEKDDKDAIEEKFRERLKELVVPKHVMDVVDEELSKLGLLDNHSSEFNVTRNYLDWLTSIPWGKYSNENLDLARAQAVLEEDHYGMEDVKKRILEFIAVSQLRGSTQGKILCFYGPPGVGKTSIARSIARALNREYFRFSVGGMTDVAEIKGHRRTYVGAMPGKIIQCLKKTKTENPLILIDEVDKIGEATRGTRRRHCWSCWTRAECQLPGPLPGRARGLVQGAVHLHGNVTDTIPEPLRDRMEMINVSGYVAQEKLAIAERYLVPQARALCGLDESKAKLSSDVLTLLIKQYCRESGVRNLQKQVEKVLRKSAYKIVSGEAESVEVTPENLQDFVGKPVFTVERMYDVTPPGVVMGLAWTAMGGSTLFVETSLRRPQDKDAKGDKDGSLEVTGQLGEVMKESARIAYTFARAFLMQHAPANDYLVTSHIHLHVPEGATPKDGPSAGCTIVTALLSLAMGRPVRQNLAMTGEVSLTGKILPVGGIKEKTIAAKRAGVTCIVLPAENKKDFYDLAAFITEGLEVHFVEHYREIFDIAFPDEQAEALAVER

SEQ ID NO: 737629 - protein, 881 aa, Homo sapiens
ELCEPRVWPGYGGEHWLRATVGSAGAGEGPVITALTPMTIPDVFPHLPLIAITRNPVFPRFIKIIEVKNKKLVELLRRKVRLAQPYVGVFLKRDDSNESDVVESLDEIYHTGTFAQIHEMQDLGDKLRMIVMGHRRVHISRQLEVEPEEPEAENKHKPRRKSKRGKKEAEDELSARHPAELAMEPTPELPAEVLMVEVENVVHEDFQVTEEVKALTAEIVKTIRDIIALNPLYRESVLQMMQAGQRVVDNPIYLSDMGAALTGAESHELQDVLEETNIPKRLYKALSLLKKEFELSKLQQRLGREVEEKIKQTHRKYLLQEQLKIIKKELGLEKDDKDAIEEKFRERLKELVVPKHVMDVVDEELSKLGLLDNHSSEFNVTRNYLDWLTSIPWGKYSNENLDLARAQAVLEEDHYGMEDVKKRILEFIAVSQLRGSTQGKILCFYGPPGVGKTSIARSIARALNREYFRFSVGGMTDVAEIKGHRRTYVGAMPGKIIQCLKKTKTENPLILIDEVDKIGEATRGTRRRHCWSCWTRAECQLPGPLPGRARGLVQGAVHLHGNVTDTIPEPLRDRMEMINVSGYVAQEKLAIAERYLVPQARALCGLDESKAKLSSDVLTLLIKQYCRESGVRNLQKQVEKVLRKSAYKIVSGEAESVEVTPENLQDFVGKPVFTVERMYDVTPPGVVMGLAWTAMGGSTLFVETSLRRPQDKDAKGDKDGSLEVTGQLGEVMKESARIAYTFARAFLMQHAPANDYLVTSHIHLHVPEGATPKDGPSAGCTIVTALLSLAMGRPVRQNLAMTGEVSLTGKILPVGGIKEKTIAAKRAGVTCIVLPAENKKDFYDLAAFITEGLEVHFVEHYREIFDIAFPDEQAEALAVER

SEQ ID NO: 737630 - protein, 716 aa, Homo sapiens
SCRFGTSKYSNENLDLAMEPTPELPAEVLMVEVENVVHEDFQVTEEVKALTAEIVKTIRDIIALNPLYRESVLQMMQAGQRVVDNPIYLSDMGAALTGAESHELQDVLEETNIPKRLYKALSLLKKEFELSKLQQRLGREVEEKIKQTHRKYLLQEQLKIIKKELGLEKDDKDAIEEKFRERLKELVVPKHVMDVVDEELSKLGLLDNHSSEFNVTRNYLDWLTSIPWGKYSNENLDLARAQAVLEEDHYGMEDVKKRILEFIAVSQLRGSTQGKILCFYGPPGVGKTSIARSIARALNREYFRFSVGGMTDVAEIKGHRRTYVGAMPGKIIQCLKKTKTENPLILIDEVDKIGEATRGTRRRHCWSCWTRAECQLPGPLPGRARGLVQGAVHLHGNVTDTIPEPLRDRMEMINVSGYVAQEKLAIAERYLVPQARALCGLDESKAKLSSDVLTLLIKQYCRESGVRNLQKQVEKVLRKSAYKIVSGEAESVEVTPENLQDFVGKPVFTVERMYDVTPPGVVMGLAWTAMGGSTLFVETSLRRPQDKDAKGDKDGSLEVTGQLGEVMKESARIAYTFARAFLMQHAPANDYLVTSHIHLHVPEGATPKDGPSAGCTIVTALLSLAMGRPVRQNLAMTGEVSLTGKILPVGGIKEKTIAAKRAGVTCIVLPAENKKDFYDLAAFITEGLEVHFVEHYREIFDIAFPDEQAEALAVER

SEQ ID NO: 737631 - protein, 477 aa, Homo sapiens
ELCERQYGRAMAASTGYVRLWGAARCWVLRRPMLAAAGGRVPTAAGAWLLRGQRTCDASPPWALWGRGPAIGGQWRGFWEASSRGGGAFSGGEDASEGGAEEGAGGAGGSAGAGEGPVITALTPMTIPDVFPHLPLIAITRNPVFPRFIKIIEVKNKKLVELLRRKVRLAQPYVGVFLKRDDSNESDVVESLDEIYHTGTFAQIHEMQDLGDKLRMIVMGHRRVHISRQLEVEPEEPEAENKHKPRRKSKRGKKEAEDELSARHPAELAMEPTPELPAEVLMVEVENVVHEDFQVTEEVKALTAEIVKTIRDIIALNPLYRESVLQMMQAGQRVVDNPIYLSDMGAALTGAESHELQDVLEETNIPKRLYKALSLLKKEFELSKLQQRLGREVEEKIKQTHRKYLLQEQLKIIKKELGLEKDDKDAIEEKFRERLKELVVPKHVMDVVDEELSKLGLLDNHSSEFNVTRNYLDCSVQ

SEQ ID NO: 737632 - protein, 135 aa, Homo sapiens
ELCEPRVWPGYGGEHWLRATVGSAGAGEGPVITALTPMTIPDVFPHLPLIAITRNPVFPRFIKIIEVKNKKLVELLRRKVRLAQPYVGVFLKRDDSNESDVVESLDEIYHTGTAGGGCQALSGPELDVRPCLGQN

SEQ ID NO: 737633 - protein, 119 aa, Homo sapiens
CSLQCCLAFGGLGLSPLFMSDVRHRSECVVGRSPFPEPPPALRRSRAPLSLTQHPPRGAASPRRSLDPQHCLLTIMAGTIRKRSSGSSFYSRVVMATKNTLAEAGSRSDVRLTNNSQGK

SEQ ID NO: 737634 - protein, 84 aa, Homo sapiens
MRGRGAPGPSGFLHDTFVQSKTRSHFDSPLSRSLLQISRLAARSLHAVLKKQIPHPPFNSFPGGNPPPNLWKRYTSSSLIKAGG

SEQ ID NO: 737635 - protein, 98 aa, Homo sapiens
SAGEEWRGPWRQTLHALGTPCRECSRRFRVSRRGHGPDRQRLGLQLCMALTPPDLAPHPHCGVGGFTWVLHLRFPGRSSAPCLGHPGPCSVGPTHAGV

SEQ ID NO: 737636 - protein, 203 aa, Homo sapiens
MVRAWLLWAVRCTSETLQSPRPETFHPQASRSFLPPASHRSSLLLSLAPTAPSPCLPFPVILAWPCQAVKPGQTTLLCAHPGQAGAGQQVADGCGRRQGPPLGLSSQSWPLLFFPSAESLCSAFREGRCGWLPPAPCPPPGLHLFSLLEQLVFSGKVLAQSTPGKSHGEARKQFPPWPLSCQHSFLTHHLMLLLSPQLEPTVL

SEQ ID NO: 737637 - protein, 110 aa, Homo sapiens
MGRDRAQIKWTQPFDLMGCTAHGGTLPWEFFLDLETFPNWNPLSSATSVPDLVGLSSGISFQRHFLFGVIPSAVMDSMNKYGYLNVFVQYENQNELVEALQISWSDPFYR

SEQ ID NO: 737638 - protein, 320 aa, Homo sapiens
PPALEAAARCATASRHPCPPDSAAACPAMGRQKELVSRCGEMLHIRYRLLRQALAECLGTLILVMFGCGSVAQVVLSRGTHGGFLTINLAFGFAVTLGILIAGQVSGAHLNPAVTFAMCFLAREPWIKLPIYTLAQTLGAFLGAGIVFGLYYDAIWHFADNQLFVSGPNGTAGIFATYPSGHLDMINGFFDQFIGTASLIVCVLAIVDPYNNPVPRGLEAFTVGLVVLVIGTSMGFNSGYAVNPARDFGPRLFTALAGWGSAVFTTGQHWWWVPIVSPLLGSIAGVFVYQLMIGCHLEQPPPSNEEENVKLAHVKHKEQI

SEQ ID NO: 737639 - protein, 79 aa, Homo sapiens
FRTMTVLKTGVRPEFRIQVCMFQGLHMEELQIDMCFCVCVCLPFFLSGGFYRLLGSRVDVGRAGRRGPQLRFGALDVHT

SEQ ID NO: 737640 - protein, 320 aa, Homo sapiens; identical to SEQ ID NO: 737638

SEQ ID NO: 737641 - protein, 320 aa, Homo sapiens; identical to SEQ ID NO: 737638

SEQ ID NO: 737642 - protein, 292 aa, Homo sapiens
MGRQKELVSRCGEMLHIRYRLLRQALAECLGTLILVMFGCGSVAQVVLSRGTHGGFLTINLAFGFAVTLGILIAGQVSGAHLNPAVTFAMCFLAREPWIKLPIYTLAQTLGAFLGAGIVFGLYYDAIWHFADNQLFVSGPNGTAGIFATYPSGHLDMINGFFDQFIGTASLIVCVLAIVDPYNNPVPRGLEAFTVGLVVLVIGTSMGFNSGYAVNPARDFGPRLFTALAGWGSAVFTTGQHWWWVPIVSPLLGSIAGVFVYQLMIGCHLEQPPPSNEEENVKLAHVKHKEQI

SEQ ID NO: 737643 - protein, 295 aa, Homo sapiens
KQAVLVGGFLVSRCGEMLHIRYRLLRQALAECLGTLILVMFGCGSVAQVVLSRGTHGGFLTINLAFGFAVTLGILIAGQVSGAHLNPAVTFAMCFLAREPWIKLPIYTLAQTLGAFLGAGIVFGLYYDAIWHFADNQLFVSGPNGTAGIFATYPSGHLDMINGFFDQFIGTASLIVCVLAIVDPYNNPVPRGLEAFTVGLVVLVIGTSMGFNSGYAVNPARDFGPRLFTALAGWGSAVFTTGQHWWWVPIVSPLLGSIAGVFVYQLMIGCHLEQPPPSNEEENVKLAHVKHKEQI

SEQ ID NO: 737644 - protein, 279 aa, Homo sapiens
MELAEGLGVSATCVDDVLGVVPVGPCVVDKGGDEGGCSVIHLTLVLRCGLDHYWGNTCIGWSRVSGAHLNPAVTFAMCFLAREPWIKLPIYTLAQTLGAFLGAGIVFGLYYDAIWHFADNQLFVSGPNGTAGIFATYPSGHLDMINGFFDQFIGTASLIVCVLAIVDPYNNPVPRGLEAFTVGLVVLVIGTSMGFNSGYAVNPARDFGPRLFTALAGWGSAVFTTGQHWWWVPIVSPLLGSIAGVFVYQLMIGCHLEQPPPSNEEENVKLAHVKHKEQI

SEQ ID NO: 737645 - protein, 208 aa, Homo sapiens
GKVEAGGASGREPWIKLPIYTLAQTLGAFLGAGIVFGLYYDAIWHFADNQLFVSGPNGTAGIFATYPSGHLDMINGFFDQFIGTASLIVCVLAIVDPYNNPVPRGLEAFTVGLVVLVIGTSMGFNSGYAVNPARDFGPRLFTALAGWGSAVFTTGQHWWWVPIVSPLLGSIAGVFVYQLMIGCHLEQPPPSNEEENVKLAHVKHKEQI

SEQ ID NO: 737646 - protein, 214 aa, Homo sapiens
ATPSACCNTAVLLLTHNSWEGGEGTPEREVWAQASPPTHCVSNLSPDAIWHFADNQLFVSGPNGTAGIFATYPSGHLDMINGFFDQFIGTASLIVCVLAIVDPYNNPVPRGLEAFTVGLVVLVIGTSMGFNSGYAVNPARDFGPRLFTALAGWGSAVFTTGQHWWWVPIVSPLLGSIAGVFVYQLMIGCHLEQPPPSNEEENVKLAHVKHKEQI

SEQ ID NO: 737647 - protein, 147 aa, Homo sapiens
RLGRGRGESAEAINGFFDQFIGTASLIVCVLAIVDPYNNPVPRGLEAFTVGLVVLVIGTSMGFNSGYAVNPARDFGPRLFTALAGWGSAVFTTGQHWWWVPIVSPLLGSIAGVFVYQLMIGCHLEQPPPSNEEENVKLAHVKHKEQI

SEQ ID NO: 737648 - protein, 149 aa, Homo sapiens [sequence omitted]

SEQ ID NO: 737649 - protein, 131 aa, Homo sapiens
QASRALWFIGRGCVLAIVDPYNNPVPRGLEAFTVGLVVLVIGTSMGFNSGYAVNPARDFGPRLFTALAGWGSAVFTTGQHWWWVPIVSPLLGSIAGVFVYQLMIGCHLEQPPPSNEEENVKLAHVKHKEQI

SEQ ID NO: 737650 - protein, 320 aa, Homo sapiens; identical to SEQ ID NO: 737638

SEQ ID NO: 737651 - protein, 320 aa, Homo sapiens; identical to SEQ ID NO: 737638

SEQ ID NO: 737652 - protein, 320 aa, Homo sapiens; identical to SEQ ID NO: 737638

SEQ ID NO: 737653 - protein, 320 aa, Homo sapiens; identical to SEQ ID NO: 737638

SEQ ID NO: 737654 - protein, 320 aa, Homo sapiens; identical to SEQ ID NO: 737638

SEQ ID NO: 737655 - protein, 186 aa, Homo sapiens
PPALEAAARCATASRHPCPPDSAAACPAMGRQKELVSRCGEMLHIRYRLLRQALAECLGTLILVMFGCGSVAQVVLSRGTHGGFLTINLAFGFAVTLGILIAGQVSGAHLNPAVTFAMCFLAREPWIKLPIYTLAQTLGAFLGAGIVFGLYYDAIWHFADNQLFVSGPNGTAGIFATYPFWMYIHK

SEQ ID NO: 737656 - protein, 615 aa, Homo sapiens
MHRGLIHPQSRAVGGDAMTPIVTVLICLGLSLGPRTRVQTGTIPKPTLWAEPDSVITQGSPVTLSCQGSLEAQEYRLYREKKSASWITRIRPELVKNGQFHIPSITWEHTGRYGCQYYSRARWSELSDPLVLVMTGAYPKPTLSAQPSPVVTSGGRVTLQCESQVAFGGFILCKEGEDEHPQCLNSQPHARGSSRAIFSVGPVSPNRRWSHRCYGYDLNSPYVWSSPSDLLELLVPGVSKKPSLSVQPGPVMAPGESLTLQCVSDVGYDRFVLYKEGERDLRQLPGRQPQAGLSQANFTLGPVSRSYGGQYRCYGAHNLSSECSAPSDPLDILITGQIRGTPFISVQPGPTVASGENVTLLCQSWRQFHTFLLTKAGAADAPLRLRSIHEYPKYQAEFPMSPVTSAHAGTYRCYGSLNSDPYLLSHPSEPLELVVSGPSMGSSPPPTGPISTPAGPEDQPLTPTGSDPQSGLGRHLGVVIGILVAVVLLLLLLLLLFLILRHRRQGKHWTSTQRKADFQHPAGAVGPEPTDRGLQWRSSPAADAQEENLYAAVKDTQPEDGVEMDTRAAASEAPQDVTYAQLHSLTLRRKATEPPPSQEREPPAEPSIYATLAIH

SEQ ID NO: 737657 - protein, 615 aa, Homo sapiens; identical to SEQ ID NO: 737656

SEQ ID NO: 737658 - protein, 640 aa, Homo sapiens
GSHCYPHQEGQTQEAPVLFAATSRLSHRGLIHPQSRAVGGDAMTPIVTVLICLGLSLGPRTRVQTGTIPKPTLWAEPDSVITQGSPVTLSCQGSLEAQEYRLYREKKSASWITRIRPELVKNGQFHIPSITWEHTGRYGCQYYSRARWSELSDPLVLVMTGAYPKPTLSAQPSPVVTSGGRVTLQCESQVAFGGFILCKEGEDEHPQCLNSQPHARGSSRAIFSVGPVSPNRRWSHRCYGYDLNSPYVWSSPSDLLELLVPGVSKKPSLSVQPGPVMAPGESLTLQCVSDVGYDRFVLYKEGERDLRQLPGRQPQAGLSQANFTLGPVSRSYGGQYRCYGAHNLSSECSAPSDPLDILITGQIRGTPFISVQPGPTVASGENVTLLCQSWRQFHTFLLTKAGAADAPLRLRSIHEYPKYQAEFPMSPVTSAHAGTYRCYGSLNSDPYLLSHPSEPLELVVSGPSMGSSPPPTGPISTPAGPEDQPLTPTGSDPQSGLGRHLGVVIGILVAVVLLLLLLLLLFLILRHRRQGKHWTSTQRKADFQHPAGAVGPEPTDRGLQWRSSPAADAQEENLYAAVKDTQPEDGVEMDTRAAASEAPQDVTYAQLHSLTLRRKATEPPPSQEREPPAEPSIYATLAIH

SEQ ID NO: 737659 - protein, 615 aa, Homo sapiens; identical to SEQ ID NO: 737656

SEQ ID NO: 737660 - protein, 527 aa, Homo sapiens
MHRGLIHPQSRAVGGDAMTPIVTVLICLGLSLGPRTRVQTGTIPKPTLWAEPDSVITQGSPVTLSCQGSLEAQEYRLYREKKSASWITRIRPELVKNGQFHIPSITWEHTGRYGCQYYSRARWSELSDPLVLVMTGAYPKPTLSAQPSPVVTSGGRVTLQCESQVAFGGFILCKEGEDEHPQCLNSQPHARGSSRAIFSVGPVSPNRRWSHRCYGYDLNSPYVWSSPSDLLELLVPGVSKKPSLSVQPGPVMAPGESLTLQCVSDVGYDRFVLYKEGERDLRQLPGRQPQAGLSQANFTLGPVSRSYGGQYRCYGAHNLSSECSAPSDPLDILITGQIRGTPFISVQPGPTVASGENVTLLCQSWRQFHTFLLTKAGAADAPLRLRSIHEYPKYQAEFPMSPVTSAHAGTYRCYGSLNSDPYLLSHPSEPLELVVSGPSMGSSPPPTGPISTPAGPEDQPLTPTGSDPQSGLGRHLGVVIGILVAVVLLLLLLLLLFLILRHRRQGKHWTSSPAQLPTPRKKTSMLP

SEQ ID NO: 737661 - protein, 68 aa, Homo sapiens
VLGKRRLVFLQLLNLKNTDKRHRESPPADAHRQHLLSPAWPEMKEVVEQPSAAGCGRGVRSVAKEDIK

SEQ ID NO: 737662 - protein, 111 aa, Homo sapiens
MPRVSDRARVLSSIFRAGYSWVLELYQAVFPKGAQREGPSPGTVREPLPQTVPVLQGPRRCCPRDPGACPGGAGRGPPLSPSSLSPGPPASRSPGAGSARLTALQLPRSRP

SEQ ID NO: 737663 - protein, 81 aa, Homo sapiens
LFYIEGNTTANILCTHCYARWEYFCEYITESGIAALEGMYTLNCPGDYHIARHKAAPVFSRPLAHEPACLLVSRPTQDCPC

SEQ ID NO: 737664 - protein, 145 aa, Homo sapiens
LLSQPSLLTSPQGWSQGGRPLAPPLSTCGPQPRILPSCSDEWHRCPAQAGKPLPETDSAGGNSSNRFYRKPLKWRLRPHLAPGPHSTEKKIHPAWGWGLPEMATLWQESLRILSEPGLWELTEGGREREREKEREIIPECAGEEA

SEQ ID NO: 737665 - protein, 136 aa, Homo sapiens
SRILQAGLDVERLSLRNFFHHFHSKRGMWSRRQMKTLEPEGVRGAQHSPLWTSSGSPGPCYCSGMGSGVTAGPQEASKLTAHSTWSCPLTEAGSGAPVSASWAFRREDFEREARRDHLLSREREELLRRTGQEGEI

SEQ ID NO: 737666 - protein, 203 aa, Homo sapiens
MGGGDLNLKKSWHPQTLRNVEKVWKAEQKHEAERKKIEELQRELREERAREEMQRYAEDVGAVKKKEEKLDWMYQGPGGMVNRDEYLLGRPIDKYVFEKMEEKEAGCSSETGLLPGSIFAPSGANSLLDMASKIREDPLFIIRKKEEEKKREVLNNPVKMKKIKELRQRIWKKGEKKSLYTNKKNSGGGRNPIRPKGNDYKLR

SEQ ID NO: 737667 - protein, 425 aa, Homo sapiens
MGGGDLNLKKSWHPQTLRNVEKVWKAEQKHEAERKKIEELQRELREERAREEMQRYAEDVGAVKKKEEKLDWMYQGPGGMVNRDEYLLGRPIDKYVFEKMEEKEAGCSSETGLLPGSIFAPSGANSLLDMASKIREDPLFIIRKKEEEKKREVLNNPVKMKKIKELLQMSLEKKEKKKKKEKKKKHKKHKHRSSSSDRSSSEDEHSAGRSQKKMANSSPVLSKVPGYGLQVRNSDRNQGLQGPLTAEQKRGHGMKNHSRSRSSSHSPPRHASKKSTREAGSRDRRSRSLGRRSRSPRPSKLHNSKVNRRETGQTRSPSPKKEVYQRRHAPGYTRKLSAEELERKRQEMMENAKWREEERLNILKRHAKDEEREQRLEKLDSRDGKFIHRMKLESASTSSLEDRVKRNIYSLQRTSVALEKNFMKR

SEQ ID NO: 737668 - protein, 438 aa, Homo sapiens
PFTIGNACVVRVGDGRRDLNLKKSWHPQTLRNVEKVWKAEQKHEAERKKIEELQRELREERAREEMQRYAEDVGAVKKKEEKLDWMYQGPGGMVNRDEYLLGRPIDKYVFEKMEEKEAGCSSETGLLPGSIFAPSGANSLLDMASKIREDPLFIIRKKEEEKKREVLNNPVKMKKIKELLQMSLEKKEKKKKKEKKKKHKKHKHRSSSSDRSSSEDEHSAGRSQKKMANSSPVLSKVPGYGLQVRNSDRNQGLQGPLTAEQKRGHGMKNHSRSRSSSHSPPRHASKKSTREAGSRDRRSRSLGRRSRSPRPSKLHNSKVNRRETGQTRSPSPKKEVYQRRHAPGYTRKLSAEELERKRQEMMENAKWREEERLNILKRHAKDEEREQRLEKLDSRDGKFIHRMKLESASTSSLEDRVKRNIYSLQRTSVALEKNFMKR

SEQ ID NO: 737669 - protein, 425 aa, Homo sapiens; identical to SEQ ID NO: 737667

SEQ ID NO: 737670 - protein, 408 aa, Homo sapiens
MGGGDLNLKKSWHPQTLRNVEKVWKAEQKHEAERKKIEELQRELREERAREEMQRYAEDVGAVKKKEEKLDWMYQGPGGMVNRDEYLLGRPIDKYVFEKMEEKEAGCSSETGLLPGSIFAPSGANSLLDMASKIREDPLFIIRKKEEEKKREVLNNPVKMKKIKELLQMSLEKKEKKKKKEKKKKHKKHKHRSSSSDRSSSEDEHSAGRSQKKMANSSPVLSKVPGYGLQVRNSDRNQGLQGPLTAEQSPPRHASKKSTREAGSRDRRSRSLGRRSRSPRPSKLHNSKVNRRETGQTRSPSPKKEVYQRRHAPGYTRKLSAEELERKRQEMMENAKWREEERLNILKRHAKDEEREQRLEKLDSRDGKFIHRMKLESASTSSLEDRVKRNIYSLQRTSVALEKNFMKR

SEQ ID NO: 737671 - protein, 519 aa, Homo sapiens
MARDLVMFRDVAVDFSQEEWECLNSYQRNLYRDVILENYSNLVSLAGCSISKPDVITLLEQGKEPWMVVRDEKRRWTLDLESRYDTKKLFQGKDIYEMNLSQWKVMERIKSCGLEEQESPHEVCFRQVTKTTSEKMPTYRKLTSLPLYQKSHNREKPYECGECGKAFRVRQQLTFHQRIHTGEKPYECKECGKAFRQCAHLSRHQRIHTSDKLYECKKCGKIFTCGSDLRVHQRIHIGEKPYECKECGKAFRVRGQLNLHQRIHTGEKPYECKECGKAFRQYAHLTRHQRLNIAEKCYECKECGQAFLCSTGLRLHHKLHTGEKPYECKECGKAFRVRQQLTLHQRIHTGEKPYDCKECGKTFSRGYHLTLHQRIHTGEKPYECKECQKFFRRYSELISHQGIHIGEKPYECKECGKAFRLFSQLTQHQSIHFGEKPFKCKECEKTFRLLSQLTQHQSIHTGEKPYDCKECGKAFRLHSSLIQHQRIHSGEKPYKCKECKKAFRQHSHLTYHQRIHNVT

SEQ ID NO: 737672 - protein, 468 aa, Homo sapiens
VTDFYYKVFVCLFCVEQENMFWSCFLSDLESRYDTKKLFQGKDIYEMNLSQWKVMERIKSCGLEEQESPHEVCFRQVTKTTSEKMPTYRKLTSLPLYQKSHNREKPYECGECGKAFRVRQQLTFHQRIHTGEKPYECKECGKAFRQCAHLSRHQRIHTSDKLYECKKCGKIFTCGSDLRVHQRIHIGEKPYECKECGKAFRVRGQLNLHQRIHTGEKPYECKECGKAFRQYAHLTRHQRLNIAEKCYECKECGQAFLCSTGLRLHHKLHTGEKPYECKECGKAFRVRQQLTLHQRIHTGEKPYDCKECGKTFSRGYHLTLHQRIHTGEKPYECKECQKFFRRYSELISHQGIHIGEKPYECKECGKAFRLFSQLTQHQSIHFGEKPFKCKECEKTFRLLSQLTQHQSIHTGEKPYDCKECGKAFRLHSSLIQHQRIHSGEKPYKCKECKKAFRQHSHLTYHQRIHNVT

SEQ ID NO: 737673 - protein, 468 aa, Homo sapiens; identical to SEQ ID NO: 737672

SEQ ID NO: 737674 - protein, 263 aa, Homo sapiens
MGGKAPQAQSLLSSLQQAEFKKQIFYTMSYASLSRAQATTSSCLQACIFLWEASPLTLHQGPGLRGDGGRFPCSRRFWEQVPEAEAMASEQVAASPPPEPAALTASHIAPASAWAKAPGVIKDSVFTSSGPRETSLAPEEGLAEPQAPVHTHRPQVWPWAGPWCADSSGHCSRAFAPACCRSRRSWGVEPQRPLVFLPLLGDGCSSWLFPESVFVIWLLETPSDETGSVGLACQAEAVGAQESHHEAGGRGPIAPPCRPGPGT

SEQ ID NO: 737675 - protein, 135 aa, Homo sapiens
ISTIRVKNKESSRKGLGVCYVRNTKSVHCFQAFLTKVNSHSSFWSINAELFLNSETLGNLSVLLTAIFFLFCFLFQIPGILLKSGCCRPWRDARLLGESGWGTCQRSRAVPLQAGSTTTSKQKAAVIHNSAHYRH

SEQ ID NO: 737676 - protein, 113 aa, Homo sapiens
RKSYPGAASATQLFVHAGALFPSSGVCLCDFMPGPTLGWLIRVAGEDWGLEDKQEQLATHRTIRPVDPGVPQRGSTCTGLPSTPAAWALSAIAAFDVQVDHSPMLYAINNSVF

SEQ ID NO: 737677 - protein, 615 aa, Homo sapiens
MHRGLIHPQSRAVGGDAMTPIVTVLICLGLSLGPRTHVQTGTIPKPTLWAEPDSVITQGSPVTLSCQGSLEAQEYRLYREKKSASWITRIRPELVKNGQFHIPSITWEHTGRYGCQYYSRARWSELSDPLVLVMTGAYPKPTLSAQPSPVVTSGGRVTLQCESQVAFGGFILCKEGEDEHPQCLNSQPHARGSSRAIFSVGPVSPNRRWSHRCYGYDLNSPYVWSSPSDLLELLVPGVSKKPSLSVQPGPVVAPGESLTLQCVSDVGYDRFVLYKEGERDLRQLPGRQPQAGLSQANFTLGPVSRSYGGQYRCYGAYNLSSEWSAPSDPLDILITGQIHGTPFISVQPGPTVASGENVTLLCQSWRQFHTFLLTKAGAADAPLRLRSIHEYPKYQAEFPMSPVTSAHAGTYRCYGSLNSDPYLLSHPSEPLELVVSGPSMGSSPPPTGPISTPAGPEDQPLTPTGSDPQSGLGRHLGVVIGILVAVVLLLLLLLLLFLILRHRRQGKHWTSTQRKADFQHPAGAVGPEPTDRGLQWRSSPAADAQEENLYAAVKDTQPEDGVEMDTRAAASEAPQDVTYAQLHSLTLRRKATEPPPSQEREPPAEPSIYATLAIH

SEQ ID NO: 737678 - protein, 305 aa, Homo sapiens
  misc_feature (36)..(36): Xaa can be any naturally occurring amino acid
FISVQPGPTVASGENVTLLCQSWRQFHTFLLTKAGXADCPTVASGENVTLLCQSWRQFHTFLLTKAGAADAPLRLRSIHEYPKYQAEFPMSPVTSAHAGTYRCYGSLNSDPYLLSHPSEPLELVVSGPSMGSSPPPTGPISTPAGPEDQPLTPTGSDPQSGLGRHLGVVIGILVAVVLLLLLLLLLFLILRHRRQGKHWTSTQRKADFQHPAGAVGPEPTDRGLQWRSSPAADAQEENLYAAVKDTQPEDGVEMDTRAAASEAPQDVTYAQLHSLTLRRKATEPPPSQEREPPAEPSIYATLAIH

SEQ ID NO: 737679 - protein, 223 aa, Homo sapiens [sequence omitted]

SEQ ID NO: 737680 - protein, 102 aa, Homo sapiens [sequence omitted]

SEQ ID NO: 737681 - protein, 279 aa, Homo sapiens
  misc_feature (256)..(256): Xaa can be any naturally occurring amino acid
  misc_feature (271)..(271): Xaa can be any naturally occurring amino acid
  misc_feature (279)..(279): Xaa can be any naturally occurring amino acid
ERLRECTEIRNPLLVQDVESYDPVLNPVLNREVRRTGGRVLITLGDQDIDLSPSFVIFLSTRDPTVEFPPDLCSRVTFVNFTVTRSSLQSQCLNEVLKAERPDVDEKRSDLLKLQGEFQLRLRQLEKSLLQALNEVKGRILDDDTIITTLENLKREAAEVTRKVEETDIVMQEVETVSQQYLPLSTACSSIYFTMESLKQIHFLYQYSLQFFLDIYHNVLYENPGRLQLRSHGFETSRGHVQQQQAVTGPMPSQPXLPLDASWLGVKQTNXGKKPVLVX

SEQ ID NO: 737682 - protein, 112 aa, Homo sapiens
RAGPASFWNTFEIFAFVRFQPFGGDSESLNLEARREGKWRPPGSGQPGRRARGTQGHRPPETSGSSRHSPCGIKNGYSGCHGNQPSPPSVSLNLCRPFLAKIQANRFVLTLR

SEQ ID NO: 737683 - protein, 107 aa, Homo sapiens
LPPTPSASGASRFADTAFPRVKCRVASGGLGIFQQEEPSGISSSPCCPPAGLETPPGMVFLPASSCCINEKNPQEPPPGRMAPFAVCRLPALWLGHLSCAMPPDQVP

SEQ ID NO: 737684 - protein, 85 aa, Homo sapiens
  misc_feature (8)..(8): Xaa can be any naturally occurring amino acid
  misc_feature (19)..(19): Xaa can be any naturally occurring amino acid
  misc_feature (27)..(27): Xaa can be any naturally occurring amino acid
AYIIRPPXADRSRRANPAXVGPSLATXAASLRSLRRASVLAGALVSHCVLQGQNGTDGEIEMRAHPQDYPSMSTNSNLIHKITHQ

SEQ ID NO: 737685 - protein, 67 aa, Homo sapiens
VATGAGSEPSHCVLSWVQKLSFGVEGTVGQGPSLKKLQLTESPSRPLKDYISVCRDAPLHELHLHCA

SEQ ID NO: 737686 - protein, 95 aa, Homo sapiens
ENPDGQSLGRRAWPRCPHWVETPCTWSTCALQPGHQTWSKPLQGWLQQLPDTQEGPGWAGNTCSQQPSPRKDPVASVEQRRVKFMGWKSYPEAAH

SEQ ID NO: 737687 - protein, 412 aa, Homo sapiens
RTQTGRAWVGEPGPAVPTGWRHHVLGPLVLFSQDTRHGPNRCRAGCSNSLTLRKAQAGQAIPAPNSHACRLPLQDSPVPRTKMTPNSTGEVPSPIPKGALGLSLALASLIITANLLLALGIAWDRRLRSPPAGCFFLSLLLAGLLTGLALPTLPGLWNQSRRGYWSCLLVYLAPNFSFLSLLANLLLVHGERYMAVLRPLQPPGSIRLALLLTWAGPLLFASLPALGWNHWTPGANCSSQAIFPAPYLYLEVYGLLLPAVGAAAFLSVRVLATAHRQLQDICRLERAVCRDEALRLARALTWRQARAQAGAMLLFGLCWGPYVATLLLSVLAYEQRPPLGPGTLLSLLSLGSASAAAVPVAMGLGDQRYTAPWRAAAQRCLQGLWGRASRDSPGPSIAYHPSSQSSVDLDLN

SEQ ID NO: 737688 - protein, 330 aa, Homo sapiens
MTPNSTGEVPSPIPKGALGLSLALASLIITANLLLALGIAWDRRLRSPPAGCFFLSLLLAGLLTGLALPTLPGLWNQSRRGYWSCLLVYLAPNFSFLSLLANLLLVHGERYMAVLRPLQPPGSIRLALLLTWAGPLLFASLPALGWNHWTPGANCSSQAIFPAPYLYLEVYGLLLPAVGAAAFLSVRVLATAHRQLQDICRLERAVCRDEALRLARALTWRQARAQAGAMLLFGLCWGPYVATLLLSVLAYEQRPPLGPGTLLSLLSLGSASAAAVPVAMGLGDQRYTAPWRAAAQRCLQGLWGRASRDSPGPSIAYHPSSQSSVDLDLN

SEQ ID NO: 737689 - protein, 330 aa, Homo sapiens; identical to SEQ ID NO: 737688

SEQ ID NO: 737690 - protein, 162 aa, Homo sapiens
ENPDGQSLGRRAWPRCPHWVETPCTWSTCALQPGHQTWSKPLQGWLQQLPDTQEGPGWAGNTCSQQPCMPAAAPGLPCPQDQDDQRPPLGPGTLLSLLSLGSASAAAVPVAMGLGDQRYTAPWRAAAQRCLQGLWGRASRDSPGPSIAYHPSSQSSVDLDLN

SEQ ID NO: 737691 - protein, 130 aa, Homo sapiens
LGPASIEGILAKTGPAAAPATGAWDTVVPPLPRKCQCSGSARSHGAGRSALHSPLEGSRPKVPAGAVGKSLPGQSRPQHCLPPKQPKQCRPGLELKEGPLLTPTRASVQLSHPACLYWAPLLWIRDPASV

SEQ ID NO: 737692 - protein, 137 aa, Homo sapiens
SVSKKKKKKKKKEQLSPGVAYVRHLPNLLNETQILSYFSQCGTVTRFRLSRKKRTGNSKGYAFVEFESEDVAKIVAETMNNYMFGERLLESHFMPPEKVQKELFQDWNIPFKQQSYPSVKCIIRTCTYTRATDGGVI

SEQ ID NO: 737693 - protein, 2087 aa, Homo sapiens
HKVAAPDVVVPTLDTVRHEALLYTWLAEHKPLVLCGPPGSGKTMTLFSALRALPDMEVVGLNFSSATTPELLLKTFDHYCEYRRTPNGVVLAPVQLGKWLVLFCDEINLPDMDKYGTQRVISFIRQMVEHGGFYRTSDQTWVKLERIQFVGACNPPTDPGRKPLSHRFLRHVPVVYVDYPGPASLTQIYGTFNRAMLRLIPSLRTYAEPLTAAMVEFYTMSQERFTQDTQPHYIYSPREMTRWVRGIFEALRPLETLPVEGLIRIWAHEALRLFQDRLVEDEERRWTDENIDTVALKHFPNIDREKAMSRPILYSNWLSKDYIPVDQEELRDYVKARLKVFYEEELDVPLVLFNEVLDHVLRIDRIFRQPQGHLLLIGVSGAGKTTLSRFVAWMNGLSVYQIKVHRKYTGEDFDEDLRTVLRRSGCKNEKIAFIMDESNVLDSGFLERMNTLLANGEVPGLFEGDEYATLMTQCKEGAQKEGLMLDSHEELYKWFTSQVIRNLHVVFTMNPSSEGLKDRAATSPALFNRCVLNWFGDWSTEALYQVGKEFTSKMDLEKPNYIVPDYMPVVYDKLPQPPSHREAIVNSCVFVHQTLHQANARLAKRGGRTMAITPRHYLDFINHYANLFHEKRSELEEQQMHLNVGLRKIKETVDQVEELRRDLRIKSQELEVKNAAANDKLKKMVKDQQEAEKKKVMSQEIQEQLHKQQEVIADKQMSVKEDLDKVEPAVIEAQNAVKSIKKQHLVEVRSMANPPAAVKLALESICLLLGASTTDWKQIRSIIMRENFIPTIVNFSAEEISDAIREKMKKNYMSNPSYNYEIVNRASLACGPMVKWAIAQLNYADMLKRVEPLRNELQKLEDDAKDNQQKANEVEQMIRDLEASIARYKEEYAVLISEAQAIKADLAAVEAKVNRSTALLKSLSAERERWEKTSETFKNQMSTIAGDCLLSAAFIAYAGYFDQQMRQNLFTTWSHHLQQANIQFRTDIARTEYLSNADERLRWQASSLPADDLCTENAIMLKRFNRYPLIIDPSGQATEFIMNEYKDRKITRTSFLDDAFRKNLESALRFGNPLLVQDVESYDPVLNPVLNREVRRTGGRVLITLGDQDIDLSPSFVIFLSTRDPTVEFPPDLCSRVTFVNFTVTRSSLQSQCLNEVLKAERPDVDEKRSDLLKLQGEFQLRLRQLEKSLLQALNEVKGRILDDDTIITTLENLKREAAEVTRKVEETDIVMQEVETVSQQYLPLSTACSSIYFTMESLKQIHFLYQYSLQFFLDIYHNVLYENPNLKGVTDHTQRLSIITKDLFQVAFNRVARGMLHQDHITFAMLLARIKLKGTVGEPTYDAEFQHFLRGNEIVLSAGSTPRIQGLTVEQAEAVVRLSCLPAFKDLIAKVQADEQFGIWLDSSSPEQTVPYLWSEETPATPIGQAIHRLLLIQAFRPDRLLAMAHMFVSTNLGESFMSIMEQPLDLTHIVGTEVKPNTPVLMCSVPGYDASGHVEDLAAEQNTQITSIAIGSAEGFNQADKAINTAVKSGRWVMLKNVHLAPGWLMQLEKKLHSLQPHACFRLFLTMEINPKVPVNLLRAGRIFVFEPPPGVKANMLRTFSSIPVSRICKSPNERARLYFLLAWFHAIIQERLRYAPLGWSKKYEFGESDLRSACDTVDTWLDDTAKGRQNISPDKIPWSALKTLMAQSIYGGRVDNEFDQRLLNTFLERLFTTRSFDSEFKLACKVDGHKDIQMPDGIRREEFVQWVELLPDTQTPSWLGLPNNAERVLLTTQGVDMISKMLKMQMLEDEDDLAYAETEKKTRTDSTSDGRPAWMRTLHTTASNWLHLIPQTLSHLKRTVENIKDPLFRFFEREVKMGAKLLQDVRQDLADVVQVCEGKKKQTNYLRTLINELVKGILPRSWSHYTVPAGMTVIQWVSDFSERIKQLQNISLAAASGGAKELKNIHVCLGGLFVPEAYITATRQYVAQANSWSLEELCLEVNVTTSQGATLDACSFGVTGLKLQGATCNNNKLSLSNAISTALPLTQLRWVKQTNTEKKASVVTLPVYLNFTRADLIFTVDFEIATKEDPRSFYERGVAVLCTE

SEQ ID NO: 737694 - protein, 2004 aa, Homo sapiens
HKVAAPDVVVPTLDTVRHEALLYTWLAEHKPLVLCGPPGSGKTMTLFSALRALPDMEVVGLNFSSATTPELLLKTFDHYCEYRRTPNGVVLAPVQLGKWLVLFCDEINLPDMDKYGTQRVISFIRQMVEHGGFYRTSDQTWVKLERIQFVGACNPPTDPGRKPLSHRFLRHVPVVYVDYPGPASLTQIYGTFNRAMLRLIPSLRTYAEPLTAAMVEFYTMSQERFTQDTQPHYIYSPREMTRWVRGIFEALRPLETLPVEGLIRIWAHEALRLFQDRLVEDEERRWTDENIDTVALKHFPNIDREKAMSRPILYSNWLSKDYIPVDQEELRDYVKARLKVFYEEELDVPLVLFNEVLDHVLRIDRIFRQPQGHLLLIGVSGAGKTTLSRFVAWMNGLSVYQIKVHRKYTGEDFDEDLRTVLRRSGCKNEKIAFIMDESNVLDSGFLERMNTLLANGEVPGLFEGDEYATLMTQCKEGAQKEGLMLDSHEELYKWFTSQVIRNLHVVFTMNPSSEGLKDRAATSPALFNRCVLNWFGDWSTEALYQVGKEFTSKMDLEKPNYIVPDYMPVVYDKLPQPPSHREAIVNSCVFVHQTLHQANARLAKRGGRTMAITPRHYLDFINHYANLFHEKRSELEEQQMHLNVGLRKIKETVDQVEELRRDLRIKSQELEVKNAAANDKLKKMVKDQQEAEKKKVMSQEIQEQLHKQQEVIADKQMSVKEDLDKVEPAVIEAQNAVKSIKKQHLVEVRSMANPPAAVKLALESICLLLGASTTDWKQIRSIIMRENFIPTIVNFSAEEISDAIREKMKKNYMSNPSYNYEIVNRASLACGPMVKWAIAQLNYADMLKRVEPLRNELQKLEDDAKDNQQKANEVEQMIRDLEASIARYKEEYAVLISEAQAIKADLAAVEAKVNRSTALLKSLSAERERWEKTSETFKNQMSTIAGDCLLSAAFIAYAGYFDQQMRQNLFTTWSHHLQQANIQFRTDIARTEYLSNADERLRWQASSLPADDLCTENAIMLKRFNRYPLIIDPSGQATEFIMNEYKDRKITRTSFLDDAFRKNLESALRFGNPLLVQDVESYDPVLNPVLNREVRRTGGRVLITLGDQDIDLSPSFVIFLSTRDPTVEFPPDLCSRVTFVNFTVTRSSLQSQCLNEVLKAERPDVDEKRSDLLKLQGEFQLRLRQLEKSLLQALNEVKGRILDDDTIITTLENLKREAAEVTRKVEETDIVMQEVETVSQQYLPLSTACSSIYFTMESLKQIHFLYQYSLQFFLDIYHNVLYENPNLKGVTDHTQRLSIITKDLFQVAFNRVARGMLHQDHITFAMLLARIKLKGTVGEPTYDAEFQHFLRGNEIVLSAGSTPRIQGLTVEQAEAVVRLSCLPAFKDLIAKVQADEQFGIWLDSSSPEQTVPYLWSEETPATPIGQAIHRLLLIQAFRPDRLLAMAHMFVSTNLGESFMSIMEQPLDLTHIVGTEVKPNTPVLMCSVPGYDASGHVEDLAAEQNTQITSIAIGSAEGFNQADKAINTAVKSGRWVMLKNVHLAPGWLMQLEKKLHSLQPHACFRLFLTMEINPKVPVNLLRAGRIFVFEPPPGVKANMLRTFSSIPVSRICKSPNERARLYFLLAWFHAIIQERLRYAPLGWSKKYEFGESDLRSACDTVDTWLDDTAKGRQNISPDKIPWSALKTLMAQSIYGGRVDNEFDQRLLNTFLERLFTTRSFDSEFKLACKVDGHKDIQMPDGIRREEFVQWVELLPDTQTPSWLGLPNNAERVLLTTQGVDMISKMLKMQMLEDEDDLAYAETEKKTRTDSTSDGRPAWMRTLHTTASNWLHLIPQTLSHLKRTVENIKDPLFRFFEREVKMGAKLLQDVRQDLADVVQVCEGKKKQTNYLRTLINELVKGILPRSWSHYTVPAGMTVIQWVSDFSERIKQLQNISLSNAISTALPLTQLRWVKQTNTEKKASVVTLPVYLNFTRADLIFTVDFEIATKEDPRSFYERGVAVLCTE

SEQ ID NO: 737695 - protein, 671 aa, Homo sapiens
VPVSAPIGQAIHRLLLIQAFRPDRLLAMAHMFVSTNLGESFMSIMEQPLDLTHIVGTEVKPNTPVLMCSVPGYDASGHVEDLAAEQNTQITSIAIGSAEGFNQADKAINTAVKSGRWVMLKNVHLAPGWLMQLEKKLHSLQPHACFRLFLTMEINPKVVPVNLLRAGRIFVFEPPPGVKANMLRTFSSIPVSRICKSPNERARLYFLLAWFHAIIQERLRYAPLGWSKKYEFGESDLRSACDTVDTWLDDTAKGRQNISPDKIPWSALKTLMAQSIYGGRVDNEFDQRLLNTFLERLFTTRSFDSEFKLACKVDGHKDIQMPDGIRREEFVQWVELLPDTQTPSWLGLPNNAERVLLTTQGVDMISKMLKMQMLEDEDDLAYAETEKKTRTDSTSDGRPAWMRTLHTTASNWLHLIPQTLSHLKRTVENIKDPLFRFFEREVKMGAKLLQDVRQDLADVVQVCEGKKKQTNYLRTLINELVKGILPRSWSHYTVPAGMTVIQWVSDFSERIKQLQNISLAAASGGAKELKNIHVCLGGLFVPEAYITATRQYVAQANSWSLEELCLEVNVTTSQGATLDACSFGVTGLKLQGATCNNNKLSLSNAISTALPLTQLRWVKQTNTEKKASVVTLPVYLNFTRADLIFTVDFEIATKEDPRSFYERGVAVLCTE

SEQ ID NO: 737696 - protein, 650 aa, Homo sapiens
VPVSAPIGQAIHRLLLIQAFRPDRLLAMAHMFVSTNLGESFMSIMEQPLDLTHIVGTEVKPNTPVLMCSVPGYDASGHVEDLAAEQNTQITSIAIGSAEGFNQADKAINTAVKSGRWVMLKNVHLAPGWLMQLEKKLHSLQPHACFRLFLTMEINPKVANMLRTFSSIPVSRICKSPNERARLYFLLAWFHAIIQERLRYAPLGWSKKYEFGESDLRSACDTVDTWLDDTAKGRQNISPDKIPWSALKTLMAQSIYGGRVDNEFDQRLLNTFLERLFTTRSFDSEFKLACKVDGHKDIQMPDGIRREEFVQWVELLPDTQTPSWLGLPNNAERVLLTTQGVDMISKMLKMQMLEDEDDLAYAETEKKTRTDSTSDGRPAWMRTLHTTASNWLHLIPQTLSHLKRTVENIKDPLFRFFEREVKMGAKLLQDVRQDLADVVQVCEGKKKQTNYLRTLINELVKGILPRSWSHYTVPAGMTVIQWVSDFSERIKQLQNISLAAASGGAKELKNIHVCLGGLFVPEAYITATRQYVAQANSWSLEELCLEVNVTTSQGATLDACSFGVTGLKLQGATCNNNKLSLSNAISTALPLTQLRWVKQTNTEKKASVVTLPVYLNFTRADLIFTVDFEIATKEDPRSFYERGVAVLCTE

SEQ ID NO: 737697 - protein, 1912 aa, Homo sapiens
HKVAAPDVVVPTLDTVRHEALLYTWLAEHKPLVLCGPPGSGKTMTLFSALRALPDMEVVGLNFSSATTPELLLKTFDHYCEYRRTPNGVVLAPVQLGKWLVLFCDEINLPDMDKYGTQRVISFIRQMVEHGGFYRTSDQTWVKLERIQFVGACNPPTDPGRKPLSHRFLRHVPVVYVDYPGPASLTQIYGTFNRAMLRLIPSLRTYAEPLTAAMVEFYTMSQERFTQDTQPHYIYSPREMTRWVRGIFEALRPLETLPVEGLIRIWAHEALRLFQDRLVEDEERRWTDENIDTVALKHFPNIDREKAMSRPILYSNWLSKDYIPVDQEELRDYVKARLKVFYEEELDVPLVLFNEVLDHVLRIDRIFRQPQGHLLLIGVSGAGKTTLSRFVAWMNGLSVYQIKVHRKYTGEDFDEDLRTVLRRSGCKNEKIAFIMDESNVLDSGFLERMNTLLANGEVPGLFEGDEYATLMTQCKEGAQKEGLMLDSHEELYKWFTSQVIRNLHVVFTMNPSSEGLKDRAATSPALFNRCVLNWFGDWSTEALYQVGKEFTSKMDLEKPNYIVPDYMPVVYDKLPQPPSHREAIVNSCVFVHQTLHQANARLAKRGGRTMAITPRHYLDFINHYANLFHEKRSELEEQQMHLNVGLRKIKETVDQVEELRRDLRIKSQELEVKNAAANDKLKKMVKDQQEAEKKKVMSQEIQEQLHKQQEVIADKQMSVKEDLDKVEPAVIEAQNAVKSIKKQHLVEVRSMANPPAAVKLALESICLLLGASTTDWKQIRSIIMRENFIPTIVNFSAEEISDAIREKMKKNYMSNPSYNYEIVNRASLACGPMVKWAIAQLNYADMLKRVEPLRNELQKLEDDAKDNQQKANEVEQMIRDLEASIARYKEEYAVLISEAQAIKADLAAVEAKVNRSTALLKSLSAERERWEKTSETFKNQMSTIAGDCLLSAAFIAYAGYFDQQMRQNLFTTWSHHLQQANIQFRTDIARTEYLSNADERLRWQASSLPADDLCTENAIMLKRFNRYPLIIDPSGQATEFIMNEYKDRKITRTSFLDDAFRKNLESALRFGNPLLVQDVESYDPVLNPVLNREVRRTGGRVLITLGDQDIDLSPSFVIFLSTRDPTVEFPPDLCSRVTFVNFTVTRSSLQSQCLNEVLKAERPDVDEKRSDLLKLQGEFQLRLRQLEKSLLQALNEVKGRILDDDTIITTLENLKREAAEVTRKVEETDIVMQEVETVSQQYLPLSTACSSIYFTMESLKQIHFLYQYSLQFFLDIYHNVLYENPNLKGVTDHTQRLSIITKDLFQVAFNRVARGMLHQDHITFAMLLARIKLKGTVGEPTYDAEFQHFLRGNEIVLSAGSTPRIQGLTVEQAEAVVRLSCLPAFKDLIAKVQADEQFGIWLDSSSPEQTVPYLWSEETPATPIGQAIHRLLLIQAFRPDRLLAMAHMFVSTNLGESFMSIMEQPLDLTHIVGTEVKPNTPVLMCSVPGYDASGHVEDLAAEQNTQITSIAIGSAEGFNQADKAINTAVKSGRWVMLKNVHLAPGWLMQLEKKLHSLQPHACFRLFLTMEINPKVPVNLLRAGRIFVFEPPPGVKANMLRTFSSIPVSRICKSPNERARLYFLLAWFHAIIQERLRYAPLGWSKKYEFGESDLRSACDTVDTWLDDTAKGRQNISPDKIPWSALKTLMAQSIYGGRVDNEFDQRLLNTFLERLFTTRSFDSEFKLACKVDGHKDIQMPDGIRREEFVQWVELLPDTQTPSWLGLPNNAERVLLTTQGVDMISKMLKMQMLEDEDDLAYAETEKKTRTDSTSDGRPAWMRTLHTTASNWLHLIPQTLSHLKRTVENIKDPLFKFLSDPQVHTVLVERSTLKEDVGDEGEEEKEFISYNINIDIHYGVKSIAWQSLRTPVTIIT

SEQ ID NO: 737698 - protein, 465 aa, Homo sapiens
SKYEVLTVQEPPRIEDAEEFPNLAVASERRDRIETPKFQSKQQPQDNFKNNVKKSQLPVQLDLGGMLTALEKKQHSQHAKQSSKPVVVSVGAVPVLSKECASGERGRRMSQMKTPHNPLDSSAPLMKKGKQREIPKAKKPTSLKKIILKERQERKQRLQENAVSPAFTSDDTQDGESGGDDQFPEQAELSGPEGMDELISTPSVEDKSEEPPGTELQRDTEASHLAPNHTTFPKIHSRRFRDYCSQMLSKEVDACVTDLLKELVRFQDRMYQKDPVKAKTKRRLVLGLREVLKHLKLKKLKCVIISPNCEKIQSKGGLDDTLHTIIDYACEQNIPFVFALNRKALGRSLNKAVPVSVVGIFSYDGAQDQFHKMVELTVAARQAYKTMLENVQQELVGEPRPQAPPSLPTQGPSCPAEDGPPALKEKEEPHYIEIWKKHLEAYSGCTLELEESLEASTSQMMNLNL

SEQ ID NO: 737699 - protein, 73 aa, Homo sapiens
VKLSSQKTPKPQTKELNALVHAAGAYLEALSHLQGKGPFSGDVAFLKDLGTLGGFAKMSLRRKIGFLTCDFLK

SEQ ID NO: 737700 - protein, 446 aa, Homo sapiens
SKYEVLTVQEPPRIEDAEEFPNLAVASERRDRIETPKFQSKQQPQDNFKNNVKKSQLPVQLDLGGMLTALEKKQHSQHAKQSSKPVVVSVGAVPVLSKECASGERGRRMSQMKTPHNPLDSSAPLMKKGKQREIPKAKKPTSLKKIILKERQERKQRLQENAVSPAFTSDDTQDGESGGDDQFPEQAELSGPEGMDELISTPSVEDKSEEPPGTELQRDTEASHLAPNHTTFPKIHSRRFRDYCSQMLSKEVDACVTDLLKELVRFQDRMYQKDPVKAKTKRRLVLGLREVLKHLKLKKLKCVIISPNCEKIQSKGGLDDTLHTIIDYACEQNIPFVFALNRKALGRSLNKAVPVSVVGIFSYDGAQDQFHKMVELTVAARQAYKTMLENVQQELVGEPRPQAPPSLPTQGPSCPAEDGPPALKEKEEPHYIEIWKIGFLTCDFLK

SEQ ID NO: 737701 - protein, 465 aa, Homo sapiens; identical to SEQ ID NO: 737698

SEQ ID NO: 737702 - protein, 173 aa, Homo sapiens [sequence omitted]

SEQ ID NO: 737703 - protein, 173 aa, Homo sapiens [sequence omitted]

SEQ ID NO: 737704 - protein, 103 aa, Homo sapiens
VTISRLHREARCGGGAPAHGTWKVLGQNPAPALMCGSISGNFHFLLCLRRRGPADVSVSWSSGQSNLHHGCLPSCRVNVAGRPLHPTSCMDMAPWLCPTSLPA

SEQ ID NO: 737705 - protein, 232 aa, Homo sapiens
MSLICSISNEVPEHPCVSPVSNHVYERRLIEKYIAENGTDPINNQPLSEEQLIDIKVAHPIRPKPPSATSIPAILKALQDEWDAVMLHSFTLRQQLQTTRQELSHALYQHDAACRVIARLTKEVTAAREAAGYLKHRLAHVPTLVASSNQVCGCGEPWLGELWDDPEDIQSSEKPWYTDADRGKRLGLEQESNGGPRGRHGRRTRGQPGGTGQNRPDKPVRGPKHGGKARGE

SEQ ID NO: 737706 - protein, 139 aa, Homo sapiens
MSLICSISNEVPEHPCVSPVSNHVYERRLIEKYIAENGTDPINNQPLSEEQLIDIKVAHPIRPKPPSATSIPAILKALQDEWDAVMLHSFTLRQQLQTTRQELSHALYQHDAACRVIARLTKGTVKGMGRRACAGFCKQ

SEQ ID NO: 737707 - protein, 153 aa, Homo sapiens
MGTQTRGDPNLLSWRQGLLQGKFPEASLPCRVARPECDSGGEKQWLSEEAENLCSLLPGTPLGSHTVERGCNTPSRQEGLLYCPGRECRSGGWDLSIHTLLPGPVWDLAQAPSPSDASDSEESNFLPLSLQDWRAWKYSEGCGVDRSFRQGTR

SEQ ID NO: 737708 - protein, 524 aa, Homo sapiens
MTEDKVTGTLVFTVITAVLGSFQFGYDIGVINAPQQVIISHYRHVLGVPLDDRKAINNYVINSTDELPTISYSMNPKPTPWAEEETVAAAQLITMLWSLSVSSFAVGGMTASFFGGWLGDTLGRIKAMLVANILSLVGALLMGFSKLGPSHILIIAGRSISGLYCGLISGLVPMYIGEIAPTALRGALGTFHQLAIVTGILISQIIGLEFILGNYDLWHILLGLSGVRAILQSLLLFFCPESPRYLYIKLDEEVKAKQSLKRLRGYDDVTKDINEMRKEREEASSEQKVSIIQLFTNSSYRQPILVALMLHVAQQFSGINGIFYYSTSIFQTAGISKPVYATIGVGAVNMVFTAVSVFLVEKAGRRSLFLIGMSGMFVCAIFMSVGLVLLNKFSWMSYVSMIAIFLFVSFFEIGPGPIPWFMVAEFFSQGPRPAALAIAAFSNWTCNFIVALCFQYIADFCGPYVFFLFAGVLLAFTLFTFFKVPETKGKSFEEIAAEFQKKSGSAHRPKAAVEMKFLGATETV

SEQ ID NO: 737709 - protein, 351 aa, Homo sapiens
MYIGEIAPTALRGALGTFHQLAIVTGILISQIIGLEFILGNYDLWHILLGLSGVRAILQSLLLFFCPESPRYLYIKLDEEVKAKQSLKRLRGYDDVTKDINEMRKEREEASSEQKVSIIQLFTNSSYRQPILVALMLHVAQQFSGINGIFYYSTSIFQTAGISKPVYATIGVGAVNMVFTAVSVFLVEKAGRRSLFLIGMSGMFVCAIFMSVGLVLLNKFSWMSYVSMIAIFLFVSFFEIGPGPIPWFMVAEFFSQGPRPAALAIAAFSNWTCNFIVALCFQYIADFCGPYVFFLFAGVLLAFTLFTFFKVPETKGKSFEEIAAEFQKKSGSAHRPKAAVEMKFLGATETV

SEQ ID NO: 737710 - protein, 345 aa, Homo sapiens
MTEDKVTGTLVFTVITAVLGSFQFGYDIGVINAPQQVIISHYRHVLGVPLDDRKAINNYVINSTDELPTISYSMNPKPTPWAEEETVAAAQLITMLWSLSVSSFAVGGMTASFFGGWLGDTLGRIKAMLVANILSLVGALLMGFSKLGPSHILIIAGRSISGLYCGLISGLVPMYIGEIAPTALRGALGTFHQLAIVTGILISQIIGLEFILGNYDLWHILLGLSGVRAILQSLLLFFCPESPRYLYIKLDEEVKAKQSLKRLRGYDDVTKDINEMRKEREEASSEQKVSIIQLFTNSSYRQPILVALMLHVAQQFSGINGVSLRTPSVFPLCWSAPGLYPVHIF

SEQ ID NO: 737711 - protein, 524 aa, Homo sapiens; identical to SEQ ID NO: 737708

SEQ ID NO: 737712 - protein, 482 aa, Homo sapiens
MTEDKVTGTLVFTVITAVLGSFQFGYDIGVINAPQQVIISHYRHVLGVPLDDRKAINNYVINSTDELPTISYSMNPKPTPWAEEETVAAAQLITMLWSLSVSSFAVGGMTASFLVGGLGTHLEGLISGLVPMYIGEIAPTALRGALGTFHQLAIVTGILISQIIGLEFILGNYDLWHILLGLSGVRAILQSLLLFFCPESPRYLYIKLDEEVKAKQSLKRLRGYDDVTKDINEMRKEREEASSEQKVSIIQLFTNSSYRQPILVALMLHVAQQFSGINGIFYYSTSIFQTAGISKPVYATIGVGAVNMVFTAVSVFLVEKAGRRSLFLIGMSGMFVCAIFMSVGLVLLNKFSWMSYVSMIAIFLFVSFFEIGPGPIPWFMVAEFFSQGPRPAALAIAAFSNWTCNFIVALCFQYIADFCGPYVFFLFAGVLLAFTLFTFFKVPETKGKSFEEIAAEFQKKSGSAHRPKAAVEMKFLGATETV

SEQ ID NO: 737713 - protein, 249 aa, Homo sapiens
MRKEREEASSEQKVSIIQLFTNSSYRQPILVALMLHVAQQFSGINGIFYYSTSIFQTAGISKPVYATIGVGAVNMVFTAVSVFLVEKAGRRSLFLIGMSGMFVCAIFMSVGLVLLNKFSWMSYVSMIAIFLFVSFFEIGPGPIPWFMVAEFFSQGPRPAALAIAAFSNWTCNFIVALCFQYIADFCGPYVFFLFAGVLLAFTLFTFFKVPETKGKSFEEIAAEFQKKSGSAHRPKAAVEMKFLGATETV

SEQ ID NO: 737714 - protein, 351 aa, Homo sapiens; identical to SEQ ID NO: 737709

SEQ ID NO: 737715 - protein, 528 aa, Homo sapiens
MTEDKVTGTLVFTVITAVLGSFQFGYDIGVINAPQQVIISHYRHVLGVPLDDRKAINNYVINSTDELPTISYSMNPKPTPWAEEETVAAAQLITMLWSLSVSSFAVGGMTASFFGGWLGDTLGRIKAMLVANILSLVGALLMGFSKLGPSHILIIAGRSISGLYCGLISGLVPMYIGEIAPTALRGALGTFHQLAIVTGILISQIIGLEFILGNYDLWHILLGLSGVRAILQSLLLFFCPESPRYLYIKLDEEVKAKQSLKRLRGYDDVTKDINEMRKEREEASSEQKVSIIQLFTNSSYRQPILVALMLHVAQQFSGINGIFYYSTSIFQTAGISKPVYATIGVGAVNMVFTAVSVFLVEKAGRRSLFLIGMSGMFVCAIFMSVGLVLLNKFSWMSYVSMIAIFLFVSFFEIGPGPIPWFMVAEFFSQGPRPAALAIAAFSNWTCNFIVALCFQYIADFCGPYVFFLFAGVLLAFTLFTFFKVPETKGKSFEEIAAEFQKKSGSAHRPKAAVEMKFLGATETVLMIP

SEQ ID NO: 737716 - protein, 120 aa, Homo sapiens
ERERERERERERERERERERERERERERERERERAAFSNWTCNFIVALCFQYIADFCGPYVFFLFAGVLLAFTLFTFFKVPETKGKSFEEIAAEFQKKSGSAHRPKAAVEMKFLGATETV

SEQ ID NO: 737717 - protein, 718 aa, Homo sapiens
MSRGYSENNNFLNNNNQMVLDMILYPLIGIPQTINWETIARLVPGLTPKECAKRFDELKSSGSSPVDNQYNSLMAAGESPVETLATYIKSSLLDIHGEFQETPVGHDAVSKTGRHSIASTRNCSSESENCTTHNGGEMTEESEGPNMVIHVCDEAKNLKEDFTCPRDLLISEMKYFAEYLSMDAQRWEEVDISVHCDVHIFNWLIKYIKRNTKENKDCEMPTLEPGNVISILISSEFLKMDSLVEQCIQYCHKNMNAIVATPCNMNCINANLLTRIADLFSHNEVDDLKDKKDKFKSKLFCKKIERLFDPEYLNPDSRSNAATLYRCCLCKKLLTKETERRIPCIPGKINVDRRGNIVYIHIRDKTWDVHEYLNSLFEELKSWRDVYWRLWGTINWLTCSRCYQAFLCIEFSHCQYHSETVVYPTAASSLNTVGTGIYPCCNQKVLRFDPTQLTKGCKVRDHMVTLRDQGEGGDLPSCPTARMLDDLHKYRDVIVVPFSKDTVSDVGVGLCDEKGIECDVLLEPNTPWGPKTGELNAFLSLKNWTLQLKQQSLFSEEEEYTTGSEVTEDEVGDEEEVSKKQRKKEKPKKFTRQPKKQVSSPCAQRKEKALEKSASRDVSPFVMSMQKNKWDATRSLRFNQDAQREDDQRRMTEITGHLIKMRLGDLDRVKSKEAKEFAGGIYSRLEAQIKASVPVSARQSSSEKNTRSKSRFGQGRPA

SEQ ID NO: 737718 - protein, 718 aa, Homo sapiens; identical to SEQ ID NO: 737717

SEQ ID NO: 737719 - protein, 572 aa, Homo sapiens
MVIHVCDEAKNLKEDFTCPRDLLISEMKYFAEYLSMDAQRWEEVDISVHCDVHIFNWLIKYIKRNTKENKDCEMPTLEPGNVISILISSEFLKMDSLVEQCIQYCHKNMNAIVATPCNMNCINANLLTRIADLFSHNEVDDLKDKKDKFKSKLFCKKIERLFDPEYLNPDSRSNAATLYRCCLCKKLLTKETERRIPCIPGKINVDRRGNIVYIHIRDKTWDVHEYLNSLFEELKSWRDVYWRLWGTINWLTCSRCYQAFLCIEFSHCQYHSETVVYPTAASSLNTVGTGIYPCCNQKVLRFDPTQLTKGCKVRDHMVTLRDQGEGGDLPSCPTARMLDDLHKYRDVIVVPFSKDTVSDVGVGLCDEKGIECDVLLEPNTPWGPKTGELNAFLSLKNWTLQLKQQSLFSEEEEYTTGSEVTEDEVGDEEEVSKKQRKKEKPKKFTRQPKKQVSSPCAQRKEKALEKSASRDVSPFVMSMQKNKWDATRSLRFNQDAQREDDQRRMTEITGHLIKMRLGDLDRVKSKEAKEFAGGIYSRLEAQIKASVPVSARQSSSEKNTRSKSRFGQGRPA

SEQ ID NO: 737720 - protein, 707 aa, Homo sapiens
MSRGYSENNNFLNNNNQMVLDMILYPLIGIPQTINWETIARLVPGLTPKECAKRFDELKSSGSSPVDNQYNSLMAAGESPVETLATYIKSSLLDIHGEFQETPVGHDAVSKTGRHSIASTRNCSSESENCTTHNGGEMTEESEGPNMVIHVCDEAKNLKEDFTCPRDLLISEMKYFAEYLSMDAQRWEEVDISVHCDVHIFNWLIKYIKRNTKENKDCEMPTLEPGNVISILISSEFLKMDSLVEQCIQYCHKNMNAIVATPCNMNCINANLLTRIADLFSHNEVDDLKDKKDKFKSKLFCKKIERLFDPEYLNPDSRSNAATLYRCCLCKKLLTKETERRIPCIPGKINVDRRGNIVYIHIRDKTWDVHEYLNSLFEELKSWRDVYWRLWGTINWLTCSRCYQAFLCIEFSHCQYHSETVVYPTAASSLNTVGTGIYPCCNQKVLRFDPTQLTKGCKVRDHMVTLRDQGEGGDLPSCPTARMLDDLHKYRDVIVVPFSKDTVSDVGVGLCDEKGIECDVLLEPNTPWGPKTGELNAFLSLKNWTLQLKQQSLFSEEEEYTTGSEVTEDEVGDEEEVSKKQRKKEKPKKFTRQPKKQVSSPCAQRKEKALEKSASRDVSPFVMSMQKNKWDATRSLRFNQDAQREDDQRRMTEITGHLIKMRLGDLDRVKSKEAKETDKLRPRDGTVSKSNRKSGLSSVLLMTVLLC

SEQ ID NO: 737721 - protein, 230 aa, Homo sapiens
MSRGYSENNNFLNNNNQMVLDMILYPLIGIPQTINWETIARLVPGLTPKECAKRFDELKSSGSSPVDNQYNSLMAAGESPVETLATYIKSSLLDIHGEFQETPVGHDAVSKTGRHSIASTRNCSSESENCTTHNGGEMTEESEGPNMVIHVCDEAKNLKEDFTCPRDLLISEMKYFAEYLSMDAQRWEEVDISVHCDVHIFNWLIKYIKRNTKENKDCEMPTLGKKQSVA

SEQ ID NO: 737722 - protein, 379 aa, Homo sapiens
MSRGYSENNNFLNNNNQMVLDMILYPLIGIPQTINWETIARLVPGLTPKECAKRFDELKSSGSSPVDNQYNSLMAAGESPVETLATYIKSSLLDIHGEFQETPVGHDAVSKTGRHSIASTRNCSSESENCTTHNGGEMTEESEGPNMVIHVCDEAKNLKEDFTCPRDLLISEMKYFAEYLSMDAQRWEEVDISVHCDVHIFNWLIKYIKRNTKENKDCEMPTLEPGNVISILISSEFLKMDSLVEQCIQYCHKNMNAIVATPCNMNCINANLLTRIADLFSHNEVDDLKDKKDKFKSKLFCKKIERLFDPEYLNPDSRSNAATLYRCCLCKKLLTKETERRIPCIPGKINVDRRGNIVYIHIRCREDKIHTCIFVYIYI

SEQ ID NO: 737723 - protein, 523 aa, Homo sapiens
LRNSGLSYCSKFIKRNTKENKDCEMPTLEPGNVISILISSEFLKMDSLVEQCIQYCHKNMNAIVATPCNMNCINANLLTRIADLFSHNEVDDLKDKKDKFKSKLFCKKIERLFDPEYLNPDSRSNAATLYRCCLCKKLLTKETERRIPCIPGKINVDRRGNIVYIHIRDKTWDVHEYLNSLFEELKSWRDVYWRLWGTINWLTCSRCYQAFLCIEFSHCQYHSETVVYPTAASSLNTVGTGIYPCCNQKVLRFDPTQLTKGCKVRDHMVTLRDQGEGGDLPSCPTARMLDDLHKYRDVIVVPFSKDTVSDVGVGLCDEKGIECDVLLEPNTPWGPKTGELNAFLSLKNWTLQLKQQSLFSEEEEYTTGSEVTEDEVGDEEEVSKKQRKKEKPKKFTRQPKKQVSSPCAQRKEKALEKSASRDVSPFVMSMQKNKWDATRSLRFNQDAQREDDQRRMTEITGHLIKMRLGDLDRVKSKEAKEFAGGIYSRLEAQIKASVPVSARQSSSEKNTRSKSRFGQGRPA

SEQ ID NO: 737724 - protein, 155 aa, Homo sapiens
MSRGYSENNNFLNNNNQMVLDMILYPLIGIPQTINWETIARLVPGLTPKECAKRFDELKSSGSSPVDNQYNSLMAAGESPVETLATYIKSSLLDIHGEFQETPVGHDAVSKTGRHSIASTRNCSSESENCTTHNGGEMTEESEGDVVSLCCPVWS

SEQ ID NO: 737725 - protein, 128 aa, Homo sapiens
  misc_feature (109)..(109): Xaa can be any naturally occurring amino acid
QPLPCTKQRGWTPLSWHQLPLLPQHSLDLGGLFGKASGCHGLHDQPTRLLLLANIASIEGFLQPPALELSGTKHFPRLPTRTNWASGCRCGLQGSGRASPESSGTQPFXTPCPVLLTSALSLQHFLEA

SEQ ID NO: 737726 - protein, 74 aa, Homo sapiens
RKAQTFLLLEHPRALDPLCPSEMGCHSSKSTTVAAESQKLEEEREGREPGLETGTQAADCKDAPLKDGTPEPKS

SEQ ID NO: 737727 - protein, 74 aa, Homo sapiens; identical to SEQ ID NO: 737726

SEQ ID NO: 737728 - protein, 240 aa, Homo sapiens
ALPVCGKAGSTPGRRVAADIMSSGNYQQSEALSKPTFSEEQASALVESVFGLKVSKVRPLPSYDDQNFHVYVSKTKDGPTEYVLKISNTKASKNPDLIEVQNHIIMFLKAAGFPTASVCHTKGDNTASLVSVDSGSEIKSYLVRLLTYLPGRPIAELPVSPQLLYEIGKLAAKLDKTLQRFHHPKLSSLHRENFIWNLKNVPLLEKYLYALGQNRNREIVEHVIHLFKEEVMTKLSHFRE

SEQ ID NO: 737729 - protein, 102 aa, Homo sapiens
GRLLLLNWRPRRPKASKNPDLIEVQNHIIMFLKAAGFPTASVCHTKGDNTASLVSVDSGSEIKSYLVRLLTYLPGRPIAELPVSPQLLYEIGKLGPSTVPGP

SEQ ID NO: 737730 - protein, 162 aa, Homo sapiens
MPNIPGDLESREAMVAFFNSAGASAQEEQRVCCQPLAHPVASSQKKPEVAAPAPESGGESVFGETHRALQGAMEKLQRLYEKEKVDLKERVEKLELQFIHLSGQTDTIESTSARGQCQRRSTGRGGHRQAGPGPGGDEGEPAGAAGQVLQLVGDHKEGHGKF

SEQ ID NO: 737731 - protein, 94 aa, Homo sapiens
MAHHSLNTFYIWHNNVLHTHLVFFLPHLLNQPFSRGSFLIWLLLCWNSWYHLRTLRRQANQANKLSMMLLRVKQSPGTKLCHGDSELTSGLLAT

SEQ ID NO: 737732 - protein, 126 aa, Homo sapiens
SGIRSHCSTGALHPGHQWPPHGKIHGQVSVLVLLGLAQLTALALFDFRPHALLVFLLPHWSHRLSFLSSPQPLNVGMTRGSVLHPLLLSICAHSLGNFTQSHCLQYHLHVALTFTSLASSSHLNSD

SEQ ID NO: 737733 - protein, 104 aa, Homo sapiens
DGVLLLLPGLQCNGAISVHCDLRLSGSSDSPFSAYRVAGITGACHQARLIFVFLVETGFHYVDQAGLELLTSGDPPALASQSAGITDVSHRPGLNLTIFKYTFQ

SEQ ID NO: 737734 - protein, 349 aa, Homo sapiens
MNSTLDGNQSSHPFCLLAFGYLETVNFCLLEVLIIVFLTVLIISGNIIVIFVFHCAPLLNHHTTSYFIQTMAYADLFVGVSCVVPSLSLLHHPLPVEESLTCQIFGFVVSVLKSVSMASLACISIDRYIAITKPLTYNTLVTPWRLRLCIFLIWLYSTLVFLPSFFHWGKPGYHGDVFQWCAESWHTDSYFTLFIVMMLYAPAALIVCFTYFNIFRICQQHTKDISERQARFSSQSGETGEVQACPDKRYAMVLFRITSVFYILWLPYIIYFLLESSTGHSNRFASFLTTWLAISNSFCNCVIYSLSNSVFQRGLKRLSGAMCTSCASQTTANDPYTVRSKGPLNGCHI

SEQ ID NO: 737735 - protein, 112 aa, Homo sapiens
SRLKLCPLAGLTGVCWAWTPASGLWLACTFPIKPSKYLQPLRPLIAFDPGCCCEMPLLTHAFLKTALPCASLIIQLLIVSKRKPENANSGPSPPLWSPSRPLCRRPGAQEML

SEQ ID NO: 737736 - protein, 328 aa, Homo sapiens
AGLTAAFRVMGIWQRLLLFGGVSLRAGGGATAPLGGSRAMVCGRQLSGAGSETLKQRRTQIMSRGLPKQKPIEGVKQVIVVASGKGGVGKSTTAVNLALALAANDSSKAIGLLDVDVYGPSVPKMMNLKGNPELSQSNLMRPLLNYGIACMSMGFLVEESEPVVWRGLMVMSAIEKLLRQVDWGQLDYLVVDMPPGTGDVQLSVSQNIPITGAVIVSTPQDIALMDAHKGAEMFRRVHVPVLGLVQNMSVFQCPKCKHKTHIFGADGARKLAQTLGLEVLGDIPLHLNIREASDTGQPIVFSQPESDEAKAYLRIAVEVVRRLPSPSE

SEQ ID NO: 737737 - protein, 328 aa, Homo sapiens; identical to SEQ ID NO: 737736

SEQ ID NO: 737738 - protein, 307 aa, Homo sapiens
AGLTAAFRVMGIWQRLLLFGGVSLRAGGGATAPLGGSRAMVCGRQLSGAGSETLKQRRTQIMSRGLPKQKPIEGVKQVIVVASGKGGVGKSTTAVNLALALAANDSSKAIGLLDVDVYGPSVPKMMNLKGNPELSQSNLMRPLLNYGIACMSMGFLVEESEPVVWRGLMVMSAIEKLLRQVDWGQLDYLVVDMPPGTGDVQLSVSQNIPITGAVIVSTPQDIALMDAHKGAEMFRRVHVPVLGLVQNMSVFQCPKCKHKRDIPLHLNIREASDTGQPIVFSQPESDEAKAYLRIAVEVVRRLPSPSE

SEQ ID NO: 737739 - protein, 189 aa, Homo sapiens
MRPLLNYGIACMSMGFLVEESEPVVWRGLMVMSAIEKLLRQVDWGQLDYLVVDMPPGTGDVQLSVSQNIPITGAVIVSTPQDIALMDAHKGAEMFRRVHVPVLGLVQNMSVFQCPKCKHKTHIFGADGARKLAQTLGLEVLGDIPLHLNIREASDTGQPIVFSQPESDEAKAYLRIAVEVVRRLPSPSE

SEQ ID NO: 737740 - protein, 159 aa, Homo sapiens
MSRRNCWICKMCRDESKRPPSNLTLEEVLQWAQSFENLMATKYGPVVYAAYLKMEHSDENIQFWMACETYKKIASRWSRISRAKKLYKIYIQPQSPREINIDSSTRETIIRNIQEPTETCFEEAQKIVYMHMERDSYPRFLKSEMYQKLLKTMQSNNSF

SEQ ID NO: 737741 - protein, 159 aa, Homo sapiens; identical to SEQ ID NO: 737740

SEQ ID NO: 737742 - protein, 159 aa, Homo sapiens; identical to SEQ ID NO: 737740

SEQ ID NO: 737743 - protein, 159 aa, Homo sapiens; identical to SEQ ID NO: 737740

SEQ ID NO: 737744 - protein, 74 aa, Homo sapiens [sequence omitted]

SEQ ID NO: 737745 - protein, 143 aa, Homo sapiens
TPRYSPAGPQRQSRPGAVHAGTRRSEAEAAPPHSAPCGREERRRQRESVLRGGARAPSVRAAARRSLRDPWTPGSACEGCGRRRDEGADGRGNGGAGEHGESRNRERVGTATGRRAPQKPGLRGSERVRVRCCSFQSCPQVRD

SEQ ID NO: 737746 - protein, 909 aa, Homo sapiens
EHAENCSRPGSLWQRRRRGPGPSNPARARLPQQPPPLPPLGHEPSFLLPPAALPAAAAASRLWASAGNMPLAAYCYLRVVGKGSYGEVTLVKHRRDGKQYVIKKLNLRNASSRERRAAEQEAQLLSQLKHPNIVTYKESWEGGDGLLYIVMGFCEGGDLYRKLKEQKGQLLPENQVVEWFVQIAMALQYLHEKHILHRDLKTQNVFLTRTNIIKVGDLGIARVLENHCDMASTLIGTPYYMSPELFSNKPYNYKSDVWALGCCVYEMATLKHAFNAKDMNSLVYRIIEGKLPPMPRDYSPELAELIRTMLSKRPEERPSVRSILRQPYIKRQISFFLEATKIKTSKNNIKNGDSQSKPFATVVSGEAESNHEVIHPQPLSSEGSQTYIMGEGKCLSQEKPRASGLLKSPASLKAHTCKQDLSNTTELATISSVNIDILPAKGRDSVSDGFVQENQPRYLDASNELGGICSISQVEEEMLQDNTKSSAQPENLIPMWSSDIVTGEKNEPVKPLQPLIKEQKPKDQSLALSPKLECSGTILAHSNLRLLGSSDSPASASRVAGITGVCHHAQDQVAGECIIEKQGRIHPDLQPHNSGSEPSLSRQRRQKRREQTEHRGEKRQVRRDLFAFQESPPRFLPSHPIVGKVDVTSTQKEAENQRRVVTGSVSSSRSSEMSSSKDRPLSARERRRLKQSQEEMSSSGPSVRKASLSVAGPGKPQEEDQPLPARRLSSDCSVTQERKQIHCLSEDELSSSTSSTDKSDGDYGEGKGQTNEINALVQLMTQTLKLDSKESCEDVPVANPVSEFKLHRKYRDTLILHGKVAEEAEEIHFKELPSAIMPGSEKIRRLVEVLRTDVIRGLGVQLLEQVYDLLEEEDEFDREVRLREHMGEKYTTYSVKARQLKFFEENMNF

SEQ ID NO: 737747 - protein, 381 aa, Homo sapiens
EHAENCSRPGSLWQRRRRGPGPSNPARARLPQQPPPLPPLGHEPSFLLPPAALPAAAAASRLWASAGNMPLAAYCYLRVVGKGSYGEVTLVKHRRDGKQYVIKKLNLRNASSRERRAAEQEAQLLSQLKHPNIVTYKESWEGGDGLLYIVMGFCEGGDLYRKLKEQKGQLLPENQVVEWFVQIAMALQYLHEKHILHRDLKTQNVFLTRTNIIKVGDLGIARVLENHCDMASTLIGTPYYMSPELFSNKPYNYKSDVWALGCCVYEMATLKHAFNAKDMNSLVYRIIEGKLPPMPRDYSPELAELIRTMLSKRPEERPSVRSILRQPYIKRQISFFLEATKIKTSKNNIKNGDSQSKPFATVVSGEAESNHEVNPPPTTLF

SEQ ID NO: 737748 - protein, 727 aa, Homo sapiens
EHAENCSRPGSLWQRRRRGPGPSNPARARLPQQPPPLPPLGHEPSFLLPPAALPAAAAASRLWASAGNMPLAAYCYLRVVGKGSYGEVTLVKHRRDGKQYVIKKLNLRNASSRERRAAEQEAQLLSQLKHPNIVTYKESWEGGDGLLYIVMGFCEGGDLYRKLKEQKGQLLPENQVVEWFVQIAMALQYLHEKHILHRDLKTQNVFLTRTNIIKVGDLGIARVLENHCDMASTLIGTPYYMSPELFSNKPYNYKSDVWALGCCVYEMATLKHAFNAKDMNSLVYRIIEGKLPPMPRDYSPELAELIRTMLSKRPEERPSVRSILRQPYIKRQISFFLEATKIKTSKNNIKNGDSQSKPFATVVSGEAESNHEVIHPQPLSSEGSQTYIMGEGKCLSQEKPRASGLLKSPASLKAHTCKQDLSNTTELATISSVNIDILPAKGRDSVSDGFVQENQPRYLDASNELGGICSISQVEEEMLQDNTKSSAQPENLIPMWSSDIVTGEKNEPVKPLQPLIKEQKPKDQSLALSPKLECSGTILAHSNLRLLGSSDSPASASRVAGITGVCHHAQDQVAGECIIEKQGRIHPDLQPHNSGSEPSLSRQRRQKRREQTEHRGEKRQVRRDLFAFQESPPRFLPSHPIVGKVDVTSTQKEAENQRRVVTGSVSSSRSSEMSSSKDRPLSARERRRLKQSQEEMSSSGPSVRKASLSVAGPGKKGNRFIVCLRMS

SEQ ID NO: 737749 - protein, 863 aa, Homo sapiens
EHAENCSRPGSLWQRRRRGPGPSNPARARLPQQPPPLPPLGHEPSFLLPPAALPAAAAASRLWASAGNMPLAAYCYLRVVGKGSYGEVTLVKHRRDGKQYVIKKLNLRNASSRERRAAEQEAQLLSQLKHPNIVTYKESWEGGDGLLYIVMGFCEGGDLYRKLKEQKGQLLPENQVVEWFVQIAMALQYLHEKHILHRDLKTQNVFLTRTNIIKVGDLGIARVLENHCDMASTLIGTPYYMSPELFSNKPYNYKSDVWALGCCVYEMATLKHAFNAKDMNSLVYRIIEGKLPPMPRDYSPELAELIRTMLSKRPEERPSVRSILRQPYIKRQISFFLEATKIKTSKNNIKNGDSQSKPFATVVSGEAESNHEVIHPQPLSSEGSQTYIMGEGKCLSQEKPRASGLLKSPASLKAHTCKQDLSNTTELATISSVNIDILPAKGRDSVSDGFVQENQPRYLDASNELGGICSISQVEEEMLQDNTKSSAQPENLIPMWSSDIVTGEKNEPVKPLQPLIKEQKPKDQDQVAGECIIEKQGRIHPDLQPHNSGSEPSLSRQRRQKRREQTEHRGEKRQVRRDLFAFQESPPRFLPSHPIVGKVDVTSTQKEAENQRRVVTGSVSSSRSSEMSSSKDRPLSARERRRLKQSQEEMSSSGPSVRKASLSVAGPGKPQEEDQPLPARRLSSDCSVTQERKQIHCLSEDELSSSTSSTDKSDGDYGEGKGQTNEINALVQLMTQTLKLDSKESCEDVPVANPVSEFKLHRKYRDTLILHGKVAEEAEEIHFKELPSAIMPGSEKIRRLVEVLRTDVIRGLGVQLLEQVYDLLEEEDEFDREVRLREHMGEKYTTYSVKARQLKFFEENMNF

SEQ ID NO: 737750 - protein, 905 aa, Homo sapiens
EHAENCSRPGSLWQRRRRGPGPSNPARARLPQQPPPLPPLGHEPSFLLPPAALPAAAAASRLWASAGNMPLAAYCYLRVVGKGSYGEVTLVKHRRDGKQYVIKKLNLRNASSRERRAAEQEAQLLSQLKHPNIVTYKESWEGGDGLLYIVMGFCEGGDLYRKLKEQKGQLLPENQVVEWFVQIAMALQYLHEKHILHRDLKTQNVFLTRTNIIKVGDLGIARVLENHCDMASTLIGTPYYMSPELFSNKPYNYKSDVWALGCCVYEMATLKHAFNAKDMNSLVYRIIEGKLPPMPRDYSPELAELIRTMLSKRPEERPSVRSILRQPYIKRQISFFLEATKIKTSKNNIKNGDSQSKPFATVVSGEAESNHEVIHPQPLSSEGSQTYIMGEGKCLSQEKPRASGLLKSPASLKAHTCKQDLSNTTELATISSVNIDILPAKGRDSVSDGFVQENQPRYLDASNELGGICSISQVEEEMLQDNTKSSAQPENLIPMWSSDIVTGEKNEPVKPLQPLIKEQKPKDQSLALSPKLECSGTILAHSNLRLLGSSDSPASASRVAGITGVCHHAQDQVAGECIIEKQGRIHPDLQPHNSGSEPSLSRQRRQKRREQTEHRGEKRQVRRDLFAFQESPPRFLPSHPIVGKVDVTSTQKEAENQRRVVTGSVSSSRSSEMSSSKDRPLSARERRRLKQSQEEMSSSGPSVRKASLSVAGPGKPQEEDQPLPARRLSSDCSVTQERKQIHCLSEDELSSSTSSTDKSDGDYGEGKGQTNEINALVQLMTQTLKLDSKESCEDVPVANPVSEFKLHRKYRDTLILHGKVAEEAEEIHFKELPSAIMPGSEKIRRLVEVLRTDVIRGLGVQLLEQVYDLLEEEDEFDREKRNWTEQNNMKQDHKRKKTLAFIFSL

SEQ ID NO: 737751 - protein, 909 aa, Homo sapiens; identical to SEQ ID NO: 737746

SEQ ID NO: 737752 - protein, 756 aa, Homo sapiens
EHAENCSRPGSLWQRRRRGPGPSNPARARLPQQPPPLPPLGHEPSFLLPPAALPAAAAASRLWASAGNMPLAAYCYLRVVGKGSYGEVTLVKHRRDGKQYVIKKLNLRNASSRERRAAEQEAQLLSQLKHPNIVTYKESWEGGDGLLYIVMGFCEGGDLYRKLKEQKGQLLPENQVVEWFVQIAMALQYLHEKHILHRDLKTQNVFLTRTNIIKVGDLGIARVLENHCDMASTLIGTPYYMSPELFSNKPYNYKSDVWALGCCVYEMATLKHAFNAKDMNSLVYRIIEGKLPPMPRDYSPELAELIRTMLSKRPEERPSVRSILRQPYIKRQISFFLEATKIKTSKNNIKNGDSQSKPFATVVSGEAESNHEVIHPQPLSSEGSQTYIMGEGKCLSQEKPRASGLLKSPASLKAHTCKQDLSNTTELATISSVNIDILPAKGRDSVSDGFVQENQPRYLDASNELGGICSISQVEEEMLQDNTKSSAQPENLIPMWSSDIVTGEKNEPVKPLQPLIKEQKPKDQSLALSPKLECSGTILAHSNLRLLGSSDSPASASRVAGITGVCHHAQDQVAGECIIEKQGRIHPDLQPHNSGSEPSLSRQRRQKRREQTEHRGEKRQVRRDLFAFQESPPRFLPSHPIVGKVDVTSTQKEAENQRRVVTGSVSSSRSSEMSSSKDRPLSARERRRLKQSQEEMSSSGPSVRKASLSVAGPGKPQEEDQPLPARRLSSDCSVTQVHYVLLREKVDSLHLAGLMQ

SEQ ID NO: 737753 - protein, 291 aa, Homo sapiens
MDPSLLRERELFKKRALSTPVVEKRSASSESSSSSSKKKKTKVEHGGSSGSKQNSDHSNGSFNLKALSGSSGYKFGVLAKIVNYMKTRHQRGDTHPLTLDEILDETQHLDIGLKQKQWLMTEALVNNPKIEVIDGKYAFKPKYNVRDKKALLRLLDQHDQRGLGGILLEDIEEALPNSQKAVKALGDQILFVNRPDKKKILFFNDKSCQFSVDEEFQKLWRSVTVDSMDEEKIEEYLKRQGISSMQESGPKKVAPIQRRKKPASQKKRRFKTHNEHLAGVLKDYSDITSSK

SEQ ID NO: 737754 - protein, 291 aa, Homo sapiens; identical to SEQ ID NO: 737753

SEQ ID NO: 737755 - protein, 291 aa, Homo sapiens; identical to SEQ ID NO: 737753

SEQ ID NO: 737756 - protein, 291 aa, Homo sapiens; identical to SEQ ID NO: 737753

SEQ ID NO: 737757 - protein, 291 aa, Homo sapiens; identical to SEQ ID NO: 737753

SEQ ID NO: 737758 - protein, 211 aa, Homo sapiens
MRISSLTRHQRGDTHPLTLDEILDETQHLDIGLKQKQWLMTEALVNNPKIEVIDGKYAFKPKYNVRDKKALLRLLDQHDQRGLGGILLEDIEEALPNSQKAVKALGDQILFVNRPDKKKILFFNDKSCQFSVDEEFQKLWRSVTVDSMDEEKIEEYLKRQGISSMQESGPKKVAPIQRRKKPASQKKRRFKTHNEHLAGVLKDYSDITSSK

SEQ ID NO: 737759 - protein, 291 aa, Homo sapiens; identical to SEQ ID NO: 737753

SEQ ID NO: 737760 - protein, 291 aa, Homo sapiens; identical to SEQ ID NO: 737753

SEQ ID NO: 737761 - protein, 182 aa, Homo sapiens
DKKALLRLESILPISHVVLGLESILPIYAFKPKYNVRDKKALLRLLDQHDQRGLGGILLEDIEEALPNSQKAVKALGDQILFVNRPDKKKILFFNDKSCQFSVDEEFQKLWRSVTVDSMDEEKIEEYLKRQGISSMQESGPKKVAPIQRRKKPASQKKRRFKTHNEHLAGVLKDYSDITSSK

SEQ ID NO: 737762 - protein, 291 aa, Homo sapiens; identical to SEQ ID NO: 737753

SEQ ID NO: 737763 - protein, 220 aa, Homo sapiens
MDPSLLRERELFKKRALSTPVVEKRSASSESSSSSSKKKKTKVEHGGSSGSKQNSDHSNGSFNLKALSGSSGYKFGVLAKIVNYMKTRHQRGDTHPLTLDEILDETQHLDIGLKQKQWLMTEALVNNPKIEVIDGKYAFKPKYNVRDKKALLRLLDQHDQRGLGGILLEDIEEALPNSQKAVKALGDQILFVNRPDKKKILFFNDKSCQFSVDEGWSAMA

SEQ ID NO: 737764 - protein, 183 aa, Homo sapiens
RVFIGNLNTLVVKKSDVEAIFSKYGKIVGCSVHKGFAFFQYVNERNARAAVAGEDGRMIAGQVLDINLLQSQNGFNSKSGQRGSSKSGKLKGDDLQAIKRELTQIKQKVDSFLENLEKIEKEQSKQAVEMNNDKSEEEQSSSSVKKDETNVKMESEGGADDSAEEGDLLDDDDNEDGGMTSWS

SEQ ID NO: 737765 - protein, 231 aa, Homo sapiens
MAVFLEAKDAHSVLKRFPRANEFLEELRQGTIERECMEEICSYEEVKEVFENKEKTMEFWKGYPNAVYSVRDPSQSSDAMYVVVPLLGVALLIVIALFIIWRCQLQKATRHHPSYAQNRYLASRAGHTLPRVMVYRGTVHSQGEPSGHREAASSPQVVLGPSRGGRTTVRLESTLYLPELSLSRLSSTTPPPSYEEVTAPQESSSEEASVSYSDPPPKYEEIVAANPGADK

SEQ ID NO: 737766 - protein, 102 aa, Homo sapiens
MRRKKKNSTLPLDCYFVQERDHGESLSRSRRLCLSRSMCVCCLMCGHSQLRLRWISWQQSCWSRWLFSLTSNEAPFQDFIDSETSTAPHPPPRNSTNTNHYN

SEQ ID NO: 737767 - protein, 162 aa, Homo sapiens
MAVFLEAKDAHSVLKRFPRANEFLEELRQGTIERECMEEICSYEEVKEVFENKEKTMEFWKGYPNAVYSVRDPSQSSDAMYVVVPLLGVALLIVIALFIIWRCQLQKATRHHPSYAQNRRCFAVRLAAPSFASKYSNVGAFPFRLWAASLSLARIYLTNIPK

SEQ ID NO: 737768 - protein, 111 aa, Homo sapiens
MPSASVIANRNRERGPGTGKKRRPGGGSGDHGAPDHSEEDEAERAGAATAHAWPGQCWKDNHPEEVQWGGHRHHLPNAGLQHQDPGAPRIQAEHLGCGWPEVPAVLLAELL

SEQ ID NO: 737769 - protein, 184 aa, Homo sapiens
MGLLTILKKMKQKERELRLLMLGLDNAGKTTILKKFNGEDIDTISPTLGFNIKTLEHRGFKLNIWDVGGQKSLRSYWRNYFESTDGLIWVVDSADRQRMQDCQRELQSLLVEERLAGATLLIFANKQDLPGALSSNAIREALELDSIRSHHWCIQGCSAVTGENLLPGIDWLLDDISSRIFTAD

SEQ ID NO: 737770 - protein, 184 aa, Homo sapiens; identical to SEQ ID NO: 737769

SEQ ID NO: 737771 - protein, 184 aa, Homo sapiens; identical to SEQ ID NO: 737769

SEQ ID NO: 737772 - protein, 184 aa, Homo sapiens; identical to SEQ ID NO: 737769

SEQ ID NO: 737773 - protein, 194 aa, Homo sapiens
MGLLTILKKMKQKERELRLLMLGLDNAGKTTILKKFNGEDIDTISPTLGFNIKTLEHRGFKLNIWDVGGQKSLRSYWRNYFESTDGLIWVVDSADRQRMQDCQRELQSLLVEEVGSSYPLCTCMDVWLPSQQMPRGARGPRGKPEAGSLPSLGPHHGRPMVPEAGHMLWTEIELTSLWCYYVTTLSISFYALKW

SEQ ID NO: 737774 - protein, 184 aa, Homo sapiens; identical to SEQ ID NO: 737769

SEQ ID NO: 737775 - protein, 164 aa, Homo sapiens [sequence omitted]

SEQ ID NO: 737776 - protein, 157 aa, Homo sapiens [sequence omitted]

SEQ ID NO: 737777 - protein, 89 aa, Homo sapiens
  misc_feature (8)..(8): Xaa can be any naturally occurring amino acid
RVAAPSRXQPFLVGMVAKRLAGATLLIFANKQDLPGALSSNAIREALELDSIRSHHWCIQGCSAVTGENLLPGIDWLLDDISSRIFTAD

SEQ ID NO: 737778 - protein, 184 aa, Homo sapiens; identical to SEQ ID NO: 737769

SEQ ID NO: 737779 - protein, 80 aa, Homo sapiens
LNRVAALPARLAGATLLIFANKQDLPGALSSNAIREALELDSIRSHHWCIQGCSAVTGENLLPGIDWLLDDISSRIFTAD

SEQ ID NO: 737780 - protein, 130 aa, Homo sapiens
RRRRMASVENMGGEDTQENDGKNTAAGQGSMLNTPQMASERLREALNGRRRGMAGGVEWRLAGATLLIFANKQDLPGALSSNAIREALELDSIRSHHWCIQGCSAVTGENLLPGIDWLLDDISSRIFTAD

SEQ ID NO: 737781 - protein, 75 aa, Homo sapiens
MPELKSCEVGVRKYNANNKRQRVTHHTLRQLCIMSLSRRQGRVIKAKINTHTYTKIKVKSQRGESMSKKHHQGLI

SEQ ID NO: 737782 - protein, 1354 aa, Homo sapiens
PDLVMTVMEAISILLNAKPDWPSAKQLLGDSNFLKRLLEYDKENIKPQILAKLQKYINNPDFVPEKVEKVSKACKSMCMWVRAMDLYSRVVKVVEPKRQKLRAAQAELDITMATLREKQALLRQVEDQIQALQDEYDKGVNEKESLAKTMALTKARLVRAGKLTAALEDEQVRWEESIQKFEEEISNITGNVFIAAACVAYYGAFTAQYRQSLIECWIQDCQSLEIPIDPSFSLINILGDPYEIRQWNTDGLPRDLISTENGILVTQGRRWPLMIDPQDQANRWIRNKESKSGLKIIKLTDSNFLRILENSIRLGLPVLLEELKETLDPALEPILLKQIFISGGRLLIRLGDSDIDYDKNFRFYMTTKMPNPHYLPEVCIKVTIINFTVTKSGLEDQLLSDVVRLEKPRLEEQRIKLIVRINTDKNQLKTIEEKILRMLFTSEGNILDNEELIDTLQDSKITSGAIKTRLEEAESTEQMINVAREKYRPVATQGSVMYFVIASLSEIDPMYQYSLKYFKQLFNTTIETSVKTENLQQRLDVLLEQTLLTAYVNVSRGLFEQHKLIYSFMLCVEMMRQQGTLSDAEWNFFLRGSAGLEKERPPKPEAPWLPTATWFACCDLEESFPVFHGLTQNILSHPISIRLGSFETYINPQKWEGYSKMKHEDKHMRQEKEAAHQDPWSAGLSSFHKLILIKCCKEEKVVFALTDFVIENLGKQFIETPPVDLPTLYQDMSCNTPLVFILSTGSDPMGAFQRFARESGYSERVQSISLGQGQGPIAEKMVKDAMKSGNWVFLQNCHLAVSWMLAMEELIKTFTDPDSAIKDTFRLFLSSMPSNTFPVTVLQNSVKVTNEPPKGLRANIRRAFTEMTPSFFEENILGKKWRQIIFGICFFHAIIQERKKFGPLGWNICYEFNDSDRECALLNLKLYCKEGKIPWDALIYITGEITYGGRVTDSWDQRCLRTILKRFFSPETLEEDYKYSESGIYFAPMADSLQEFKDYIENLPLIDDPEIFGMHENANLVFQYKETSTLINTILEVQPRSSTGGEGKSNDEIVQELVASVQTRVPEKLEMEGASESLFVKDLQGRLNSLTTVLGQEVDRFNNLLKLIHTSLETLNKAIAGFVVMSEEMEKVYNSFLNNQVPALWSNTAYPSLKPLGSWVKDLILRTSFVDLWLKRGQPKSYWISGFFFPQGFLTGTLQNHARKYNLPIDELSFKYSVIPTYRDQAAVIEAAKTVQFGQELPMDMELPSPEDGVLVHGMFMDASRWDDKEMVIEDALPGQMNPVLPVVHFEPQQNYKPSPTLYHCPLYKTGARAGTLSTTGHSTNFVVTVLLPSKRSKDYWIAKGSALLCQLSE

SEQ ID NO: 737783 - protein, 644 aa, Homo sapiens
HWQRHNLDDLNFGFSDVVRLEKPRLEEQRIKLIVRINTDKNQLKTIEEKILRMLFTSEGNILDNEELIDTLQDSKITSGAIKTRLEEAESTEQMINVAREKYRPVATQGSVMYFVIASLSEIDPMYQYSLKYFKQLFNTTIETSVKTENLQQRLDVLLEQTLLTAYVNVSRGLFEQHKLIYSFMLCVEMMRQQGTLSDAEWNFFLRGSAGLEKERPPKPEAPWLPTATWFACCDLEESFPVFHGLTQNILSHPISIRLGSFETYINPQKWEGYSKMKHEDKHMRQEKEAAHQDPWSAGLSSFHKLILIKCCKEEKVVFALTDFVIENLGKQFIETPPVDLPTLYQDMSCNTPLVFILSTGSDPMGAFQRFARESGYSERVQSISLGQGQGPIAEKMVKDAMKSGNWVFLQNCHLAVSWMLAMEELIKTFTDPDSAIKDTFRLFLSSMPSNTFPVTVLQNSVKVTNEPPKGLRANIRRAFTEMTPSFFEENILGKKWRQIIFGICFFHAIIQERKKFGPLGWNICYEFNDSDRECALLNLKLYCKEGKIPWDALIYITGEITYGGRVTDSWDQRCLRTILKRFFSPETLEEDYKYSESGIYFAPMADSLQEFKDYIENLPLIDDPEIFGMHENANLVFQVCGLSS

SEQ ID NO: 737784 - protein, 590 aa, Homo sapiens
RAQLRSHVTLVRNLCCPPRRPLPPDAPPAAAAQPWLLAGSGGGCGGAMASGGGGGNTGAGGGPGMGLSLGLGLGLSLGMSEATSEAEEEAATAEAVGRLATTLWLRLRGWEAVLAAAQRLLVWEKPLHSLVTAAALNGLFWLLSSSSLRPFFLLSVSLLAYFLLDLWQPRFLPDVSASSPEEPHSDSEGAGSGARPHLLSVPELCRYLAESWLTFQIHLQELLQYKRQNPAQFCVRVCSGCAVLAVLGHYVPGIMISYIVLLSILLWPLVVYHELIQRMYTRLEPLLMQLDYSMKAEANALHHKHDKRKRQGKNAPPGGDEPLAETESESEAELAGFSPVVDVKKTALALAITDSELSDEEASILESGGFSVSRATTPQLTDVSEDLDQQSLPSEPEETLSRDLGEGEEGELAPPEDLLGRPQALSRQALDSEEEEEDVAAKETLLRLSSPLHFVNTHFNGAGSPPDGVKCSPGGPVETLSPETVSGGLTALPGTLSPPLCLVGSDPAPSPSILPPVPQDSPQPLPAPEEEEALTTEDFELLDQGELEQLNAELGLEPETPPKPPDAPPLGPDIHSLVQSDQEAQAVAEP

SEQ ID NO: 737785 - protein, 512 aa, Homo sapiens [sequence omitted]

SEQ ID NO: 737786 - protein, 590 aa, Homo sapiens; identical to SEQ ID NO: 737784

SEQ ID NO: 737787 - protein, 590 aa, Homo sapiens; identical to SEQ ID NO: 737784

SEQ ID NO: 737788 - protein, 590 aa, Homo sapiens; identical to SEQ ID NO: 737784

SEQ ID NO: 737789 - protein, 590 aa, Homo sapiens; identical to SEQ ID NO: 737784

SEQ ID NO: 737790 - protein, 590 aa, Homo sapiens; identical to SEQ ID NO: 737784

SEQ ID NO: 737791 - protein, 561 aa, Homo sapiens
RAQLRSHVTLVRNLCCPPRRPLPPDAPPAAAAQPWLLAGSGGGCGGAMASGGGGGNTGAGGGPGMGLSLGLGLGLSLGMSEATSEAEEEAATAEAVGRLATTLWLRLRGWEAVLAAAQRLLVWEKPLHSLVTAAALNGLFWLLSSSSLRPFFLLSVSLLAYFLLDLWQPRFLPDVSASSPEEPHSDRIHLQELLQYKRQNPAQFCVRVCSGCAVLAVLGHYVPGIMISYIVLLSILLWPLVVYHELIQRMYTRLEPLLMQLDYSMKAEANALHHKHDKRKRQGKNAPPGGDEPLAETESESEAELAGFSPVVDVKKTALALAITDSELSDEEASILESGGFSVSRATTPQLTDVSEDLDQQSLPSEPEETLSRDLGEGEEGELAPPEDLLGRPQALSRQALDSEEEEEDVAAKETLLRLSSPLHFVNTHFNGAGSPPDGVKCSPGGPVETLSPETVSGGLTALPGTLSPPLCLVGSDPAPSPSILPPVPQDSPQPLPAPEEEEALTTEDFELLDQGELEQLNAELGLEPETPPKPPDAPPLGPDIHSLVQSDQEAQAVAEP

SEQ ID NO: 737792 - protein, 336 aa, Homo sapiens
MISYIVLLSILLWPLVVYHELIQRMYTRLEPLLMQLDYSMKAEANALHHKHDKRKRQGKNAPPGGDEPLAETESESEAELAGFSPVVDVKKTALALAITDSELSDEEASILESGGFSVSRATTPQLTDVSEDLDQQSLPSEPEETLSRDLGEGEEGELAPPEDLLGRPQALSRQALDSEEEEEDVAAKETLLRLSSPLHFVNTHFNGAGSPPDGVKCSPGGPVETLSPETVSGGLTALPGTLSPPLCLVGSDPAPSPSILPPVPQDSPQPLPAPEEEEALTTEDFELLDQGELEQLNAELGLEPETPPKPPDAPPLGPDIHSLVQSDQEAQAVAEP

SEQ ID NO: 737793 - protein, 336 aa, Homo sapiens; identical to SEQ ID NO: 737792

SEQ ID NO: 737794 - protein, 506 aa, Homo sapiens
RAQLRSHVTLVRNLCCPPRRPLPPDAPPAAAAQPWLLAGSGGGCGGAMASGGGGGNTGAGGGPGMGLSLGLGLGLSLGMSEATSEAEEEAATAEAVGRLATTLWLRLRGWEAVLAAAQRLLVWEKPLHSLVTAAALNGLFWLLSSSSLRPFFLLSVSLLAAVLGHYVPGIMISYIVLLSILLWPLVVYHELIQRMYTRLEPLLMQLDYSMKAEANALHHKHDKRKRQGKNAPPGGDEPLAETESESEAELAGFSPVVDVKKTALALAITDSELSDEEASILESGGFSVSRATTPQLTDVSEDLDQQSLPSEPEETLSRDLGEGEEGELAPPEDLLGRPQALSRQALDSEEEEEDVAAKETLLRLSSPLHFVNTHFNGAGSPPDGVKCSPGGPVETLSPETVSGGLTALPGTLSPPLCLVGSDPAPSPSILPPVPQDSPQPLPAPEEEEALTTEDFELLDQGELEQLNAELGLEPETPPKPPDAPPLGPDIHSLVQSDQEAQAVAEP

SEQ ID NO: 737795 - protein, 528 aa, Homo sapiens
RAQLRSHVTLVRNLCCPPRRPLPPDAPPAAAAQPWLLAGSGGGCGGAMASGGGGGNTGAGGGPGMGLSLGLGLGLSLGMSEATSEAEEEAATAEAVGRLATTLWLRLRGWEAVLAAAQRLLVWEKPLHSLVTAAALNGLFWLLSSSSLRPFFLLSVSLLAYFLLDLWQPRFLPDVSASSPEEPHSDSEGAGSGARPHLLSVPELCRYLAESWLTFQIHLQELLQYKRQNPAQFCVRVCSGCAVLAVLGHYVPGIMISYIVLLSILLWPLVVYHELIQRMYTRLEPLLMQLDYSMKAEANALHHKHDKRKRQGKNAPPGGDEPLAETESESEAELAGFSPVVDVKKTALALAITDSELSDEEASILESGGFSVSRATTPQLTDVSEDLDQQSLPSEPEETLSRDLGEGEEGELAPPEDLLGRPQALSRQALDSEEEEEDVAAKETLLRLSSPLHFVNTHFNGAGSPPDGVKCSPGGPVETLSPETVSGGLTALPGTLSPPLCLVGSDPAPSPSILPPVPQQEAQAVAEP

SEQ ID NO: 737796 - protein, 590 aa, Homo sapiens; identical to SEQ ID NO: 737784

SEQ ID NO: 737797 - protein, 135 aa, Homo sapiens
AGTVPSLRSPPDGVKCSPGGPVETLSPETVSGGLTALPGTLSPPLCLVGSDPAPSPSILPPVPQDSPQPLPAPEEEEALTTEDFELLDQGELEQLNAELGLEPETPPKPPDAPPLGPDIHSLVQSDQEAQAVAEP

SEQ ID NO: 737798 - protein, 590 aa, Homo sapiens; identical to SEQ ID NO: 737784

SEQ ID NO: 737799 - protein, 217 aa, Homo sapiens
RAQLRSHVTLVRNLCCPPRRPLPPDAPPAAAAQPWLLAGSGGGCGGAMASGGGGGNTGAGGGPGMGLSLGLGLGLSLGMSEATSEAEEEAATAEAVGRLATTLWLRLRGWEAVLAAAQRLLVWEKPLHSLVTAAALNGLFWLLSSSSLRPFFLLSVSLLAYFLLDLWQPRFLPDVSASSPEEPHSDSEGAGSGARPHLLSVPELCRYLAESWLTFHS

SEQ ID NO: 737800 - protein, 590 aa, Homo sapiens; identical to SEQ ID NO: 737784

SEQ ID NO: 737801 - protein, 118 aa, Homo sapiens
MVAIPPSACLPACCPGHGAVPVPRIGFKFVNNFPFGLVDVNRAREVLPTACACLPASSLFSFHYAPSPGGLALSFSSYPQGPVLLCPHVPLGCLVEALYNFSLVLCSFLLYFPAVSCP

SEQ ID NO: 737802 - protein, 263 aa, Homo sapiens
RAQLRSHVTLVRNLCCPPRRPLPPDAPPAAAAQPWLLAGSGGGCGGAMASGGGGGNTGAGGGPGMGLSLGLGLGLSLGMSEATSEAEEEAATAEAVGRLATTLWLRLRGWEAVLAAAQRLLVWEKPLHSLVTAAALNGLFWLLSSSSLRPFFLLSVSLLAYFLLDLWQPRFLPDVSASSPEEPHSDSEGAGSGARPHLLSVPELCRYLAESWLTFQIHLQELLQYKRQNPAQFCVRVCSGCAVLAVLGHYVPGIMISYIVSCP

SEQ ID NO: 737803 - protein, 235 aa, Homo sapiens
RAQLRSHVTLVRNLCCPPRRPLPPDAPPAAAAQPWLLAGSGGGCGGAMASGGGGGNTGAGGGPGMGLSLGLGLGLSLGMSEATSEAEEEAATAEAVGRLATTLWLRLRGWEAVLAAAQRLLVWEKPLHSLVTAAALNGLFWLLSSSSLRPFFLLSVSLLAYFLLDLWQPRFLPDVSASSPEEPHSDSEGAGSGARPHLLSVPELCRYLAESWLTFHMCSLLRLGASLLLLWVIQV

SEQ ID NO: 737804 - protein, 128 aa, Homo sapiens
LCCPPRRPLPPDAPPAAAAQPWLLAGSGGGCGGAMASGGGGGNTGAGGGPGMGLSLGLGLGLSLGMSEATSEAEEEAATAEAVGRLATTLWLRLRGWEAVLAAAQRLLVWEKPLHSLVTAAALNGLFW

SEQ ID NO: 737805 - protein, 578 aa, Homo sapiens
RAQLRSHVTLVRNLCCPPRRPLPPDAPPAAAAQPWLLAGSGGGCGGAMASGGGGGNTGAGGGPGMGLSLGLGLGLSLGMSEATSEAEEEAATAEAVGRLATTLWLRLRGWEAVLAAAQRLLVWEKPLHSLVTAAALNGLFWLLSSSSLRPFFLLSVSLLAYFLLDLWQPRFLPDVSASSPEEPHSDSEGAGSGARPHLLSVPELCRYLAESWLTFQIHLQELLQYKRQNPAQFCVRVCSGCAVLAVLGHYVPGIMISYIVLLSILLWPLVVYHELIQRMYTRLEPLLMQLDYSMKAEANALHHKHDKRKRQGKNAPPGGDEPLAETESESEAELAGFSPVVDVKKTALALAITDSELSDEEASILESGGFSVSRATTPQLTDVSEDLDQQSLPSEPEETLSRDLGEGEEGELAPPEDLLGRPQALSRQALDSEEEEEDVAAKETLLRLSSPLHFVNTHFNGAGSPPDGVKCSPGGPVETLSPETVSGGLTALPGTLSPPLCLVGSDPAPSPSILPPVPQEALTTEDFELLDQGELEQLNAELGLEPETPPKPPDAPPLGPDIHSLVQSDQEAQAVAEP

SEQ ID NO: 737806 - protein, 590 aa, Homo sapiens; identical to SEQ ID NO: 737784

SEQ ID NO: 737807 - protein, 235 aa, Homo sapiens
SSSSSMSLAKGVDFSRLLKPLYSHSHFPYSVDMYMCMVARVPPPEYLSHDGFFRGELAPPEDLLGRPQALSRQALDSEEEEEDVAAKETLLRLSSPLHFVNTHFNGAGSPPDGVKCSPGGPVETLSPETVSGGLTALPGTLSPPLCLVGSDPAPSPSILPPVPQDSPQPLPAPEEEEALTTEDFELLDQGELEQLNAELGLEPETPPKPPDAPPLGPDIHSLVQSDQEAQAVAEP

SEQ ID NO: 737808 - protein, 291 aa, Homo sapiens
RAQLRSHVTLVRNLCCPPRRPLPPDAPPAAAAQPWLLAGSGGGCGGAMASGGGGGNTGAGGGPGMGLSLGLGLGLSLGMSEATSEAEEEAATAEAVGRLATTLWLRLRGWEAVLAAAQRLLVWEKPLHSLVTAAALNGLFWLLSSSSLRPFFLLSVSLLAYFLLDLWQPRFLPDVSASSPEEPHSDSEGAGSGARPHLLSVPELCRYLAESWLTFQIHLQELLQYKRQNPAQFCVRVCSGCAVLLEVTQPPPLPFSHLFPRTHPSPCLPLRKKRHSPLRTLSCWIRGSWSS

SEQ ID NO: 737809 - protein, 146 aa, Homo sapiens
PSWGDPAPLKCVFTKWSEMLHWSSRGAFHSILGGPCPIETVSGGLTALPGTLSPPLCLVGSDPAPSPSILPPVPQDSPQPLPAPEEEEALTTEDFELLDQGELEQLNAELGLEPETPPKPPDAPPLGPDIHSLVQSDQEAQAVAEP

SEQ ID NO: 737810 - protein, 278 aa, Homo sapiens
RAQLRSHVTLVRNLCCPPRRPLPPDAPPAAAAQPWLLAGSGGGCGGAMASGGGGGNTGAGGGPGMGLSLGLGLGLSLGMSEATSEAEEEAATAEAVGRLATTLWLRLRGWEAVLAAAQRLLVWEKPLHSLVTAAALNGLFWLLSSSSLRPFFLLSVSLLAYFLLDLWQPRFLPDVSASSPEEPHSDSEGAGSGARPHLLSVPELCRYLAESWLTFQIHLQELLQYKRQNPAQFCVRVCSGCAVLAVLGHYVPGRLLVWEVKSKPGAVGQASSYTLRSL

SEQ ID NO: 737811 - protein, 421 aa, Homo sapiens
RAQLRSHVTLVRNLCCPPRRPLPPDAPPAAAAQPWLLAGSGGGCGGAMASGGGGGNTGAGGGPGMGLSLGLGLGLSLGMSEATSEAEEEAATAEAVGRLATTLWLRLRGWEAVLAAAQRLLVWEKPLHSLVTAAALNGLFWLLSSSSLRPFFLLSVSLLAYFLLDLWQPRFLPDVSASSPEEPHSDSEGAGSGARPHLLSVPELCRYLAESWLTFQIHLQELLQYKRQNPAQFCVRVCSGCAVLAVLGHYVPGIMISYIVLLSILLWPLVVYHELIQRMYTRLEPLLMQLDYSMKAEANALHHKHDKRKRQGKNAPPGGDEPLAETESESEAELAGFSPVVDVKKTALALAITDSELSDEEASILESGGFSVSRATTPQLTDVSEDLDQQSLPSEPEETLSRDLGEGEEEGHAGSSESPQA

SEQ ID NO: 737812 - protein, 75 aa, Homo sapiens
MGELTDALLGKGALKTRFGSLLGQGDWGGVRVSQVEVRWVIFCLLHWLHVNLPVTEYLALDVLFPLAIVQKHSIL

SEQ ID NO: 737813 - protein, 35 aa, Homo sapiens
MQPTNFHGITRQPRTIKCLRKTNHYQKGAPKVSRY

SEQ ID NO: 737814 - protein, 135 aa, Homo sapiens
LYISKTSIDWGCFELMGLVLKQHYFVQNKIVESMPLRRDTSQGLKCRVTPPFGNEPLLVSGLDGTSPAFRFLFYKTGVITAPTSEGYHEDCHRGCRVPGPPAWYGGTHSVKAICCHCHCHSYCRHSVACQFQNWG

SEQ ID NO: 737815 - protein, 198 aa, Homo sapiens [sequence omitted]

SEQ ID NO: 737816 - protein, 344 aa, Homo sapiens
PPTRPAQALSFEDQICTPDLVVFLACANQRLKERLLKRAEQQGRPDDNVKATQRRLMNFKQNAAPLVKYFQEKGLIMTFDADRDEDEVFYDISMAVDNKLFPNKEAAAGSSDLDPSMILDTGEIIDTGSDYEDQGDDQLNVFGEDTMGGFMEDLRKCKIIFIIGGPGSGKGTQCEKLVEKYGFTHLSTGELLREELASESERSKLIRDIMERGDLVPSGIVLELLKEAMVASLGDTRGFLIDGYPREVKQGEEFGRRIGDPQLVICMDCSADTMTNRLLQRSRSSLPVDDTTKTIAKRLEAYYRASIPVIAYYETKTQLHKINAEGTPEDVFLQLCTAIDSIIF

SEQ ID NO: 737817 - protein, 125 aa, Homo sapiens
TLKEPEGQERKKPEALGLSQNISRVRFLTVLCSHSHLQIGDPQLVICMDCSADTMTNRLLQRSRSSLPVDDTTKTIAKRLEAYYRASIPVIAYYETKTQLHKINAEGTPEDVFLQLCTAIDSIIF

SEQ ID NO: 737818 - protein, 177 aa, Homo sapiens
MNTNDAKEYLARREIPQLFESLLNGLMCSKPEDPVEYLESCLQKVKELGGCDKVKWDTFVSQEKKTLPPLNGGQSRRSFLRNVMPENSNFPYRRYDRLPPIHQFSIESDTDLSETAELIEEYEVFDPTRPRPKIILVIGGPGSGKGTQSLKIAERYGFQYISVGELLRTEDPQYQQQ

SEQ ID NO: 737819 - protein, 151 aa, Homo sapiens
MCSKPEDPVEYLESCLQKVKELGGCDKVKWDTFVSQEKKTLPPLNGGQSRRSFLRNVMPENSNFPYRRYDRLPPIHQFSIESDTDLSETAELIEEYEVFDPTRPRPKIILVIGGPGSGKGTQSLKIAERYGFQYISVGELLRTEDPQYQQQ

SEQ ID NO: 737820 - protein, 344 aa, Homo sapiens; identical to SEQ ID NO: 737816

SEQ ID NO: 737821 - protein, 134 aa, Homo sapiens
LTTLALLQGIVLELLKEAMVASLGDTRGFLIDGYPREVKQGEEFGRRIGDPQLVICMDCSADTMTNRLLQRSRSSLPVDDTTKTIAKRLEAYYRASIPVIAYYETKTQLHKINAEGTPEDVFLQLCTAIDSIIF

SEQ ID NO: 737822 - protein, 146 aa, Homo sapiens
CVRHAVLPPPLPAPHPWRPRCLAAREAAAQLLGACSSGSGAGTEAGAAGVKQGEEFGRRIGDPQLVICMDCSADTMTNRLLQRSRSSLPVDDTTKTIAKRLEAYYRASIPVIAYYETKTQLHKINAEGTPEDVFLQLCTAIDSIIF

SEQ ID NO: 737823 - protein, 344 aa, Homo sapiens; identical to SEQ ID NO: 737816

SEQ ID NO: 737824 - protein, 344 aa, Homo sapiens; identical to SEQ ID NO: 737816

SEQ ID NO: 737825 - protein, 177 aa, Homo sapiens; identical to SEQ ID NO: 737818

SEQ ID NO: 737826 - protein, 344 aa, Homo sapiens; identical to SEQ ID NO: 737816

SEQ ID NO: 737827 - protein, 153 aa, Homo sapiens
MNTNDAKEYLARREIPQLFESLLNGLMCSKPEDPVEYLESCLQKVKELGGCDKVKWDTFVSQEKKTLPPLNGGQSRRSFLRNESDTDLSETAELIEEYEVFDPTRPRPKIILVIGGPGSGKGTQSLKIAERYGFQYISVGELLRTEDPQYQQQ

SEQ ID NO: 737828 - protein, 138 aa, Homo sapiens
PPTRPAQALSFEDQICTPDLVVFLACANQRLKERLLKRAEQQGRPDDNVKATQRRLMNFKQNAAPLVKYFQEKGLIMTFDADRDEDEVFYDISMAVDNKLFPNKEAAAGSSDLDPSMILDTGEIIDTGSDYEDQVIKI

SEQ ID NO: 737829 - protein, 168 aa, Homo sapiens
PPTRPAQALSFEDQICTPDLVVFLACANQRLKERLLKRAEQQGRPDDNVKATQRRLMNFKQNAAPLVKYFQEKGLIMTFDADRDEDEVFYDISMAVDNKLFPNKEAAAGSSDLDPSMILDTGEIIDTGSDYEDQGDDQLNVFGEDTMGGFTPVLPFMLKTQLKESSKD

SEQ ID NO: 737830 - protein, 103 aa, Homo sapiens
LWQRDMGWKMASPTDGTDLEASLLSFEKLDRASPDLWPEQLPGVAEFAASFKSPITSSPPKWMAEIERDDIDMLKELGSLTTANLMEKVRGLQNLAYQLGLDE

SEQ ID NO: 737831 - protein, 121 aa, Homo sapiens
LWQRDMGWKMASPTDGTDLEASLLSFEKLDRASPDLWPEQLPGVAEFAASFKSPITSSPPKWMAEIERDDIDMLKELGSLTTANLMEKVRGLQNLAYQLGLDESREMTRGKFLNILEKPKK

SEQ ID NO: 737832 - protein, 121 aa, Homo sapiens; identical to SEQ ID NO: 737831

SEQ ID NO: 737833 - protein, 121 aa, Homo sapiens; identical to SEQ ID NO: 737831

SEQ ID NO: 737834 - protein, 121 aa, Homo sapiens; identical to SEQ ID NO: 737831

SEQ ID NO: 737835 - protein, 156 aa, Homo sapiens
LWQRDMGWKMASPTDGTDLEASLLSFEKLDRASPDLWPEQLPGVAEFAASFKSPITSSPPKWMAEIERDDIDMLKELGSLTTANLMEKVRGLQNLAYQLGLDEWSPSVTQAGVQWCDLGSLQPLPPGLKQVPHLSFPSSWDYRCEPQRPARNAFLI

SEQ ID NO: 737836 - protein, 103 aa, Homo sapiens
MQPCSPSSVAGCRKGGFTAQTRGGPWAEGRRQSSARCLGPGQQRPLLAALELHSLLAFPWASFLGTRLLPMVEHQGSVRLPVSPTHSASRVPVPTSEPWFCLH

SEQ ID NO: 737837 - protein, 31 aa, Homo sapiens
MVTSLSLRARYRIQSLGHVDTELRRIFSEIP

SEQ ID NO: 737838 - protein, 107 aa, Homo sapiens [sequence omitted]

SEQ ID NO: 737839 - protein, 139 aa, Homo sapiens [sequence omitted]

SEQ ID NO: 737840 - protein, 127 aa, Homo sapiens
MHICYLYIFFGKVSVKIFSLFKIGFFFIVEFKEFFVYFGYMSSIRYMLCSIFSQCVACLFILLTMSFAEQKFLILMMSSLSVFSFMSHAFGVVSKNSMLDHGHLDFLVCYLLEVLCFAFYIYVCDPF

SEQ ID NO: 737841 - protein, 319 aa, Homo sapiens
MSQQNTSGDCLFDGVNELMKTLQFAVHIPTFVLGLLLNLLAIHGFSTFLKNRWPDYAATSIYMINLAVFDLLLVLSLPFKMVLSQVQSPFPSLCTLVECLYFVSMYGSVFTICFISMDRFLAIRYPLLVSHLRSPRKIFGICCTIWVLVWTGSIPIYSFHGKVEKYMCFHNMSDDTWSAKVFFPLEVFGFLLPMGIMGFCCSRSIHILLGRRDHTQDWVQQKACIYSIAASLAVFVVSFLPVHLGFFLQFLVRNSFIVECRAKQSISFFLQLSMCFSNVNCCLDVFCYYFVIKEFRMNIRAHRPSRVQLVLQDTTISRG

SEQ ID NO: 737842 - protein, 71 aa, Homo sapiens
LAVVTSLVKAPRSGARVGISGRGLSGGGKVANQDFCNTKISHAVSSSSQEVWLGLAGSLGLEPGEKSQKNC

SEQ ID NO: 737843 - protein, 129 aa, Homo sapiens
LSEPSLRRFPHEPSRATSRRIYSPGSAKGSLHQAHNSSSKRMFKGPVISASAGQQNFACRILELRRVLNQGQWRKWETVKRVRGLCQLPPFPPPAIHLTFLSLTFVIMRMCIFINNHLFLQCKILLLQK

SEQ ID NO: 737844 - protein, 242 aa, Homo sapiens
MDNRQNVTPALIFAITVATIGSFQFGYNTGVINAPETIIKEFINKTLTDKANAPPSEVLLTNLWSLSVAIFSVGGMIGSFSVGLFVNRFGRRNSMLIVNLLAATGGCLMGLCKIAESVEMLILGRLVIGLFCGLCTGFVPMYIGEISPTALRGAFGTLNQLGIVIGILVAQIFGLELILGSEELWPVLLGFTILPAILQSAALPCCPESPRFCSLTETKRRMLRGSSSGCGAPRMFPKTSRR

SEQ ID NO: 737845 - protein, 148 aa, Homo sapiens
MLIVNLLAATGGCLMGLCKIAESVEMLILGRLVIGLFCGLCTGFVPMYIGEISPTALRGAFGTLNQLGIVIGILVAQIFGLELILGSEELWPVLLGFTILPAILQSAALPCCPESPRFCSLTETKRRMLRGSSSGCGAPRMFPKTSRR

SEQ ID NO: 737846 - protein, 188 aa, Homo sapiens
MDNRQNVTPALIFAITVATIGSFQFGYNTGVINAPETIIKEFINKTLTDKANAPPSEVLLTNLWSLSVAIFSVGGMIGSFSVGLFVNRFGRRNSMLIVNLLAATGGCLMGLCKIAESVEMLILGRLVIGLFCGLCTGFVPMYIGEISPTALRGAFGTLNQLGIVIGILVAQSSSGCGAPRMFPKTSRR

SEQ ID NO: 737847 - protein, 242 aa, Homo sapiens; identical to SEQ ID NO: 737844

SEQ ID NO: 737848 - protein, 265 aa, Homo sapiens
MEFHNGGHVSGIGGFLVSLTSRMKPHTLAVTPALIFAITVATIGSFQFGYNTGVINAPETIIKEFINKTLTDKANAPPSEVLLTNLWSLSVAIFSVGGMIGSFSVGLFVNRFGRRNSMLIVNLLAATGGCLMGLCKIAESVEMLILGRLVIGLFCGLCTGFVPMYIGEISPTALRGAFGTLNQLGIVIGILVAQIFGLELILGSEELWPVLLGFTILPAILQSAALPCCPESPRFCSLTETKRRMLRGSSSGCGAPRMFPKTSRR

SEQ ID NO: 737849 - protein, 242 aa, Homo sapiens; identical to SEQ ID NO: 737844

SEQ ID NO: 737850 - protein, 265 aa, Homo sapiens; identical to SEQ ID NO: 737848

SEQ ID NO: 737851 - protein, 125 aa, Homo sapiens [sequence omitted]

SEQ ID NO: 737852 - protein, 520 aa, Homo sapiens
AGTVREFGIQCLAMARLLRSATWELFPWRGYCSQKAKGELCRDFVEALKAVVGGSHVSTAAVVREQHGRDESVHRCEPPDAVVWPQNVEQVSRLAALCYRQGVPIIPFGTGTGLEGGVCAVQGGVCVNLTHMDRILELNQEDFSVVVEPGVTRKALNAHLRDSGLWFPVDPGADASLCGMAATGASGTNAVRYGTMRDNVLNLEVVLPDGRLLHTAGRGRHFRFGFWPEIPHHTAWYSPCVSLGRRKSAAGYNLTGLFVGSEGTLGLITATTLRLHPAPEATVAATCAFPSVQAAVDSTVHILQAAVPVARIEFLDEVMMDACNRYSKLNCLVAPTLFLEFHGSQQALEEQLQRTEEIVQQNGASDFSWAKEAEERSRLWTARHNAWYAALATRPGCKGYSTDVCVPISRLPEIVVQTKEDLNASGLTGSIVGHVGDGNFHCILLVNPDDAEELGRVKAFAEQLGRRALALHGTCTGEHGIGMGKRQLLQEEVGAVGVETMRQLKAVLDPQGLMNPGKVL

SEQ ID NO: 737853 - protein, 499 aa, Homo sapiens
SPCHPVLTPSGQCLAMARLLRSATWELFPWRGYCSQKAKGELCRDFVEALKAVVGGSHVSTAAVVREQHGRDESVHRCEPPDAVVWPQNVEQVSRLAALCYRQGVPIIPFGTGTGLEGGVCAVQGGVCVNLTHMDRILELNQEDFSVVVEPGVTRKALNAHLRDSGLWFPVDPGADASLCGMAATGASGTNAVRYGTMRDNVLNLEVVLPDGRLLHTAGRGRHFRKSAAGYNLTGLFVGSEGTLGLITATTLRLHPAPEATVAATCAFPSVQAAVDSTVHILQAAVPVARIEFLDEVMMDACNRYSKLNCLVAPTLFLEFHGSQQALEEQLQRTEEIVQQNGASDFSWAKEAEERSRLWTARHNAWYAALATRPGCKGYSTDVCVPISRLPEIVVQTKEDLNASGLTGSIVGHVGDGNFHCILLVNPDDAEELGRVKAFAEQLGRRALALHGTCTGEHGIGMGKRQLLQEEVGAVGVETMRQLKAVLDPQGLMNPGKVL

SEQ ID NO: 737854 - protein, 522 aa, Homo sapiens
SPCHPVLTPSGQCLAMARLLRSATWELFPWRGYCSQKAKGELCRDFVEALKAVVGGSHVSTAAVVREQHGRDESVHRCEPPDAVVWPQNVEQVSRLAALCYRQGVPIIPFGTGTGLEGGVCAVQGGVCVNLTHMDRILELNQEDFSVVVEPGVTRKALNAHLRDSGLWFPVDPGADASLCGMAATGASGTNAVRYGTMRDNVLNLEVVLPDGRLLHTAGRGRHFRFGFWPEIPHHTAWYSPCVSLGRRKSAAGYNLTGLFVGSEGTLGLITATTLRLHPAPEATVAATCAFPSVQAAVDSTVHILQAAVPVARIEFLDEVMMDACNRYSKLNCLVAPTLFLEFHGSQQALEEQLQRTEEIVQQNGASDFSWAKEAEERSRLWTARHNAWYAALATRPGCKGYSTDVCVPISRLPEIVVQTKEDLNASGLTGSIVGHVGDGNFHCILLVNPDDAEELGRVKAFAEQLGRRALALHGTCTGEHGIGMGKRQLLQEEVGAVGVETMRQLKAVLDPQGLMNPGKVL

SEQ ID NO: 737855 - protein, 299 aa, Homo sapiens
GWYRREFGIQCLAMARLLRSATWELFPWRGYCSQKAKGELCRDFVEALKAVVGGSHVSTAAVVREQHGRDESVHRCEPPDAVVWPQNVEQVSRLAALCYRQGVPIIPFGTGTGLEGGVCAVQVQWGSLARPEDGPSTPWHTCGCLPATHGTLGLLPPVGCLPLGVWSGCWGDTRGVWSGDVARSETQVCSGLSTCPNQGGVCVNLTHMDRILELNQEDFSVVVEPGVTRKALNAHLRDSGLWFPVDPGADASLCGMAATGASGTNAVRYGTMRDNVLNLEVVLPDGRLLHTAGRGRHFR

SEQ ID NO: 737856 - protein, 77 aa, Homo sapiens
KKRLKAVTGSSHREVLVTLLRLTPRSAGWMQKGREEDSVTETVNASYSPKTAAEKEGQMEGQVRSRKVLNYAAIFKN

SEQ ID NO: 737857 - protein, 115 aa, Homo sapiens
QKNEGLCDILFPEGEEGRPPNDLAPWNLASLLRGTYSAVLHCGSRVWLGLALSSDSPLGQNHTSKNGLSQSQVSLLWNSIPGFPEQLGTPFCNQTEFTFGHQLLPQTKGRTKYRK

SEQ ID NO: 737858 - protein, 1486 aa, Homo sapiens
MAANVGSMFQYWKRFDLRRLQKELNSVASELSARQEESEHSHKHLIELRREFKKNVPEEIREMVAPVLKSFQAEVVALSKRSQEAEAAFLSVYKQLIEAPDPVPVFEAARSLDDRLQPPSFDPSGQPRRDLHTSWKRNPELLSPKEQREGTSPAGPTLTEGSRLPGIPGKALLTETLLQRNEAEKQKGLQEVQITLAARLGEAEEKIKVLHSALKATQAELLELRRKYDEEAASKADEVGLIMTNLEKANQRAEAAQREVESLREQLASVNSSIRLACCSPQGPSGDKVNFTLCSGPRLEAALASKDREILRLLKDVQHLQSSLQELEEASANQIADLERQLTAKSEAIEKLEEKLQAQSDYEEIKTELSILKAMKLASSTCSLPQGMAKPEDSLLIAKEAFFPTQKFLLEKPSLLASPEEDPSEDDSIKDSLGTEQSYPSPQQLPPPPGPEDPLSPSPGQPLLGPSLGPDGTRTFSLSPFPSLASGERLMMPPAAFKGEAGGLLVFPPAFYGAKPPTAPATPAPGPEPLGGPEPADGGGGGAAGPGAEEEQLDTAEIAFQVKEQLLKHNIGQRVFGHYVLGLSQGSVSEILARPKPWRKLTVKGKEPFIKMKQFLSDEQNVLALRTIQVRQRGSITPRIRTPETGSDDAIKSILEQAKKEIESQKGGEPKTSVAPLSIANGTTPASTSEDAIKSILEQARREMQAQQQALLEMEVAPRGRSVPPSPPERPSLATASQNGAPALVKQEEGSGGPAQAPLPVLSPAAFVQSIIRKVKSEIGDAGYFDHHWASDRGLLSRPYASVSPSLSSSSSSGYSGQPNGRAWPRGDEAPVPPEDEAAAGAEDEPPRTGELKAEGATAEAGARLPYYPAYVPRTLKPTVPPLTPEQYELYMYREVDTLELTRQVKEKLAKNGICQRIFGEKVLGLSQGSVSDMLSRPKPWSKLTQKGREPFIRMQLWLSDQLGQAVGQQPGASQASPTEPRSSPSPPPSPTEPEKSSQEPLSLSLESSKENQQPEGRSSSSLSGKMYSGSQAPGGIQEIVAMSPELDTYSITKRVKEVLTDNNLGQRLFGESILGLTQGSVSDLLSRPKPWHKLSLKGREPFVRMQLWLNDPHNVEKLRDMKKLEKKAYLKRRYGLISTGSDSESPATRSECPSPCLQPQDLSLLQIKKPRVVLAPEEKEALRKAYQLEPYPSQQTIELLSFQLNLKTNTVINWFHNYRSRMRREMLVEGTQDEPDLDPSGGPGILPPGHSHPDPTPQSPDSETEDQKPTVKELELQEGPEENSTPLTTQDKAQVRIKQEQMEEDAEEEAGSQPQDSGELDKGQGPPKEEHPDPPGNDGLPKVAPGPLLPGGSTPDCPSLHPQQESEAGERLHPDPLSFKSASESSRCSLEVSLNSPSAASSPGLMMSVSPVPSSSAPISPSPPGAPPAKVPSASPTADMAGALHPSAKVNPNLQRRHEKMANLNNIIYRLERAANREEALEWEF

SEQ ID NO: 737859 - protein, 103 aa, Homo sapiens
AQYLPPRPQSTPEWSTGAPPPLVHLSKSRPCFMASRGSHRSSPRPIGPYSLQPQTSGLKQSSCLSLPSPANFLNLFFVVPKSHYVTQTGLKLLASSDPPTSAS

SEQ ID NO: 737860 - protein, 1546 aa, Homo sapiens
MCSPHMGEQDWTCRDPGWEQNLRQLRVLWEGNGFIAAFRFYFCTFAFYLPVVLLTGPRSGAVSGHFWEPWTALERRQELPRKELNSVASELSARQEESEHSHKHLIELRREFKKNVPEEIREMVAPVLKSFQAEVVALSKRSQEAEAAFLSVYKQLIEAPDPVPVFEAARSLDDRLQPPSFDPSGQPRRDLHTSWKRNPELLSPKEQREGTSPAGPTLTEGSRLPGIPGKALLTETLLQRNEAEKQKGLQEVQITLAARLGEAEEKIKVLHSALKATQAELLELRRKYDEEAASKADEVGLIMTNLEKANQRAEAAQREVESLREQLASVNSSIRLACCSPQGPSGDKVNFTLCSGPRLEAALASKDREILRLLKDVQHLQSSLQELEEASANQIADLERQLTAKSEAIEKLEEKLQAQSDYEEIKTELSILKAMKLASSTCSLPQGMAKPEDSLLIAKEAFFPTQKFLLEKPSLLASPEEDPSEDDSIKDSLGTEQSYPSPQQLPPPPGPEDPLSPSPGQPLLGPSLGPDGTRTFSLSPFPSLASGERLMMPPAAFKGEAGGLLVFPPAFYGAKPPTAPATPAPGPEPLGGPEPADGGGGGAAGPGAEEEQLDTAEIAFQVKEQLLKHNIGQRVFGHYVLGLSQGSVSEILARPKPWRKLTVKGKEPFIKMKQFLSDEQNVLALRTIQVRQRGSITPRIRTPETGSDDAIKSILEQAKKEIESQKGGEPKTSVAPLSIANGTTPASTSEDAIKSILEQARREMQAQQQALLEMEVAPRGRSVPPSPPERPSLATASQNGAPALVKQEEGSGGPAQAPLPVLSPAAFVQSIIRKVKSEIGDAGYFDHHWASDRGLLSRPYASVSPSLSSSSSSGYSGQPNGRAWPRGDEAPVPPEDEAAAGAEDEPPRTGELKAEGATAEAGARLPYYPAYVPRTLKPTVPPLTPEQYELYMYREVDTLELTRQVKEKLAKNGICQRIFGEKVLGLSQGSVSDMLSRPKPWSKLTQKGREPFIRMQLWLSDQLGQAVGQQPGASQASPTEPRSSPSPPPSPTEPEKSSQEPLSLSLESSKENQQPEGRSSSSLSGKMYSGSQAPGGIQEIVAMSPELDTYSITKRVKEVLTDNNLGQRLFGESILGLTQGSVSDLLSRPKPWHKLSLKGREPFVRMQLWLNDPHNVEKLRDMKKLEKKAYLKRRYGLISTGSDSESPATRSECPSPCLQPQDLSLLQIKKPRVVLAPEEKEALRKAYQLEPYPSQQTIELLSFQLNLKTNTVINWFHNYRSRMRREMLVEGTQDEPDLDPSGGPGILPPGHSHPDPTPQSPDSETEDQKPTVKELELQEGPEENSTPLTTQDKAQVRIKQEQMEEDAEEEAGSQPQDSGELDKGQGPPKEEHPDPPGNDGLPKVAPGPLLPGGSTPDCPSLHPQQESEAGERLHPDPLSFKSASESSRCSLEVSLNSPSAASSPGLMMSVSPVPSSSAPISPSPPGAPPAKVPSASPTADMAGALHPSAKVNPNLQRRHEKMANLNNIIYRLERAANREEALEWEF

SEQ ID NO: 737861 - protein, 1112 aa, Homo sapiens
MKLASSTCSLPQGMAKPEDSLLIAKEAFFPTQKFLLEKPSLLASPEEDPSEDDSIKDSLGTEQSYPSPQQLPPPPGPEDPLSPSPGQPLLGPSLGPDGTRTFSLSPFPSLASGERLMMPPAAFKGEAGGLLVFPPAFYGAKPPTAPATPAPGPEPLGGPEPADGGGGGAAGPGAEEEQLDTAEIAFQVKEQLLKHNIGQRVFGHYVLGLSQGSVSEILARPKPWRKLTVKGKEPFIKMKQFLSDEQNVLALRTIQVRQRGSITPRIRTPETGSDDAIKSILEQAKKEIESQKGGEPKTSVAPLSIANGTTPASTSEDAIKSILEQARREMQAQQQALLEMEVAPRGRSVPPSPPERPSLATASQNGAPALVKQEEGSGGPAQAPLPVLSPAAFVQSIIRKVKSEIGDAGYFDHHWASDRGLLSRPYASVSPSLSSSSSSGYSGQPNGRAWPRGDEAPVPPEDEAAAGAEDEPPRTGELKAEGATAEAGARLPYYPAYVPRTLKPTVPPLTPEQYELYMYREVDTLELTRQVKEKLAKNGICQRIFGEKVLGLSQGSVSDMLSRPKPWSKLTQKGREPFIRMQLWLSDQLGQAVGQQPGASQASPTEPRSSPSPPPSPTEPEKSSQEPLSLSLESSKENQQPEGRSSSSLSGKMYSGSQAPGGIQEIVAMSPELDTYSITKRVKEVLTDNNLGQRLFGESILGLTQGSVSDLLSRPKPWHKLSLKGREPFVRMQLWLNDPHNVEKLRDMKKLEKKAYLKRRYGLISTGSDSESPATRSECPSPCLQPQDLSLLQIKKPRVVLAPEEKEALRKAYQLEPYPSQQTIELLSFQLNLKTNTVINWFHNYRSRMRREMLVEGTQDEPDLDPSGGPGILPPGHSHPDPTPQSPDSETEDQKPTVKELELQEGPEENSTPLTTQDKAQVRIKQEQMEEDAEEEAGSQPQDSGELDKGQGPPKEEHPDPPGNDGLPKVAPGPLLPGGSTPDCPSLHPQQESEAGERLHPDPLSFKSASESSRCSLEVSLNSPSAASSPGLMMSVSPVPSSSAPISPSPPGAPPAKVPSASPTADMAGALHPSAKVNPNLQRRHEKMANLNNIIYRLERAANREEALEWEF

SEQ ID NO: 737862 - protein, 1156 aa, Homo sapiens
MVRVCTYSRRYQGTVSEAIEKLEEKLQAQSDYEEIKTELSILKAMKLASSTCSLPQGMAKPEDSLLIAKEAFFPTQKFLLEKPSLLASPEEDPSEDDSIKDSLGTEQSYPSPQQLPPPPGPEDPLSPSPGQPLLGPSLGPDGTRTFSLSPFPSLASGERLMMPPAAFKGEAGGLLVFPPAFYGAKPPTAPATPAPGPEPLGGPEPADGGGGGAAGPGAEEEQLDTAEIAFQVKEQLLKHNIGQRVFGHYVLGLSQGSVSEILARPKPWRKLTVKGKEPFIKMKQFLSDEQNVLALRTIQVRQRGSITPRIRTPETGSDDAIKSILEQAKKEIESQKGGEPKTSVAPLSIANGTTPASTSEDAIKSILEQARREMQAQQQALLEMEVAPRGRSVPPSPPERPSLATASQNGAPALVKQEEGSGGPAQAPLPVLSPAAFVQSIIRKVKSEIGDAGYFDHHWASDRGLLSRPYASVSPSLSSSSSSGYSGQPNGRAWPRGDEAPVPPEDEAAAGAEDEPPRTGELKAEGATAEAGARLPYYPAYVPRTLKPTVPPLTPEQYELYMYREVDTLELTRQVKEKLAKNGICQRIFGEKVLGLSQGSVSDMLSRPKPWSKLTQKGREPFIRMQLWLSDQLGQAVGQQPGASQASPTEPRSSPSPPPSPTEPEKSSQEPLSLSLESSKENQQPEGRSSSSLSGKMYSGSQAPGGIQEIVAMSPELDTYSITKRVKEVLTDNNLGQRLFGESILGLTQGSVSDLLSRPKPWHKLSLKGREPFVRMQLWLNDPHNVEKLRDMKKLEKKAYLKRRYGLISTGSDSESPATRSECPSPCLQPQDLSLLQIKKPRVVLAPEEKEALRKAYQLEPYPSQQTIELLSFQLNLKTNTVINWFHNYRSRMRREMLVEGTQDEPDLDPSGGPGILPPGHSHPDPTPQSPDSETEDQKPTVKELELQEGPEENSTPLTTQDKAQVRIKQEQMEEDAEEEAGSQPQDSGELDKGQGPPKEEHPDPPGNDGLPKVAPGPLLPGGSTPDCPSLHPQQESEAGERLHPDPLSFKSASESSRCSLEVSLNSPSAASSPGLMMSVSPVPSSSAPISPSPPGAPPAKVPSASPTADMAGALHPSAKVNPNLQRRHEKMANLNNIIYRLERAANREEALEWEF

SEQ ID NO: 737863 - protein, 124 aa, Homo sapiens
MAANVGSMFQYWKRFDLRRLQKELNSVASELSARQEESEHSHKHLIELRREFKKNVPEEIREMVAPVLKSFQAEVVALSKRSQEAEAAFLSVYKQLIEAPGKLFVEILLPATRSHTSPDSTFLF

SEQ ID NO: 737864 - protein, 48 aa, Homo sapiens
MVCHGPGGLGTAWRAARLAEATLEEAAAFPAWGSSRAWVRGVSRRDPS

SEQ ID NO: 737865 - protein, 407 aa, Homo sapiens
MLLSVTSRPGISTFGYNRNNKKPYVSLAQQMAPPSPSNSTPNSSSGSNGNDQLSKTNLYIRGLQPGTTDQDLVKLCQPYGKIVSTKAILDKTTNKCKGYGFVDFDSPSAAQKAVTALKASGVQAQMAKQQEQDPTNLYISNLPLSMDEQELEGMLKPFGQVISTRILRDTSGTSRGVGFARMESTEKCEAIITHFNGKYIKTPPGVPAPSDPLLCKFADGGPKKRQNQGKFVQNGRAWPRNADMGVMALTYDPTTALQNGFYPAPYNITPNRMLAQSALSPYLSSPVSSYQRVTQTSPLQVPNPSWMHHHSYLMQPSGSVLTPGMDHPISLQPASMMGPLTQQLGHLSLSSTGTYMPTAAAMQGAYISQYTPVPSSSVSVEESSGQQNQVAVDAPSEHGVYSFQFNK

SEQ ID NO: 737866 - protein, 136 aa, Homo sapiens
MALSQKEANDSDVQPSGAQRAEAFVRAFLKRSTPRMSPQAREDQMQRKGGVLEYFTRHKRKEKKKAKASLARQGEEVRLFCIEPEPPRVQAFSLSSWTLENSHIRTCAEGLKAETPAHDELRASSFGELYGAIYLG

SEQ ID NO: 737867 - protein, 282 aa, Homo sapiens
MAKQQEQDPTNLYISNLPLSMDEQELEGMLKPFGQVISTRILRDTSGTSRGVGFARMESTEKCEAIITHFNGKYIKTPPGVPAPSDPLLCKFADGGPKKRQNQGKFVQNGRAWPRNADMGVMALTYDPTTALQNGFYPAPYNITPNRMLAQSALSPYLSSPVSSYQRVTQTSPLQVPNPSWMHHHSYLMQPSGSVLTPGMDHPISLQPASMMGPLTQQLGHLSLSSTGTYMPTAAAMQGAYISQYTPVPSSSVSVEESSGQQNQVAVDAPSEHGVYSFQFNK

SEQ ID NO: 737868 - protein, 226 aa, Homo sapiens [sequence omitted]

SEQ ID NO: 737869 - protein, 282 aa, Homo sapiens; identical to SEQ ID NO: 737867

SEQ ID NO: 737870 - protein, 407 aa, Homo sapiens; identical to SEQ ID NO: 737865

SEQ ID NO: 737871 - protein, 437 aa, Homo sapiens
MLLSVTSRPGISTFGYNRNNKKPYVSLAQQMAPPSPSNSTPNSSSGSNGNDQLSKTNLYIRGLQPGTTDQDLVKLCQPYGKIVSTKAILDKTTNKCKGYGFVDFDSPSAAQKAVTALKASGVQAQMAKQQEQDPTNLYISNLPLSMDEQELEGMLKPFGQVISTRILRDTSGTSRGVGFARMESTEKCEAIITHFNGKYIKTPPGVPAPSDPLLCKFADGGPKKRQNQGKFVQNGRAWPRNADMGVMALTYDPTTALQNGFYPAPYNITPNRMLAQSALSPYLSSPVSSYQRVTQTSPLQVPNPSWMHHHSYLMQPSGSVLTPGMDHPISLQPASMMGPLTQQLGHLSLSSTGTYMPTAAAMQGAYISQYTPVPSSSVSVEVRVLSFLWIEIRKMNGGRFPPDQDLSLTMMLILCSQIAGRYTKNVGRMCSLRQHAY

SEQ ID NO: 737872 - protein, 102 aa, Homo sapiens [sequence omitted]

SEQ ID NO: 737873 - protein, 896 aa, Homo sapiens
MNYVGQLAGQVIVTVKELYKGINQATLSGCIDVIVVQQQDGSYQCSPFHVRFGKLGVLRSKEKVIDIEINGSAVDLHMKLGDNGEAFFVEETEEEYEKLPAYLATSPIPTEDQFFKDIDTPLVKSGGDETPSQSSDISHVLETETIFTPSSVKKKKRRRKKYKQDSKKEEQAASAAAEDTCDVGVSSDDDKGAQAARGSSNASLKEEECKEPLLFHSGDHYPLSDGDWSPLETTYPQTACPKSDSELEVKPAESLLRSESHMEWTWGGFPESTKVSKRERSDHHPRTATITPSENTHFRVIPSEDNLISEVEKDASMEDTVCTIVKPKPRALGTQMSDPTSVAELLEPPLESTQISSMLDADHLPNAALAEAPSESKPAAKVDSPSKKKGVHKRSQHQGPDDIYLDDLKGLEPEVAALYFPKSESEPGSRQWPESDTLSGSQSPQSVGSAAADSGTECLSDSAMDLPDVTLSLCGGLSENGEISKEKFMEHIITYHEFAENPGLIDNPNLVIRIYNRYYNWALAAPMILSLQVFQKSLPKATVESWVKDKMPKKSGRWWFWRKRESMTKQLPESKEGKSEAPPASDLPSSSKEPAGARPAENDSSSDEGSQELEESITVDPIPTEPLSHGSTTSYKKSLRLSSDQIAKLKLHDGPNDVVFSITTQYQGTCRCAGTIYLWNWNDKIIISDIDGTITKSDALGQILPQLGKDWTHQGIAKLYHSINENGYKFLYCSARAIGMADMTRGYLHWVNDKGTILPRGPLMLSPSSLFSAFHREVIEKKPEKFKIECLNDIKNLFAPSKQPFYAAFGNRPNDVYAYTQVGVPDCRIFTVNPKGELIQERTKGNKSSYHRLSELVEHVFPLLSKEQNSAFPCPEFSSFCYWRDPIPEVDLDDLS

SEQ ID NO: 737874 - protein, 124 aa, Homo sapiens [sequence omitted]

SEQ ID NO: 737875 - protein, 918 aa, Homo sapiens
QSSRRLPSAARWPGAEPLWSQTMNYVGQLAGQVIVTVKELYKGINQATLSGCIDVIVVQQQDGSYQCSPFHVRFGKLGVLRSKEKVIDIEINGSAVDLHMKLGDNGEAFFVEETEEEYEKLPAYLATSPIPTEDQFFKDIDTPLVKSGGDETPSQSSDISHVLETETIFTPSSVKKKKRRRKKYKQDSKKEEQAASAAAEDTCDVGVSSDDDKGAQAARGSSNASLKEEECKEPLLFHSGDHYPLSDGDWSPLETTYPQTACPKSDSELEVKPAESLLRSESHMEWTWGGFPESTKVSKRERSDHHPRTATITPSENTHFRVIPSEDNLISEVEKDASMEDTVCTIVKPKPRALGTQMSDPTSVAELLEPPLESTQISSMLDADHLPNAALAEAPSESKPAAKVDSPSKKKGVHKRSQHQGPDDIYLDDLKGLEPEVAALYFPKSESEPGSRQWPESDTLSGSQSPQSVGSAAADSGTECLSDSAMDLPDVTLSLCGGLSENGEISKEKFMEHIITYHEFAENPGLIDNPNLVIRIYNRYYNWALAAPMILSLQVFQKSLPKATVESWVKDKMPKKSGRWWFWRKRESMTKQLPESKEGKSEAPPASDLPSSSKEPAGARPAENDSSSDEGSQELEESITVDPIPTEPLSHGSTTSYKKSLRLSSDQIAKLKLHDGPNDVVFSITTQYQGTCRCAGTIYLWNWNDKIIISDIDGTITKSDALGQILPQLGKDWTHQGIAKLYHSINENGYKFLYCSARAIGMADMTRGYLHWVNDKGTILPRGPLMLSPSSLFSAFHREVIEKKPEKFKIECLNDIKNLFAPSKQPFYAAFGNRPNDVYAYTQVGVPDCRIFTVNPKGELIQERTKGNKSSYHRLSELVEHVFPLLSKEQNSAFPCPEFSSFCYWRDPIPEVDLDDLS

SEQ ID NO: 737876 - protein, 933 aa, Homo sapiens
MFYLEDDKEDEVVCKGSLSKTQDVYHDKSPPGILSQTMNYVGQLAGQVIVTVKELYKGINQATLSGCIDVIVVQQQDGSYQCSPFHVRFGKLGVLRSKEKVIDIEINGSAVDLHMKLGDNGEAFFVEETEEEYEKLPAYLATSPIPTEDQFFKDIDTPLVKSGGDETPSQSSDISHVLETETIFTPSSVKKKKRRRKKYKQDSKKEEQAASAAAEDTCDVGVSSDDDKGAQAARGSSNASLKEEECKEPLLFHSGDHYPLSDGDWSPLETTYPQTACPKSDSELEVKPAESLLRSESHMEWTWGGFPESTKVSKRERSDHHPRTATITPSENTHFRVIPSEDNLISEVEKDASMEDTVCTIVKPKPRALGTQMSDPTSVAELLEPPLESTQISSMLDADHLPNAALAEAPSESKPAAKVDSPSKKKGVHKRSQHQGPDDIYLDDLKGLEPEVAALYFPKSESEPGSRQWPESDTLSGSQSPQSVGSAAADSGTECLSDSAMDLPDVTLSLCGGLSENGEISKEKFMEHIITYHEFAENPGLIDNPNLVIRIYNRYYNWALAAPMILSLQVFQKSLPKATVESWVKDKMPKKSGRWWFWRKRESMTKQLPESKEGKSEAPPASDLPSSSKEPAGARPAENDSSSDEGSQELEESITVDPIPTEPLSHGSTTSYKKSLRLSSDQIAKLKLHDGPNDVVFSITTQYQGTCRCAGTIYLWNWNDKIIISDIDGTITKSDALGQILPQLGKDWTHQGIAKLYHSINENGYKFLYCSARAIGMADMTRGYLHWVNDKGTILPRGPLMLSPSSLFSAFHREVIEKKPEKFKIECLNDIKNLFAPSKQPFYAAFGNRPNDVYAYTQVGVPDCRIFTVNPKGELIQERTKGNKSSYHRLSELVEHVFPLLSKEQNSAFPCPEFSSFCYWRDPIPEVDLDDLS

SEQ ID NO: 737877 - protein, 580 aa, Homo sapiens
MEDTVCTIVKPKPRALGTQMSDPTSVAELLEPPLESTQISSMLDADHLPNAALAEAPSESKPAAKVDSPSKKKGVHKRSQHQGPDDIYLDDLKGLEPEVAALYFPKSESEPGSRQWPESDTLSGSQSPQSVGSAAADSGTECLSDSAMDLPDVTLSLCGGLSENGEISKEKFMEHIITYHEFAENPGLIDNPNLVIRIYNRYYNWALAAPMILSLQVFQKSLPKATVESWVKDKMPKKSGRWWFWRKRESMTKQLPESKEGKSEAPPASDLPSSSKEPAGARPAENDSSSDEGSQELEESITVDPIPTEPLSHGSTTSYKKSLRLSSDQIAKLKLHDGPNDVVFSITTQYQGTCRCAGTIYLWNWNDKIIISDIDGTITKSDALGQILPQLGKDWTHQGIAKLYHSINENGYKFLYCSARAIGMADMTRGYLHWVNDKGTILPRGPLMLSPSSLFSAFHREVIEKKPEKFKIECLNDIKNLFAPSKQPFYAAFGNRPNDVYAYTQVGVPDCRIFTVNPKGELIQERTKGNKSSYHRLSELVEHVFPLLSKEQNSAFPCPEFSSFCYWRDPIPEVDLDDLS

SEQ ID NO: 737878 - protein, 918 aa, Homo sapiens; identical to SEQ ID NO: 737875

SEQ ID NO: 737879 - protein, 295 aa, Homo sapiens
MKTSPLTLGRRKRESVAVSYLRTHTSGARETPLSEAPQWVRLHGMALQLLEAVIKSPFKSVPPPISYWQLIVNQIGKRCMCLIPDSFSCFYRLLRSDALGQILPQLGKDWTHQGIAKLYHSINENGYKFLYCSARAIGMADMTRGYLHWVNDKGTILPRGPLMLSPSSLFSAFHREVIEKKPEKFKIECLNDIKNLFAPSKQPFYAAFGNRPNDVYAYTQVGVPDCRIFTVNPKGELIQERTKGNKSSYHRLSELVEHVFPLLSKEQNSAFPCPEFSSFCYWRDPIPEVDLDDLS

SEQ ID NO: 737880 - protein, 157 aa, Homo sapiens [sequence omitted]

SEQ ID NO: 737881 - protein, 918 aa, Homo sapiens; identical to SEQ ID NO: 737875

SEQ ID NO: 737882 - protein, 918 aa, Homo sapiens; identical to SEQ ID NO: 737875

SEQ ID NO: 737883 - protein, 863 aa, Homo sapiens
QSSRRLPSAARWPGAEPLWSQTMNYVGQLAGQVIVTVKELYKGINQATLSGCIDVIVVQQQDGSYQCSPFHVRFGKLGVLRSKEKVIDIEINGSAVDLHMKLGDNGEAFFVEETEEEYEKLPAYLATSPIPTEDQFFKDIDTPLVKSGGDETPSQSSDISHVLETETIFTPSSVKKKKRRRKKYKQDSKKEEQAASAAAEDTCDVGVSSDDDKGAQAARGSSNASLKEEECKEPLLFHSGDHYPLSDGDWSPLETTYPQTACPKSDSELEVKPAESLLRSESHMEWTWGGFPESTKVSKRERSDHHPRTATITPSENTHFRVIPSEDNLISEVEKDASMEDTVCTIVKPKPRALGTQMSDPTSVAELLEPPLESTQISSMLDADHLPNAALAEAPSESKPAAKVDSPSKKKGVHKRSQHQGPDDIYLDDLKGLEPEVAALYFPKSESEPGSRQWPESDTLSGSQSPQSVGSAAADSGTECLSDSAMDLPDVTLSLCGGLSENGEISKEKFMEHIITYHEFAENPGLIDNPNLVIRIYNRYYNWALAAPMILSLQVFQKSLPKATVESWVKDKMPKKSGRWWFWRKRESMTKQLPESKEGKSEAPPASDLPSSSKEPAGARPAENDSSSDEGSQELEESITVDPIPTEPLSHGSTTSYKKSLRLSSDQIAKLKLHDGPNDVVFSITTQYQGTCRCAGTIYLWNWNDKIIISDIDGTITKSDALGQILPQLGKDWTHQGIAKLYHSINENGYKFLYCSARAIGMADMTRGYLHWVNDKGTILPRGPLMLSPSSLFSAFHRYLSGRQPSAHRPSMWAGLGPRWGDVWEQKSDVGAATPLPVLWSLVVSYHILLTCHVAGLVKKGRF

SEQ ID NO: 737884 - protein, 427 aa, Homo sapiens
  misc_feature (412)..(412): Xaa can be any naturally occurring amino acid
  misc_feature (420)..(420): Xaa can be any naturally occurring amino acid
  misc_feature (427)..(427): Xaa can be any naturally occurring amino acid
QSSRRLPSAARWPGAEPLWSQTMNYVGQLAGQVIVTVKELYKGINQATLSGCIDVIVVQQQDGSYQCSPFHVRFGKLGVLRSKEKVIDIEINGSAVDLHMKLGDNGEAFFVEETEEEYEKLPAYLATSPIPTEDQFFKDIDTPLVKSGGDETPSQSSDISHVLETETIFTPSSVKKKKRRRKKYKQDSKKEEQAASAAAEDTCDVGVSSDDDKGAQAARGSSNASLKEEECKEPLLFHSGDHYPLSDGDWSPLETTYPQTACPKSDSELEVKPAESLLRSESHMEWTWGGFPESTKVSKRERSDHHPRTATITPSENTHFRVIPSEDNLISEVEKDASMEDTVCTIVKPKPRALGTQMSDPTSVAELLEPPLESTQISSMLDADHLPNAALAEAPSESKPAAKVDSPSKKKXSQRTTQDXELPVLRX

SEQ ID NO: 737885 - protein, 112 aa, Homo sapiens
MFYLEDDKEDEVVCKGSLSKTQDVYHDKSPPGILSQTMNYVGQLAGQVIVTVKELYKGINQATLSGCIDVIVVQQQDGSYQCSPFHVRFGKLGVLRSKEKVVSVLKERKSHP

SEQ ID NO: 737886 - protein, 122 aa, Homo sapiens
GVFSFRNGYKFLYCSARAIGMADMTRGYLHWVNDKGTILPRGPLMLSPSSLFSAFHRYLSGRQPSAHRPSMWAGLGPRWGDVWEQKSDVGAATPLPVLWSLVVSYHILLTCHVAGLVKKGRF

SEQ ID NO: 737887 - protein, 171 aa, Homo sapiens
AEKATPLAPKGAAPGAVQPVAGAEAAPAATLAALGGRRPGPPEEPPRELESVPSKLGEPPPLGEGGGGGGEGGGAGGGSGEREGGAPQPPPPRGWRGKGVRAQQRGGSGGEGASPSPSSSSAGKTPGTGSRNSGSGVAGGGSGGGGSYWKEGCLQSELIQFHLKKERAAAA

SEQ ID NO: 737888 - protein, 111 aa, Homo sapiens
MKWPFVPEKWQYKQAVGPEDKTNLKDVIGAGLQQLLASLRASILARDCAAAAAIVFLVDRFLYGLDVSGKLLQVAKGLHKLQPATPIAPQVVIRQARISVNSGSHPAKHSM

SEQ ID NO: 737889 - protein, 150 aa, Homo sapiens
AECHELMWKFSQMMMIERRKQQNNMFSVTSFTYERERDRKAVGFVVLMKMPPTLSLALSLPAFPPGSRCSTLFLQASLRASILARDCAAAAAIVFLVDRFLYGLDVSGKLLQVAKGLHKLQPATPIAPQVVIRQARISVNSGSHPAKHSM

SEQ ID NO: 737890 - protein, 111 aa, Homo sapiens
MNNQKVVAVLLQECKQVLDQLLLEAPDVSEEDKSEDQRCRALLPSELRTLIQEAKEMKWPFVPEKWQYKQAVGPEDKTNLKDVIGAGLQQLLVGRATPPVPLISPSEAFRL

SEQ ID NO: 737891 - protein, 1244 aa, Homo sapiens [sequence omitted]

SEQ ID NO: 737892 - protein, 1244 aa, Homo sapiens [sequence omitted]

SEQ ID NO: 737893 - protein, 1100 aa, Homo sapiens
MFKANCVAFGCCFSGKLLKAEYILSSLISNNGATGTWLYRNESDKVLVQSVCIQIRGQILQKLGMWYEAAELIWASIVGYLALPQPDKKGLSTSLGILADIFVSMSKNDYEKFKNNPQINLSLLKEFDHHLLSAAEACKLAAAFSAYTPLFVLTAVNIRGTCLLSYSSSNDCPPELKNLHLCEAKEAFEIGLLTKRDDEPVTGKQELHSFVKAAFGLTTVHRRLHGETGTVHAASQLCKEAMGKLYNFSTSSRSQDREALSQEVMSVIAQVKEHLQVQSFSNVDDRSYVPESFECRLDKLILHGQGDFQKILDTYSQHHTSVCEVFESDCGNNKNEQKDAKTGVCITALKTEIKNIDTVSTTQEKPHCQRDTGISSSLMGKNVQRELRRGGRRNWTHSDAFRVSLDQDVETETEPSDYSNDEGAVFNKSLSGSQTSSAWSNLSGFSSSASWEEVNYHVDDRSARKEPGKEHLVDTQCSTALSEELENDREGRAMHSLRSQLHDLSLQEPNNDNLEPSQNQPQQQMPLTPFSPHNTPGIFLAPGAGLLEGAPEGIQEVRNMGPRNTSAHSRPSYRSASWSSDSGRPKNIGTHPSVQKEEAFEIIVEFPETNCDVKDRQGKEQGEEISERGAGPTFKASPSWVDPEGETAESTEDAPLDFHRVLHNSLGNISMLPCSSFTPNWPVQNPDSRKSGGPVAEQGIDPDASTVDEEGQLLDSMDVPCTNGHGSHRLCILRQPPGQRAETPNSSVSGNILFPVLSEDCTTTEEGNQPGNMLNCSQNSSSSSVWWLKSPAFSSGSSEGDSPWSYLNSSGSSWVSLPGKMRKEILEARTLQPDDFEKLLAGVRHDWLFQRLENTGVFKPSQLHRAHSALLLKYSKKSELWTAQETIVYLGDYLTVKKKGRQRNAFWVHHLHQEEILGRYVGKDYKEQKGLWHHFTDVERQMTAQHYVTEFNKRLYEQNIPTQIFYIPSTILLILEDKTIKGCISVEPYILGEFVKLSNNTKVVKTEYKATEYGLAYGHFSYEFSNHRDVVVDLQGWVTGNGKGLIYLTDPQIHSVDQKVFTTNFGKRGIFYFFNNQHVECNEICHRLSLTRPSMEKPCT

SEQ ID NO: 737894 - protein, 1226 aa, Homo sapiens
MNNQLEAPDVSEEDKSEDQRCRALLPSELRTLIQEAKEMKWPFVPEKWQYKQAVGPEDKTNLKDVIGAGLQQLLASLRASILARDCAAAAAIVFLVDRFLYGLDVSGKLLQVAKGLHKLQPATPIAPQVVIRQARISVNSGKLLKAEYILSSLISNNGATGTWLYRNESDKVLVQSVCIQIRGQILQKLGMWYEAAELIWASIVGYLALPQPDKKGLSTSLGILADIFVSMSKNDYEKFKNNPQINLSLLKEFDHHLLSAAEACKLAAAFSAYTPLFVLTAVNIRGTCLLSYSSSNDCPPELKNLHLCEAKEAFEIGLLTKRDDEPVTGKQELHSFVKAAFGLTTVHRRLHGETGTVHAASQLCKEAMGKLYNFSTSSRSQDREALSQEVMSVIAQVKEHLQVQSFSNVDDRSYVPESFECRLDKLILHGQGDFQKILDTYSQHHTSVCEVFESDCGNNKNEQKDAKTGVCITALKTEIKNIDTVSTTQEKPHCQRDTGISSSLMGKNVQRELRRGGRRNWTHSDAFRVSLDQDVETETEPSDYSNDEGAVFNKSLSGSQTSSAWSNLSGFSSSASWEEVNYHVDDRSARKEPGKEHLVDTQCSTALSEELENDREGRAMHSLRSQLHDLSLQEPNNDNLEPSQNQPQQQMPLTPFSPHNTPGIFLAPGAGLLEGAPEGIQEVRNMGPRNTSAHSRPSYRSASWSSDSGRPKNIGTHPSVQKEEAFEIIVEFPETNCDVKDRQGKEQGEEISERGAGPTFKASPSWVDPEGETAESTEDAPLDFHRVLHNSLGNISMLPCSSFTPNWPVQNPDSRKSGGPVAEQGIDPDASTVDEEGQLLDSMDVPCTNGHGSHRLCILRQPPGQRAETPNSSVSGNILFPVLSEDCTTTEEGNQPGNMLNCSQNSSSSSVWWLKSPAFSSGSSEGDSPWSYLNSSGSSWVSLPGKMRKEILEARTLQPDDFEKLLAGVRHDWLFQRLENTGVFKPSQLHRAHSALLLKYSKKSELWTAQETIVYLGDYLTVKKKGRQRNAFWVHHLHQEEILGRYVGKDYKEQKGLWHHFTDVERQMTAQHYVTEFNKRLYEQNIPTQIFYIPSTILLILEDKTIKGCISVEPYILGEFVKLSNNTKVVKTEYKATEYGLAYGHFSYEFSNHRDVVVDLQGWVTGNGKGLIYLTDPQIHSVDQKVFTTNFGKRGIFYFFNNQHVECNEICHRLSLTRPSMEKPCT

SEQ ID NO: 737895 - protein, 211 aa, Homo sapiens [sequence omitted]

SEQ ID NO: 737896 - protein, 167 aa, Homo sapiens
MNNQKVVAVLLQECKQVLDQLLLEAPDVSEEDKSEDQRCRALLPSELRTLIQEAKEMKWPFVPEKWQYKQAVGPEDKTNLKDVIGAGLQQLLASLRASILARDCAAAAAIVFLVDRFLYGLDVSGKLLQVAKGLHKLQPATPIAPQVVIRQARISVNSGSHPAKHSM

SEQ ID NO: 737897 - protein, 110 aa, Homo sapiens
MNNQKVVAVLLQECKQVLDQLLLEAPDVSEEDKSEDQRCRALLPSELRTLIQEAKEMKWPFVPEKWQYKQAVGPEDKTNLKDVIGAGLQQLLAYLRLHPRSGLGTVHELD

SEQ ID NO: 737898 - protein, 440 aa, Homo sapiens
KTEYMAFPKPFESSSSIGAEKPRNKKLPEEEVESSRTPWLYEQEGEVEKPFIKTGFSVSVEKSTSSNRKNQLDTNGRRRQFDEESLESFSSMPDPVDPTTVTKTFKTRKASAQASLASKDKTPKSKSKKRNSTQLKSRVKNIKTGSDFSMFEALRDTIYSEVATLISQNESRPHFLIELFHELQLLNTDYLRQRALYALQDIVSRHISESHEKGENVKSVNSGTWIASNSELTPSESLATTDDETFEKNFERETHKISEQNDADNASVLSVSSNFEPFATDDLGNTVIHLDQALARMREYERMKTEAESNSNMRCTCRIIEDGDGAGAGTTVNNLEETPVIENRSSQQPVSEVSTIPCPRIDTQQLDRQIKAIMKEVIPFLKEDPKWEFPRKNLVLGKTLGEGEFGKVVKATAFHLKGRAGYTTVAVKMLKENASPSELR

SEQ ID NO: 737899 - protein, 514 aa, Homo sapiens
KTEYMAFPKPFESSSSIGAEKPRNKKLPEEEVESSRTPWLYEQEGEVEKPFIKTGFSVSVEKSTSSNRKNQLDTNGRRRQFDEESLESFSSMPDPVDPTTVTKTFKTRKASAQASLASKDKTPKSKSKKRNSTQLKSRVKNIRYESASMSSTCEPCKSRNRHSAQTEEPVQAKVFSRKNHEQLEKIIKCNRSTEISSAHARRILQQSNRNACNEAPETGSDFSMFEALRDTIYSEVATLISQNESRPHFLIELFHELQLLNTDYLRQRALYALQDIVSRHISESHEKGENVKSVNSGTWIASNSELTPSESLATTDDETFEKNFERETHKISEQNDADNASVLSVSSNFEPFATDDLGNTVIHLDQALARMREYERMKTEAESNSNMRCTCRIIEDGDGAGAGTTVNNLEETPVIENRSSQQPVSEVSTIPCPRIDTQQLDRQIKAIMKEVIPFLKEDPKWEFPRKNLVLGKTLGEGEFGKVVKATAFHLKGRAGYTTVAVKMLKENASPSELR

SEQ ID NO: 737900 - protein, 411 aa, Homo sapiens
KTEYMAFPKPFESSSSIGAEKPRNKKLPEEEVESSRTPWLYEQEGEVEKPFIKTGFSVSVEKSTSSNRKNQLDTNGRRRQFDEESLESFSSMPDPVDPTTVTKTFKTRKASAQASLASKDKTPKSKSKKRNSTQLKSRVKNIKTGSDFSMFEALRDTIYSEVATLISQNESRPHFLIELFHELQLLNTDYLRQRALYALQDIVSRHISESHEKGENVKSVNSGTWIASNSELTPSESLATTDDETFEKNFERETHKISEQNDADNASVLSVSSNFEPFATDDLGNTVIHLDQALARMREYERMKTEAESNSNMRCTCRIIEDGDGAGAETPVIENRSSQQPVSEVSTIPCPRIDTQQLDRQIKAIMKEVIPFLKEHMDEVCSSQLLTSVRRMVLTLTQQNDESKEFVKFFS

SEQ ID NO: 737901 - protein, 419 aa, Homo sapiens
KTEYMAFPKPFESSSSIGAEKPRNKKLPEEEVESSRTPWLYEQEGEVEKPFIKTGFSVSVEKSTSSNRKNQLDTNGRRRQFDEESLESFSSMPDPVDPTTVTKTFKTRKASAQASLASKDKTPKSKSKKRNSTQLKSRVKNIKTGSDFSMFEALRDTIYSEVATLISQNESRPHFLIELFHELQLLNTDYLRQRALYALQDIVSRHISESHEKGENVKSVNSGTWIASNSELTPSESLATTDDETFEKNFERETHKISEQNDADNASVLSVSSNFEPFATDDLGNTVIHLDQALARMREYERMKTEAESNSNMRCTCRIIEDGDGAGAGTTVNNLEETPVIENRSSQQPVSEVSTIPCPRIDTQQLDRQIKAIMKEVIPFLKEHMDEVCSSQLLTSVRRMVLTLTQQNDESKEFVKFFS

SEQ ID NO: 737902 - protein, 164 aa, Homo sapiens
MLSASFSAWCMCSISSCCCACSANSSISVFWFPHEYITGQRLRDDELRGLRVGKQGRRLGPGACAALAALLGPSGTVRWTWSPLEYGFSHGLLYRFDWKIHLPTAFSHSDGDTEVQRKRHLSNVTDLGGDLRPIMPRGHLSTQFFFGGAGGGDRVSLCHQAGVQ

SEQ ID NO: 737903 - protein, 71 aa, Homo sapiens
DREGARRSAALSPTQLTSTPSNTTVSFLSYNPPASDDYMKAGEGKEPGALQRPKPMGKAEKLQHSHLLVIQ

SEQ ID NO: 737904 - protein, 114 aa, Homo sapiens
LVMLIPNHLVPSTGGGSLNPFSEDVKTNPDGCAYLPSFWPFSQSPLEQSRASRAFLEDLPWRERERLDGILNKNDRLCFKLNKNKPSEEYIEVACMLPLERFIFICLSMYKGGR

SEQ ID NO: 737905 - protein, 97 aa, Homo sapiens
CQARELQRFSLGTMGSQRSTLCWDQCDRRWGQRRNCKARGTRSLNQARAGETGQGEVERKRRGWVFLPAVLPEAPCPEEAGYEGSRGTTGRGRGWTN

SEQ ID NO: 737906 - protein, 39 aa, Homo sapiens
EVWFLSAGLVTGGGLSLRGLAVAMSLHPPCQPGTGPIKT

SEQ ID NO: 737907 - protein, 122 aa, Homo sapiens
WLNVSADGDNVHLVLNVSEEQHFGLSLYWNQVQGPPKPRWHKNLTGPQIITLNHTDLVPCQTSWGPCSSLAPRVPGGSKRERSKCPGPFSQPWIATSIPRGLLRRDAGWDQGRDLGRGTGLK

SEQ ID NO: 737908 - protein, 73 aa, Homo sapiens
EKNLFQNLPCHRNPRVSLRTGLGHTDWLQNGIFSFFRSSGRRWTRKKKLEVVFGWAFISIGYQVHKNKTQAAN

SEQ ID NO: 737909 - protein, 193 aa, Homo sapiens
MDDFISQNLNTGNYSSSPGSATCRLLSVGYTHPLFSHCLLGGVDQLQSVICGQGVPSRSFRFQTPGVKDVLCAGGAGRPSHGGRRLLFPQDGTAPLWIASQMGHSEVVRVMLLRGADRDAARNDGTTALLKAANKGYNDVIKELLKFSPTLGILKNGTSALHAAVLSGNIKTVALLLEAGADPSLRNKVRWQN

SEQ ID NO: 737910 - protein, 102 aa, Homo sapiens
AVCGGCCRAGRRERAASEAAPLRNAESPGRVKGRGGQGAPGPKRAGSRSGGRGHVQDVLQEGNSTCQCCILGSQERKPGAAEAAVEQRPGGRGLQRQRTVVR

SEQ ID NO: 737911 - protein, 279 aa, Homo sapiens
MCRMSFKKETPLANAAFWAARRGNLALLKLLLNSGRVDVDCRDSHGTTLLMVAAYAGHIDCVRELVLQGADINLQRESGTTALFFAAQQGHNDVVRFLFGFGASTEFRTKDGGTALLAASQYGHMQVVETLLKHGANIHDQLYDGATALFLAAQGGYLDVIRLLLASGAKVNQPRQDGTAPLWIASQMGHSEVVRVMLLRGADRDAARNDGTTALLKAANKGYNDVIKELLKFSPTLGILKNGTSALHAAVLSGNIKTVALLLEAGADPSLRNKVRWQN

SEQ ID NO: 737912 - protein, 346 aa, Homo sapiens
MCRMSFKKETPLANAAFWAARRGNLALLKLLLNSGRVDVDCRDSHGTTLLMVAAYAGHIDCVRELVLQGADINLQRESGTTALFFAAQQGHNDVVRFLFGFGASTEFRTKDGGTALLAASQYGHMQVVETLLKHGANIHDQLYDGATALFLAAQGGYLDVIRLLLASGAKVNQPRQDGTAPLWIASQMGHSEVVRVMLLRGADRDAARNVSARVARPKSEAPGAPVWRKRVLTESAAHMGFLPTSFLEQENKVKDGTTALLKAANKGYNDVIKELLKFSPTLGILKNGTSALHAAVLSGNIKTVALLLEAGADPSLRNKANELPAELTKNERILRLLRSKEGPRKS

SEQ ID NO: 737913 - protein, 200 aa, Homo sapiens
MCRMSFKKETPLANAAFWAARRGNLALLKLLLNSGRVDVDCRDSHGTTLLMVAAYAGHIDCVRELVLQGADINLQREDGGTALLAASQYGHMQVVETLLKHGANIHDQLYDGATALFLAAQGGYLDVIRLLLASGAKVNQPRQDGTAPLWIASQMGHSEVVRVMLLRGADRDAARNVSARVARPKSEASRRACVEKTGLD

SEQ ID NO: 737914 - protein, 114 aa, Homo sapiens [sequence omitted]

SEQ ID NO: 737915 - protein, 137 aa, Homo sapiens
MGHSEVVRVMLLRGADRDAARNVSARVARPKSEAPGAPVWRKRVLTESAAHMGFLPTSFLEQENKVKDGTTALLKAANKGYNDVIKELLKFSPTLGILKNGTSALHAAVLSGNIKTVALLLEAGADPSLRNKVRWQN

SEQ ID NO: 737916 - protein, 315 aa, Homo sapiens
MGGSSPVTSKAIVDADGRIYIRNWQGGILSGGFEKNPKPIFTEGKNQLEIQNLQEDWDHFEPLLSSLLRRMPELETLEIMKLVNCPETFTPDMRCIMGESPAVQGYFVLAGMNSAGLSFGGGAGKYLAEWMVHGYPSENVWELDLKRFGALQSSRTFLRHRVMEVMPLMYDLKVPRWDFQTGRQLRTSPLYDRLDAQGARWMEKHGFERPKYFVPPDKDLLALEQSKTFYKPDWFDIVESEVKCCKEAVCVIDMSSFTKFEITVSIWEPKSNRLGNFTYLLNAFCFSSSKLIPDWVQWVMPVFPALWEAKGAWIT

SEQ ID NO: 737917 - protein, 134 aa, Homo sapiens
GLIFLTGYTRTGSIFLAQTQDRLISLKRINAGLNVIGIPSEIISPKKVAELHHLLNVHDLVGAMHVPEDAVVSSADVALALASAASQNGVQIYDRTSVLHVMVKKGQVTGVETDKGQIECQYFVNCAGQVGQHQ

SEQ ID NO: 737918 - protein, 336 aa, Homo sapiens
GLIFLTGYTRTGSIFLAQTQDRLISLKRINAGLNVIGIPSEIISPKKVAELHHLLNVHDLVGAMHVPEDAVVSSADVALALAVLPPKMWAYELGLSNEEPVSIPLHACEHFYLLTRPLETPLQSSTPTIVDADGRIYIRNWQGGILSGGFEKNPKPIFTEGKNQLEIQNLQEDWDHFEPLLSSLLRRMPELETLEIMKLVNCPETFTPDMRCIMGESPAVQGYFVLAGMNSAGLSFGGGAGKYLAEWMVHGYPSENVWELDLKRFGALQSSRTFLRHRVMEVMPLMYDLKVPRWDFQTGRQLRTSPLYDRLDAQGARWMEKHGFERPKYFVPPDKG

SEQ ID NO: 737919 - protein, 254 aa, Homo sapiens
GTYWEGGIRAVGFVHSPLLKNKGTVCKELVHITDWYPTLISLAEGQIDEDIQLDGYDIWETISEGLRSPRVDILHNIDPIYTKAKNGSWAAGYGIWNTAIQSAIRVQHWKLLTGNPGYSDWVPPQSFSNLGPNRWHNERITLSTGKSVWLFNITADPYERVDLSNRYPGIVKKLLRRLSQFNKTAVPVRYPPKDPRSNPRLNGGVWGPWYKEETKKKKPSKNQAEKKQKKSKKKKKKQQKAVSGSTCHSGVTCG

SEQ ID NO: 737920 - protein, 251 aa, Homo sapiens
GTYWEGGIRAVGFVHSPLLKNKGTVCKELVHITDWYPTLISLAEGQIDEDIQLDGYDIWETISEGLRSPRVDILHNIDPIYTKAKNGSWAAGYGIWNTAIQSAIRVQHWKLLTGNPGYSDWVPPQSFSNLGPNRWHNERITLSTGKSVWLFNITADPYERVDLSNRYPGIVKKLLRRLSQFNKTAVPVRYPPKDPRSNPRLNGGVWGPWYKEETKKKKPSKNQAEKKQKKSKKKKKKQQKAVSGKPANLAR

SEQ ID NO: 737921 - protein, 75 aa, Homo sapiens
EFNWLRPGQYMSAGPRSERESPERPLPPVFSAGLWEFAGCSECLGLRDSHLREIPGAVGGGMRVGGELQMDIVAC

SEQ ID NO: 737922 - protein, 315 aa, Homo sapiens
MSHSRGRCYIRRGHAYWEAQVGNSSWYLYDGEDDTPSYRGFLIFWGYIIVLNTMVPISLYVSVEVIRLGQSHFINWDLQMYYAEKDTPAKARTTTLNEQLGQIHYIFSDKTGTLTQNIMTFKKCCINGQIYGDHRDASQHNHNKIEQVDFSWNTYADGKLAFYDHYLIEQIQSGKEPEVRQFFFLLAVCHTVMVDRTDGQLNYQAASPDEGALVNAARNFGFAFLARTQNTITISELGTERTYNVLAILDFNSDRKRMSIIVRTPEGNIKLYCKGADTVIYERLHRMNPTKQETQDALDIFANETLRTLCLCYKE

SEQ ID NO: 737923 - protein, 118 aa, Homo sapiens
LGPAFTPWRSPSDPHRSLSRGLNNELCICFYSFSGISLASLLGQLNYQAASPDEGALVNAARNFGFAFLARTQNTITISELGTERTYNVLAILDFNSDRKRMSIIGKSPSESVYESLI

SEQ ID NO: 737924 - protein, 354 aa, Homo sapiens
LNFPFSGADTKIMKNSGKTRFKRTKIDYLMNYMVYTIFVVLILLSAGLAIGHAYWEAQVGNSSWYLYDGEDDTPSYRGFLIFWGYIIVLNTMVPISLYVSVEVIRLGQSHFINWDLQMYYAEKDTPAKARTTTLNEQLGQIHYIFSDKTGTLTQNIMTFKKCCINGQIYGDHRDASQHNHNKIEQVDFSWNTYADGKLAFYDHYLIEQIQSGKEPEVRQFFFLLAVCHTVMVDRTDGQLNYQAASPDEGALVNAARNFGFAFLARTQNTITISELGTERTYNVLAILDFNSDRKRMSIIVRTPEGNIKLYCKGADTVIYERLHRMNPTKQETQDALDIFANETLRTLCLCYKEI

SEQ ID NO: 737925 - protein, 206 aa, Homo sapiens
MPLFFLILDIFLFPFNSWFLPKRSHVRTSLGMCLQEKCGLPSSPWMPVGSLPHPGCLWAAFLTLDACGQPSSPWMPVGCLPHPGCLWAAFLTLDACGQPSSPWMPVTWFPWGLPKLRDPKPPSNLMTRLVSEHTCVVPEPLTNPLCNPAHAFPILKGPAHRPAHVFPLPLLCPYLVGSCPFWALVWHFTHKCVLWVVSGPPPAVRG

SEQ ID NO: 737926 - protein, 206 aa, Homo sapiens; identical to SEQ ID NO: 737925

SEQ ID NO: 737927 - protein, 196 aa, Homo sapiens
MPLFFLILDIFLFPFNSWFLPKRSHVRTSLGMCLQEKCGLPSSPWMPVGAFLTLDACGQPSSPWMPVGCLPHPGCLWAAFLTLDACGQPSSPWMPVTWFPWGLPKLRDPKPPSNLMTRLVSEHTCVVPEPLTNPLCNPAHAFPILKGPAHRPAHVFPLPLLCPYLVGSCPFWALVWHFTHKCVLWVVSGPPPAVRG

SEQ ID NO: 737928 - protein, 206 aa, Homo sapiens; identical to SEQ ID NO: 737925

SEQ ID NO: 737929 - protein, 206 aa, Homo sapiens; identical to SEQ ID NO: 737925

SEQ ID NO: 737930 - protein, 68 aa, Homo sapiens
PLDFSQSHLSLGPTTTWAAPVDIFSRTPVNFRRAQFHNPLASRPTALLPPPPRGIPNDGEPQLYCEIF

SEQ ID NO: 737931 - protein, 100 aa, Homo sapiens
HSTQSKVGAIHGGRGRLETFNRAKEHKETKQQRPHQHRGPRSTNVEFDCLRDSTNDSHVSDRPPRLWREGWRRHNGWFMFWLSKSHQELWVKQADDNEEE

SEQ ID NO: 737932 - protein, 109 aa, Homo sapiens
HAPPCLANVVFLVEMGFLHVGQAGLQLPTSGDLPASVSQSAEITGMSHCTGPASIFLTDLVAFSASNSSGHISMLSFVPVLPVGIAPWKGLGLQLAELLLLRPCVRSLG

SEQ ID NO: 737933 - protein, 813 aa, Homo sapiens
LLIMVTNKMTAAFRNPSGKQVATDKVAEKLSSTLSWVKNTVSHTVSQMASQVASPSTSLHTTSSSTTLSTPALSPSSPSQLSPDVLELLAKLEEQNILLETDSKSLRSVNGSRRNSGSSLVSSSSASSNLSHLEEDSWILWGRIVNEWEDVRKKKEKQVKELVHKGIPHHFRAIVWQLLCSAQSMPIKDQYSELLKMTSPCEKLIRRDIARTYPEHNFFKEKDSLGQEVLFNVMKAYSLVDREVGYCQGSAFIVGLLLMQMPEEEAFCVFVKLMQDYRLRELFKPSMAELGLCMYQFECMIQEHLPELFVHFQSQSFHTSMYASSWFLTIFLTTFPLPVATRIFDIFMSEGLEIVFRVGLALLQMNQAELMQLDMEGMLQHFQKVIPHQFDGVPDKLIQAAYQVQYNSKKMKKLEKEYTTIKTKEMEEQVEIKRLRTENRLLKQRIETLEKHKCSSNYNEDFVLQLEKELVQARLSEAESQCALKEMQDKVLDIEKRNNSLPDENNIARLQEELIAVKLREAEAIMGLKELRQQVKDLEEHWQRHLARTTGRWKDPPKKNAMNELQDELMTIRLREAETQAEIREIKQRMMEMETQNQINSNHLRRAEQEVISLQEKVQYLSAQNKGLLTQLSEAKRKQAEIECKNKEEVMAVRLREADSIAAVAELRQHIAELEIQKEEGKLQGQLNKSDSNQYIGELKDQIAELNHELRCLKGQRGFSGQPPFDGIHIVNHLIGDDESFHSSDEDFIDNSLQETGVGFPLHGKSGSMSLDPAVADGSESETEDSVLETRESNQVVQKERPPRRRESYSTTV

SEQ ID NO: 737934 - protein, 813 aa, Homo sapiens; identical to SEQ ID NO: 737933

SEQ ID NO: 737935 - protein, 508 aa, Homo sapiens
MAPTLFQKLFSKRTGLGAPGRDARDPDCGFSWPLPEFDPSQIRLIVYQDCERRGRNVLFDSSVKRRNEDISVSKLCSDAQVKVFGKCCQLKPGGDSSSSLDSSVTSSSDIKDQCLKYQGSRCSSDANMLGEMMFGSVAMSYKGSTLKIHQIRSPPQLMLSKVFTARTGSSICGSLNTLQDSLEFINQDNNTLKADNNTVINGLLGNIGLSQFCSPRRAFSEQGPLRLIRSASFFAVHSNPMDMPGRELNEDRDSGIARSASLSSLLITPFPSPNSSLTRSCASSYQRRWRRSQTTSLENGVFPRWSIEESFNLSDESCGPNPGIVRKKKIAIGVIFSLSKDEDENNKFNEFFFSHFPLFESHMNKLKSAIEQAMKMSRRSADASQRSLAYNRIVDALNEFRTTICNLYTMPRIGEPVWLTMMSGTPEKNHLCYRFMKEFTFLMENASKNQFLPALITAVLTNHLAWVPTVMPNGQPPIKIFLEKHSSQSVDMLAKTHPYNPLWAQLGM

SEQ ID NO: 737936 - protein, 222 aa, Homo sapiens
MAPTLFQKLFSKRTGLGAPGRDARDPDCGFSWPLPEFDPSQIRLIVYQDCERRGRNVLFDSSVKRRNEDISVSKLCSDAQVKVFGKCCQLKPGGDSSSSLDSSVTSSSDIKDQCLKYQGSRCSSDANMLGEMMFGSVAMSYKGSTLKIHQIRSPPQLMLSKVFTARTGSSICGSLNTLQDSLEFINQDNNTLKADNNTVINGLLGNIDSSTELLLYCDTSGA

SEQ ID NO: 737937 - protein, 120 aa, Homo sapiens
ESELGALTSGLRFLLPPVFPRPDGFGVLCRGLALPGFGLSSGVSLFTLLCRQRRRPGVAGTELDPLKMLEGFDVQIPGDGFERLSLIFLGNRCLSTEGYKLGGESTVGSRAVSFLFSLGS

SEQ ID NO: 737938 - protein, 110 aa, Homo sapiens
QKPFTGPADSGAELPEGHRTTESSSGSCETSLWCGNGKPAHLLTQGVTSCISLGWVASSRGSILEFSESPQRQVLHEQQALVPILIKPRASYHKLRGTDNHQCYSDTAPP

SEQ ID NO: 737939 - protein, 125 aa, Homo sapiens
GLESTGLAVCWLFSVCPPDTPTQPYPYPVWLCQGAPLPTSCSSCMAKRKLTENNGVGRERSGFYPQTPSPGPGQERLRLPAMDCWAARALLWGLPASLLSSGVGSALAPRLPNPRFLLCPFPSFP

SEQ ID NO: 737940 - protein, 103 aa, Homo sapiens
NSNGIIIEWNRMESSSGIEWNYDQMESNVIIIKWNQKEPSSIGIEWNCHQMEFKGIIIKWNRMESSLNGNERGHHQMESNGIIIKWNLMESLNRIEWNRHRMN

SEQ ID NO: 737941 - protein, 428 aa, Homo sapiens
MDSLWGPGAGSHPFGVHNTRLSPDLCPGKIVLRALKESGAGMPEQDKDPRVQENPGDQRRVPEVTGDARPAFRPLRDNGGLSPFVPGPGPLQTDLHAQRSEIRYNQTSQTSWTSSCTNRNAISSSYSSTGGLPGLKRRRGPASSHCQLTLSSSKTVSEDRPQAVSSGHTQCEKAADIAPGQTLTLRNDSSTSEASRPSTHKFPLLPRRRGEPLMLPPPLELGYRVTVEDLDREKEAAFQRINSALQVEDKAISDCRPSRPSHTLSSLATGASGLPAVSKAPSMDAQQETHKSQDCLGLLDPLASAAGVPSTAPMSGKKHRPPGPLFSSSDPLPATSSDSQDSAQVTSLIPAPFPAASMDAGMRRTRHGTSAPAAAAAAPPRSTLNPTLGSLLEWMEALHISGPQPQLQQVPRGQNQRSQTSWTSSCPK

SEQ ID NO: 737942 - protein, 108 aa, Homo sapiens
MPGPWSTLRSHRGHHCPHLHPVLRRPTLTDIEGCLQCLDVCGHTGRTRGRCPPPPCLGARSPPRTGARCRAPWTSLSCGRGECSQCPNSPAWAITQETCSLSAHPEVG

SEQ ID NO: 737943 - protein, 108 aa, Homo sapiens; identical to SEQ ID NO: 737942

SEQ ID NO: 737944 - protein, 108 aa, Homo sapiens; identical to SEQ ID NO: 737942

SEQ ID NO: 737945 - protein, 108 aa, Homo sapiens; identical to SEQ ID NO: 737942

SEQ ID NO: 737946 - protein, 113 aa, Homo sapiens [sequence omitted]

SEQ ID NO: 737947 - protein, 168 aa, Homo sapiens
MRLTEKSEGEQQLKPNNSNAPNEDQEEEIQQSEQHTPARQRTQRADTQPSRCRLPSRRTPTTSSDRTINLLEVLPWPTEWIFNPYRLPALFELYPEFLLVFKEAFHDISHCLKAQMEKIGLPIILHLFALSTLYFYKFFLPTILSLSFFILLVLLLLLFIIVFILIFF

SEQ ID NO: 737948 - protein, 125 aa, Homo sapiens
  misc_feature (13)..(13): Xaa can be any naturally occurring amino acid
FGESPLGNPPSSXLTVPCLARNRSLPSSLKAAASGAALTADHPLGPEGSRVGARPQATRGASMRGFIQNSRKEGISPHPRGQEPGCSYHRKAQASLRLKQNCKKRRLHPKNGVRLLDSTTPRARD

SEQ ID NO: 737949 - protein, 429 aa, Homo sapiens
CFTPFPIIRPITGSFAAFFKFLMPQNLHPQDVPIETRRLEAVSHFEYEVQTSASSHDSQAEVILFKKIYSSMMEKYEKIGKIGEGSYGVVFKCRNRDTGQIVAIKKFLESEDDPVIKKIALREIRMLKQLKHPNLVNLLEVFRRKRRLHLVFEYCDHTVLHELDRYQRGVPEHLVKSITWQTLQAVNFCHKHNCIHRDVKPENILITKHSVIKLCDFGFARLLTGPSDYYTDYVATRWYRSPELLVGDTQYGPPVDVWAIGCVFAELLSGVPLWPGKSDVDQLYLIRKTLGDLIPRHQQVFSTNQYFSGVKIPDPEDMEPLELKFPNISYPALGLLKGCLHMDPTERLTCEQLLHHPYFENIREIEDLAKEHNKPTRKTLRKSRKHHCFTETSKLQYLPQLTGSSILPALDNKKYYCDTKKLNYRFPNI

SEQ ID NO: 737950 - protein, 112 aa, Homo sapiens
MEPLELKFPNISYPALGLLKGCLHMDPTERLTCEQLLHHPYFENIREIEDLAKEHNKPTRKTLRKSRKHHCFTETSKLQYLPQLTGSSILPALDNKKYYCDTKKLNYRFPNI

SEQ ID NO: 737951 - protein, 174 aa, Homo sapiens
HSAREDPPEMAPNASCLCVHVRSEEWDLMTFDANPYDSVKKIKEHVRSKTKVPVQDQVLLLGSKILKPRRSLSSYGIDKEKTIHLTLKVVKPSDEELPLFLVESGDEAKRHLLQVRRSSSVAQVKAMIETKTGIIPETQIVTCNGKRLEDGKMMADYGIRKGNLLFLASYCIGG

SEQ ID NO: 737952 - protein, 232 aa, Homo sapiens
RQSISKAVWPYYQKYVDEASKKEIKDILIQYDRTLLVADPRRCESKKFGGPGARARYQNIPGPLSAEMAPNASCLCVHVRSEEWDLMTFDANPYDSVKKIKEHVRSKTKVPVQDQVLLLGSKILKPRRSLSSYGIDKEKTIHLTLKVVKPSDEELPLFLVESGDEAKRHLLQVRRSSSVAQVKAMIETKTGIIPETQIVTCNGKRLEDGKMMADYGIRKGNLLFLASYCIGG

SEQ ID NO: 737953 - protein, 156 aa, Homo sapiens
HSAREDPPEMAPNASCLCVHVRSEEWDLMTFDANPYDSVKLLLGSKILKPRRSLSSYGIDKEKTIHLTLKVVKPSDEELPLFLVESGDEAKRHLLQVRRSSSVAQVKAMIETKTGIIPETQIVTCNGKRLEDGKMMADYGIRKGNLLFLASYCIGG

SEQ ID NO: 737954 - protein, 105 aa, Homo sapiens
RPPTTTKFAAASTIHLTLKVVKPSDEELPLFLVESGDEAKRHLLQVRRSSSVAQVKAMIETKTGIIPETQIVTCNGKRLEDGKMMADYGIRKGNLLFLASYCIGG

SEQ ID NO: 737955 - protein, 125 aa, Homo sapiens
QVVDWGPGLWRQTAWIAGLASGCPSELHVHNADNISTSLPGLEARAQRLGTEVTTLLAGEWGQAEQLTPPLCFLRPHSNGGFTRGPWTWEPIPFPPCPSVSSLVIPATWEAEVGELLEPGRWRLQ

SEQ ID NO: 737956 - protein, 69 aa, Homo sapiens
KIRGVRGRKKSEALRQVDLPSNSDSALYSCVPLGKLLNLSDFQFYFKVEEVLIYLVRLWEKLMKHMKVP

SEQ ID NO: 737957 - protein, 423 aa, Homo sapiens
GRLRPWILMSGMEKLQNASWIYQQKLEDPFQKHLNSTEEYLAFLCGPRRSHFFLPVSVVYVPIFVVGVIGNVLVCLVILQHQAMKTPTNYYLFSLAVSDLLVLLLGMPLEVYEMWRNYPFLFGPVGCYFKTALFETVCFASILSITTVSVERYVAILHPFRAKLQSTRRRALRILGIVWGFSVLFSLPNTSIHGIKFHYFPNGSLVPGSATCTVIKPMWIYNFIIQVTSFLFYLLPMTVISVLYYLMALRLKKDKSLEADEGNANIQRPCRKSVNKMLFVLVLVFAICWAPFHIDRLFFSFVEEWSESLAAVFNLVHVVSGVFFYLSSAVNPIIYNLLSRRFQAAFQNVISSFHKQWHSQHDPQLPPAQRNIFLTECHFVELTEDIGPQFPCQSSMHNSHLPTALSSEQMSRTNYQSFHFNKT

SEQ ID NO: 737958 - protein, 147 aa, Homo sapiens
MLFVLVLVFAICWAPFHIDRLFFSFVEEWSESLAAVFNLVHVVSGVFFYLSSAVNPIIYNLLSRRFQAAFQNVISSFHKQWHSQHDPQLPPAQRNIFLTECHFVELTEDIGPQFPCQSSMHNSHLPTALSSEQMSRTNYQSFHFNKT

SEQ ID NO: 737959 - protein, 106 aa, Homo sapiens
SLEGSLWKKMYPGKHPVTYHLARIVLLLMCVLDSILFIPNTALPHPQILSSKLCFGSMTSIYNKEILKEPHGIHIYHKNVVEDVGHCTIRCLLLDSRNYLWFQPQG

SEQ ID NO: 737960 - protein, 123 aa, Homo sapiens
MALNNVSLSSGDQRSRVAYRSSHGDLRPRASALAMVSGDGFLVSRPEAIHLGPRQAVRPSVRAESRRVDGGGRSPREPDGRGRSRQARFSPYPIPAVEPDLLRSVLQQRLIALGGVIAARISV

SEQ ID NO: 737961 - protein, 123 aa, Homo sapiens; identical to SEQ ID NO: 737960

SEQ ID NO: 737962 - protein, 123 aa, Homo sapiens; identical to SEQ ID NO: 737960

SEQ ID NO: 737963 - protein, 123 aa, Homo sapiens; identical to SEQ ID NO: 737960

SEQ ID NO: 737964 - protein, 123 aa, Homo sapiens; identical to SEQ ID NO: 737960

SEQ ID NO: 737965 - protein, 40 aa, Homo sapiens
MAFIFLLYKRILKDYTKTCKRSNSSTQLRLINTVSDLIMP

SEQ ID NO: 737966 - protein, 114 aa, Homo sapiens
IRSLALLPRQCSGMISAYCHLHFLGSTDSPASASQVAGTTGCCHHIQLIFVFLVETGFLRVGQAGHELLTSNDRVALASQSAAVTGMSHMPGRQRDFTWETDQIITIYRNCNCI

SEQ ID NO: 737967 - protein, 337 aa, Homo sapiens
MDLDVVNMFVIAGGTLAIPILAFVASFLLWPSALIRIYYWYWRRTLGMQVRYVHHEDYQFCYSFRGRPGHKPSILMLHGFSAHKDMWLSVVKFLPKNLHLVCVDMPGHEGTTRSSLDDLSIDGQVKRIHQFVECLKLNKKPFHLVGTSMGGQVAGVYAAYYPSDVSSLCLVCPAGLQYSTDNQFVQRLKELQGSAAVEKIPLIPSTPEEMSEMLQLCSYVRFKVPQQILQGLVDVRIPHNNFYRKLFLEIVSEKSRYSLHQNMDKIKVPTQIIWGKQDQVLDVSGADMLAKSIANCQVELLENCGHSVVMERPRKTAKLIIDFLASVHNTDNNKKLD

SEQ ID NO: 737968 - protein, 337 aa, Homo sapiens; identical to SEQ ID NO: 737967

SEQ ID NO: 737969 - protein, 337 aa, Homo sapiens; identical to SEQ ID NO: 737967

SEQ ID NO: 737970 - protein, 337 aa, Homo sapiens; identical to SEQ ID NO: 737967

SEQ ID NO: 737971 - protein, 290 aa, Homo sapiens [sequence omitted]

SEQ ID NO: 737972 - protein, 315 aa, Homo sapiens
MDLDVVNMFVIAGGTLAIPILAFVASFLLWPSALIRIYYWYWRRTLGMQVRYVHHEDYQFCYSFRGRPGHKPSILMLHGFSAHKDMWLSVVKFLPKNLHLVCVDMPGHEGTTRSSLDDLSIDGQVKRIHQVAGVYAAYYPSDVSSLCLVCPAGLQYSTDNQFVQRLKELQGSAAVEKIPLIPSTPEEMSEMLQLCSYVRFKVPQQILQGLVDVRIPHNNFYRKLFLEIVSEKSRYSLHQNMDKIKVPTQIIWGKQDQVLDVSGADMLAKSIANCQVELLENCGHSVVMERPRKTAKLIIDFLASVHNTDNNKKLD

SEQ ID NO: 737973 - protein, 178 aa, Homo sapiens
VSFTLLMMCCCHGNACLQYSTDNQFVQRLKELQGSAAVEKIPLIPSTPEEMSEMLQLCSYVRFKVPQQILQGLVDVRIPHNNFYRKLFLEIVSEKSRYSLHQNMDKIKVPTQIIWGKQDQVLDVSGADMLAKSIANCQVELLENCGHSVVMERPRKTAKLIIDFLASVHNTDNNKKLD

SEQ ID NO: 737974 - protein, 337 aa, Homo sapiens; identical to SEQ ID NO: 737967

SEQ ID NO: 737975 - protein, 149 aa, Homo sapiens
SYVRFKVQSCSISLISSGVDGMSEMLQLCSYVRFKVPQQILQGLVDVRIPHNNFYRKLFLEIVSEKSRYSLHQNMDKIKVPTQIIWGKQDQVLDVSGADMLAKSIANCQVELLENCGHSVVMERPRKTAKLIIDFLASVHNTDNNKKLD

SEQ ID NO: 737976 - protein, 113 aa, Homo sapiens
MCLGQTCWPSQLPTARWSFHNRLFSFCAQHRQQQEAGLRPRLQPAFCTQHLLPSPKSDAATTLRDPAPNAVGAPVTLRKPVPYPWYPRFPRALGTTRKPPRYFSQNRNSYGTK

SEQ ID NO: 737977 - protein, 139 aa, Homo sapiens
DEVSLCCPGWRVQWYGLSSLQPPPPRFKRFSSLSLLSSWDYRCLPPRPGNFFFFCIFSRDGVSPCWPGWSRTPDLMIRPCWPPKVWDYRRKPPHLAVQRISAFSSLAPSPAPISPFRMYSSCHLLWATSCDYRTTVLRS

SEQ ID NO: 737978 - protein, 139 aa, Homo sapiens; identical to SEQ ID NO: 737977

SEQ ID NO: 737979 - protein, 39 aa, Homo sapiens
MTAPVSGHTGATENLRGAFRGSTAEPQTPSQPGPGQLWR

SEQ ID NO: 737980 - protein, 47 aa, Homo sapiens
SCISAIFTSFVSDSSLISTSPKSQHHHPQFPILQIFQAVAHLPSHDP

SEQ ID NO: 737981 - protein, 129 aa, Homo sapiens
QGHTRLIFNQMDLVIANKEKENKTLSQAIVNGCYQKMALAGHQGPGQLQAAPHLLSNPRSLLGGLGQPEPGRVEDFYHEKVRALPEGAEALRVTVWEAGLLLILCRKRITLFRPGSQISAGRELSAGPV

SEQ ID NO: 737982 - protein, 132 aa, Homo sapiens
  misc_feature (118)..(118): Xaa can be any naturally occurring amino acid
  misc_feature (131)..(131): Xaa can be any naturally occurring amino acid
HPTTSQAKGPSPQTNKELGNFFRSLWGPYAGWAQAGLLGNAFDGHQLLRPLIFCQDHLREGPPIGRGDSQGEELEPQLPSSLSSIPYGFCDHCWTKDVDDPPLVTHPSPGSRDGHMTXPSASQSSLSPGHXN

SEQ ID NO: 737983 - protein, 67 aa, Homo sapiens
AAVTGQLALVQLLVERQRMLTSRTACMAGRPSCRQPTMGQCQPHALSDKARQMLWPEMEVPNGLFWS

SEQ ID NO: 737984 - protein, 107 aa, Homo sapiens
KSSPQHRTVTVADPCQTASLGGTQIYSFLLVGPPCGNFSNSSQGFTGRILISQGQSPCEEGQLWSSCFSRPSLPCMLALKIPGILDKGASPQCSMAAPLRDSQSDLL

SEQ ID NO: 737985 - protein, 130 aa, Homo sapiens
CTLTPYSATPRRGPRAPVKIRPPPQNPILLELQVVSGFYPESWRNSPHPLTHAWCPVSRRARQLPQGHKGLNPGEGTRSDLPPKRIFQFIPQHNMPGLVPASVPTPPVRMGHQGHPGVGREVNPSAAGSP

SEQ ID NO: 737986 - protein, 180 aa, Homo sapiens
MSTLGPLMSTSGTFISPSTLGTDTSISPLTLGPFKCKSTSGMEILGALKCISGILNLGPFNFPSGPSISISPTFTSILGAFTSISGPFKSPSTLGRETSTSVFSLGAFKLSPTSGIEILCVCIFMLGILNLGPFSFPSGASRFTSGTSMSTLGPETPRSALGRFISTSGPCRRGREFSSS

SEQ ID NO: 737987 - protein, 54 aa, Homo sapiens
HTELGHFHLGHFQVPIWVVNLHIWGINVHFGPFNVNISPFDFGAIMHLRHSNLG

SEQ ID NO: 737988 - protein, 194 aa, Homo sapiens
MSTLGPLMSTSGTFISPSTLGTDTSISPLTLGPFKCKSTSGMEILGALKCISGILNLGPFNFPSGPSISISPTFTSILGAFTSISGPFKSPSTLGRETSTSVFSLGAFKLSPTSGIEILCVCIFMLGILNLGPFSFPSGASRFTSGTSMSTLGPETPRSALGRFISTSGPSPLKPGMLNLGIFTLGIFRCQSGP

SEQ ID NO: 737989 - protein, 163 aa, Homo sapiens [sequence omitted]

SEQ ID NO: 737990 - protein, 208 aa, Homo sapiens
RRHRREPELPGGAASAPDWSGRAAEGSCWEFFSREGERSGERPRELGSGRACERRSQRSKPRNRSGKPGSRRKWDCERTGEQEGKEAPGLLMSEEPGKSRWKNLKTAGALLLPQERHRRPPHTPPRRLRVPPESRRQRPAGLLRGDGGLRGARSGDRGATSGIQISVWWLDVDFNEFGLHVDLVVSLIPSCGQGEGPRAALSSRRRPR

SEQ ID NO: 737991 - protein, 1894 aa, Homo sapiens
MEQRRPWPRALEVDSRSVVLLSVVWVLLAPPAAGMPQFSTFHSENRDWTFNHLTVHQGTGAVYVGAINRVYKLTGNLTIQVAHKTGPEEDNKSCYPPLIVQPCSEVLTLTNNVNKLLIIDYSENRLLACGSLYQGVCKLLRLDDLFILVEPSHKKEHYLSSVNKTGTMYGVIVRSEGEDGKLFIGTAVDGKQDYFPTLSSRKLPRDPESSAMLDYELHSDFVSSLIKIPSDTLALVSHFDIFYIYGFASGGFVYFLTVQPETPEGVAINSAGDLFYTSRIVRLCKDDPKFHSYVSLPFGCTRAGVEYRLLQAAYLAKPGDSLAQAFNITSQDDVLFAIFSKGQKQYHHPPDDSALCAFPIRAINLQIKERLQSCYQGEGNLELNWLLGKDVQCTKAPVPIDDNFCGLDINQPLGGSTPVEGLTLYTTSRDRMTSVASYVYNGYSVVFVGTKSGKLKKIRADGPPHGGVQYEMVSVLKDGSPILRDMAFSIDQRYLYVMSERQVTRVPVESCEQYTTCGECLSSGDPHCGWCALHNMCSRRDKCQQAWEPNRFAASISQCVSLAVHPSSISVSEHSRLLSLVVSDAPDLSAGIACAFGNLTEVEGQVSGSQVICISPGPKDVPVIPLDQDWFGLELQLRSKETGKIFVSTEFKFYNCSAHQLCLSCVNSAFRCHWCKYRNLCTHDPTTCSFQEGRINISEDCPQLVPTEEILIPVGEVKPITLKARNLPQPQSGQRGYECVLNIQGAIHRVPALRFNSSSVQCQNSSYQYDGMDISNLAVDFAVVWNGNFIIDNPQDLKVHLYKCAAQRESCGLCLKADRKFECGWCSGERRCTLHQHCTSPSSPWLDWSSHNVKCSNPQITEILTVSGPPEGGTRVTIHGVNLGLDFSEIAHHVQVAGVPCTPLPGEYIIAEQIVCEMGHALVGTTSGPVRLCIGECKPEFMTKSHQQYTFVNPSVLSLNPIRGPESGGTMVTITGHYLGAGSSVAVYLGNQTCEFYGRSMSEIVCVSPPSSNGLGPVPVSVSVDRAHVDSNLQFEYIDDPRVQRIEPEWSIASGHTPLTITGFNLDVIQEPRIRVKFNGKESVNVCKVVNTTTLTCLAPSLTTDYRPGLDTVERPDEFGFVFNNVQSLLIYNDTKFIYYPNPTFELLSPTGVLDQKPGSPIILKGKNLCPPASGGAKLNYTVLIGETPCAVTVSETQLLCEPPNLTGQHKVMVHVGGMVFSPGSVSVISDSLLTLPAIVSIAAGGSLLLIIVIIVLIAYKRKSRENDLTLKRLQMQMDNLESRVALECKEAFAELQTDINELTSDLDRSGIPYLDYRTYAMRVLFPGIEDHPVLRELEVQGNGQQHVEKALKLFAQLINNKVFLLTFIRTLELQRSFSMRDRGNVASLIMTGLQGRLEYATDVLKQLLSDLIDKNLENKNHPKLLLRRTESVAEKMLTNWFAFLLHKFLKECAGEPLFMLYCAIKQQMEKGPIDAITGEARYSLSEDKLIRQQIEYKTLILNCVNPDNENSPEIPVKVLNCDTITQVKEKILDAVYKNVPYSQRPRAVDMDLEWRQGRIARVVLQDEDITTKIEGDWKRLNTLMHYQVSDRSVVALVPKQTSSYNIPASASISRTSISRYDSSFRYTGSPDSLRSRAPMITPDLESGVKVWHLVKNHDHGDQKEGDRGSKMVSEIYLTRLLATKGTLQKFVDDLFETLFSTVHRGSALPLAIKYMFDFLDEQADRHSIHDTDVRHTWKSNCLPLRFWVNVIKNPQFVFDIHKGSITDACLSVVAQTFMDSCSTSEHRLGKDSPSNKLLYAKDIPSYKSWVERYYADIAKLPAISDQDMNAYLAEQSRLHAVEFNMLSALNEIYSYVSKYSEELIGALEQDEQARRQRLAYKVEQLINAMSIES

SEQ ID NO: 737992 - protein, 1894 aa, Homo sapiens; identical to SEQ ID NO: 737991

SEQ ID NO: 737993 - protein, 1894 aa, Homo sapiens; identical to SEQ ID NO: 737991

SEQ ID NO: 737994 - protein, 1559 aa, Homo sapiens
MEFVGELVRSFCLQLVLGPLNSHVCLSEAWCPKAGSCGYGSCRDFTMPPLLLTPIPSASLQPVPIDDNFCGLDINQPLGGSTPVEGLTLYTTSRDRMTSVASYVYNGYSVVFVGTKSGKLKKIRADGPPHGGVQYEMVSVLKDGSPILRDMAFSIDQRYLYVMSERQVTRVPVESCEQYTTCGECLSSGDPHCGWCALHNMCSRRDKCQQAWEPNRFAASISQCVSLAVHPSSISVSEHSRLLSLVVSDAPDLSAGIACAFGNLTEVEGQVSGSQVICISPGPKDVPVIPLDQDWFGLELQLRSKETGKIFVSTEFKFYNCSAHQLCLSCVNSAFRCHWCKYRNLCTHDPTTCSFQEGRINISEDCPQLVPTEEILIPVGEVKPITLKARNLPQPQSGQRGYECVLNIQGAIHRVPALRFNSSSVQCQNSSYQYDGMDISNLAVDFAVVWNGNFIIDNPQDLKVHLYKCAAQRESCGLCLKADRKFECGWCSGERRCTLHQHCTSPSSPWLDWSSHNVKCSNPQITEILTVSGPPEGGTRVTIHGVNLGLDFSEIAHHVQVAGVPCTPLPGEYIIAEQIVCEMGHALVGTTSGPVRLCIGECKPEFMTKSHQQYTFVNPSVLSLNPIRGPESGGTMVTITGHYLGAGSSVAVYLGNQTCEFYGRSMSEIVCVSPPSSNGLGPVPVSVSVDRAHVDSNLQFEYIDDPRVQRIEPEWSIASGHTPLTITGFNLDVIQEPRIRVKFNGKESVNVCKVVNTTTLTCLAPSLTTDYRPGLDTVERPDEFGFVFNNVQSLLIYNDTKFIYYPNPTFELLSPTGVLDQKPGSPIILKGKNLCPPASGGAKLNYTVLIGETPCAVTVSETQLLCEPPNLTGQHKVMVHVGGMVFSPGSVSVISDSLLTLPAIVSIAAGGSLLLIIVIIVLIAYKRKSRENDLTLKRLQMQMDNLESRVALECKEAFAELQTDINELTSDLDRSGIPYLDYRTYAMRVLFPGIEDHPVLRELEVQGNGQQHVEKALKLFAQLINNKVFLLTFIRTLELQRSFSMRDRGNVASLIMTGLQGRLEYATDVLKQLLSDLIDKNLENKNHPKLLLRRTESVAEKMLTNWFAFLLHKFLKECAGEPLFMLYCAIKQQMEKGPIDAITGEARYSLSEDKLIRQQIEYKTLILNCVNPDNENSPEIPVKVLNCDTITQVKEKILDAVYKNVPYSQRPRAVDMDLEWRQGRIARVVLQDEDITTKIEGDWKRLNTLMHYQVSDRSVVALVPKQTSSYNIPASASISRTSISRYDSSFRYTGSPDSLRSRAPMITPDLESGVKVWHLVKNHDHGDQKEGDRGSKMVSEIYLTRLLATKGTLQKFVDDLFETLFSTVHRGSALPLAIKYMFDFLDEQADRHSIHDTDVRHTWKSNCLPLRFWVNVIKNPQFVFDIHKGSITDACLSVVAQTFMDSCSTSEHRLGKDSPSNKLLYAKDIPSYKSWVERYYADIAKLPAISDQDMNAYLAEQSRLHAVEFNMLSALNEIYSYVSKYSEELIGALEQDEQARRQRLAYKVEQLINAMSIES

SEQ ID NO: 737995 - protein, 1887 aa, Homo sapiens
MEQRRPWPRALEVDSRSVVLLSVVWVLLAPPAAGMPQFSTFHSENRDWTFNHLTVHQGTGAVYVGAINRVYKLTGNLTIQVAHKTGPEEDNKSCYPPLIVQPCSEVLTLTNNVNKLLIIDYSENRLLACGSLYQGVCKLLRLDDLFILVEPSHKKEHYLSSVNKTGTMYGVIVRSEGEDGKLFIGTAVDGKQDYFPTLSSRKLPRDPESSAMLDYELHSDFVSSLIKIPSDTLALVSHFDIFYIYGFASGGFVYFLTVQPETPEGVAINSAGDLFYTSRIVRLCKDDPKFHSYVSLPFGCTRAGVEYRLLQAAYLAKPGDSLAQAFNITSQDDVLFAIFSKGQKQYHHPPDDSALCAFPIRAINLQIKERLQSCYQGEGNLELNWLLGKDVQCTKAPVPIDDNFCGLDINQPLGGSTPVEGLTLYTTSRDRMTSVASYVYNGYSVVFVGTKSGKLKKIRADGPPHGGVQYEMVSVLKDGSPILRDMAFSIDQRYLYVMSERQVTRVPVESCEQYTTCGECLSSGDPHCGWCALHNMCSRRDKCQQAWEPNRFAASISQCVSLAVHPSSISVSEHSRLLSLVVSDAPDLSAGIACAFGNLTEVEGQVSGSQVICISPGPKDVPVIPLDQDWFGLELQLRSKETGKIFVSTEFKFYNCSAHQLCLSCVNSAFRCHWCKYRNLCTHDPTTCSFQEGRINISEDCPQLVPTEEILIPVGEVKPITLKARNLPQPQSGQRGYECVLNIQGAIHRVPALRFNSSSVQCQNSSYQYDGMDISNLAVDFAVVWNGNFIIDNPQDLKVHLYKCAAQRESCGLCLKADRKFECGWCSGERRCTLHQHCTSPSSPWLDWSSHNVKCSNPQITEILTVSGPPEGGTRVTIHGVNLGLDFSEIAHHVQVAGVPCTPLPGEYIIAEQIVCEMGHALVGTTSGPVRLCIGECKPEFMTKSHQQYTFVNPSVLSLNPIRGPESGGTMVTITGHYLGAGSSVAVYLGNQTCEFYGRSMSEIVCVSPPSSNGLGPVPVSVSVDRAHVDSNLQFEYIDDPRVQRIEPEWSIASGHTPLTITGFNLDVIQEPRIRVKFNGKESVNVCKVVNTTTLTCLAPSLTTDYRPGLDTVERPDEFGFVFNNVQSLLIYNDTKFIYYPNPTFELLSPTGVLDQKPGSPIILKGKNLCPPASGGAKLNYTVLIGETPCAVTVSETQLLCEPPNLTGQHKVMVHVGGMVFSPGSVSVISDSLLTLPAIVSIAAGGSLLLIIVIIVLIAYKRKSRENDLTLKRLQMQMDNLESRVALECKEAFAELQTDINELTSDLDRSGIPYLDYRTYAMRVLFPGIEDHPVLRELEVQGNGQQHVEKALKLFAQLINNKVFLLTFIRTLELQRSFSMRDRGNVASLIMTGLQGRLEYATDVLKQLLSDLIDKNLENKNHPKLLLRRTESVAEKMLTNWFAFLLHKFLKECAGEPLFMLYCAIKQQMEKGPIDAITGEARYSLSEDKLIRQQIEYKTLILNCVNPDNENSPEIPVKVLNCDTITQVKEKILDAVYKNVPYSQRPRAVDMDLEWRQGRIARVVLQDEDITTKIEGDWKRLNTLMHYQVSDRSVVALVPKQTSSYNIPASASISRTSISRYDSSFRYTGSPDSLRSRAPMITPDLESGVKVWHLVKNHDHGDQKEGDRGSKMVSEIYLTRLLATKGTLQKFVDDLFETLFSTVHRGSALPLAIKYMFDFLDEQADRHSIHDTDVRHTWKSNCLPLRFWVNVIKNPQFVFDIHKGSITDACLSVVAQTFMDSCSTSEHRLGKDSPSNKLLYAKDIPSYKSWVERYYADIAKLPAISDQDMNAYLAEHRMSRHGGSGWLIRWSSSLMPCPLRAERRSLAFLGRGTCPSCHTGSLRWKDK

SEQ ID NO: 737996 - protein, 164 aa, Homo sapiens [sequence omitted]

SEQ ID NO: 737997 - protein, 361 aa, Homo sapiens
YSIVLYPLRLPRACWSYWTLEWRQGRIARVVLQDEDITTKIEGDWKRLNTLMHYQVSDRSVVALVPKQTSSYNIPASASISRTSISRYDSSFRYTGSPDSLRSRAPMITPDLESGVKVWHLVKNHDHGDQKEGDRGSKMVSEIYLTRLLATKGTLQKFVDDLFETLFSTVHRGSALPLAIKYMFDFLDEQADRHSIHDTDVRHTWKSNCLPLRFWVNVIKNPQFVFDIHKGSITDACLSVVAQTFMDSCSTSEHRLGKDSPSNKLLYAKDIPSYKSWVERYYADIAKLPAISDQDMNAYLAEQSRLHAVEFNMLSALNEIYSYVSKYSEELIGALEQDEQARRQRLAYKVEQLINAMSIES

SEQ ID NO: 737998 - protein, 145 aa, Homo sapiens
  misc_feature (54)..(54): Xaa can be any naturally occurring amino acid
GRHQGSAMPPLCVRPHPSVNVLLQRAEAARCPLDSLLLTRLLFAQRDISQSTKXLECVEMIRTAEIGTKLPQPDLRDQDMNAYLAEQSRLHAVEFNMLSALNEIYSYVSKYSEELIGALEQDEQARRQRLAYKVEQLINAMSIES

SEQ ID NO: 737999 - protein, 498 aa, Homo sapiens
MEQRRPWPRALEVDSRSVVLLSVVWVLLAPPAAGMPQFSTFHSENRDWTFNHLTVHQGTGAVYVGAINRVYKLTGNLTIQVAHKTGPEEDNKSCYPPLIVQPCSEVLTLTNNVNKLLIIDYSENRLLACGSLYQGVCKLLRLDDLFILVEPSHKKEHYLSSVNKTGTMYGVIVRSEGEDGKLFIGTAVDGKQDYFPTLSSRKLPRDPESSAMLDYELHSDFVSSLIKIPSDTLALVSHFDIFYIYGFASGGFVYFLTVQPETPEGVAINSAGDLFYTSRIVRLCKDDPKFHSYVSLPFGCTRAGVEYRLLQAAYLAKPGDSLAQAFNITSQDDVLFAIFSKGQKQYHHPPDDSALCAFPIRAINLQIKERLQSCYQGEGNLELNWLLGKDVQCTKAPVPIDDNFCGLDINQPLGGSTPVEGLTLYTTSRDRMTSVASYVYNGYSVVFVGTKSGKLKKVRVYEFRCSNAIHLLSKESLLEGSYWWRFNYRQLYFLGEQR

SEQ ID NO: 738000 - protein, 259 aa, Homo sapiens
MERKINRREKEKEYEGKHNSLEDTDQGKNCKSTLMTLNVGGYLYITQKQTLTKYPDTFLEGIVNGKILCPFDADGHYFIDRDGLLFRHVLNFLRNGELLLPEGFRENQLLAQEAEFFQLKGLAEEVKSRWEKEQLTPRETTFLEITDNHDRSQGLRIFCNAPDFISKIKSRIVLVSKSRLDGFPEEFSISSNIIQFKYFIKSENGTRLVLKEDNTFVCTLETLKFEAIMMALKCGFRLLTSLDCSKGSIVHSDALHFIK

SEQ ID NO: 738001 - protein, 115 aa, Homo sapiens
VYILVKHSFSLLSFACSFQRYLFDIYYVLVVLLETSFLCIHYVFSAVHFCTYCSFGQNTFLRLSQKSLEGLHLPSRTSSNASVTVKTFFTTLVVAISFSYSEHYTYLCYRSYKEL

SEQ ID NO: 738002 - protein, 744 aa, Homo sapiens
MAADKPADQGAEKHEGTGQSSGITDQEKELSTNAFQAFTSGNYDACLQHLACLQDINKDDYKIILNTAVAEFFKSNQTTTDNLRQTLNQLKNQVHSAVEEMDGLDDVENSMLYYNQAVILYHLRQYTEAISVGEKLYQFIEPFEEKFAQAVCFLLVDLYILTYQAEKALHLLAVLEKMISQGNNNKNGKNETGNNNNKDGSNHKAESGALIEAAKSKIHQYKVRAYIQMKSLKACKREIKSVMNTAGNSAPSLFLKSNFEYLRGNYRKAVKLLNSSNIAEHPGFMKTGECLRCMFWNNLGCIHFAMSKHNLGIFYFKKALQENDNVCAQLSAGSTDPGKKFSGRPMCTLLTNKRYELLYNCGIQLLHIGRPLAAFECLIEAVQVYHANPRLWLRLAECCIAANKGTSEQETKGLPSKKGIVQSIVGQGYHRKIVLASQSIQNTVYNDGQSSAIPVASMEFAAICLRNALLLLPEEQQDPKQENGAKNSNQLGGNTESSESSETCSSKSHDGDKFIPAPPSSPLRKQELENLKCSILACSAYVALALGDNLMALNHADKLLQQPKLSGSLKFLGHLYAAEALISLDRISDAITHLNPENVTDVSLGISSNEQDQGSDKGENEAMESSGKRAPQCYPSSVNSARTVMLFNLGSAYCLRSEYDKARKCLHQAASMIHPKEVPPEAILLAVYLELQNGNTQLALQIIKRNQLLPAVKTHSEVRKKPVFQPVHPIQPIQMPAFTTVQRK

SEQ ID NO: 738003 - protein, 744 aa, Homo sapiens; identical to SEQ ID NO: 738002

SEQ ID NO: 738004 - protein, 744 aa, Homo sapiens; identical to SEQ ID NO: 738002

SEQ ID NO: 738005 - protein, 717 aa, Homo sapiens
MAADKPADQGAEKHEGTGQSSGITDQEKELSTNAFQAFTSGNYDACLQHLACLQDINKDDYKIILNTAVAEFFKSNQTTTDNLRQTLNQLKNQVHSAVEEMDGLDDVENSMLYYNQAVILYHLRQYTEAISVGEKLYQFIEPFEEKFAQAVCFLLVDLYILTYQAEKALHLLAVLEKMISQGNNNKNGKNETGNNNNKDGSNHKAESGALIEAAKSKIHQYKVRAYIQMKSLKACKREIKSVMNTAGNSAPSLFLKSNFEYLRGNYRKAVKLLNSSNIAEHPGFMKTGECLRCMFWNNLGCIHFAMSKHNLGIFYFKKALQENDNVCAQLSAGSTDPGKKFSGRPMCTLLTNKRYELLYNCGIQLLHIGRPLAAFECLIEAVQVYHANPRLWLRLAECCIAANKGTSEQETKGLPSKKGIVQSIVGQGYHRKIVLASQSIQNTVYNDGQSSAIPVASMEFAAICLRNALLLLPEEQQDPKQENGAKNSNQLGGNTESSESSETCRCSILACSAYVALALGDNLMALNHADKLLQQPKLSGSLKFLGHLYAAEALISLDRISDAITHLNPENVTDVSLGISSNEQDQGSDKGENEAMESSGKRAPQCYPSSVNSARTVMLFNLGSAYCLRSEYDKARKCLHQAASMIHPKEVPPEAILLAVYLELQNGNTQLALQIIKRNQLLPAVKTHSEVRKKPVFQPVHPIQPIQMPAFTTVQRK

SEQ ID NO: 738006 - protein, 168 aa, Homo sapiens
PGRLDSKSSVFVFLPEEYCCAKWLLKAIDWVASLLLARPLHQCLHSFSPAGKRAPQCYPSSVNSARTVMLFNLGSAYCLRSEYDKARKCLHQAASMIHPKEVPPEAILLAVYLELQNGNTQLALQIIKRNQLLPAVKTHSEVRKKPVFQPVHPIQPIQMPAFTTVQRK

SEQ ID NO: 738007 - protein, 705 aa, Homo sapiens
MAADKPADQGAEKHEGTGQSSGITDQEKELSTNAFQAFTSGNYDACLQHLACLQDINKDDYKIILNTAVAEFFKSNQTTTDNLRQTLNQLKNQVHSAVEEMDGLDDVENSMLYYNQAVILYHLRQYTEAISVGEKLYQFIEPFEEKFAQAVCFLLVDLYILTYQAEKALHLLAVLEKMISQGNNNKNGKNETGNNNNKDGSNHKAESGALIEAAKSKIHQYKVRAYIQMKSLKACKREIKSVMNTAGNVNGLRCMFWNNLGCIHFAMSKHNLGIFYFKKALQENDNVCAQLSAGSTDPGKKFSGRPMCTLLTNKRYELLYNCGIQLLHIGRPLAAFECLIEAVQVYHANPRLWLRLAECCIAANKGTSEQETKGLPSKKGIVQSIVGQGYHRKIVLASQSIQNTVYNDGQSSAIPVASMEFAAICLRNALLLLPEEQQDPKQENGAKNSNQLGGNTESSESSETCSSKSHDGDKFIPAPPSSPLRKQELENLKCSILACSAYVALALGDNLMALNHADKLLQQPKLSGSLKFLGHLYAAEALISLDRISDAITHLNPENVTDVSLGISSNEQDQGSDKGENEAMESSGKRAPQCYPSSVNSARTVMLFNLGSAYCLRSEYDKARKCLHQAASMIHPKEVPPEAILLAVYLELQNGNTQLALQIIKRNQLLPAVKTHSEVRKKPVFQPVHPIQPIQMPAFTTVQRK

SEQ ID NO: 738008 - protein, 695 aa, Homo sapiens
MAADKPADQGAEKHEGTGQSSGITDQEKELSTNAFQAFTSGNYDACLQHLACLQDINKDDYKIILNTAVAEFFKSNQTTTDNLRQTLNQLKNQVHSAVEEMDGLDDVENSMLYYNQAVILYHLRQYTEAISVGEKLYQFIEPFEEKFAQAVCFLLVDLYILTYQAEKALHLLAVLEKMISQGNNNKNGKNETGNNNNKDGSNHKAESGALIEAAKSKIHQYKVRAYIQMKSLKACKREIKSVMNTAGNSAPSLFLKSNFEYLRGNYRKAVKLLNSSNIAEHPGFMKTGECLRCMFWNNLGCIHFAMSKHNLGIFYFKKALQENDNVCAQLSAGSTDPGKKFSGRPMCTLLTNKRYELLYNCGIQLLHIGRPLAAFECLIEAVQVYHANPRLWLRLAECCIAANKGTSEQETKGLPSKKGIVQSIVGQGYHRKIVLASQSIQNTVYNDGQSSAIPVASMEFAAICLRNALLLLPEEQQDPKQENGAKNSNQLGGNTESSESSETCRCSILACSAYVALALGDNLMALNHAEALISLDRISDAITHLNPENVTDVSLGISSNEQDQGSDKGENEAMESSGKRAPQCYPSSVNSARTVMLFNLGSAYCLRSEYDKARKCLHQAASMIHPKEVPPEAILLAVYLELQNGNTQLALQIIKRNQLLPAVKTHSEVRKKPVFQPVHPIQPIQMPAFTTVQRK

SEQ ID NO: 738009 - protein, 744 aa, Homo sapiens; identical to SEQ ID NO: 738002

SEQ ID NO: 738010 - protein, 744 aa, Homo sapiens; identical to SEQ ID NO: 738002

SEQ ID NO: 738011 - protein, 71 aa, Homo sapiens
TVTLKCYGKDEHGELPVILSQLLARCWVNRLPRIEELALKQLLLKNASKQTTHNCGKPGGNPSTLWHEMAV

SEQ ID NO: 738012 - protein, 417 aa, Homo sapiens
GSERPGGAGGGARSRRELPGCPRRRCGAMIRNGRGAAGGAEQPGPGGRRAVRVWCDGCYDMVHYGHSNQLRQARAMGDYLIVGVHTDEEIAKHKGPPVFTQEERYKMVQAIKWVDEVVPAAPYVTTLETLDKYNCDFCVHGNDITLTVDGRDTYEEVKQAGRYRECKRTQGVSTTDLVGRMLLVTKAHHSSQEMSSEYREYADSFGKCPGGRNPWTGVSQFLQTSQKIIQFASGKEPQPGETVIYVAGAFDLFHIGHVDFLEKVHRLAERPYIIAGLHFDQEVNHYKGKNYPIMNLHERTLSVLACRYVSEVVIGAPYAVTAELLSHFKVDLVCHGKTEIIPDRDGSDPYQEPKRRGIFRQIDSGSNLTTDLIVQRIITNRLEYEARNQKKEAKELAFLEAARQQAAQPLGERDGDF

SEQ ID NO: 738013 - protein, 417 aa, Homo sapiens; identical to SEQ ID NO: 738012

SEQ ID NO: 738014 - protein, 261 aa, Homo sapiens
  misc_feature (261)..(261): Xaa can be any naturally occurring amino acid
GSERPGGAGGGARSRRELPGCPRRRCGAMIRNGRGAAGGAEQPGPGGRRAVRVWCDGCYDMVHYGHSNQLRQARAMGDYLIVGVHTDEEIAKHKGPPVFTQEERYKMVQAIKWVDEVVPAAPYVTTLETLDKYNCDFCVHGNDITLTVDGRDTYEEVKQAGRYRECKRTQGVSTTDLVGRMLLVTKAHHSSQEMSSEYREYADSFGKCPGGRNPWTGVSQFLQTSQKIIQFASGKEPQPGETVIYVAGAFDLFPTIRGQLX

SEQ ID NO: 738015 - protein, 150 aa, Homo sapiens [sequence omitted]

SEQ ID NO: 738016 - protein, 230 aa, Homo sapiens
MVHYGHSNQLRQARAMGDYLIVGVHTDEEIAKHKGPPVFTQEERYKMVQAIKWVDEVVPAAPYVTTLETLDKYNCDFCVHGNDITLTVDGRDTYEEVKQAGRYRECKRTQGVSTTDLVGRMLLVTKAHHSSQEMSSEYREYADSFGKCPGGRNPWTGVSQFLQTSQKIIQFASGKEPQPGETVIYVAGAFDLFHIGHVDFLEKVHRLAERPYIIAGLHFDQVTAFKLPGP

SEQ ID NO: 738017 - protein, 423 aa, Homo sapiens
  misc_feature (9)..(9): Xaa can be any naturally occurring amino acid
GLLGLPGPXLMYCDICRSSAPLDVPGCPRRRCGAMIRNGRGAAGGAEQPGPGGRRAVRVWCDGCYDMVHYGHSNQLRQARAMGDYLIVGVHTDEEIAKHKGPPVFTQEERYKMVQAIKWVDEVVPAAPYVTTLETLDKYNCDFCVHGNDITLTVDGRDTYEEVKQAGRYRECKRTQGVSTTDLVGRMLLVTKAHHSSQEMSSEYREYADSFGKCPGGRNPWTGVSQFLQTSQKIIQFASGKEPQPGETVIYVAGAFDLFHIGHVDFLEKVHRLAERPYIIAGLHFDQEVNHYKGKNYPIMNLHERTLSVLACRYVSEVVIGAPYAVTAELLSHFKVDLVCHGKTEIIPDRDGSDPYQEPKRRGIFRQIDSGSNLTTDLIVQRIITNRLEYEARNQKKEAKELAFLEAARQQAAQPLGERDGDF

SEQ ID NO: 738018 - protein, 412 aa, Homo sapiens
TSARSRLGLNSAVPGCPRRRCGAMIRNGRGAAGGAEQPGPGGRRAVRVWCDGCYDMVHYGHSNQLRQARAMGDYLIVGVHTDEEIAKHKGPPVFTQEERYKMVQAIKWVDEVVPAAPYVTTLETLDKYNCDFCVHGNDITLTVDGRDTYEEVKQAGRYRECKRTQGVSTTDLVGRMLLVTKAHHSSQEMSSEYREYADSFGKCPGGRNPWTGVSQFLQTSQKIIQFASGKEPQPGETVIYVAGAFDLFHIGHVDFLEKVHRLAERPYIIAGLHFDQEVNHYKGKNYPIMNLHERTLSVLACRYVSEVVIGAPYAVTAELLSHFKVDLVCHGKTEIIPDRDGSDPYQEPKRRGIFRQIDSGSNLTTDLIVQRIITNRLEYEARNQKKEAKELAFLEAARQQAAQPLGERDGDF

SEQ ID NO: 738019 - protein, 417 aa, Homo sapiens; identical to SEQ ID NO: 738012

SEQ ID NO: 738020 - protein, 357 aa, Homo sapiens
MVHYGHSNQLRQARAMGDYLIVGVHTDEEIAKHKGPPVFTQEERYKMVQAIKWVDEVVPAAPYVTTLETLDKYNCDFCVHGNDITLTVDGRDTYEEVKQAGRYRECKRTQGVSTTDLVGRMLLVTKAHHSSQEMSSEYREYADSFGKCPGGRNPWTGVSQFLQTSQKIIQFASGKEPQPGETVIYVAGAFDLFHIGHVDFLEKVHRLAERPYIIAGLHFDQEVNHYKGKNYPIMNLHERTLSVLACRYVSEVVIGAPYAVTAELLSHFKVDLVCHGKTEIIPDRDGSDPYQEPKRRGIFRQIDSGSNLTTDLIVQRIITNRLEYEARNQKKEAKELAFLEAARQQAAQPLGERDGDF

SEQ ID NO: 738021 - protein, 363 aa, Homo sapiens
MYEPVFELAEAVPNDMRLPGCPRRRCGAMIRNGRGAAGGAEQPGPGGRRAVRVWCDGCYDMVHYGHSNQLRQARAMGDYLIVGVHTDDDITLTVDGRDTYEEVKQAGRYRECKRTQGVSTTDLVGRMLLVTKAHHSSQEMSSEYREYADSFGKCPGGRNPWTGVSQFLQTSQKIIQFASGKEPQPGETVIYVAGAFDLFHIGHVDFLEKVHRLAERPYIIAGLHFDQEVNHYKGKNYPIMNLHERTLSVLACRYVSEVVIGAPYAVTAELLSHFKVDLVCHGKTEIIPDRDGSDPYQEPKRRGIFRQIDSGSNLTTDLIVQRIITNRLEYEARNQKKEAKELAFLEAARQQAAQPLGERDGDF

SEQ ID NO: 738022 - protein, 441 aa, Homo sapiens
  misc_feature (9)..(9): Xaa can be any naturally occurring amino acid
GLLGLPGPXLMYCDICRSSAPLDVPGCPRRRCGAMIRNGRGAAGGAEQPGPGGRRAVRVWCDGCYDMVHYGHSNQLRQARAMGDYLIVGVHTDEEIAKHKGPPVFTQEERYKMVQAIKWVDEVVPAAPYVTTLETLDKYNCDFCVHGNDITLTVDGRDTYEEVKQAGRYRECKRTQGVSTTDLVGRMLLVTKAHHSSQEMSSEYREYADSFGKPPHPIPAGDILSSEGCSQCPGGRNPWTGVSQFLQTSQKIIQFASGKEPQPGETVIYVAGAFDLFHIGHVDFLEKVHRLAERPYIIAGLHFDQEVNHYKGKNYPIMNLHERTLSVLACRYVSEVVIGAPYAVTAELLSHFKVDLVCHGKTEIIPDRDGSDPYQEPKRRGIFRQIDSGSNLTTDLIVQRIITNRLEYEARNQKKEAKELAFLEAARQQAAQPLGERDGDF

SEQ ID NO: 738023 - protein, 452 aa, Homo sapiens
MVHYGHSNQLRQARAMGDYLIVGVHTDAKEKGHLLPTTASEAPKPSGAEHLLVQKESLPLPETLAGKRATQLASTSGLRARVERQPAPTGPLVWLQLGAGKGPPTGGAGWAGVPSLPVVLFLEEIAKHKGPPVFTQEERYKMVQAIKWVDEVVPAAPYVTTLETLDKYNCDFCVHGNDITLTVDGRDTYEEVKQAGRYRECKRTQGVSTTDLVGRMLLVTKAHHSSQEMSSEYREYADSFGKCPGGRNPWTGVSQFLQTSQKIIQFASGKEPQPGETVIYVAGAFDLFHIGHVDFLEKVHRLAERPYIIAGLHFDQEVNHYKGKNYPIMNLHERTLSVLACRYVSEVVIGAPYAVTAELLSHFKVDLVCHGKTEIIPDRDGSDPYQEPKRRGIFRQIDSGSNLTTDLIVQRIITNRLEYEARNQKKEAKELAFLEAARQQAAQPLGERDGDF

SEQ ID NO: 738024 - protein, 311 aa, Homo sapiens
MVQAIKWVDEVVPAAPYVTTLETLDKYNCDFCVHGNDITLTVDGRDTYEEVKQAGRYRECKRTQGVSTTDLVGRMLLVTKAHHSSQEMSSEYREYADSFGKCPGGRNPWTGVSQFLQTSQKIIQFASGKEPQPGETVIYVAGAFDLFHIGHVDFLEKVHRLAERPYIIAGLHFDQEVNHYKGKNYPIMNLHERTLSVLACRYVSEVVIGAPYAVTAELLSHFKVDLVCHGKTEIIPDRDGSDPYQEPKRRGIFRQIDSGSNLTTDLIVQRIITNRLEYEARNQKKEAKELAFLEAARQQAAQPLGERDGDF

SEQ ID NO: 738025 - protein, 391 aa, Homo sapiens
GSERPGGAGGGARSRRELPGCPRRRCGAMIRNGRGAAGGAEQPGPGGRRAVRVWCDGCYDMVHYGHSNQLRQARAMGDYLIVGVHTDEEIAKHKGPPVFTQEERYKMVQAIKWVDEVVPAAPYVTTLETLDKYNCDFCVHGNDITLTVDGRDTYEEVKQAGRYRECKRTQGVSTTDLVGRMLLVTKAHHSSQEMSSEYREYADSFGKCPGGRNPWTGVSQFLQTSQKIIQFASGKEPQPGETVIYVAGAFDLFHIGHVDFLEKVHRLAERPYIIAGLHFDQYVSEVVIGAPYAVTAELLSHFKVDLVCHGKTEIIPDRDGSDPYQEPKRRGIFRQIDSGSNLTTDLIVQRIITNRLEYEARNQKKEAKELAFLEAARQQAAQPLGERDGDF

SEQ ID NO: 738026 - protein, 335 aa, Homo sapiens
MIRNGRGAAGGAEQPGPGGRRAVRVWCDGCYDMVHYGHSNQLRQARAMGDYLIVGVHTDDDITLTVDGRDTYEEVKQAGRYRECKRTQGVSTTDLVGRMLLVTKAHHSSQEMSSEYREYADSFGKCPGGRNPWTGVSQFLQTSQKIIQFASGKEPQPGETVIYVAGAFDLFHIGHVDFLEKVHRLAERPYIIAGLHFDQEVNHYKGKNYPIMNLHERTLSVLACRYVSEVVIGAPYAVTAELLSHFKVDLVCHGKTEIIPDRDGSDPYQEPKRRGIFRQIDSGSNLTTDLIVQRIITNRLEYEARNQKKEAKELAFLEAARQQAAQPLGERDGDF

SEQ ID NO: 738027 - protein, 475 aa, Homo sapiens
GSERPGGAGGGARSRRELPGCPRRRCGAMIRNGRGAAGGAEQPGPGGRRAVRVWCDGCYDMVHYGHSNQLRQARAMGDYLIVGVHTDEEIAKHKGPPVFTQEERYKMVQAIKWVDEVVPAAPYVTTLETLDKYNCDFCVHGNDITLTVDGRDTYEEVKQAGRYRECKRTQGVSTTDLVGRMLLVTKAHHSSQVSRRRNPRGPWVEVSRGKEGHLPALSGSSCPLLPIPSRFWGGHAGRAGPSALLCPSVQEMSSEYREYADSFGKCPGGRNPWTGVSQFLQTSQKIIQFASGKEPQPGETVIYVAGAFDLFHIGHVDFLEKVHRLAERPYIIAGLHFDQEVNHYKGKNYPIMNLHERTLSVLACRYVSEVVIGAPYAVTAELLSHFKVDLVCHGKTEIIPDRDGSDPYQEPKRRGIFRQIDSGSNLTTDLIVQRIITNRLEYEARNQKKEAKELAFLEAARQQAAQPLGERDGDF

SEQ ID NO: 738028 - protein, 336 aa, Homo sapiens
MVHYGHSNQLRQARAMGDYLIVGVHTDEEIAKHKGPPVFTQEERYKMVQAIKWVDEVVPAAPYVTTLETLDKYNCDFCVHGNDITLTVDGRDTYEEVKQAGRYRECKRTQGEMSSEYREYADSFGKCPGGRNPWTGVSQFLQTSQKIIQFASGKEPQPGETVIYVAGAFDLFHIGHVDFLEKVHRLAERPYIIAGLHFDQEVNHYKGKNYPIMNLHERTLSVLACRYVSEVVIGAPYAVTAELLSHFKVDLVCHGKTEIIPDRDGSDPYQEPKRRGIFRQIDSGSNLTTDLIVQRIITNRLEYEARNQKKEAKELAFLEAARQQAAQPLGERDGDF

SEQ ID NO: 738029 - protein, 375 aa, Homo sapiens
MVHYGHSNQLRQARAMGDYLIVGVHTDEEIAKHKGPPVFTQEERYKMVQAIKWVDEVVPAAPYVTTLETLDKYNCDFCVHGNDITLTVDGRDTYEEVKQAGRYRECKRTQGVSTTDLVGRMLLVTKAHHSSQEMSSEYREYADSFGKPPHPIPAGDILSSEGCSQCPGGRNPWTGVSQFLQTSQKIIQFASGKEPQPGETVIYVAGAFDLFHIGHVDFLEKVHRLAERPYIIAGLHFDQEVNHYKGKNYPIMNLHERTLSVLACRYVSEVVIGAPYAVTAELLSHFKVDLVCHGKTEIIPDRDGSDPYQEPKRRGIFRQIDSGSNLTTDLIVQRIITNRLEYEARNQKKEAKELAFLEAARQQAAQPLGERDGDF

SEQ ID NO: 738030 - protein, 159 aa, Homo sapiens
QPGGAHPVPPKSLRAELAALWPQEVNHYKGKNYPIMNLHERTLSVLACRYVSEVVIGAPYAVTAELLSHFKVDLVCHGKTEIIPDRDGSDPYQEPKRRGIFRQIDSGSNLTTDLIVQRIITNRLEYEARNQKKEAKELAFLEAARQQAAQPLGERDGDF

SEQ ID NO: 738031 - protein, 382 aa, Homo sapiens
GSERPGGAGGGARSRRELPGCPRRRCGAMIRNGRGAAGGAEQPGPGGRRAVRVWCDGCYDMVHYGHSNQLRQARAMGDYLIVGVHTDEEIAKHKGPPVFTQEERYKMVQAIKWVDEVVPAAPYVTTLETLDKYNCDFCVHGNDITLTVDGRDTYEEVKQAGRYRECKRTQGVSTTDLVGRMLLVTKAHHSSQEMSSEYREYADSFGKCPGGRNPWTGVSQFLQTSQKIIQFASGKEPQPGETVIYVAGAFDLFHIGHVDFLEKVHRLAERPYIIAGLHFDQEVNHYKGKNYPIMNLHERTLSVLACRYVSEVVIGAPYAVTAELLSHFKEPKRRGIFRQIDSGSNLTTDLIVQRIITNRLEYEARNQKKEAKEVFLEVQRQQ

SEQ ID NO: 738032 - protein, 341 aa, Homo sapiens
MYEPVFELAEAVPNDMRLPGCPRRRCGAMIRNGRGAAGGAEQPGPGGRRAVRVWCDGCYDMVHYGHSNQLRQARAMGDYLIVGVHTDDDITLTVDGRDTYEEVKQAGRYRECKRTQGVSTTDLVGRMLLVTKAHHSSQEMSSEYREYADSFGKCPGGRNPWTGVSQFLQTSQKIIQFASGKEPQPGETVIYVAGAFDLFHIGHVDFLEKVHRLAERPYIIAGLHFDQEVNHYKGKNYPIMNLHERTLSVLACRYVSEVVIGAPYAVTAELLSHFKEPKRRGIFRQIDSGSNLTTDLIVQRIITNRLEYEARNQKKEAKELAFLEAARQQAAQPLGERDGDF

SEQ ID NO: 738033 - protein, 150 aa, Homo sapiens [sequence omitted]

SEQ ID NO: 738034 - protein, 348 aa, Homo sapiens
GSERPGGAGGGARSRRELPGCPRRRCGAMIRNGRGAAGGAEQPGPGGRRAVRVWCDGCYDMVHYGHSNQLRQARAMGDYLIVGVHTDEEIAKHKGPPVFTQEERYKMVQAIKWVDEVVPAAPYVTTLETLDKYNCDFCVHGNDITLTVDGRDTYEEVKQAGRYRECKRTQGVSTTDLVGRMLLVTKAHHSSQVSRRRNPRGPWVEVSRGKEGHLPALSGSSCPLLPIPSRFWGGHAGRAGPSALLCPSVQEMSSEYREYADSFGKCPGGRNPWTGVSQFLQTSQKIIQFASGKEPQPGETVIYVAGAFDLFHIGHVDFLEKVHRLAERPYIIAGLHFDQVTAFKLPGP

SEQ ID NO: 738035 - protein, 181 aa, Homo sapiens
MEERYKMVQAIKWVDEVVPAAPYVTTLETLDKYNCDFCVHGNDITLTVDGRDTYEEVKQAGRYRECKRTQGVSTTDLVGRMLLVTKAHHSSQEMSSEYREYADSFGKCPGGRNPWTGVSQFLQTSQKIRKFPERLYWAFSHWRTAKKAGQRDTNNERATTRKCGEGKSGNRKGNIPKFSLY

SEQ ID NO: 738036 - protein, 67 aa, Homo sapiens
GRRPGSSPGPGPGPAPASKDRAEGGAHWREEALDFLRILSLSHRGAEGVGQKNCQILESLKPCPRIW

SEQ ID NO: 738037 - protein, 88 aa, Homo sapiens
HGLGPLFSELLRCPPPFTSQLLHTLLCILQLKVRSLDQQQKLQQQLGSTSDLFILMRSQGDSDAHSSLRSAARNHLCFSSLSLYVALT

SEQ ID NO: 738038 - protein, 931 aa, Homo sapiens
PSFLPERSLPFSRKRKKRMTVSKEMVTFKDVAVVFTEEELGLLDSVQRKLYRDVMLENFRNLLLVAHQPFKPDLISQLEREEKLLMVETETPRDGCSGRKNQQKMESIQEVTVSYFSPKELSSRQTWQQSAGGLIRCQDFLKVFQGKNSQLQEQGNSLGQVWAGIPVQISEDKNYIFTHIGNGSNYIKSQGYPSWRAHHSWRKMYLKESHNYQCRCQQISMKNHFCKCDSVSWLSHHNDKLEVHRKENYSCHDCGEDIMKVSLLNQESIQTEEKPYPCTGYRKAFSNDSSSEVHQQFHLEGKPYTYSSCGKGCNYSSLLHIHQNIEREDDIENSHLKSYQRVHTEEKPCKCGEYGENFNHCSPLNTYELIHTGEMSYRHNIYEKAFSHSLDLNSIFRVHTRDEPHEYEENENVFNQSSCLQVHQKIHTEEKLYTDIEYGKSFICSSNLDIQHRVHMEENSYNSQECGNGFSLASHFQDLQIVHTKEQPYKRYVCSNSFSHNLHLQGHPKIHIGEKPRKEHGNGFNWSSKLKDHQRVHTGQKPYKCNICGKGFNHRSVLNVHQRVHTGEKPYKCEECDKGFSRSSYLQAHQRVHTGEKPYKCEECGKGFSRNSYLQGHQRVHTGEKPYKCEECGKGFSRSSHLQGHQRVHTGEKPFKCEECGKGFSWSFNLQIHQRVHTGEKPYKCEECGKGFSKASTLLAHQRVHTGEKPYQCDECGKSFSQRSYLQSHQSVHSGERPYICEVCGKGFSQRAYLQGHQRVHTRVKPYKCEMCGKGFSQSSRLEAHRRVHTGGKPYKCEVCTKGFSESSRLQAHQRVHVEGRPYKCEQCGKGFSGYSSLQAHHRVHTGEKPYKCEVCGKGFSQRSNLQAHQRVHTGEKPYKCDACGKGFRWSSGLLIHQRVHSSDKFYKSEDYGKDYPSSENLHRNEDSVLF

SEQ ID NO: 738039 - protein, 907 aa, Homo sapiens
MVTFKDVAVVFTEEELGLLDSVQRKLYRDVMLENFRNLLLVAHQPFKPDLISQLEREEKLLMVETETPRDGCSGRKNQQKMESIQEVTVSYFSPKELSSRQTWQQSAGGLIRCQDFLKVFQGKNSQLQEQGNSLGQVWAGIPVQISEDKNYIFTHIGNGSNYIKSQGYPSWRAHHSWRKMYLKESHNYQCRCQQISMKNHFCKCDSVSWLSHHNDKLEVHRKENYSCHDCGEDIMKVSLLNQESIQTEEKPYPCTGYRKAFSNDSSSEVHQQFHLEGKPYTYSSCGKGCNYSSLLHIHQNIEREDDIENSHLKSYQRVHTEEKPCKCGEYGENFNHCSPLNTYELIHTGEMSYRHNIYEKAFSHSLDLNSIFRVHTRDEPHEYEENENVFNQSSCLQVHQKIHTEEKLYTDIEYGKSFICSSNLDIQHRVHMEENSYNSQECGNGFSLASHFQDLQIVHTKEQPYKRYVCSNSFSHNLHLQGHPKIHIGEKPRKEHGNGFNWSSKLKDHQRVHTGQKPYKCNICGKGFNHRSVLNVHQRVHTGEKPYKCEECDKGFSRSSYLQAHQRVHTGEKPYKCEECGKGFSRNSYLQGHQRVHTGEKPYKCEECGKGFSRSSHLQGHQRVHTGEKPFKCEECGKGFSWSFNLQIHQRVHTGEKPYKCEECGKGFSKASTLLAHQRVHTGEKPYQCDECGKSFSQRSYLQSHQSVHSGERPYICEVCGKGFSQRAYLQGHQRVHTRVKPYKCEMCGKGFSQSSRLEAHRRVHTGGKPYKCEVCTKGFSESSRLQAHQRVHVEGRPYKCEQCGKGFSGYSSLQAHHRVHTGEKPYKCEVCGKGFSQRSNLQAHQRVHTGEKPYKCDACGKGFRWSSGLLIHQRVHSSDKFYKSEDYGKDYPSSENLHRNEDSVLF

SEQ ID NO: 738040 - protein, 907 aa, Homo sapiens; identical to SEQ ID NO: 738039

SEQ ID NO: 738041 - protein, 161 aa, Homo sapiens
DSFPMMPIKHAIQWLYPYSILLGHEGKMAVEGVLKRFELQDSGSSLLPKEIVKVEKMMENHVSQASVTIRIADKEVTIKVPAGTRLLSQPCASDRFIQTLSHKQLQAEMMQSHMVKDICLIGGKGCGKTVIAKNFADTLGYNIEPIMLYQVQCSFLAALGL

SEQ ID NO: 738042 - protein, 1580 aa, Homo sapiens
DSFPMMPIKHAIQWLYPYSILLGHEGKMAVEGVLKRFELQDSGSSLLPKEIVKVEKMMENHVSQASVTIRIADKEVTIKVPAGTRLLSQPCASDRFIQTLSHKQLQAEMMQSHMVKDICLIGGKGCGKTVIAKNFADTLGYNIEPIMLYQDMTARDLLQQRYTLPNGDTAWRSSPLVNAALEGKLVLLDGIHRVNAGTLAVLQRLIHDRELSLYDGSRLLREDRYMRLKEELQLSDEQLQKRSIFPIHPSFRIIALAEPPVIGSTAHQWLGPEFLTMFFFHYMKPLVKSEEIQVIKEKVPNVPQEALDKLLSFTHKLRETQDPTAQSLAASLSTRQLLRISRRLSQYPNENLHSAVTKACLSRFLPSLARSALEKNLADATIEINTDDNLEPELKDYKCEVTSGTLRIGAVSAPIYNAHEKMKVPDVLFYDNIQHVIVMEDMLKDFLLGEHLLLVGNQGVGKNKIVDRFLHLLNRPREYIQLHRDTTVQTLTLQPSVKDGLIVYEDSPLVKAVKLGHILVVDEADKAPTNVTCILKTLVENGEMILADGRRIVANSANVNGRENVVVIHPDFRMIVLANRPGFPFLGNDFFGTLGDIFSCHAVDNPKPHSELEMLRQYGPNVPEPILQKLVAAFGELRSLADQGIINYPYSTREVVNIVKHLQKFPTEGLSSVVRNVFDFDSYNNDMREILINTLHKYGIPIGAKPTSVQLAKELTLPEQTFMGYWTIGQARSGMQKLLCPVETHHIDIKGPALINIQEYPIERHEERSLNFTEECASWRIPLDEINIICDIATSHENEQNTLYVVTCNPASLYFMNMTGKSGFFVDFFDIFPRTANGVWHPFVTVAPLGSPLKGQVVLHEQQSNVILLLDTTGRALHRLILPSEKFTSKKPFWWNKEEAETYKMCKEFSHKNWLVFYKEKGNSLTVLDVLEGRTHTISLPINLKTVFLVAEDKWLLVESKTNQKYLLTKPAHIESEGSGVCQLYVLKEEPPSTGFGVTQETEFSIPHKISSDQLSSEHLSSAVEQKIASPNRILSDEKNYATIVVGFPDLMSPSEVYSWKRPSSLHKLKGTDTSFYRGKKKRGTPKQSNCVTLLDTNQVVRILPPGEVPLKDIYPKDVTPPQTSGYIEVTDLQSKKLRYIPIPRSESLSPYTTWLSTISDTDALLAEWDKSGVVTVDMGGHIRLWETGLERLQRSLMEWRNMIGQDDRNMQITINRDSGEDVSSPKHGKEDPDNMPHVGGNTWAGGTGGRDTAGLGGKGGPYRLDAGHTVYQVSQAEKDAVPEEVKRAAREMGQRAFQQRLKEIQMSEYDAATYERFSGAVRRQVHSLRIILDNLQAKGKERQWLRHQATGELDDAKIIDGLTGEKAIYKRRGELEPQLGSPQQKPKRLRLVVDVSGSMYRFNRMDGRLERTMEAVCMVMEAFENYEEKFQYDIVGHSGDGYNIGLVPMNKIPKDNKQRLEILKTMHAHSQFCMSGDHTLEGTEHAIKEIVKEEADEYFVIVLSDANLSRYGIHPAKFAQILTRDPQVNAFAIFIGSLGDQATRLQRTLPAGRSFVAMDTKDIPQILQQIFTSTMLSSV

SEQ ID NO: 738043 - protein, 1263 aa, Homo sapiens
MERGRRSEGEYEGILSTRQLLRISRRLSQYPNENLHSAVTKACLSRFLPSLARSALEKNLADATIEINTDDNLEPELKDYKCEVTSGTLRIGAVSAPIYNAHEKMKVPDVLFYDNIQHVIVMEDMLKDFLLGEHLLLVGNQGVGKNKIVDRFLHLLNRPREYIQLHRDTTVQTLTLQPSVKDGLIVYEDSPLVKAVKLGHILVVDEADKAPTNVTCILKTLVENGEMILADGRRIVANSANVNGRENVVVIHPDFRMIVLANRPGFPFLGNDFFGTLGDIFSCHAVDNPKPHSELEMLRQYGPNVPEPILQKLVAAFGELRSLADQGIINYPYSTREVVNIVKHLQKFPTEGLSSVVRNVFDFDSYNNDMREILINTLHKYGIPIGAKPTSVQLAKELTLPEQTFMGYWTIGQARSGMQKLLCPVETHHIDIKGPALINIQEYPIERHEERSLNFTEECASWRIPLDEINIICDIATSHENEQNTLYVVTCNPASLYFMNMTGKSGFFVDFFDIFPRTANGVWHPFVTVAPLGSPLKGQVVLHEQQSNVILLLDTTGRALHRLILPSEKFTSKKPFWWNKEEAETYKMCKEFSHKNWLVFYKEKGNSLTVLDVLEGRTHTISLPINLKTVFLVAEDKWLLVESKTNQKYLLTKPAHIESEGSGVCQLYVLKEEPPSTGFGVTQETEFSIPHKISSDQLSSEHLSSAVEQKIASPNRILSDEKNYATIVVGFPDLMSPSEVYSWKRPSSLHKLKGTDTSFYRGKKKRGTPKQSNCVTLLDTNQVVRILPPGEVPLKDIYPKDVTPPQTSGYIEVTDLQSKKLRYIPIPRSESLSPYTTWLSTISDTDALLAEWDKSGVVTVDMGGHIRLWETGLERLQRSLMEWRNMIGQDDRNMQITINRDSGEDVSSPKHGKEDPDNMPHVGGNTWAGGTGGRDTAGLGGKGGPYRLDAGHTVYQVSQAEKDAVPEEVKRAAREMGQRAFQQRLKEIQMSEYDAATYERFSGAVRRQVHSLRIILDNLQAKGKERQWLRHQATGELDDAKIIDGLTGEKAIYKRRGELEPQLGSPQQKPKRLRLVVDVSGSMYRFNRMDGRLERTMEAVCMVMEAFENYEEKFQYDIVGHSGDGYNIGLVPMNKIPKDNKQRLEILKTMHAHSQFCMSGDHTLEGTEHAIKEIVKEEADEYFVIVLSDANLSRYGIHPAKFAQILTRDPQVNAFAIFIGSLGDQATRLQRTLPAGRSFVAMDTKDIPQILQQIFTSTMLSSV

SEQ ID NO: 738044 - protein, 1562 aa, Homo sapiens
DSFPMMPIKHAIQWLYPYSILLGHEGKMAVEGVLKRFELQDSGSSLLPKEIVKVEKMMENHVSQASVTIRIADKEVTIKVPAGTRLLSQPCASDRFIQTLSHKQLQAEMMQSHMVKDICLIGGKGCGKTVIAKNFADTLGYNIEPIMLYQDMTARDLLQQRYTLPNGDTAWRSSPLVNAALEGKLVLLDGIHRVNAGTLAVLQRLIHDRELSLYDGSRLLREDRYMRLKEELQLSDEQLQKRSIFPIHPSFRIIALAEPPVIGSTAHQWLGPEFLTMFFFHYMKPLVKSEEIQVIKEKVPNVPQEALDKLLSFTHKLRETQDPTAQSLAASLSTRQLLRISRRLSQYPNENLHSAVTKACLSRFLPSLARSALEKNLADATIEINTDDNLEPELKDYKCEVTSGTLRIGAVSAPIYNAHEKMKVPDVLFYDNIQHVIVMEDMLKDFLLGEHLLLVGNQGVGKNKIVDRFLHLLNRPREYIQLHRDTTVQTLTLQPSVKDGLIVYEDSPLVKAVKLGHILVVDEADKAPTNVTCILKTLVENGEMILADGRRIVASEYFEKAIPGFPFLGNDFFGTLGDIFSCHAVDNPKPHSELEMLRQYGPNVPEPILQKLVAAFGELRSLADQGIINYPYSTREVVNIVKHLQKFPTEGLSSVVRNVFDFDSYNNDMREILINTLHKYGIPIGAKPTSVQLAKELTLPEQTFMGYWTIGQARSGMQKLLCPVETHHIDIKGPALINIQEYPIERHEERSLNFTEECASWRIPLDEINIICDIATSHENEQNTLYVVTCNPASLYFMNMTGKSGFFVDFFDIFPRTANGVWHPFVTVAPLGSPLKGQVVLHEQQSNVILLLDTTGRALHRLILPSEKFTSKKPFWWNKEEAETYKMCKEFSHKNWLVFYKEKGNSLTVLDVLEGRTHTISLPINLKTVFLVAEDKWLLVESKTNQKYLLTKPAHIESEGSGVCQLYVLKEEPPSTGFGVTQETEFSIPHKISSDQLSSEHLSSAVEQKIASPNRILSDEKNYATIVVGFPDLMSPSEVYSWKRPSSLHKLKGTDTSFYRGKKKRGTPKQSNCVTLLDTNQVVRILPPGEVPLKDIYPKDVTPPQTSGYIEVTDLQSKKLRYIPIPRSESLSPYTTWLSTISDTDALLAEWDKSGVVTVDMGGHIRLWETGLERLQRSLMEWRNMIGQDDRNMQITINRDSGEDVSSPKHGKEDPDNMPHVGGNTWAGGTGGRDTAGLGGKGGPYRLDAGHTVYQVSQAEKDAVPEEVKRAAREMGQRAFQQRLKEIQMSEYDAATYERFSGAVRRQVHSLRIILDNLQAKGKERQWLRHQATGELDDAKIIDGLTGEKAIYKRRGELEPQLGSPQQKPKRLRLVVDVSGSMYRFNRMDGRLERTMEAVCMVMEAFENYEEKFQYDIVGHSGDGYNIGLVPMNKIPKDNKQRLEILKTMHAHSQFCMSGDHTLEGTEHAIKEIVKEEADEYFVIVLSDANLSRYGIHPAKFAQILTRDPQVNAFAIFIGSLGDQATRLQRTLPAGRSFVAMDTKDIPQILQQIFTSTMLSSV

SEQ ID NO: 738045 - protein, 714 aa, Homo sapiens
DSFPMMPIKHAIQWLYPYSILLGHEGKMAVEGVLKRFELQDSGSSLLPKEIVKVEKMMENHVSQASVTIRIADKEVTIKVPAGTRLLSQPCASDRFIQTLSHKQLQAEMMQSHMVKDICLIGGKGCGKTVIAKNFADTLGYNIEPIMLYQDMTARDLLQQRYTLPNGDTAWRSSPLVNAALEGKLVLLDGIHRVNAGTLAVLQRLIHDRELSLYDGSRLLREDRYMRLKEELQLSDEQLQKRSIFPIHPSFRIIALAEPPVIGSTAHQWLGPEFLTMFFFHYMKPLVKSEEIQVIKEKVPNVPQEALDKLLSFTHKLRETQDPTAQSLAASLSTRQLLRISRRLSQYPNENLHSAVTKACLSRFLPSLARSALEKNLADATIEINTDDNLEPELKDYKCEVTSGTLRIGAVSAPIYNAHEKMKVPDVLFYDNIQHVIVMEDMLKDFLLGEHLLLVGNQGVGKNKIVDRFLHLLNRPREYIQLHRDTTVQTLTLQPSVKDGLIVYEDSPLVKAVKLGHILVVDEADKAPTNVTCILKTLVENGEMILADGRRIVANSANVNGRENVVVIHPDFRMIVLANRPGFPFLGNDFFGTLGDIFSCHAVDNPKPHSELEMLRQYGPNVPEPILQKLVAAFGELRSLADQGIINYPYSTREVVNIVKHLQKFPTEGLSSVVRNVFDFDSYNNDMREILINTLHKYGIPIGAKPTSVQLAKE

SEQ ID NO: 738046 - protein, 714 aa, Homo sapiens; identical to SEQ ID NO: 738045

SEQ ID NO: 738047 - protein, 212 aa, Homo sapiens
  misc_feature (4)..(4): Xaa can be any naturally occurring amino acid
  misc_feature (81)..(81): Xaa can be any naturally occurring amino acid
  misc_feature (110)..(110): Xaa can be any naturally occurring amino acid
DPPXLNKNNNYGDDHKEDNKLGDTVVLTAHSGYSSVGAPRSTGQIGKKRFPPPGIQKSEPNWFSRAPLGDPLACGSEELDXGPWKPTLSQTWSQFTDQKVCRASISVEVXRSSGAASCRIRHEILQKLVAAFGELRSLADQGIINYPYSTREVVNIVKHLQKFPTEGLSSVVRNVFDFDSYNNDMREILINTLHKYGIPIGAKPTSVQLAKE

SEQ ID NO: 738048 - protein, 69 aa, Homo sapiens
MEHTQASSWAMSVSSSQGLKSSRMEDLATSSGFLAFFSAYCCSRSSCSCAAFLSSSSLSLPNRSVSSSS

SEQ ID NO: 738049 - protein, 69 aa, Homo sapiens; identical to SEQ ID NO: 738048

SEQ ID NO: 738050 - protein, 69 aa, Homo sapiens; identical to SEQ ID NO: 738048

SEQ ID NO: 738051 - protein, 165 aa, Homo sapiens
MKCVFVTVGTTSFDDLIACVSAPDSLQKIESLGYNRLILQIGRGTVVPEPFSTESFTLDVYRYKDSLKEDIQKADLVISHAGAGSCLETLEKGKPLVVVINEKLMNNHQLELAKQLHKEGHLFYCTCSTLPGLLQSMDLSTLKCYPPGQPEKFSAFLDKVVGLQK

SEQ ID NO: 738052 - protein, 165 aa, Homo sapiens; identical to SEQ ID NO: 738051

SEQ ID NO: 738053 - protein, 165 aa, Homo sapiens; identical to SEQ ID NO: 738051

SEQ ID NO: 738054 - protein, 133 aa, Homo sapiens
MKCVFVTVGTTSFDDLIACVSAPDSLQKIESLGYNRLILQIGRGTVVPEPFSTESFTLDVYRYKDSLKEDIQKADLVISHAGAGSCLETLEKGKPLVVVINEKLMNNHQLELAKQLHKEGHLFYCTCSSSLRH

SEQ ID NO: 738055 - protein, 187 aa, Homo sapiens
KRREWPSLPPSLHLSPMLDTSCLQTSDSKFFSFGTRTGSPCSSACRHPIVGPCDCKIESLGYNRLILQIGRGTVVPEPFSTESFTLDVYRYKDSLKEDIQKADLVISHAGAGSCLETLEKGKPLVVVINEKLMNNHQLELAKQLHKEGHLFYCTCRLILKKCLLVVEGGDKEILWVAGGSQLGLKFC

SEQ ID NO: 738056 - protein, 170 aa, Homo sapiens
MNNHQLELAKQLHKEGHLFYCTCRVLTCPGQAKSIASAPGKCQDSAALTSTAFSGLDFGLLSGYLHKQALVTATHPTCTLLFPSCHAFFPLPLTPTLYKMHKGWKNYCSQKSLNEASMDEYLGSLGLFRKLTAKDASCLFRAISEQLFCSQVHHLEIRKACVSYMRENQQ

SEQ ID NO: 738057 - protein, 165 aa, Homo sapiens; identical to SEQ ID NO: 738051

SEQ ID NO: 738058 - protein, 170 aa, Homo sapiens; identical to SEQ ID NO: 738056

SEQ ID NO: 738059 - protein, 53 aa, Homo sapiens
MHRVLLTGETPLELGMQNSYEGLLPRSGLDHLQGWTFNLLGSFPGDESMLGGS

SEQ ID NO: 738060 - protein, 67 aa, Homo sapiens
MDHWTMSSGIRMSEGQDQKNGPGRPTYTHVWTAWCPSLSHVSNGLCFQSGAVHESCGLSSPDCSSMK

SEQ ID NO: 738061 - protein, 459 aa, Homo sapiens
  misc_feature (2)..(4): Xaa can be any naturally occurring amino acid
EXXXGRAILFCKQCQRYFQPPGTWIQCALESRELLALCLKKIKAPLSKVRLVDAGFVWTEPHSKRLKVKLTIQKEVMNGAILQQVFVVDYVVQSQMCGDCHRVEAKDFWKAVIQVRQKTLHKKTFYYLEQLILKYGMHQNTLRIKEIHDGLDFYYSSKQHAQKMVEFLQCTVPCRYKASQRLISQDIHSNTYNYKSTFSVEIVPICKDNVVCLSPKLAQSLGNMNQICVCIRVTSAIHLIDPNTLQVADIDGSTFWSHPFNSLCHPKQLEEFIVMECSIVQDIKRAAGAGMISKKHTLGEVWVQKTSEMNTDKQYFCHTHLGHLLNPGELVLGFDLANCNLNDEHGNKMNSDRVPDVVLIKKNYDWTKRQRRRNWKLKELARERENMDTDDERQYQDFLEDLEEDEAIRKNVNIYRDSAIPVESDTDDEGAPRISLAEMLEDLHISQDATGEEGASMLT

SEQ ID NO: 738062 - protein, 319 aa, Homo sapiens
VWRCEAYRTMEYMTESTDRSPGLILCCECGIAISPNPANICVACLQSKVGISQDIPKQVSLLFCKQCQRYFQPPGTWIQCALESRELLALCLKKIKAPLSKVRLVDAGFVWTEPHSKRLKVKLTIQKEVMNGAILQQVFVVDYVVQSQMCGDCHRVEAKDFWKAVIQVRQKTLHKKTFYYLEQLILKYGMHQNTLRIKEIHDGLDFYYSSKQHAQKMVEFLQCTVPCRYKASQRLISQDIHSNTYNYKSTFSVEIVPICKDNVVCLSPKLAQSLGNMNQICVCIRVTSAIHLIDPNTLQVADIDGSTFWSHPFNSLCHP

SEQ ID NO: 738063 - protein, 57 aa, Homo sapiens
MAGIMAISMKLALYPRQGRSHQSLVDTSAGKPAAKVGVGSHPEEVGRALEDSTWSPD

SEQ ID NO: 738064 - protein, 146 aa, Homo sapiens [sequence omitted]

SEQ ID NO: 738065 - protein, 81 aa, Homo sapiens
FEDNRDLALLRVNIVNLNAYCTVVDIGREDQRDRLNGCWLQDRPGNGPLGHILAHRSPCCHLPLSTERIVRKHNLVNRGFG

SEQ ID NO: 738066 - protein, 79 aa, Homo sapiens
PAAGVGIRQCSPVRGWAGKSCVSFEHMSVKSCFLSSPIAGPHHSSCLKVLVGVTGWWLVSGVSKWVTALCGSRGWPCPR

SEQ ID NO: 738067 - protein, 127 aa, Homo sapiens
LGALRGIFLSPRAWVGISRHEKGDTGVQDWGCPWASLRLPPRIGTCLPHLSSGTAPIQLGVLGNLVQGAGRAQSGPGFPRDHTAGWGALAGAHFAHPEWASCQPCPTLTPLHQACCSWRAEPIYRSL

SEQ ID NO: 738068 - protein, 103 aa, Homo sapiens
PFLSLSLSHTHTYIHAWRHRYTQLFCIVFWILFQSLSSCMFHSCEAKQSQRISELTVTTVQKISSNPQQGGEWLLIHPNEVISSSLCWSSVNKKTDNPASFAE

SEQ ID NO: 738069 - protein, 394 aa, Homo sapiens
MTAGRSQERRAQEMGRGSVQGLDLKGDLEFFTAPMLSLRSFVFVGVGSGLTSSHIPAQRWAEWGQCLAPPARSLLTSGSLCCPRTMNGTYNTCGSSDLTWPPAIKLGFYAYLGVLLVLGLLLNSLALWVFCCRMQQWTETRIYMTNLAVADLCLLCTLPFVLHSLRDTSDTPLCQLSQGIYLTNRYMSISLVTAIAVDRYVAVRHPLRARGLRSPRQAAAVCAVLWVLVIGSLVARWLLGIQEGGFCFRSTRHNFNSMAFPLLGFYLPLAVVVFCSLKVVTALAQRPPTDVGQAEATRKAARMVWANLLVFVVCFLPLHVGLTVRLAVGWNACALLETIRRALYITSKLSDANCCLDAICYYYMAKEFQEASALAVAPSAKAHKSQDSLCVTLA

SEQ ID NO: 738070 - protein, 394 aa, Homo sapiens; identical to SEQ ID NO: 738069

SEQ ID NO: 738071 - protein, 444 aa, Homo sapiens
PIRLMQVLMSRRGIKDILAKPITDYLVPGRACWAGDWRGTWSSFCLLSCPMTAGRSQERRAQEMGRGSVQGLDLKGDLEFFTAPMLSLRSFVFVGVGSGLTSSHIPAQRWAEWGQCLAPPARSLLTSGSLCCPRTMNGTYNTCGSSDLTWPPAIKLGFYAYLGVLLVLGLLLNSLALWVFCCRMQQWTETRIYMTNLAVADLCLLCTLPFVLHSLRDTSDTPLCQLSQGIYLTNRYMSISLVTAIAVDRYVAVRHPLRARGLRSPRQAAAVCAVLWVLVIGSLVARWLLGIQEGGFCFRSTRHNFNSMAFPLLGFYLPLAVVVFCSLKVVTALAQRPPTDVGQAEATRKAARMVWANLLVFVVCFLPLHVGLTVRLAVGWNACALLETIRRALYITSKLSDANCCLDAICYYYMAKEFQEASALAVAPSAKAHKSQDSLCVTLA

SEQ ID NO: 738072 - protein, 71 aa, Homo sapiens
SRVINFFTSVVVSAHPVRWHSIHPLNIQTVTKQWECPKARSKSTKSIWSPARGSVGLGGLPEECWFPPEIP

SEQ ID NO: 738073 - protein, 111 aa, Homo sapiens [sequence omitted]

SEQ ID NO: 738074 - protein, 73 aa, Homo sapiens
  misc_feature (18)..(18): Xaa can be any naturally occurring amino acid
IQEIDMTAIMALATGRDXRVSAVSGNQRVASLLIDAGANVNVKDRNGKTPLMSVVSLLEERKKKQRPKKSCVC

SEQ ID NO: 738075 - protein, 148 aa, Homo sapiens
VTQINMSHRSLLYIVLHHPEIMPPSKPHPPVVGKVTHHSIELYWDLEKKAKRQGPQEQWFRFSIEEEDPKMHTYGIIYTGYATKHVVEGLEPRTLYRFRLKVTSPSGECEYSPLVSVSTTREPISSEHLHRAVSVNDEDLLVRILQGG

SEQ ID NO: 738076 - protein, 336 aa, Homo sapiens
MEPQKIMPPSKPHPPVVGKVTHHSIELYWDLEKKAKRQGPQEQWFRFSIEEEDPKMHTYGIIYTGYATKHVVEGLEPRTLYRFRLKVTSPSGECEYSPLVSVSTTREPISSEHLHRAVSVNDEDLLVRILQGGRVKVDVPNKFGFTALMVAAQKGYTRLVKILVSNGTDVNLKNGSGKDSLMLACYAGHLDVVKYLRRHGASWQARDLGGCTALHWAADGGHCSVIEWMIKDGCEVDVVDTGSGWTPLMRVSAVSGNQRVASLLIDAGANVNVKDRNGKTPLMVAVLNNHEELVQLLLDKGADASVKNEFGKGVLEMARVFDRQVGMLFLPIKANF

SEQ ID NO: 738077 - protein, 188 aa, Homo sapiens
MVAAQKGYTRLVKILVSNGTDVNLKNGSGKDSLMLACYAGHLDVVKYLRRHGASWQARDLGGCTALHWAADGGHCSVIEWMIKDGCEVDVVDTGSGWTPLMRVSAVSGNQRVASLLIDAGANVNVKDRNGKTPLMVAVLNNHEELVQLLLDKGADASVKNEFGKGVLEMARVFDRQVGMLFLPIKANF

SEQ ID NO: 738078 - protein, 304 aa, Homo sapiens
MEPQKIMPPSKPHPPVVGKVTHHSIELYWDLEKKAKRQGPQEQWFRFSIEEEDPKMHTYGIIYTGYATKHVVEGLEPRTLYRFRLKVTSPSGECEYSPLVSVSTTREPISSEHLHRAVSVNDEDLLVRILQGGRVKVDVPNKFGFTALMVAAQKGYTRLVKILVSNGTDVNLKNGSGKDSLMLACYAGHLDVVKYLRRHGASWQARDLGGCTALHWAADGGHCSVIEWMIKDGCEVDVVDTGSGWTPLMRVSAVSGNQRVASLLIDAGANVNVKDRNGKTPLMSVVSLLEERKKKQRPKKSCVC

SEQ ID NO: 738079 - protein, 330 aa, Homo sapiens
MPPSKPHPPVVGKVTHHSIELYWDLEKKAKRQGPQEQWFRFSIEEEDPKMHTYGIIYTGYATKHVVEGLEPRTLYRFRLKVTSPSGECEYSPLVSVSTTREPISSEHLHRAVSVNDEDLLVRILQGGRVKVDVPNKFGFTALMVAAQKGYTRLVKILVSNGTDVNLKNGSGKDSLMLACYAGHLDVVKYLRRHGASWQARDLGGCTALHWAADGGHCSVIEWMIKDGCEVDVVDTGSGWTPLMRVSAVSGNQRVASLLIDAGANVNVKDRNGKTPLMVAVLNNHEELVQLLLDKGADASVKNEFGKGVLEMARVFDRQVGMLFLPIKANF

SEQ ID NO: 738080 - protein, 330 aa, Homo sapiens; identical to SEQ ID NO: 738079

SEQ ID NO: 738081 - protein, 345 aa, Homo sapiens
MEPQKIMPPSKPHPPVVGKVTHHSIELYWDLEKKAKRQGPQEQWFRFSIEEEDPKMHTYGIIYTGYATKHVVEGLEPRTLYRFRLKVTSPSGECEYSPLVSVSTTREPISSEHLHRAVSVNDEDLLVRILQGGRVKVDVPNKFGFTALMVAAQKGYTRLVKILVSNGTDVNLKNGSGKDSLMLACYAGHLDVVKYLRRHGASWQARDLGGCTALHWAADGGHCSVIEWMIKDGCEVDVVDTGSGWTPLMRVSAVSGNQRVASLLIDAGANVNVKDRNGKTPLMVAVLNNHEELVQLLLDKGADASVKNEFGKGVLEMARVFDRQSVVSLLEERKKKQRPKKSCVC

SEQ ID NO: 738082 - protein, 248 aa, Homo sapiens
MEPQKIMPPSKPHPPVVGKVTHHSIELYWDLEKKAKRQGPQEQWFRFSIEEEDPKMHTYGIIYTGYATKHVVEGLEPRTLYRFRLKVTSPSGECEYSPLVSVSTTREPISSEHLHRAVSVNDEDLLVRILQGGRVKVDVPNKFGFTALMVAAQKGYTRLVKILVSNGTDVNLKNGSGKDSLMLACYAGHLDVVKYLRRHGASWQARDLGGCTALHWAADGGHCSVIEWMIKDGCEVAHLMLLKPMGRT

SEQ ID NO: 738083 - protein, 288 aa, Homo sapiens
MPPSKPHPPVVGKVTHHSIELYWDLEKKAKRQGPQEQWFRFSIEEEDPKMHTYGIIYTGYATKHVVEGLEPRTLYRFRLKVTSPSGECEYSPLVSVSTTREPISSEHLHRAVSVNDEDLLVRILQGGRVKVDVPNKFGFTALMVAAQKGYTSLMLACYAGHLDVVKYLRRHGASWQARDLGGCTALHWAADGGHCSVIEWMIKDGCEVDVVDTGSGWTPLMRVSAVSGNQRVASLLIDAGANVNVKDRNGKTPLMVAVLNNHEELVQLLLDKGADASVKNEVNESIFM

SEQ ID NO: 738084 - protein, 268 aa, Homo sapiens
MEPQKIMPPSKPHPPVVGKVTHHSIELYWDLEKKAKRQGPQEQWFRFSIEEEDPKMHTYGIIYTGYATKHVVEGLEPRTLYRFRLKVTSPSGECEYSPLVSVSTTREPISSEHLHRAVSVNDEDLLVRILQGGRVKVDVPNKFGFTALMVAAQKGYTRLVKILVSNGTDVNLKNGSGKDSLMLACYAGHLDVVKYLRRHGASWQARDLGGCTALHWAADGGHCSVISCCYGCGVGQRLQLQFDPCLGTSICRRYSPKKEKKRNFGRDS

SEQ ID NO: 738085 - protein, 104 aa, Homo sapiens
LRRIPNGLSAKVSQFFQSGFSGFLSWREISAFSDVRAGADNGAKLGFSELKVCLILKFLLEGKKGRLKGHQELEGKKGRLKGHQELEGKKGRLKGHQELRSCVW

SEQ ID NO: 738086 - protein, 113 aa, Homo sapiens
WGRPQLCKLLWPWVTKPTRALSFLWGGAGKASGPWGWRALRSSVPFTSAEGKESPKAQSCARLGVTRARHSGGQGVEGGAGAGVEEELDPVAVGSQLPKAKTRATVAGTEIKL

SEQ ID NO: 738087 - protein, 758 aa, Homo sapiens
MSGESGQPEAGPSHAGLDWPNPERNRAGVPGGVIRRAGSQGPRSWIQKVLEQIMDSPRQCVTPSEVVPVTVLAVQRYLLEDEPRDTVPKPPLYCYDVTISDGVYQEKCYLDPSLNSLVYQNILKVGIQMRISRVSCLYNEKRIGQGILCIDNVHCGETSDSISLETPFRNRAHQEKPERPLRGGKSHYLALWNNEDPYGDIWLTDKQPEEHNFSDTKIISLSHLEMTWTNRRNFPALLVRILHKSKLRYYGKPDKKMIEPYQTFLEVADSSGTVSVIMWNALCPEWYKSLRVGLVLLLQDYSVKKSYPFRIQPVPVDPQIKLISTMEICLNLRDPPTNIIIIPEKQVKPEWRLPKLNHRFTTRSELDDMPENCICDVIGLLVFVGRVQRSKKKENREDFWSYRWIHIADGTSEQPFIVELFSTSQPEIFENIYPMAYFVCTQLKVVRNDNQVPKLLYLTTTNESGVFITGHRGQPYTYDAKNANRPSTSQAARVEIQERNGKRHQDDEPVNSQYFQTTSTNLSLSNKIRILQGPHANPVAVPQPGASVQTKGIKPGMPSIFNRRANINANLQGKARKTISDRWESQLWREKKFGLIDHLHYSRVYPESIPRKFMFEHRKFLSDQYNSQPAKYVPPEGRPPKLDDFKSARSLGHFEVTILGLNHEIAIDVAFLPMYCPEDIRTSQIDTLLTSMNYSCAYPQDTTGNDRLPGPRAVAGDIIKAATELDRVHIVGILDICNLGNNKVEVYLHKIYSPENTS

SEQ ID NO: 738088 - protein, 567 aa, Homo sapiens
MSGESGQPEAGPSHAGLDWPNPERNRAGVPGGVIRRAGSQGPRSWIQKVLEQIMDSPRQCVTPSEVVPVTVLAVQRYLLEDEPRDTVPKPPLYCYDVTISDGVYQEKCYLDPSLNSLVYQNILKVGIQMRISRVSCLYNEKRIGQGILCIDNVHCGETSDSISLETPFRNRAHQEKPERPLRGGKSHYLALWNNEDPYGDIWLTDKQPEEHNFSDTKIISLSHLEMTWTNRRNFPALLVRILHKSKLRYYGKPDKKMIEPYQTFLEVADSSGTVSVIMWNALCPEWYKSLRVGLVLLLQDYSVKKSYPFRIQPVPVDPQIKLISTMEICLNLRDPPTNIIIIPEKQVKPEWRLPKLNHRFTTRSELDDMPENCICDVIGLLVFVGRVQRSKKKENREDFWSYRWIHIADGTSEQPFIVELFSTSQPEIFENIYPMAYFVCTQLKVVRNDNQVPKLLYLTTTNESGVFITGHRGQPYTYDAKVKNFIQWIRTKSDSGEQKNMVIGGYYPYPPVPETFSKYSSSIKGTNVIASPSKYVYILYVWLMLFQLVIFILFFYGSDLKFSNIHR

SEQ ID NO: 738089 - protein, 135 aa, Homo sapiens
ICKTSVSPRVFIYGGKHQPHFRPRFLWDTGYAQLVHHNHNAARRPTKSVDKKRSSRRPMRVRNTFFVDELVDVALLGLKMGSPYVAQAGLELLGSRNPSTSGSQSAEITGCELPHPAMKTSVNLNYRVLLKVRYT

SEQ ID NO: 738090 - protein, 135 aa, Homo sapiens; identical to SEQ ID NO: 738089

SEQ ID NO: 738091 - protein, 90 aa, Homo sapiens
TCAHNLGDLEIEPPHLPRLMPMHTLWAPEDRALFAYCHLHTISRVLEIGLLYPPLLSLTNVIQWHKDRPFLLTTGKCAHIPESQGLACSA

SEQ ID NO: 738092 - protein, 119 aa, Homo sapiens
MAALISPGSVRKLKLQFHKILGRFACTSEHPVSSLQQPFIRCRHSFSLSALLCLHVPFYPSQMSCPILVTLFKHPLKITIGRVRCLTPVTPTLWEAKASGSQGQEIETILANMVKPRLY

SEQ ID NO: 738093 - protein, 128 aa, Homo sapiens
MAALISPGSVRKLKLQFHKILGRFACTSEHPVSSLQQPFIRCRHSFSLSALLCLHVPFYPSQMRCLQFMTQVITVTTTIFLGTTYDAISPELYTTYFVYQDPSCNLPVIMNSNSRPRDSDTLVWIGGY

SEQ ID NO: 738094 - protein, 850 aa, Homo sapiens
MRQVCCSALPPPPLEKGRCSSYSDSSSSSSERSSSSSSSSSESGSSSRSSSNNSSISRPAAPPEPRPQQQPQPRSPAARRAAARSRAAAAGGMRRDPAPGFSMLLFGVSLACYSPSLKSVQDQAYKAPVVVEGKVQGLVPAGGSSSNSTREPPASGRVALVKVLDKWPLRSGGLQREQVISVGSCVPLERNQRYIFFLEPTEQPLVFKTAFAPLDTNGKNLKKEVGKILCTDCATRPKLKKMKSQTGQVGEKQSLKCEAAAGNPQPSYRWFKDGKELNRSRDIRIKYGNGRKNSRLQFNKVKVEDAGEYVCEAENILGKDTVRGRLYVNSVSTTLSSWSGHARKCNETAKSYCVNGGVCYYIEGINQLSCKCPNGFFGQRCLEKLPLRLYMPDPKQKAEELYQKRVLTITGICVALLVVGIVCVVAYCKTKKQRKQMHNHLRQNMCPAHQNRSLANGPSHPRLDPEEIQMADYISKNVPATDHVIRRETETTFSGSHSCSPSHHCSTATPTSSHRHESHTWSLERSESLTSDSQSGIMLSSVGTSKCNSPACVEARARRAAAYNLEERRRATAPPYHDSVDSLRDSPHSERYVSALTTPARLSPVDFHYSLATQVPTFEITSPNSAHAVSLPPAAPISYRLAEQQPLLRHPAPPGPGPGPGPGPGPGADMQRSYDSYYYPAAGPGPRRGTCALGGSLGSLPASPFRIPEDDEYETTQECAPPPPPRPRARGASRRTSAGPRRWRRSRLNGLAAQRARAARDSLSLSSGSGGGSASASDDDADDADGALAAESTPFLGLRGAHDALRSDSPPLCPAADSRTYYSLDSHSTRASSRHSRGPPPRAKQDSAPL

SEQ ID NO: 738095 - protein, 858 aa, Homo sapiens
MRQVCCSALPPPPLEKGRCSSYSDSSSSSSERSSSSSSSSSESGSSSRSSSNNSSISRPAAPPEPRPQQQPQPRSPAARRAAARSRAAAAGGMRRDPAPGFSMLLFGVSLACYSPSLKSVQDQAYKAPVVVEGKVQGLVPAGGSSSNSTREPPASGRVALVKVLDKWPLRSGGLQREQVISVGSCVPLERNQRYIFFLEPTEQPLVFKTAFAPLDTNGKNLKKEVGKILCTDCATRPKLKKMKSQTGQVGEKQSLKCEAAAGNPQPSYRWFKDGKELNRSRDIRIKYGNGRKNSRLQFNKVKVEDAGEYVCEAENILGKDTVRGRLYVNSVSTTLSSWSGHARKCNETAKSYCVNGGVCYYIEGINQLSCKCPNGFFGQRCLEKLPLRLYMPDPKQKHLGFELKEAEELYQKRVLTITGICVALLVVGIVCVVAYCKTKKQRKQMHNHLRQNMCPAHQNRSLANGPSHPRLDPEEIQMADYISKNVPATDHVIRRETETTFSGSHSCSPSHHCSTATPTSSHRHESHTWSLERSESLTSDSQSGIMLSSVGTSKCNSPACVEARARRAAAYNLEERRRATAPPYHDSVDSLRDSPHSERYVSALTTPARLSPVDFHYSLATQVPTFEITSPNSAHAVSLPPAAPISYRLAEQQPLLRHPAPPGPGPGPGPGPGPGADMQRSYDSYYYPAAGPGPRRGTCALGGSLGSLPASPFRIPEDDEYETTQECAPPPPPRPRARGASRRTSAGPRRWRRSRLNGLAAQRARAARDSLSLSSGSGGGSASASDDDADDADGALAAESTPFLGLRGAHDALRSDSPPLCPAADSRTYYSLDSHSTRASSRHSRGPPPRAKQDSAPL

SEQ ID NO: 738096 - protein, 852 aa, Homo sapiens
MRQVCCSALPPPPLEKGRCSSYSDSSSSSSERSSSSSSSSSESGSSSRSSSNNSSISRPAAPPEPRPQQQPQPRSPAARRAAARSRAAAAGGMRRDPAPGFSMLLFGVSLACYSPSLKSVQDQAYKAPVVVEGKVQGLVPAGGSSSNSTREPPASGRVALVKVLDKWPLRSGGLQREQVISVGSCVPLERNQRYIFFLEPTEQPLVFKTAFAPLDTNGKNLKKEVGKILCTDCATRPKLKKMKSQTGQVGEKQSLKCEAAAGNPQPSYRWFKDGKELNRSRDIRIKYGNGRKNSRLQFNKVKVEDAGEYVCEAENILGKDTVRGRLYVNSVSTTLSSWSGHARKCNETAKSYCVNGGVCYYIEGINQLSCKCPVGYTGDRCQQFAMVNFSKHLGFELKEAEELYQKRVLTITGICVALLVVGIVCVVAYCKTKKQRKQMHNHLRQNMCPAHQNRSLANGPSHPRLDPEEIQMADYISKNVPATDHVIRRETETTFSGSHSCSPSHHCSTATPTSSHRHESHTWSLERSESLTSDSQSGIMLSSVGTSKCNSPACVEARARRAAAYNLEERRRATAPPYHDSVDSLRDSPHSERYVSALTTPARLSPVDFHYSLATQVPTFEITSPNSAHAVSLPPAAPISYRLAEQQPLLRHPAPPGPGPGPGPGPGPGADMQRSYDSYYYPAAGPGPRRGTCALGGSLGSLPASPFRIPEDDEYETTQECAPPPPPRPRARGASRRTSAGPRRWRRSRLNGLAAQRARAARDSLSLSSGSGGGSASASDDDADDADGALAAESTPFLGLRGAHDALRSDSPPLCPAADSRTYYSLDSHSTRASSRHSRGPPPRAKQDSAPL

SEQ ID NO: 738097 - protein, 844 aa, Homo sapiens
MRQVCCSALPPPPLEKGRCSSYSDSSSSSSERSSSSSSSSSESGSSSRSSSNNSSISRPAAPPEPRPQQQPQPRSPAARRAAARSRAAAAGGMRRDPAPGFSMLLFGVSLACYSPSLKSVQDQAYKAPVVVEGKVQGLVPAGGSSSNSTREPPASGRVALVKVLDKWPLRSGGLQREQVISVGSCVPLERNQRYIFFLEPTEQPLVFKTAFAPLDTNGKNLKKEVGKILCTDCATRPKLKKMKSQTGQVGEKQSLKCEAAAGNPQPSYRWFKDGKELNRSRDIRIKYGNGRKNSRLQFNKVKVEDAGEYVCEAENILGKDTVRGRLYVNSVSTTLSSWSGHARKCNETAKSYCVNGGVCYYIEGINQLSCKCPVGYTGDRCQQFAMVNFSKAEELYQKRVLTITGICVALLVVGIVCVVAYCKTKKQRKQMHNHLRQNMCPAHQNRSLANGPSHPRLDPEEIQMADYISKNVPATDHVIRRETETTFSGSHSCSPSHHCSTATPTSSHRHESHTWSLERSESLTSDSQSGIMLSSVGTSKCNSPACVEARARRAAAYNLEERRRATAPPYHDSVDSLRDSPHSERYVSALTTPARLSPVDFHYSLATQVPTFEITSPNSAHAVSLPPAAPISYRLAEQQPLLRHPAPPGPGPGPGPGPGPGADMQRSYDSYYYPAAGPGPRRGTCALGGSLGSLPASPFRIPEDDEYETTQECAPPPPPRPRARGASRRTSAGPRRWRRSRLNGLAAQRARAARDSLSLSSGSGGGSASASDDDADDADGALAAESTPFLGLRGAHDALRSDSPPLCPAADSRTYYSLDSHSTRASSRHSRGPPPRAKQDSAPL

SEQ ID NO: 738098 - protein, 278 aa, Homo sapiens
  misc_feature (7)..(7): Xaa can be any naturally occurring amino acid
PPPRRPXLALAHASASPRRYVSALTTPARLSPVDFHYSLATQVPTFEITSPNSAHAVSLPPAAPISYRLAEQQPLLRHPAPPGPGPGPGPGPGPGADMQRSYDSYYYPAAGPGPRRGTCALGGSLGSLPASPFRIPEDDEYETTQECAPPPPPRPRARGASRRTSAGPRRWRRSRLNGLAAQRARAARDSLSLSSGSGGGSASASDDDADDADGALAAESTPFLGLRGAHDALRSDSPPLCPAADSRTYYSLDSHSTRASSRHSRGPPPRAKQDSAPL

SEQ ID NO: 738099 - protein, 263 aa, Homo sapiens
GRGKKHPEGRKREREPDPGEKATRPKLKKMKSQTGQVGEKQSLKCEAAAGNPQPSYRWFKDGKELNRSRDIRIKYGNGRKNSRLQFNKVKVEDAGEYVCEAENILGKDTVRGRLYVNSVSTTLSSWSGHARKCNETAKSYCVNGGVCYYIEGINQLSCKAPGLHCLELGTQSHHFPISASPGSSQGSWNQLPQHPLSALGGEGSPGGDAVRTPGPQSCAGEGQGGGGQGRAQRPFCGWTSWEGRWAGLLGFLMTPEWNKKERT

SEQ ID NO: 738100 - protein, 870 aa, Homo sapiens
MRQVCCSALPPPPLEKGRCSSYSDSSSSSSERSSSSSSSSSESGSSSRSSSNNSSISRPAAPPEPRPQQQPQPRSPAARRAAARSRAAAAGGMRRDPAPGFSMLLFGVSLACYSPSLKSVQDQAYKAPVVVEGKVQGLVPAGGSSSNSTREPPASGRVALVKVLDKWPLRSGGLQREQVISVGSCVPLERNQRYIFFLEPTEQPLVFKTAFAPLDTNGKNLKKEVGKILCTDCATRPKLKKMKSQTGQVGEKQSLKCEAAAGNPQPSYRWFKDGKELNRSRDIRIKYGNGRKNSRLQFNKVKVEDAGEYVCEAENILGKDTVRGRLYVNSVSTTLSSWSGHARKCNETAKSYCVNGGVCYYIEGINQLSCKCPNGFFGQRCLEKLPLRLYMPDPKQSVLWDDTGDRCQQFAMVNFSKAEELYQKRVLTITGICVALLVVGIVCVVAYCKTKKQRKQMHNHLRQNMCPAHQNRSLANGPSHPRLDPEEIQMADYISKNVPATDHVIRRETETTFSGSHSCSPSHHCSTATPTSSHRHESHTWSLERSESLTSDSQSGIMLSSVGTSKCNSPACVEARARRAAAYNLEERRRATAPPYHDSVDSLRDSPHSERYVSALTTPARLSPVDFHYSLATQVPTFEITSPNSAHAVSLPPAAPISYRLAEQQPLLRHPAPPGPGPGPGPGPGPGADMQRSYDSYYYPAAGPGPRRGTCALGGSLGSLPASPFRIPEDDEYETTQECAPPPPPRPRARGASRRTSAGPRRWRRSRLNGLAAQRARAARDSLSLSSGSGGGSASASDDDADDADGALAAESTPFLGLRGAHDALRSDSPPLCPAADSRTYYSLDSHSTRASSRHSRGPPPRAKQDSAPL

SEQ ID NO: 738101 - protein, 878 aa, Homo sapiens
MRQVCCSALPPPPLEKGRCSSYSDSSSSSSERSSSSSSSSSESGSSSRSSSNNSSISRPAAPPEPRPQQQPQPRSPAARRAAARSRAAAAGGMRRDPAPGFSMLLFGVSLACYSPSLKSVQDQAYKAPVVVEGKVQGLVPAGGSSSNSTREPPASGRVALVKVLDKWPLRSGGLQREQVISVGSCVPLERNQRYIFFLEPTEQPLVFKTAFAPLDTNGKNLKKEVGKILCTDCATRPKLKKMKSQTGQVGEKQSLKCEAAAGNPQPSYRWFKDGKELNRSRDIRIKYGNGRKNSRLQFNKVKVEDAGEYVCEAENILGKDTVRGRLYVNSVSTTLSSWSGHARKCNETAKSYCVNGGVCYYIEGINQLSCKCPNGFFGQRCLEKLPLRLYMPDPKQSVLWDTPGTGVSSSQWSTSPSTFGFELKEAEELYQKRVLTITGICVALLVVGIVCVVAYCKTKKQRKQMHNHLRQNMCPAHQNRSLANGPSHPRLDPEEIQMADYISKNVPATDHVIRRETETTFSGSHSCSPSHHCSTATPTSSHRHESHTWSLERSESLTSDSQSGIMLSSVGTSKCNSPACVEARARRAAAYNLEERRRATAPPYHDSVDSLRDSPHSERYVSALTTPARLSPVDFHYSLATQVPTFEITSPNSAHAVSLPPAAPISYRLAEQQPLLRHPAPPGPGPGPGPGPGPGADMQRSYDSYYYPAAGPGPRRGTCALGGSLGSLPASPFRIPEDDEYETTQECAPPPPPRPRARGASRRTSAGPRRWRRSRLNGLAAQRARAARDSLSLSSGSGGGSASASDDDADDADGALAAESTPFLGLRGAHDALRSDSPPLCPAADSRTYYSLDSHSTRASSRHSRGPPPRAKQDSAPL

SEQ ID NO: 738102 - protein, 638 aa, Homo sapiens
GRGKKHPEGRKREREPDPGEKATRPKLKKMKSQTGQVGEKQSLKCEAAAGNPQPSYRWFKDGKELNRSRDIRIKYGNGRKNSRLQFNKVKVEDAGEYVCEAENILGKDTVRGRLYVNSVSTTLSSWSGHARKCNETAKSYCVNGGVCYYIEGINQLSCKCPNGFFGQRCLEKLPLRLYMPDPKQKAEELYQKRVLTITGICVALLVVGIVCVVAYCKTKKQRKQMHNHLRQNMCPAHQNRSLANGPSHPRLDPEEIQMADYISKNVPATDHVIRRETETTFSGSHSCSPSHHCSTATPTSSHRHESHTWSLERSESLTSDSQSGIMLSSVGTSKCNSPACVEARARRAAAYNLEERRRATAPPYHDSVDSLRDSPHSERYVSALTTPARLSPVDFHYSLATQVPTFEITSPNSAHAVSLPPAAPISYRLAEQQPLLRHPAPPGPGPGPGPGPGPGADMQRSYDSYYYPAAGPGPRRGTCALGGSLGSLPASPFRIPEDDEYETTQECAPPPPPRPRARGASRRTSAGPRRWRRSRLNGLAAQRARAARDSLSLSSGSGGGSASASDDDADDADGALAAESTPFLGLRGAHDALRSDSPPLCPAADSRTYYSLDSHSTRASSRHSRGPPPRAKQDSAPL

SEQ ID NO: 738103 - protein, 510 aa, Homo sapiens
MRQVCCSALPPPPLEKGRCSSYSDSSSSSSERSSSSSSSSSESGSSSRSSSNNSSISRPAAPPEPRPQQQPQPRSPAARRAAARSRAAAAGGMRRDPAPGFSMLLFGVSLACYSPSLKSVQDQAYKAPVVVEGKVQGLVPAGGSSSNSTREPPASGRVALVKVLDKWPLRSGGLQREQVISVGSCVPLERNQRYIFFLEPTEQPLVFKTAFAPLDTNGKNLKKEVGKILCTDCATRPKLKKMKSQTGQVGEKQSLKCEAAAGNPQPSYRWFKDGKELNRSRDIRIKYGNGRKNSRLQFNKVKVEDAGEYVCEAENILGKDTVRGRLYVNSVSTTLSSWSGHARKCNETAKSYCVNGGVCYYIEGINQLSCKTPLYKDAIPGCCLCPFSPQPPLHGMRGYQQGHYSRAPGLHCLELGTQSHHFPISASPGSSQGSWNQLPQHPLSALGGEGSPGGDAVRTPGPQSCAGEGQGGGGQGRAQRPFCGWTSWEGRWAGLLGFLMTPEWNKKERT

SEQ ID NO: 738104 - protein, 120 aa, Homo sapiens
MPLHSRLGDRDSKNKKRKREKEIESKQAASEWEAVDVANLSLKSGLCTHLLTHSFIHCLFIKYLFGTNTSVGLGAKVNVFQIGILKELETQEIRVNFRNHRYLTFHPASHSFVNARSQCL

SEQ ID NO: 738105 - protein, 114 aa, Homo sapiens
GAGVCRTLHPGQDAQHARPQEPLHTPLVSPHYRQGQPLSWRHRTFNRPALPVLEIYRNRLGQVRWLTPVMPALWEAKADGLLEVRSSRPAWPTWQNPVSSKNTKKISQCGSVHL

SEQ ID NO: 738106 - protein, 173 aa, Homo sapiens
KCAQSTSACLGVRICGMQVYQTDKKYFLCKDKYYGRKLSVEGFRQALYQFLHNGSHLRRELLEPILHQLRALLSVIRSQSSYRFYSSSLLVIYDGQEPPERAPGSPHPHEAPQAAHGSSPGGLTKVDIRMIDFAHTTYKGYWNEHTTYDGPDPGYIFGLENLIRILQDIQEGE

SEQ ID NO: 738107 - protein, 377 aa, Homo sapiens
IKGTGAGQFPTPQRSLSLPSSLALPPPTHWLPPPALSSFCAPGATRQSSRIMEFLSEKFALKSPPSKNSDFYMGAGGPLEHVMETLDNESFYSKASAGKCVQAFGPLPRAEHHVRLERTSPCQDSSVNYGITKVEGQPLHTELNRAMDNCNSLRMSPVKGMQEKGELDELGDKCDSNVSSSKKRRHRTTFTSLQLEELEKVFQKTHYPDVYVREQLALRTELTEARVQVWFQNRRAKWRKRERYGQIQQAKSHFAATYDISVLPRTDSYPQIQNNLWAGNASGGSVVTSCMLPRDTSSCMTPYSHSPRTDSSYTGFSNHQNQFSHVPLNNFFTDSLLTGATNGHAFETKPEFERRSSSIAVLRMKAKEHTANISWAM

SEQ ID NO: 738108 - protein, 377 aa, Homo sapiens; identical to SEQ ID NO: 738107

SEQ ID NO: 738109 - protein, 123 aa, Homo sapiens
EQGSWSEGGRQKGERTRWVTAPRGTWDRHWPLAFQHGGFRQALSSLLLNLLPERGILIPPSPAQPNHDASGSLVPPLTEARSRVGLGIPSGDGVCGLRLGKSGPLNALLKMTGPCLLVGTASW

SEQ ID NO: 738110 - protein, 128 aa, Homo sapiens
KPRGQVSSLRGSLGQSFCSGALHESSPGKLSLKSETAQAQHRGQSLATGSGPSLDFLPSSIFASLGLSSSMPALRCSPTPPCTWDHRPLVFSFSCESPPGYCCFLEGCPGLRPALLSLPRKDNQKDKP

SEQ ID NO: 738111 - protein, 124 aa, Homo sapiens
ITSTPAAGSHPWGPSGLWKASPDQRALCSRSSHRASSMGHPSREPVSLCAQSCISNGRFSLTLSLLHLGILPCGATCILLEPLPYPKPFFHNEGLRLCNPSRLPGSSVFAEDVVDITDTPGSAR

SEQ ID NO: 738112 - protein, 112 aa, Homo sapiens
ARQRARTPDHRLGWSWEGPGDTWGVYTMEQSLLQCSLGASVRPQPPGRAQCCIPRCCRLRPSQLRVLTCRPQLSLPTPCLPLLTGTSQAEASGSRRSLSPLPPGLLRVYHQE

SEQ ID NO: 738113 - protein, 281 aa, Homo sapiens
LSNCVRLSDASVMKLSERCPNLNYLSLRNCEHLTAQGIGYIVNIFSLVSIDLSGTDISNEGLNVLSRHKKLKELSVSECYRITDDGIQAFCKSSLILEHLDVSYCSQLSDMIIKALAIYCINLTSLSIAGCPKITDSAMEMLSAKCHYLHILDISGCVLLTDQILEDLQIGCKQLRILKMQYCTNISKKAAQRMSSKVQQQEYNTNDPPRWFGYDREGNPVTELDNITSSKGALELTVKKSTYSSEDQSSVTFSLKQEEQKIKNLASFLHLLQVCLLAESQ

SEQ ID NO: 738114 - protein, 949 aa, Homo sapiens
KREHAKQHGMIRTEITGAEIAEEMEKERRLFQLQMCEYLIKVNEIKTKKGVDLLQNLIKYYHAQCNFFQDGLKTADKLKQYIEKLAADLYNIKQTQDEEKKQLTALRDLIKSSLQLDQKESRRDSQSRQGGYSMHQLQGNKEYGSEKKGYLLKKSDGIRKVWQRRKCSVKNGILTISHATSNRQPAKLNLLTCQVKPNAEDKKSFDLISHNRTYHFQAEDEQDYVAWISVLTNSKEEALTMAFRGEQSAGENSLEDLTKAIIEDVQRLPGNDICCDCGSSEPTWLSTNLGILTCIECSGIHREMGVHISRIQSLELDKLGTSELLLAKNVGNNSFNDIMEANLPSPSPKPTPSSDMTVRKEYITAKYVDHRFSRKTCSTSSAKLNELLEAIKSRDLLALIQVYAEGVELMEPLLEPGQELGETALHLAVRTADQTSLHLVDFLVQNCGNLDKQTALGNTVLHYCSMYSKPECLKLLLRSKPTVDIVNQAGETALDIAKRLKATQCEDLLSQAKSGKFNPHVHVEYEWNLRQEEIDESDDDLDDKPSPVKKERSPRPQSFCHSSSISPQDKLALPGFSTPRDKQRLSYGAFTNQIFVSTSTDSPTSPTTEAPPLPPRNAGKGPTGPPSTLPLSTQTSSGSSTLSKKRPPPPPPGHKRTLSDPPSPLPHGPPNKGAVPWGNDGGPSSSSKTTNKFEGLSQQSSTSSAKTALGPRVLPKLPQKVALRKTDHLSLDKATIPPEIFQKSSQLAELPQKPPPGDLPPKPTELAPKPQIGDLPPKPGELPPKPQLGDLPPKPQLSDLPPKPQMKDLPPKPQLGDLLAKSQTGDVSPKAQQPSEVTLKSHPLDLSPNVQSRDAIQKQASEDSNDLTPTLPETPVPLPRKINTGKNKVRRVKTIYDCQADNDDELTFIEGEVIIVTGEEDQEWWIGHIEGQPERKGVFPVSFVHILSD

SEQ ID NO: 738115 - protein, 949 aa, Homo sapiens; identical to SEQ ID NO: 738114

SEQ ID NO: 738116 - protein, 892 aa, Homo sapiens
KREHAKQHGMIRTEITGAEIAEEMEKERRLFQLQMCEYLIKVNEIKTKKGVDLLQNLIKYYHAQCNFFQDGLKTADKLKQYIEKLAADLYNIKQTQDEEKKQLTALRDLIKSSLQLDQKESRRDSQSRQGGYSMHQLQGNKEYGSEKKGYLLKKSDGIRKVWQRRKCSVKNGILTISHATSNRQPAKLNLLTCQVKPNAEDKKSFDLISHNRTYHFQAEDEQDYVAWISVLTNSKEEALTMAFRGEQSAGENSLEDLTKAIIEDVQRLPGNDICCDCGSSEPTWLSTNLGILTCIECSGIHREMGVHISRIQSLELDKLGTSELLLAKNVGNNSFNDIMEANLPSPSPKPTPSSDMTVRKEYITAKYVDHRFSRKTCSTSSAKLNELLEAIKSRDLLALIQVYAEGVELMEPLLEPGQELGETALHLAVRTADQTSLHLVDFLVQNCGNLDKQTALGNTVLHYCSMYSKPECLKLLLRSKPTVDIVNQAGETALDIAKRLKATQCEDLLSQAKSGKFNPHVHVEYEWNLRQEEIDESDDDLDDKPSPVKKERSPRPQSFCHSSSISPQDKLALPGFSTPRDKQRLSYGAFTNQIFVSTSTDSPTSPTTEAPPLPPRNAGKGNDGGPSSSSKTTNKFEGLSQQSSTSSAKTALGPRVLPKLPQKVALRKTDHLSLDKATIPPEIFQKSSQLAELPQKPPPGDLPPKPTELAPKPQIGDLPPKPGELPPKPQLGDLPPKPQLSDLPPKPQMKDLPPKPQLGDLLAKSQTGDVSPKAQQPSEVTLKSHPLDLSPNVQSRDAIQKQASEDSNDLTPTLPETPVPLPRKINTGKNKVRRVKTIYDCQADNDDELTFIEGEVIIVTGEEDQEWWIGHIEGQPERKGVFPVSFVHILSD

SEQ ID NO: 738117 - protein, 949 aa, Homo sapiens; identical to SEQ ID NO: 738114

SEQ ID NO: 738118 - protein, 949 aa, Homo sapiens; identical to SEQ ID NO: 738114

SEQ ID NO: 738119 - protein, 949 aa, Homo sapiens; identical to SEQ ID NO: 738114

SEQ ID NO: 738120 - protein, 949 aa, Homo sapiens; identical to SEQ ID NO: 738114

SEQ ID NO: 738121 - protein, 644 aa, Homo sapiens
KREHAKQHGMIRTEITGAEIAEEMEKERRLFQLQMCEYLIKVNEIKTKKGVDLLQNLIKYYHAQCNFFQDGLKTADKLKQYIEKLAADLYNIKQTQDEEKKQLTALRDLIKSSLQLDQKESRRDSQSRQGGYSMHQLQGNKEYGSEKKGYLLKKSDGIRKVWQRRKCSVKNGILTISHATSNRQPAKLNLLTCQVKPNAEDKKSFDLISHNRTYHFQAEDEQDYVAWISVLTNSKEEALTMAFRGEQSAGENSLEDLTKAIIEDVQRLPGNDICCDCGSSEPTWLSTNLGILTCIECSGIHREMGVHISRIQSLELDKLGTSELLLAKNVGNNSFNDIMEANLPSPSPKPTPSSDMTVRKEYITAKYVDHRFSRKTCSTSSAKLNELLEAIKSRDLLALIQVYAEGVELMEPLLEPGQELGETALHLAVRTADQTSLHLVDFLVQNCGNLDKQTALGNTVLHYCSMYSKPECLKLLLRSKPTVDIVNQAGETALDIAKRLKATQCEDLLSQAKSGKFNPHVHVEYEWNLRQEEIDESDDDLDDKPSPVKKERSPRPQSFCHSSSISPQDKLALPGFSTPRDKQRLSYGAFTNQIFVSTSTDSPTSPTTEAPPLPPRNAGKGPTGPPSTLPLSTQEPGIITSEFA

SEQ ID NO: 738122 - protein, 705 aa, Homo sapiens
KREHAKQHGMIRTEITGAEIAEEMEKERRLFQLQMCEYLIKVNEIKTKKGVDLLQNLIKYYHAQCNFFQDGLKTADKLKQYIEKLAADLYNIKQTQDEEKKQLTALRDLIKSSLQLDQKESRRDSQSRQGGYSMHQLQGNKEYGSEKKGYLLKKSDGIRKVWQRRKCSVKNGILTISHATSNRQPAKLNLLTCQVKPNAEDKKSFDLISHNRTYHFQAEDEQDYVAWISVLTNSKEEALTMAFRGEQSAGENSLEDLTKAIIEDVQRLPGNDICCDCGSSEPTWLSTNLGILTCIECSGIHREMGVHISRIQSLELDKLGTSELLLAKNVGNNSFNDIMEANLPSPSPKPTPSSDMTVRKEYITAKYVDHRFSRKTCSTSSAKLNELLEAIKSRDLLALIQVYAEGVELMEPLLEPGQELGETALHLAVRTADQTSLHLVDFLVQNCGNLDKQTALGNTVLHYCSMYSKPECLKLLLRSKPTVDIVNQAGETALDIAKRLKATQCEDLLSQAKSGKFNPHVHVEYEWNLRQEEIDESDDDLDDKPSPVKKERSPRPQSFCHSSSISPQDKLALPGFSTPRDKQRLSYGAFTNQIFVSTSTDSPTSPTTEAPPLPPRNAGKGNDGGPSSSSKTTNKFEGLSQQSSTSSAKTALGPRVLPKLPQKVALRKTDHLSLDKATIPPEIFQKSSQLAELPQKPPPWRSRLQ

SEQ ID NO: 738123 - protein, 171 aa, Homo sapiens
MALWRAYQRALAAHPWKVQVLTAGSLMGLGDIISQQLVERRGLQEHQRGRTLTMVSLGCGFVGPVVGGWYKVLDRFIPGTTKVDALKKMLLDQGGFAPCFLGCFLPLVGALNGLSAQDNWAKLQRDYPDALITNYYLWPAVQLANFYLVPLHYREDPASTTLVSIPPELRL

SEQ ID NO: 738124 - protein, 176 aa, Homo sapiens
MALWRAYQRALAAHPWKVQVLTAGSLMGLGDIISQQLVERRGLQEHQRGRTLTMVSLGCGFVGPVVGGWYKVLDRFIPGTTKVDALKKMLLDQGGFAPCFLGCFLPLVGALNGLSAQDNWAKLQRDYPDALITNYYLWPAVQLANFYLVPLHYRLAVVQCVAVIWNSYLSWKAHRL

SEQ ID NO: 738125 - protein, 194 aa, Homo sapiens
VVERDGGGDPLSSWLDRSMALWRAYQRALAAHPWKVQVLTAGSLMGLGDIISQQLVERRGLQEHQRGRTLTMVSLGCGFVGPVVGGWYKVLDRFIPGTTKVDALKKMLLDQGGFAPCFLGCFLPLVGALNGLSAQDNWAKLQRDYPDALITNYYLWPAVQLANFYLVPLHYRLAVVQCVAVIWNSYLSWKAHRL

SEQ ID NO: 738126 - protein, 189 aa, Homo sapiens
VVERDGGGDPLSSWLDRSMALWRAYQRALAAHPWKVQVLTAGSLMGLGDIISQQLVERRGLQEHQRGRTLTMVSLGCGFVGPVVGGWYKVLDRFIPGTTKVDALKKMLLDQGGFAPCFLGCFLPLVGALNGLSAQDNWAKLQRDYPDALITNYYLWPAVQLANFYLVPLHYREDPASTTLVSIPPELRL

SEQ ID NO: 738127 - protein, 176 aa, Homo sapiens; identical to SEQ ID NO: 738124

SEQ ID NO: 738128 - protein, 187 aa, Homo sapiens
PTLSTHAYARSMALWRAYQRALAAHPWKVQVLTAGSLMGLGDIISQQLVERRGLQEHQRGRTLTMVSLGCGFVGPVVGGWYKVLDRFIPGTTKVDALKKMLLDQGGFAPCFLGCFLPLVGALNGLSAQDNWAKLQRDYPDALITNYYLWPAVQLANFYLVPLHYRLAVVQCVAVIWNSYLSWKAHRL

SEQ ID NO: 738129 - protein, 170 aa, Homo sapiens
MAAHPRRCPDNTCVPCIGSLMGLGDIISQQLVERRGLQEHQRGRTLTMVSLGCGFVGPVVGGWYKVLDRFIPGTTKVDALKKMLLDQGGFAPCFLGCFLPLVGALNGLSAQDNWAKLQRDYPDALITNYYLWPAVQLANFYLVPLHYRLAVVQCVAVIWNSYLSWKAHRL

SEQ ID NO: 738130 - protein, 160 aa, Homo sapiens
MKLKSHKRSLMGLGDIISQQLVERRGLQEHQRGRTLTMVSLGCGFVGPVVGGWYKVLDRFIPGTTKVDALKKMLLDQGGFAPCFLGCFLPLVGALNGLSAQDNWAKLQRDYPDALITNYYLWPAVQLANFYLVPLHYRLAVVQCVAVIWNSYLSWKAHRL

SEQ ID NO: 738131 - protein, 123 aa, Homo sapiens
MVSLGCGFVGPVVGGWYKVLDRFIPGTTKVDALKKMLLDQGGFAPCFLGCFLPLVGALNGLSAQDNWAKLQRDYPDALITNYYLWPAVQLANFYLVPLHYRLAVVQCVAVIWNSYLSWKAHRL

SEQ ID NO: 738132 - protein, 90 aa, Homo sapiens
PTLSTHAYARSMALWRAYQRALAAHPWKVQVLTADFWGGRQHCWPHASSYTCRPRPPGLKDTLPAPHSKKPLLAPLPSAHETQKPQKALW

SEQ ID NO: 738133 - protein, 152 aa, Homo sapiens
MAAHPRRCPDNTCVPCIGSLMGLGDIISQQLVERRGLQEHQRGRTLTMVSLGCGFVGPVVGGWYKVLDRFIPGTTKVDALKKMLLDQGGFAPCFLGCFLPLVGALNGLSAQDNWAKLQRVSWAGVENVSGWRADSPGEEDRFYRDKKGGKCR

SEQ ID NO: 738134 - protein, 138 aa, Homo sapiens
MAAHPRRCPDNTCVPCIGSLMGLGDIISQQLVERRGLQEHQRGRTLTMVSLGCGFVGPVVGGWYKVLDRFIPGTTKVDALKKMLLDQDYPDALITNYYLWPAVQLANFYLVPLHYRLAVVQCVAVIWNSYLSWKAHRL

SEQ ID NO: 738135 - protein, 158 aa, Homo sapiens
MALWRAYQRALAAHPWKVQVLTAGSLMGLGDIISQQLVERRGLQEHQRGRTLTMVSLGCGFVGPVVGGWYKVLDRFIPGTTKVDALKKMLLDQGGFAPCFLGCFLPLVGALNGLSAQDNWAKLQRVSWAGVENVSGWRADSPGEEDRFYRDKKGGKCR

SEQ ID NO: 738136 - protein, 152 aa, Homo sapiens; identical to SEQ ID NO: 738133

SEQ ID NO: 738137 - protein, 113 aa, Homo sapiens
MALWRAYQRALAAHPWKVQVLTAGSLMGLGDIISQQLVERRGLQEHQRGRTLTMVSLGCGFVDYPDALITNYYLWPAVQLANFYLVPLHYRLAVVQCVAVIWNSYLSWKAHRL

SEQ ID NO: 738138 - protein, 142 aa, Homo sapiens
MKLKSHKRSLMGLGDIISQQLVERRGLQEHQRGRTLTMVSLGCGFVGPVVGGWYKVLDRFIPGTTKVDALKKMLLDQGGFAPCFLGCFLPLVGALNGLSAQDNWAKLQRVSWAGVENVSGWRADSPGEEDRFYRDKKGGKCR

SEQ ID NO: 738139 - protein, 158 aa, Homo sapiens; identical to SEQ ID NO: 738135

SEQ ID NO: 738140 - protein, 177 aa, Homo sapiens
LRIPLIATRRCPDNTCVPCIGSLMGLGDIISQQLVERRGLQEHQRGRTLTMVSLGCGFVGPVVGGWYKVLDRFIPGTTKVDALKKMLLDQGGFAPCFLGCFLPLVGALNGLSAQDNWAKLQRDYPDALITNYYVRADTSTACSPASLSLELSWDWAVNPDMGNPSVGITLSFPGWAP

SEQ ID NO: 738141 - protein, 121 aa, Homo sapiens
PTLSTHAYARSMALWRAYQRALAAHPWKVQVLTADFWGGRQHCWPHASSYTCRPRPPGLKDTLPAPHSKKPLLAPLPSAHETQKPQKNIAVCHPHEVTRSRMMEFGGVKTERKCISLGNVL

SEQ ID NO: 738142 - protein, 87 aa, Homo sapiens
PTLSTHAYARSMALWRAYQRALAAHPWKVQVLTADFWGGRQHCWPHASSYTCRPRPPGLKDTLPAPHSKKPLLAPLPSAHETQKPQK

SEQ ID NO: 738143 - protein, 85 aa, Homo sapiens
FEEERHVPYLYETNLENDGFISNGNKDLSIIIKIRLLSVNLIHVLSGSMRWGLQSVAKKQSRVACEHQSAQYTRIEVQQVSNEAD

SEQ ID NO: 738144 - protein, 91 aa, Homo sapiens
QEAMGRGAGQKAQSRLRGLQGAVWGLLPLAGRATSQQAQWKQRLKGRKQNHPRALRPSWVFKLQATESACGALHRPAKRSPSTRPGSSSRS

SEQ ID NO: 738145 - protein, 77 aa, Homo sapiens
SVFLLMQSARSRVSAARGPVCNPARHVYSPPPRALPQVLLQPGPRSAAADPVHTARGYDPWDLPSAQLELPSWPTEQ

SEQ ID NO: 738146 - protein, 103 aa, Homo sapiens
MKDCSNGCSAECTGEGGSKEVVGTFKAKDLIVTPATILKEKPDPNNLVFGTVFTDHMLTVEWSSEFGWEKPHIKPLQNLSLHPGSSALHYAVEELRLISFCPM

SEQ ID NO: 738147 - protein, 386 aa, Homo sapiens
MKDCSNGCSAECTGEGGSKEVVGTFKAKDLIVTPATILKEKPDPNNLVFGTVFTDHMLTVEWSSEFGWEKPHIKPLQNLSLHPGSSALHYAVELFEGLKAFRGVDNKIRLFQPNLNMDRMYRSAVRATLPVFDKEELLECIQQLVKLDQEWVPYSTSASLYIRPTFIGTEPSLGVKKPTKALLFVLLSPVGPYFSSGTFNPVSLWANPKYVRAWKGGTGDCKMGGNYGSSLFAQCEAVDNGCQQVLWLYGEDHQITEVGTMNLFLYWINEDGEEELATPPLDGIILPGVTRRCILDLAHQWGEFKVSERYLTMDDLTTALEGNRVREMFGSGTACVVCPVSDILYKGETIHIPTMENGPKLASRILSKLTDIQYGREESDWTIVLS

SEQ ID NO: 738148 - protein, 386 aa, Homo sapiens; identical to SEQ ID NO: 738147

SEQ ID NO: 738149 - protein, 323 aa, Homo sapiens
MKDCSNGCSAECTGEGGSKEVVGTFKAKDLIVTPATILKEKPDPNNLVFGTVFTDHMLTVEWSSEFGWEKPHIKPLQNLSLHPGSSALHYAVELFEGLKAFRGVDNKIRLFQPNLNMDRMYRSAVRATLPVFDKEELLECIQQLVKLDQEWVPYSTSASLYIRPTFIGTEPSLGVKKPTKALLFVLLSPVGPYFSSGTFNPVSLWANPKYVRAWKGGTGDCKMGGNYGSSLFAQCEAVDNGCQQVLWLYGEDHQITEVGTMNLFLYWINEDGEEELATPPLDGIILPGVTRRCILDLAHQWVGAFDMNNFCKPEIKNNQNKPS

SEQ ID NO: 738150 - protein, 547 aa, Homo sapiens
VRGGGVGEVQKDEKPVEAELSRSEPGWRQRNRRESLTAERPSTAERQQPPWPPASDKKLQLMQAPRELAVGIDLGTTYSCVGVFQQGRVEILANDQGNRTTPSYVAFTDTERLVGDAAKSQAALNPHNTVFDAKRLIGRKFADTTVQSDMKHWPFRVVSEGGKPKVRVCYRGEDKTFYPEEISSMVLSKMKETAEAYLGQPVKHAVITVPAYFNDSQRQATKDAGAIAGLNVLRIINEPTAAAIAYGLDRRGAGERNVLIFDLGGGTFDVSVLSIDAGVFEVKATAGDTHLGGEDFDNRLVNHFMEEFRRKHGKDLSGNKRALRRLRTACERAKRTLSSSTQATLEIDSLFEGVDFYKSITRARFEELCSDLFRSTLEPVEKALRDAKLDKAQIHDFVLGGGSTRIPKVQKLLQDFFNGKELNKSINPDEAVAYGAAVQAAVLMGDKCEKVQDLLLLDVAPLSLGLETAGGVMTTLIQRNATIPTKQTQTFTTYSDNQPGVFIQVYEGERAMTKDNNLLGRFELSGIPPAPRGVPQIEVTFDIDEVD

SEQ ID NO: 738151 - protein, 703 aa, Homo sapiens
VRGGGVGEVQKDEKPVEAELSRSEPGWRQRNRRESLTAERPSTAERQQPPWPPASDKKLQLMQAPRELAVGIDLGTTYSCVGVFQQGRVEILANDQGNRTTPSYVAFTDTERLVGDAAKSQAALNPHNTVFDAKRLIGRKFADTTVQSDMKHWPFRVVSEGGKPKVRVCYRGEDKTFYPEEISSMVLSKMKETAEAYLGQPVKHAVITVPAYFNDSQRQATKDAGAIAGLNVLRIINEPTAAAIAYGLDRRGAGERNVLIFDLGGGTFDVSVLSIDAGVFEVKATAGDTHLGGEDFDNRLVNHFMEEFRRKHGKDLSGNKRALRRLRTACERAKRTLSSSTQATLEIDSLFEGVDFYKSITRARFEELCSDLFRSTLEPVEKALRDAKLDKAQIHDFVLGGGSTRIPKVQKLLQDFFNGKELNKSINPDEAVAYGAAVQAAVLMGDKCEKVQDLLLLDVAPLSLGLETAGGVMTTLIQRNATIPTKQTQTFTTYSDNQPGVFIQVYEGERAMTKDNNLLGRFELSGIPPAPRGVPQIEVTFDIDANGILSVTATDRSTGKANKIITNDKGRLSKEEVERMVHEAEQYKAEDEAQRDRVAAKNSLEAHVFHVKGSLQEESLRDKIPEEDRRKMQDKCREVLAWLEHNQLAEKEEYEHQKRELEQICRPIFSRLYGGPGVPGGSSCSAQARQGDPSTGPIIEEVD

SEQ ID NO: 738152 - protein, 703 aa, Homo sapiens; identical to SEQ ID NO: 738151

SEQ ID NO: 738153 - protein, 703 aa, Homo sapiens; identical to SEQ ID NO: 738151

SEQ ID NO: 738154 - protein, 169 aa, Homo sapiens
LSPLVLEVDPNIQAVRTQEKEQIKTLNNKFASNDKGRLSKEEVERMVHEAEQYKAEDEAQRDRVAAKNSLEAHVFHVKGSLQEESLRDKIPEEDRRKMQDKCREVLAWLEHNQLAEKEEYEHQKRELEQICRPIFSRLYGGPGVPGGSSCSAQARQGDPSTGPIIEEVD

SEQ ID NO: 738155 - protein, 101 aa, Homo sapiens
LVLISKLPYIHFFHTVLKQIAPEYFEKNEPYLEAACNDVDRWPAPVPGKTLHLPIMGVVMKVRIPTCHDKPGTTQIVQLTQQVDTNISVILPTVHEVDIFR

SEQ ID NO: 738156 - protein, 87 aa, Homo sapiens
MGDTITAVSEKRNLPPTQVSAPSWAAAQDPPPHSEQGNPKALRNPEAPTTNRGQIREAGRGPSEAKGTDPERQTHRWELSCGKEGGR

SEQ ID NO: 738157 - protein, 115 aa, Homo sapiens [sequence omitted]

SEQ ID NO: 738158 - protein, 154 aa, Homo sapiens
SALLSQGFEPLRFSGQTRKNENTAWGAPTSRRLCQLTSGHGAAAGAHGGQGQLHILPSPSHFTVAPNPARRERVSAPQTTGSLLTKNGETRFHLSAEEPQAGLSERDGAGGRLWIASQIKLCSLNVALSPRKSLGPEFLRFMVHLIDQIYLDFF

SEQ ID NO: 738159 - protein, 119 aa, Homo sapiens
KRASTMSFNTLDRLFLGIKAPHLWAGTQFPSSSSTSRPWLPAPLSPGPSKETSSLSGPSTVSQFCGFSPFRVSASGYLPTHAHPPPHPGITAVCALGTMTPHAFSLLNRSDRSPREGRA

SEQ ID NO: 738160 - protein, 167 aa, Homo sapiens
VQDIGAGNRTEASQKHVFLVKESTRERFTAVLCYLLCTPPPYAHGRAHFSPHQTLGNTPKALAVSRLQFLRPGTLCCHLVADLRHSKLAAGILFELGLRRELWFGSNPYRALLPVMLIFKKCFTPYAPLLVFHVGTSFNVPPEATFWVLMCLVNVKESVNYLPERRQ

SEQ ID NO: 738161 - protein, 61 aa, Homo sapiens
VKHSPSISCAAQVWELPLFVACLQQGCPSHDQPEPKLPATTSISSSHQTHYFKGRKNAGHQ

SEQ ID NO: 738162 - protein, 588 aa, Homo sapiens
MYSAANFVHHLRNALDVLHREVPRVLVNLVDFLNPTIMRQVFLGNPDKCPVQQASVLCNCVLTLRENSQELARLEAFSRAYRSSMRELVGSGRYDTQEDFSVVLQPFFQNIQLPVLADGLPDTSFFAPDCIHPNQKFHSQLARALWTNMLEPLGSKTETLDLRAEMPITCPTQNEPFLRTPRNSNYTYPIKPAIENWGSDFLCTEWKASNSVPTSVHQLRPADIKVVAALGDSLTTAVGARPNNSSDLPTSWRGLSWSIGGDGNLETHTTLPNILKKFNPYLLGFSTSTWEGTAGLNVAAEGARARDMPAQAWDLVERMKNSPDINLEKDWKLVTLFIGVNDLCHYCENPEAHLATEYVQHIQQALDILSEELPRAFVNVVEVMELASLYQGQGGKCAMLAAQNNCTCLRHSQSSLEKQELKKVNWNLQHGISSFSYWHQYTQREDFAVVVQPFFQNTLTPLNERGDTDLTFFSEDCFHFSDRGHAEMAIALWNNMLEPVGRKTTSNNFTHSRAKLKCPSPESPYLYTLRNSRLLPDQAEEAPEVLYWAVPVAAGVGLVVGIIGTVVWRCRRGGRREDPPMSLRTVAL

SEQ ID NO: 738163 - protein, 504 aa, Homo sapiens
MRELVGSGRYDTQEDFSVVLQPFFQNIQLPVLADGLPDTSFFAPDCIHPNQKFHSQLARALWTNMLEPLGSKTETLDLRAEMPITCPTQNEPFLRTPRNSNYTYPIKPAIENWGSDFLCTEWKASNSVPTSVHQLRPADIKVVAALGDSLTTAVGARPNNSSDLPTSWRGLSWSIGGDGNLETHTTLPNILKKFNPYLLGFSTSTWEGTAGLNVAAEGARARDMPAQAWDLVERMKNSPDINLEKDWKLVTLFIGVNDLCHYCENPEAHLATEYVQHIQQALDILSEELPRAFVNVVEVMELASLYQGQGGKCAMLAAQNNCTCLRHSQSSLEKQELKKVNWNLQHGISSFSYWHQYTQREDFAVVVQPFFQNTLTPLNERGDTDLTFFSEDCFHFSDRGHAEMAIALWNNMLEPVGRKTTSNNFTHSRAKLKCPSPESPYLYTLRNSRLLPDQAEEAPEVLYWAVPVAAGVGLVVGIIGTVVWRCRRGGRREDPPMSLRTVAL

SEQ ID NO: 738164 - protein, 423 aa, Homo sapiens
MPITCPTQNEPFLRTPRNSNYTYPIKPAIENWGSDFLCTEWKASNSVPTSVHQLRPADIKVVAALGDSLTTAVGARPNNSSDLPTSWRGLSWSIGGDGNLETHTTLPNILKKFNPYLLGFSTSTWEGTAGLNVAAEGARARDMPAQAWDLVERMKNSPDINLEKDWKLVTLFIGVNDLCHYCENPEAHLATEYVQHIQQALDILSEELPRAFVNVVEVMELASLYQGQGGKCAMLAAQNNCTCLRHSQSSLEKQELKKVNWNLQHGISSFSYWHQYTQREDFAVVVQPFFQNTLTPLNERGDTDLTFFSEDCFHFSDRGHAEMAIALWNNMLEPVGRKTTSNNFTHSRAKLKCPSPESPYLYTLRNSRLLPDQAEEAPEVLYWAVPVAAGVGLVVGIIGTVVWRCRRGGRREDPPMSLRTVAL

SEQ ID NO: 738165 - protein, 117 aa, Homo sapiens
PLRVMGETPQGPRTRFRFWLVHMLTQGAACWCEFNKYAFSSPALEGMGTWRLTPHCPVSSSPERHHHCGRPPWGQGLPAGGGEEEVICKKGSQPALKSPRTPVSHPCPHPACSSQLL

SEQ ID NO: 738166 - protein, 123 aa, Homo sapiens
MLLEWIHLNKVQSYFIPGFACVKHSPSISCAAQVWELPLFVACLQQGCPSHDQPEPKLPATTSISSSHQTHYFKGRKNAGHQVVAGILELAGCHSVQSNTYLLSNCFVSRTMRSTEVPPRLCM

SEQ ID NO: 738167 - protein, 145 aa, Homo sapiens
MSALACACAARGGVTSGGASQLEEAVAAGRGERLRGSGGGALGSDAPAMTSSPVSRVVYNGKRTSSPRSPPSSSEIFTPAHEENVRFIYEAWQGVERDLRGQVPGGERGLVEEYVEKVPNPSLKTFKPIDLSDLKRRSTQDAKKS

SEQ ID NO: 738168 - protein, 145 aa, Homo sapiens; identical to SEQ ID NO: 738167

SEQ ID NO: 738169 - protein, 145 aa, Homo sapiens; identical to SEQ ID NO: 738167

SEQ ID NO: 738170 - protein, 159 aa, Homo sapiens
RVLLCCLGWSAVPRSWLPAALTSWAQAVLPPQPLSSWDYKCMLPHQRLRGSGGGALGSDAPAMTSSPVSRVVYNGKRTSSPRSPPSSSEIFTPAHEENVRFIYEAWQGVERDLRGQVPGGERGLVEEYVEKVPNPSLKTFKPIDLSDLKRRSTQDAKKS

SEQ ID NO: 738171 - protein, 126 aa, Homo sapiens
MIILAPELQLAGERLRGSGGGALGSDAPAMTSSPVSRVVYNGKRTSSPRSPPSSSEIFTPAHEENVRFIYEAWQGVERDLRGQVPGGERGLVEEYVEKVPNPSLKTFKPIDLSDLKRRSTQDAKKS

SEQ ID NO: 738172 - protein, 145 aa, Homo sapiens; identical to SEQ ID NO: 738167

SEQ ID NO: 738173 - protein, 145 aa, Homo sapiens; identical to SEQ ID NO: 738167

SEQ ID NO: 738174 - protein, 145 aa, Homo sapiens; identical to SEQ ID NO: 738167

SEQ ID NO: 738175 - protein, 102 aa, Homo sapiens
RGLAEEDALPPRRREAWGRVIGVPLTTVLVILRGRDRPARGAGTGSAAWQGVERDLRGQVPGGERGLVEEYVEKVPNPSLKTFKPIDLSDLKRRSTQDAKKS

SEQ ID NO: 738176 - protein, 145 aa, Homo sapiens; identical to SEQ ID NO: 738167

SEQ ID NO: 738177 - protein, 126 aa, Homo sapiens; identical to SEQ ID NO: 738171

SEQ ID NO: 738178 - protein, 145 aa, Homo sapiens; identical to SEQ ID NO: 738167

SEQ ID NO: 738179 - protein, 175 aa, Homo sapiens
MRRARLRLCSPRWRHFRRGLPAGRGGGGGSGRGEAGAAGRRGRGGAGRARLAPPWCRRAAAGSPAGPGGAGRGGVAGQPGSEGGARVPRPAPAGGRGRGRLGARVGRARLGLSAFPAQAGAGAGDPAPPDARSGPAFCRRRGFGADRAPLSRSPGGTVPEDASDSRSAAGPAVRI

SEQ ID NO: 738180 - protein, 114 aa, Homo sapiens
SLNQLQDGTSSLGLGYCRAPQGGPQQPGLASWCLRSQWPLGRGTQADPEVLLLGLSWLWGVLGGSPGPFSFLCPLKAKCLCGCGARGSVNKGGGTGRGLLVVCQASAPAAHMHS

SEQ ID NO: 738181 - protein, 130 aa, Homo sapiens
MSALACACAARGGVTSGGASQLEEAVAAGRGERLRGSGGGALGSDAPAMTSSPVSRVVYNGKRTSSPRSPPSSSEIFTPAHEENVRFIYEAWQGVERDLRGQVPGGERGLVEEYVEKVPNPSLKTAWPLP

SEQ ID NO: 738182 - protein, 101 aa, Homo sapiens
RHEPSCCRLLPHLLCPPPLLTRVLCILLRSPPNPADPQRKMRGHIRWQKTRFIGGKRRIVQNGDCIVAVGRPHSLSLPASRQPPLFPPQNLYQCSVSTGQD

SEQ ID NO: 738183 - protein, 118 aa, Homo sapiens
FQAGLLNATNCTNVAECDTQHISMLQAQWGFKQALAVKTPALINLIISSYVFCLFFCLFVFETESRSVIQAGVQWCHLGSLHAPPPRFMPFSCLSLLSSWDYRHPPPRPANFLSSYVL

SEQ ID NO: 738184 - protein, 283 aa, Homo sapiens
RGAPGDCWATVPNSGLGPGVPAFSESLVPAPAGAGTRPTPRPSPAHAPAAGAGREAGARRSSPRDPFKAWRARAGMPSPVAETAVRSAPRERPSSRAPRTSPSRAERTSPEASPTTDTVQPPGGARHAEAKIDCIRRTTLDLEEDRPTEANAQHTCKACPSELDEPQELRELPPQEKWDQRTINGSAQGMLKRWKHQREAPSLKTKTTCPREVTTPGPGWALFITRARRTERMHGATKRWRKHAGEVARRLTGFNHSTELTTKTEHNHTTGDTKYSNSHTHKG

SEQ ID NO: 738185 - protein, 114 aa, Homo sapiens
PQYIQPLTLVSYTPDLLLSVRGERKNETDSSLNQEAPTEEASSVFPKLTSAKPFSSLPDLRNINLSSSKLEPSKPNFSIKEAKSASAVNVFTGTVHLTSVETTPESTTQLSISP

SEQ ID NO: 738186 - protein, 74 aa, Homo sapiens
KWARPSHTQSGSAAAKKIDNRTHDPGRDAERGSPKTGRPARNRFVAHRAHSAKTHTHTGKHTQNTERGKETHRH

SEQ ID NO: 738187 - protein, 86 aa, Homo sapiens
LTPSRNSRQGCLVYSARPAQSLAGGSAQANDCRNLSERRQELATLAPAGANSMWAPHQRPGVGTSHAKPQRACNHTLSSTVRRQQC

SEQ ID NO: 738188 - protein, 80 aa, Homo sapiens
MKSEPDKADPFSFAGPEIMDCDGCTIDWKKGKNVTVKTIKKKQKRKGPGTVRTITKQVSNESFFNFFNPLKASGDGESLD

SEQ ID NO: 738189 - protein, 143 aa, Homo sapiens
MDELRWYHITVCLDHIFGHNCSLSCKDCMNGGKCQEGKSECSCPAGCRVILCNENCLEGAYGAGCTSECQCVEENTLECSAKNGSCTCKSGYQGNRCQKDGLWGPEGWFSSAPCENGGQCNKKTGNCDCTPDYTRKSCTICKS

SEQ ID NO: 738190 - protein, 268 aa, Homo sapiens
DVVGEEGYRIGNDRKTYPSLDDDELEEEEEEGEVVRFPGLLFKSPPQQLHYVATFLPPTYKDEEDEEEEEKDIHRELTALHNFVCLDHIFGHNCSLSCKDCMNGGKCQEGKSECSCPAGCRVILCNENCLEGAYGAGCTSECQCVEENTLECSAKNGSCTCKSGYQGNRCQKDGLWGPEGWFSSAPCENGGQCNKKTGNCDCTPDYTRKSCTILRCISLTNLALSRRSSPMKYQQNVSSHREVRQRQQCSSDRPFKKLLCKFSFKIGM

SEQ ID NO: 738191 - protein, 105 aa, Homo sapiens [sequence omitted]

SEQ ID NO: 738192 - protein, 169 aa, Homo sapiens
GPFKFCSSEIHTEVWTQFRRATQKETTMSLLPVPYTEAASLSTGSTVTIKGRPLACFLNEPYLQVDFHTEMKEESDIVFHFQVCFGRRVVMNSREYGAWKQQVESKNMPFQDGQEFELSISVLPDKYQVMVNGQSSYTFDHRIKPEAVKMVQVWRDISLTKFNVSYLKR

SEQ ID NO: 738193 - protein, 156 aa, Homo sapiens
ANSLVIRDCEKETTMSLLPVPYTEAASLSTGSTVTIKGRPLACFLNEPYLQVDFHTEMKEESDIVFHFQVCFGRRVVMNSREYGAWKQQVESKNMPFQDGQEFELSISVLPDKYQVMVNGQSSYTFDHRIKPEAVKMVQVWRDISLTKFNVSYLKR

SEQ ID NO: 738194 - protein, 381 aa, Homo sapiens
MNEKSCSFHSKEELRDGQGERLSAGYSPSYDKDKSVLAFRGIPISELKNHGILQALTTEAYEWEPRVVSTEVVRAQEEWEAVDTIQPETGSQASSEQPGQLISFSEALQHFQTVDLSPFKKRIQPTIRRTGLAALRHYLFGPPKLHQRLREERDLVLTIAQCGLDSQDPVHGRVLQTIYKKLTGSKFDCALHGNHWEDLGFQGANPATDLRGAGFLALLHLLYLVMDSKTLPMAQEIFRLSRHHIQQFPFCLMSVNITHIAIQALREECLSRECNRQQKVIPVVNSFYAATFLHLAHVWRTQRKTISDSGFVLKELEVLAKKSPRRLLKTLELYLARVSKGQASLLGAQKCYGPEAPPFKDLTFTGESDLQSHSSEGVWLI

SEQ ID NO: 738195 - protein, 391 aa, Homo sapiens
MNEKSCSFHSKEELRDGQGERLSAGYSPSYDKDKSVLAFRGIPISELKNHGILQALTTEAYEWEPRVVSTEVVRAQEEWEAVDTIQPETGSQASSEQPGQLISFSEALQHFQTVDLSPFKKRIQPTIRRTGLAALRHYLFGPPKLHQRLREERDLVLTIAQCGLDSQDPVHGRVLQTIYKKLTGSKFDCALHGNHWEDLGFQGANPATDLRGAGFLALLHLLYLVMDSKTLPMAQEIFRLSRHHIQQFPFCLMSVNITHIAIQALREECLSRECNRQQKVIPVVNSFYAATFLHLAHVWRTQRKTISDSGFVLKGVLFLLGRPRLNAQCPRSREPKVVARLVLAAVLPHPHFLKFQLTKISITHPLESASSPFSALTVALFWSYTYDKHIF

SEQ ID NO: 738196 - protein, 391 aa, Homo sapiens; identical to SEQ ID NO: 738195

SEQ ID NO: 738197 - protein, 391 aa, Homo sapiens; identical to SEQ ID NO: 738195

SEQ ID NO: 738198 - protein, 254 aa, Homo sapiens
MNEKSCSFHSKEELRDGQGERLSAGYSPSYDKDKSVLAFRGIPISELKNHGILQALTTEAYEWEPRVVSTEVVRAQEEWEAVDTIQPETGSQASSEQPGQLISFSEALQHFQTVDLSPFKKRIQPTIRRTGLAALRHYLFGPPKLHQRLREERDLVLTIAQCGLDSQDPVHGRVLQTIYKKLTGSKFDCALHGNHWEDLGFQGANPATDLRGAGFLALLHLLYLVMDSKTLPMAQEIFRLSRHHIQIERNQGKG

SEQ ID NO: 738199 - protein, 391 aa, Homo sapiens; identical to SEQ ID NO: 738195

SEQ ID NO: 738200 - protein, 161 aa, Homo sapiens
MNEKSCSFHSKEELRDGQGERLSAGYSPSYDKDKSVLAFRGIPISELKNHGILQALTTEAYEWEPRVVSTEVVRAQEEWEAVDTIQPETGSQASSEQPGQLISFSEALQHFQTVDLSPFKKRIQPTIRRTGLAALRHYLFGPPKLHQRLREERDLVLTIAQ

SEQ ID NO: 738201 - protein, 139 aa, Homo sapiens [sequence omitted]

SEQ ID NO: 738202 - protein, 391 aa, Homo sapiens; identical to SEQ ID NO: 738195

SEQ ID NO: 738203 - protein, 78 aa, Homo sapiens
SDTTNMTNSVHHLLEKPTALWWGNRYTAKWPCDNPMRISVKVPGIKISITHPLESASSPFSALTVALFWSYTYDKHIF

SEQ ID NO: 738204 - protein, 146 aa, Homo sapiens
MASAGVAAGRQAEDVLPPTSDQPLPDTKPLPPPQPPPVPAPQPQQSPAPRPQSPARAREEENYSFLPLVHNIIKCMDKDSPEVHQDLNALKSKFQEMRKLISTMPGIHLSPEQQQQQLQSLREQVRTKNELLQKYKSLCMFEIPKE

SEQ ID NO: 738205 - protein, 166 aa, Homo sapiens
DAGECATLLATRPLANLPPEPWPLLGWQPGDRRRMYCRQRPTSRCLTPSRCRLLSRRRSLRLNRSSRRRHGLSHLPARGRKRTTPFYLWFTTSSNGKNLGEDQAPYSLQLLLSAVSELQEALALWGTPPFHRWGNSDPEREEAFPKTTETFHELSKRFEPREVRYP

SEQ ID NO: 738206 - protein, 111 aa, Homo sapiens
  misc_feature (2)..(2): Xaa can be any naturally occurring amino acid
SXPGKKVLLKEGEAQRLAAPNPRQVWQLISKVLGTWECVKEEIKFQWLWTEKKALDLSGWSPVRPGLPWDCYLTESVISLKFHSSGWACFKALTDTTKHEARGTTRPPGSF

SEQ ID NO: 738207 - protein, 146 aa, Homo sapiens; identical to SEQ ID NO: 738204

SEQ ID NO: 738208 - protein, 146 aa, Homo sapiens; identical to SEQ ID NO: 738204

SEQ ID NO: 738209 - protein, 124 aa, Homo sapiens
SCNSWRWPLLRPFLHSLSDFQKRHQTHAPAHSRQRLLSPCKAGPCWRLHPHGVTALGAHRDPHWHVHGAPAAKAASCQHSFVSLHTTAWKGPPSLHPPMSPLVKLKHRISRFEENLYPILKQSH

SEQ ID NO: 738210 - protein, 118 aa, Homo sapiens
NTFEGHHVPGTADTESNSSVASQHTQVKAELLERTPNPGKIWLCSFSGLLGSSHPDSCQSLGSTVPLPPQPTHALRRSFCFSSSPCLVCAACPPGLAAICFILLCLSVQSCHIAQCLS

SEQ ID NO: 738211 - protein, 113 aa, Homo sapiens
RRNLTLSPRLECNGAILAHCNLHLPPRFKQFSCFSLPSSWDYRRLPPCLANLFVFLVETGFHHVGQAVLELLTSNDPPASASQSTGIRGVSHCAWPLFFKVNILDKNWDKNMV

SEQ ID NO: 738212 - protein, 197 aa, Homo sapiens
MSEGDSVGESVHGKPSVVYRFFTRLGQIYQSWLDKSTPYTAVRWVVTLGLSFVYMIRVYLLQGWYIVTYALGIYHLNLFIAFLSPKVDPSLMEDSDDGPSLPTKQNEGIPPLHFEGLPEFKFWHAATKGILVAMVCTFFDAFNVPVFWPILVMYFIMLFCITMKRQIKHMIKYRYIPFTHGKRRYRGKEDAGKAFAS

SEQ ID NO: 738213 - protein, 197 aa, Homo sapiens; identical to SEQ ID NO: 738212

SEQ ID NO: 738214 - protein, 197 aa, Homo sapiens; identical to SEQ ID NO: 738212

SEQ ID NO: 738215 - protein, 238 aa, Homo sapiens
MDKILNVEETYLTVLVKIGPGFHTRECFLLKSILCFSPSYRMSEGDSVGESVHGKPSVVYRFFTRLGQIYQSWLDKSTPYTAVRWVVTLGLSFVYMIRVYLLQGWYIVTYALGIYHLNLFIAFLSPKVDPSLMEDSDDGPSLPTKQNEGIPPLHFEGLPEFKFWHAATKGILVAMVCTFFDAFNVPVFWPILVMYFIMLFCITMKRQIKHMIKYRYIPFTHGKRRYRGKEDAGKAFAS

SEQ ID NO: 738216 - protein, 232 aa, Homo sapiens
MDFQVAGPSPEPDKGPLKELHSSRRKLRSKPESYRMSEGDSVGESVHGKPSVVYRFFTRLGQIYQSWLDKSTPYTAVRWVVTLGLSFVYMIRVYLLQGWYIVTYALGIYHLNLFIAFLSPKVDPSLMEDSDDGPSLPTKQNEGIPPLHFEGLPEFKFWHAATKGILVAMVCTFFDAFNVPVFWPILVMYFIMLFCITMKRQIKHMIKYRYIPFTHGKRRYRGKEDAGKAFAS

SEQ ID NO: 738217 - protein, 127 aa, Homo sapiens
  misc_feature (75)..(75): Xaa can be any naturally occurring amino acid
  misc_feature (82)..(82): Xaa can be any naturally occurring amino acid
  misc_feature (84)..(84): Xaa can be any naturally occurring amino acid
  misc_feature (98)..(98): Xaa can be any naturally occurring amino acid
  misc_feature (118)..(118): Xaa can be any naturally occurring amino acid
MRYAKKHNIKGLKKMQANNAKAMSARAEAIKALVKPKEVKPKIPKGVSRKLDRLAYIAHPKLGKRARARIAKGLXLCRPKAXAXAKGQDHTKAQAVSXSFKFSFRLPNVPSPLQRLRXDISATLRQK

SEQ ID NO: 738218 - protein, 110 aa, Homo sapiens
APPLSDQSSCPNSSLTCPPALSRLPDPSSCPNSSLTNPPALTPTCPAANSIAAWLGPGSVCCPLPSAQPRFYLGFWWLHLIKVVCNFGTKVVPCPACSWPSTLNPSVTHG

SEQ ID NO: 738219 - protein, 791 aa, Homo sapiens
GAVLLQSFSRQKPGAHSSRQAYGASLYEQLVWERQLGLPLYLWATKALEELACKLCPHVLRHHQFLQHSSPGSPSLGLQLLAPTLDLLAPPGSPVRNAHNEILEEPHHCPLQKYTRLQTPSSFPTLATLKEEGQRKAWASFDPKALLPLPEASYLPSCQLNRRLAWSWLCLLPSAFCPAQVLLGVLVASSHKGCLQLRDQSGSLPCLLLAKHSQPLSDPRLIGCLVRAERFQLIVERDVRSSFPSWKELSMPGFIQKQQARVYVQFFLADALILPVPRPCLHSATPSTPQTDPTGPEGPHLGQSRLFLLCHKEALMKRNFCVPPGASPEVPKPALSFYVLGSWLGGTQRKEGTGWGLPEPQGNDDNDQKVHLIFFGSSVRWFEFLHPGQVYRLVAPGPATPMLFEKDGSSCISRRPLELAGCASCLTVQDNWTLELESSQDIQDVLDANKSLPESSLTDLLSDNFTDSLVSFSAEILSRTLCEPLVASLWMKLGNTGAMRRCVKLTVALETAECEFPPHLDVYIEDPHLPPSLGLLPGARVHFSQLEKRVSRSHNVYCCFRSSTYVQVLSFPPETTISVPLPHIYLAELLQGGQSPFQATASCHIVSVFSLQLFWVCAYCTSICRQGKCTRLGSTCPTQTAISQAIIRLLVEDGTAEAVVTCRNHHVAAALGLCPREWASLLDFVQVPGRVVLQFAGPGAQLESSARVDEPMTMFLWTLCTSPSVLRPIVLSFELERKPSKIVPLEPPRLQRFQCGELPFLTHVNPRLRLSCLSIRESEYSSSLGILASSC

SEQ ID NO: 738220 - protein, 822 aa, Homo sapiens
GAVLLQSFSRQKPGAHSSRQAYGASLYEQLVWERQLGLPLYLWATKALEELACKLCPHVLRHHQFLQHSSPGSPSLGLQLLAPTLDLLAPPGSPVRNAHNEILEEPHHCPLQKDEDVGEGWWQNTGGHLGPMGHTPDFSSLLDKYTRLQTPSSFPTLATLKEEGQRKAWASFDPKALLPLPEASYLPSCQLNRRLAWSWLCLLPSAFCPAQVLLGVLVASSHKGCLQLRDQSGSLPCLLLAKHSQPLSDPRLIGCLVRAERFQLIVERDVRSSFPSWKELSMPGFIQKQQARVYVQFFLADALILPVPRPCLHSATPSTPQTDPTGPEGPHLGQSRLFLLCHKEALMKRNFCVPPGASPEVPKPALSFYVLGSWLGGTQRKEGTGWGLPEPQGNDDNDQKVHLIFFGSSVRWFEFLHPGQVYRLVAPGPATPMLFEKDGSSCISRRPLELAGCASCLTVQDNWTLELESSQDIQDVLDANKSLPESSLTDLLSDNFTDSLVSFSAEILSRTLCEPLVASLWMKLGNTGAMRRCVKLTVALETAECEFPPHLDVYIEDPHLPPSLGLLPGARVHFSQLEKRVSRSHNVYCCFRSSTYVQVLSFPPETTISVPLPHIYLAELLQGGQSPFQATASCHIVSVFSLQLFWVCAYCTSICRQGKCTRLGSTCPTQTAISQAIIRLLVEDGTAEAVVTCRNHHVAAALGLCPREWASLLDFVQVPGRVVLQFAGPGAQLESSARVDEPMTMFLWTLCTSPSVLRPIVLSFELERKPSKIVPLEPPRLQRFQCGELPFLTHVNPRLRLSCLSIRESEYSSSLGILASSC

SEQ ID NO: 738221 - protein, 635 aa, Homo sapiens
GAVLLQSFSRQKPGAHSSRQAYGASLYEQLVWERQLGLPLYLWATKALEELACKLCPHVLRHHQFLQHSSPGSPSLGLQLLAPTLDLLAPPGSPVRNAHNEILEEPHHCPLQKYTRLQTPSSFPTLATLKEEGQRKAWASFDPKALLPLPEASYLPSCQLNRRLAWSWLCLLPSAFCPAQVLLGVLVASSHKGCLQLRDQSGSLPCLLLAKHSQPLSDPRLIGCLVRAERFQLIVERDVRSSFPSWKELSMPGFIQKQQARVYVQFFLADALILPVPRPCLHSATPSTPQTDPTGPEGPHLGQSRLFLLCHKEALMKRNFCVPPGASPEVPKPALSFYVLGSWLGGTQRKEGTGWGLPEPQGNDDNDQKVHLIFFGSSVRWFEFLHPGQVYRLVAPGPATPMLFEKDGSSCISRRPLELAGCASCLTVQDNWTLELESSQDIQDVLDANKSLPESSLTDLLSDNFTDSLVSFSAEILSRTLCEPLVASLWMKLGNTGAMRRCVKLTVALETAECEFPPHLDVYIEDPHLPPSLGLLPGARVHFSQLEKRVSRSHNVYCCFRSSTYVQVLSFPPETTISVPLPHIYLAELLQGGQSPFQATASCHIVSVFSLQLFWVCAYCTSICRQVREGRNRLN

SEQ ID NO: 738222 - protein, 640 aa, Homo sapiens
GAVLLQSFSRQKPGAHSSRQAYGASLYEQLVWERQLGLPLYLWATKALEELACKLCPHVLRHHQFLQHSSPGSPSLGLQLLAPTLDLLAPPGSPVRNAHNEILEEPHHCPLQKYTRLQTPSSFPTLATLKEEGQRKAWASFDPKALLPLPEASYLPSCQLNRRLAWSWLCLLPSAFCPAQVLLGVLVASSHKGCLQLRDQSGSLPCLLLAKHSQPLSDPRLIGCLVRAERFQLIVERDVRSSFPSWKELSMPGFIQKQQARVYVQFFLADALILPVPRPCLHSATPSTPQTDPTGPEGPHLGQSRLFLLCHKEALMKRNFCVPPGASPEVPKPALSFYVLGSWLGGTQRKEGTGWGLPEPQGNDDNDQKVHLIFFGSSVRWFEFLHPGQVYRLVAPGPATPMLFEKDGSSCISRRPLELAGCASCLTVQDNWTLELESSQDIQDVLDANKSLPESSLTDLLSDNFTDSLVSFSAEILSRTLCEPLVASLWMKLGNTGAMRRCVKLTVALETAECEFPPHLDVYIEDPHLPPSLGLLPGARVHFSQLEKRVSRSHNVYCCFRSSTYVQVLSFPPETTISVPLPHIYLAELLQGGQSPFQATASCHIVSVFSLQLFWVCAYCTSICRQAPGGGWDCRSRGDL

SEQ ID NO: 738223 - protein, 603 aa, Homo sapiens
SSGLGWVVRPVGWFALQPTPQVSFLVKTENFLPLGCLVRAERFQLIVERDVRSSFPSWKELSMPGFIQKQQARVYVQFFLADALILPVPRPCLHSATPSTPQTDPTGPEGPHLGQSRLFLLCHKEALMKRNFCVPPGASPEVPKPALSFYVLGSWLGGTQRKEGTGWGLPEPQGNDDNDQKVHLIFFGSSVRWFEFLHPGQVYRLVAPGPATPMLFEKDGSSCISRRPLELAGCASCLTVQDNWTLELESSQDIQDVLDANKSLPESSLTDLLSDNFTDSLVSFSAEILSRTLCEPLVASLWMKLGNTGAMRRCVKLTVALETAECEFPPHLDVYIEDPHLPPSLGLLPGARVHFSQLEKRVSRSHNVYCCFRSSTYVQVLSFPPETTISVPLPHIYLAELLQGGQSPFQATASCHIVSVFSLQLFWVCAYCTSICRQGKCTRLGSTCPTQTAISQAIIRLLVEDGTAEAVVTCRNHHVAAALGLCPREWASLLDFVQVPGRVVLQFAGPGAQLESSARVDEPMTMFLWTLCTSPSVLRPIVLSFELERKPSKIVPLEPPRLQRFQCGELPFLTHVNPRLRLSCLSIRESEYSSSLGILASSC

SEQ ID NO: 738224 - protein, 376 aa, Homo sapiens
LLGVKCLWMEGLWMTKMSLDAKCLWMQSVLVDANKSLPESSLTDLLSDNFTDSLVSFSAEILSRTLCEPLVASLWMKLGNTGAMRRCVKLTVALETAECEFPPHLDVYIEDPHLPPSLGLLPGARVHFSQLEKRVSRSHNVYCCFRSSTYVQVLSFPPETTISVPLPHIYLAELLQGGQSPFQATASCHIVSVFSLQLFWVCAYCTSICRQGKCTRLGSTCPTQTAISQAIIRLLVEDGTAEAVVTCRNHHVAAALGLCPREWASLLDFVQVPGRVVLQFAGPGAQLESSARVDEPMTMFLWTLCTSPSVLRPIVLSFELERKPSKIVPLEPPRLQRFQCGELPFLTHVNPRLRLSCLSIRESEYSSSLGILASSC

SEQ ID NO: 738225 - protein, 552 aa, Homo sapiens
GAVLLQSFSRQKPGAHSSRQAYGASLYEQLVWERQLGLPLYLWATKALEELACKLCPHVLRHHQFLQHSSPGSPSLGLQLLAPTLDLLAPPGSPVRNAHNEILEEPHHCPLQKYTRLQTPSSFPTLATLKEEGQRKAWASFDPKALLPLPEASYLPSCQLNRRLAWSWLCLLPSAFCPAQVLLGVLVASSHKGCLQLRDQSGSLPCLLLAKHSQPLSDPRLIGCLVRAERFQLIVERDVRSSFPSWKELSMPGFIQKQQARVYVQFFLADALILPVPRPCLHSATPSTPQTDPTGPEGPHLGQSRLFLLCHKEALMKRNFCVPPGASPEVPKPALSFYVLGSWLGGTQRKEGTGWGLPEPQGNDDNDQKVHLIFFGSSVRWFEFLHPGQVYRLVAPGPATPMLFEKDGSSCISRRPLELAGCASCLTVQDNWTLELESSQDIQDVLDANKSLPESSLTDLLSDNFTDSLVSFSAEILSRTLCEPLVASLWMKLGNTGAMRRCVKLTVALETAECEFPPHLDVYIEDPHLPPSLGLLPGARVHFSQLEKRVSR

SEQ ID NO: 738226 - protein, 389 aa, Homo sapiens [sequence omitted]

SEQ ID NO: 738227 - protein, 190 aa, Homo sapiens
MKASQCCCCLSHLLASVLLLLLLPELSGPLAVLLQAAEAAPGLGPPDPRPRTLPPLPPGPTPAQQPGRGLAEAAGPRGSEGGNGSNPVAGLETDDHGGKAGEGSVGGGLAVSPNPGDKPMTQRALTVLMVVSGAVLVYFVVRTVRMRRRNRKTRRYGVLDTNIENMELTPLEQDDEDDDNTLFDANHPRR

SEQ ID NO: 738228 - protein, 69 aa, Homo sapiens
DSKQHPAGPMEMSLPTFTLSLPPYASLPLDKPRLMTQGTSSLPVASPSLTILKEPANKMLSSGFFQWHC

SEQ ID NO: 738229 - protein, 86 aa, Homo sapiens
FPGGGNGFQKENSCMAGSTDVVCILTHAMSRRMRVRHDSPEGLSPRRLSTAQRAGPGSGCGLGGRHTDSGTTWPWFKSHFCCSLNV

SEQ ID NO: 738230 - protein, 124 aa, Homo sapiens
MFPALETHLKQTIPDPYEDFMYRHLQYYGYFKAQRGSLPNSATHQHVRKNNPQCLLNGSLGEKDDLIPDTLQKEKLLWPISLSSAVHRQIEAINRDFHSCLGWMQWRGLSSLQPPPPRFKDSPA

SEQ ID NO: 738231 - protein, 95 aa, Homo sapiens
PGPSQKAVAGGCSEFVPLPAHCLASVLKCGGRLPRWSFSAAAIRAAWDGPGREGGRIHRSALLLLLCNQLPIWKLGRVCDWMLMSLTSFQPTIQK

SEQ ID NO: 738232 - protein, 95 aa, Homo sapiens; identical to SEQ ID NO: 738231

SEQ ID NO: 738233 - protein, 98 aa, Homo sapiens
SKLPDILKECMKLFCSEALFLLLSNFTGLKLHFLAPSEDEMDDKKEEAAASAADRTEEGTGHSPPEPENNQAAISINGQQSHEQTDRVRGLEDWSPHF

SEQ ID NO: 738234 - protein, 119 aa, Homo sapiens
MTRKAHVKRLSPACLLRAPECSSKPSSCPFRQTAASQGCLCLPEGPEVGREQKPQRVLQLSQREAATALLEACARNALLLAGGQRGEAPRLTPVILALWEAKVGGSPEIRSWKPARPTW

SEQ ID NO: 738235 - protein, 138 aa, Homo sapiens
LDHSFGIAGPSNGKGEHWMLRLLSHVRSMPGSMTSCLPFSSVKYARSESQSRIRISSKMACTGSSYHGSITRNAKQSAISELWSDLQKPRETSNTKMQIKISREINEPGRCTSVAGLAEVTTCTADCWKFCGIPAEWP

SEQ ID NO: 738236 - protein, 94 aa, Homo sapiens
LFLLCLYVCLRWSLCLCCSGQSTVVQSWLTATSTSQKKKANTANSISFLEEAGASGGWTMLELLVGGRCWSFWWVDDAESSGGWTMVELLVGGP

SEQ ID NO: 738237 - protein, 78 aa, Homo sapiens
EASLGMNGAVRRQPRLPSAGPARTTEAVCERNGNEPQALPKEPHPLPRAGLRNAGQPERNPRWERRSRASETPLRRTL

SEQ ID NO: 738238 - protein, 66 aa, Homo sapiens
CAACAPHLTNTWTSCLHPPKQDALPCQVTPSKTNWNLASYRKASVTAPGVAGLLAQGEALFEVPAL

SEQ ID NO: 738239 - protein, 112 aa, Homo sapiens
PCPANFVFLVELGFLHVGQAGLELLTSGDPPTSASESAGITGVRHRARLDSIFYMLLLLSFPTSLLSLISICPTLLLPESSSCFPVFCVFCLSLSKDRVFSVKSPTRGQTPL

SEQ ID NO: 738240 - protein, 101 aa, Homo sapiens
LLLNSRPRRPVIQTVLMQEKDKNFGNSKLGGILICPISSLFSTLALKNNSLQSQQKPAAWKPLEGSKRGWSSFKAPFPKNCHYLTYLVVPWKTLQCSLYLT

SEQ ID NO: 738241 - protein, 273 aa, Homo sapiens
APFPLFIALNTLSTLLVLSIPFLNVPTLVKAVASLHFTTASPSVSSTSRLTVHLVGRTGIYPRGPKLGFGRWITPIIDPFVEIALRVFVLRGRRNLGRALHSVLQRWGDAPGPLVAPAQVCSHGGTRVGNRFRPGQVRTRSSQRLGSRRRRLPPRAFPVTCCRAAQSAPAARGLGIQTAAPPAGGDQRWRGCGRCCLRAMEHRIVGPGPYRATRLVSECAGAWAEHPVPRAPTQRADRVLVSLRFRRPAGLGCGAFQLGLLGLPFSGRASKKG

SEQ ID NO: 738242 - protein, 728 aa, Homo sapiens
APFPLFIALNTLSTLLVLSIPFLNVPTLVKAVASLHFTTASPSVSSTSRLTVHLVGRTGIYPRGPKLGFGRWITPIIDPFVEIALRVFVLRGRRNLGRALHSVLQRWGDAPGPLVAPAKVCSHGGTRVGNRFRPGQVRTRSSQRLGSRRRRLPPRAFPVTCCRAAQSAPAARGLGIQTAAPPAGGDQRWRGCGRCCLRAMEHRIVGPGPYRATRLWNETVELFRAKMPLRKHRCRFKSYEHCFTAAEAVDWLHELLRCSQNFGPEVTRKQTVQLLKKFLKNHVIEDIKGKWGEEDFEDNRHLYRFPPSSPLKPYPKKPPNQKDVIKFPEWNDLPPGTSQENIPVRPVVMNSEMWYKRHSIAIGEVPACRLVHRRQLTEANVEEIWKSMTLSYLQKILGLDSLEEVLDVKLVNSKFIIHNVYSVSKQGVVILDDKSKELPHWVLSAMKCLANWPNCSDLKQPMYLGFEKDVFKTIADYYGHLKEPLLTFHLFDAFVSVLGLLQKEKVAVEAFQICCLLLPPENRRKLQLLMRMMARICLNKEMPPLCDGFGTRTLMVQTFSRCILCSKDEVDLDELLAARLVTFLMDNYQEILKVPLALQTSIEERVAHLRRVQIKYPGADMDITLSAPSFCRQISPEEFEYQRSYGSQEPLAALLEEVITDAKLSNKEKKKKLKQFQKSYPEVYQERFPTPESAALLFPEKPKPKPQLLMWALKKPFQPFQRTRSFRM

SEQ ID NO: 738243 - protein, 514 aa, Homo sapiens
MWNETVELFRAKMPLRKHRCRFKSYEHCFTAAEAVDWLHELLRCSQNFGPEVTRKQTVQLLKKFLKNHVIEDIKGKWGEEDFEDNRHLYRFPPSSPLKPYPKKPPNQKDVIKFPEWNDLPPGTSQENIPVRPVVMNSEMWYKRHSIAIGEVPACRLVHRRQLTEANVEEIWKSMTLSYLQKILGLDSLEEVLDVKLVNSKFIIHNVYSVSKQGVVILDDKSKELPHWVLSAMKCLANWPNCSDLKQPMYLGFEKDVFKTIADYYGHLKEPLLTFHLFDAFVSVLGLLQKEKVAVEAFQICCLLLPPENRRKLQLLMRMMARICLNKEMPPLCDGFGTRTLMVQTFSRCILCSKDEVDLDELLAARLVTFLMDNYQEILKVPLALQTSIEERVAHLRRVQIKYPGADMDITLSAPSFCRQISPEEFEYQRSYGSQEPLAALLEEVITDAKLSNKEKKKKLKQFQKSYPEVYQERFPTPESAALLFPEKPKPKPQLLMWALKKPFQPFQRTRSFRM

SEQ ID NO: 738244 - protein, 380 aa, Homo sapiens
MNSEMWYKRHSIAIGEVPACRLVHRRQLTEANVEEIWKSMTLSYLQKILGLDSLEEVLDVKLVNSKFIIHNVYSVSKQGVVILDDKSKELPHWVLSAMKCLANWPNCSDLKQPMYLGFEKDVFKTIADYYGHLKEPLLTFHLFDAFVSVLGLLQKEKVAVEAFQICCLLLPPENRRKLQLLMRMMARICLNKEMPPLCDGFGTRTLMVQTFSRCILCSKDEVDLDELLAARLVTFLMDNYQEILKVPLALQTSIEERVAHLRRVQIKYPGADMDITLSAPSFCRQISPEEFEYQRSYGSQEPLAALLEEVITDAKLSNKEKKKKLKQFQKSYPEVYQERFPTPESAALLFPEKPKPKPQLLMWALKKPFQPFQRTRSFRM

SEQ ID NO: 738245 - protein, 267 aa, Homo sapiens [sequence omitted]

SEQ ID NO: 738246 - protein, 359 aa, Homo sapiens
MVPDRSVLELLRIWPAHLMEVVPQVLVFRQAQLAKWCRYPITATMLATCVKCRKPIQSADSGCRVTTLLRIFMTSVAADLAMSSPANWAKSLRNYRTSSLSIGLNAWSNVCVGAGAPGCTCSSRLDCWRLMTPHRMRMAVPPPPPPPPPPPPPPPPPPPPAPLIRPPSTFPRPPPLCDGFGTRTLMVQTFSRCILCSKDEVDLDELLAARLVTFLMDNYQEILKVPLALQTSIEERVAHLRRVQIKYPGADMDITLSAPSFCRQISPEEFEYQRSYGSQEPLAALLEEVITDAKLSNKEKKKKLKQFQKSYPEVYQERFPTPESAALLFPEKPKPKPQLLMWALKKPFQPFQRTRSFRM

SEQ ID NO: 738247 - protein, 150 aa, Homo sapiens
  misc_feature (1)..(1): Xaa can be any naturally occurring amino acid
XFGTRVHTLLYRGLQGQRDLQTSIEERVAHLRRVQIKYPGADMDITLSAPSFCRQISPEEFEYQRSYGSQEPLAALLEEVITDAKLSNKEKKKKLKQFQKSYPEVYQERFPTPESAALLFPEKPKPKPQLLMWALKKPFQPFQRTRSFRM

SEQ ID NO: 738248 - protein, 389 aa, Homo sapiens
TRRLPGVSLPPALRRRPVHTPPPSRQLSLRACARCLPARSGSRRRAMWAAAGGLWRSRAGLRALFRSRDAALFPGCERGLHCSAVSCKNWLKKFASKTKKKVWYESPSLGSHSTYKPSKLEFLMRSTSKKTRKEDHARLRALNGLLYKALTDLLCTPEVSQELYDLNVELSKVSLTPDFSACRAYWKTTLSAEQNAHMEAVLQRSAAHMRHLLMSQQTLRNVPPIVFVQDKGNAALAELDQLLAVADFGPRDERDNFVQNDFRDPDAPQPCGTTEPTTSSSLCGIDHEALNKQIMEYKRRKDKGLGGLVWQGQVAELTTQMKKGRKRAKPRLEQDSSLKSYLSGEEVEDDLDLVGAPEYECYAPDTEELEAERGGGRTEDGHSCGASRE

SEQ ID NO: 738249 - protein, 99 aa, Homo sapiens
TRRLPGVSLPPALRRRPVHTPPPSRQLSLRACARCLPARSGSRRRAMWAAAGGLWRSRAGLRALFRSRDAALFPGCERGLHCSAVSCKNWLKKFASKTK

SEQ ID NO: 738250 - protein, 84 aa, Homo sapiens
VVGSVVPQGCGASGSLGRKKRRWQNRGWPQLRSKQGVDGEALPIPHLQGKALARNAACGFIEAVDGVKPSALLLLQHFLAFPCI

SEQ ID NO: 738251 - protein, 188 aa, Homo sapiens
MTLTWSSPRHLLMSQQTLRNVPPIVFVQDKGNAALAELDQLLAVADFGPRDERDNFVQNDFRDPDAPQPCGTTEPTTSSSLCGIDHEALNKQIMEYKRRKDKGLGGLVWQGQVAELTTQMKKGRKRAKPRLEQDSSLKSYLSGEEVEDDLDLVGAPEYECYAPDTEELEAERGGGRTEDGHSCGASRE

SEQ ID NO: 738252 - protein, 364 aa, Homo sapiens
TRRLPGVSLPPALRRRPVHTPPPSRQLSLRACARCLPARSGSRRRAMWAAAGGLWRSRAGLRALFRSRDAALFPGCERGLHCSAVSCKNWLKKFASKTKKKVWYESPSLGSHSTYKPSKLEFLMRSTSKKTRKEDHARLRALNGLLYKALTDLLCTPEVSQELYDLNVELSKVSLTPDFSACRAYWKTTLSAEQNAHMEAVLQRSAAHMRHLLMSQQTLRNVPPIVFVQDKGNAALAELDQLLAVADFGPRDERDNFVQNDFRDPDAPQPCGTTEPTTSSSLCGIDHEALNKQIMEYKRRKDKGLGGLVWQGQVAELTTQMKKGRKRAKPRLEQDSSLKSYLSGEEVEDDLDLQDNFRLQGSGT

SEQ ID NO: 738253 - protein, 210 aa, Homo sapiens
TRRLPGVSLPPALRRRPVHTPPPSRQLSLRACARCLPARSGSRRRAMWAAAGGLWRSRAGLRALFRSRDAALFPGCERGLHCSAVSCKNWLKKFASKTKKKVWYESPSLGSHSTYKPSKLEFLMRSTSKKTRKEDHARLRALNGLLYKALTDLLCTPEVSQELYDLNVELSKVSLTPDFSACRAYWKTTLSAEQNAHMEAVLQRSAAHMR

SEQ ID NO: 738254 - protein, 102 aa, Homo sapiens
HSHRHPAGHSRADPLLRGRSGGSGGAGTVATWQVTVLARRMWVCITEPTWAWGRYLGGLLEDAEVSFQEQCLAMSLVALVIMVSPETNNIQPSVSPPRHTSN

SEQ ID NO: 738255 - protein, 261 aa, Homo sapiens [sequence omitted]

SEQ ID NO: 738256 - protein, 191 aa, Homo sapiens [sequence omitted]

SEQ ID NO: 738257 - protein, 406 aa, Homo sapiens
MRESALEPGPVPEAPAGGPVHAVTVVTLLEKLASMLETLRERQGGLARRQGGLAGSVRRIQSGLGALSRSHDTTSNTLAQLLAKAERVSSHANAAQERAVRRAAQVQRLEANHGLLVARGKLHVLLFKVSDLKRSPIRGLCRPVGHQLGAPRFHPPTTPTFLTPPAVCCCGTDSQSRTHFPRPSPIPPSQPEPRLANPSPPSSSSGHVRRIWSESQPIPKITVVERAFRDCGHYPLLAPHQASPTLQRFAVRTQLSLPLPSHACLSPQTLAAEEEGEVPASAFQKAPEPLGPADQSELGPEQPEAEVGESSDEEPVESRAQRLRRTGLQKVQSLRRALSGRKGPAAPPPTPVKPPRLGPGRSAEAQPEAQPALEPTLEPEPPQDTEEDPGRPGAAEEALLQMESVA

SEQ ID NO: 738258 - protein, 293 aa, Homo sapiens [sequence omitted]

SEQ ID NO: 738259 - protein, 362 aa, Homo sapiens
AAPMRPLPPVGDVRLELSPPPPLLPVPVVSGSPVGSSGRLMASSSSLVPDRLRLPLCFLGVFVCYFYYGILQEKITRGKYGEGAKQETFTFALTLVFIQCVINAVFAKILIQFFDTARVDRTRSWLYAACSISYLGAMVSSNSALQFVNYPTQVLGKSCKPIPVMLLGVTLLKKKYPLAKYLCVLLIVAGVALFMYKPKKVVGIEEHTVGYGELLLLLSLTLDGLTGVSQDHMRAHYQTGSNHMMLNINLWSTLLLGMGILFTGELWEFLSFAERYPAIIYNILLFGLTSALGQSFIFMTVVYFGPLTCSIITTTRKFFTILASVILFANPISPMQWVGTVLVFLGLGLDAKFGKGAKKTSH

SEQ ID NO: 738260 - protein, 362 aa, Homo sapiens; identical to SEQ ID NO: 738259

SEQ ID NO: 738261 - protein, 363 aa, Homo sapiens
GAEAAAGTSSGGGSGAMVKMAPPLLPVPVVSGSPVGSSGRLMASSSSLVPDRLRLPLCFLGVFVCYFYYGILQEKITRGKYGEGAKQETFTFALTLVFIQCVINAVFAKILIQFFDTARVDRTRSWLYAACSISYLGAMVSSNSALQFVNYPTQVLGKSCKPIPVMLLGVTLLKKKYPLAKYLCVLLIVAGVALFMYKPKKVVGIEEHTVGYGELLLLLSLTLDGLTGVSQDHMRAHYQTGSNHMMLNINLWSTLLLGMGILFTGELWEFLSFAERYPAIIYNILLFGLTSALGQSFIFMTVVYFGPLTCSIITTTRKFFTILASVILFANPISPMQWVGTVLVFLGLGLDAKFGKGAKKTSH

SEQ ID NO: 738262 - protein, 397 aa, Homo sapiens
GAEAAAGTSSGGGSGAMVKMAPPLLPVPVVSGSPVGSSGRLMASSSSLVPDRLRLPLCFLGVFVCYFYYGILQEKMTRVGPLLVLPDACKQPIRPRPWCHSRNTVSSCLGTRGKYGEGAKQETFTFALTLVFIQCVINAVFAKILIQFFDTARVDRTRSWLYAACSISYLGAMVSSNSALQFVNYPTQVLGKSCKPIPVMLLGVTLLKKKYPLAKYLCVLLIVAGVALFMYKPKKVVGIEEHTVGYGELLLLLSLTLDGLTGVSQDHMRAHYQTGSNHMMLNINLWSTLLLGMGILFTGELWEFLSFAERYPAIIYNILLFGLTSALGQSFIFMTVVYFGPLTCSIITTTRKFFTILASVILFANPISPMQWVGTVLVFLGLGLDAKFGKGAKKTSH

SEQ ID NO: 738263 - protein, 225 aa, Homo sapiens
MVSSNSALQFVNYPTQVLGKSCKPIPVMLLGVTLLKKKYPLAKYLCVLLIVAGVALFMYKPKKVVGIEEHTVGYGELLLLLSLTLDGLTGVSQDHMRAHYQTGSNHMMLNINLWSTLLLGMGILFTGELWEFLSFAERYPAIIYNILLFGLTSALGQSFIFMTVVYFGPLTCSIITTTRKFFTILASVILFANPISPMQWVGTVLVFLGLGLDAKFGKGAKKTSH

SEQ ID NO: 738264 - protein, 293 aa, Homo sapiens [sequence omitted]

SEQ ID NO: 738265 - protein, 353 aa, Homo sapiens
SCPQSCLIGKISRARDQSRGCRFPWPSGMEPRTRVGPLLVLPDACKQPIRPRPWCHSRNTVSSCLGTRGKYGEGAKQETFTFALTLVFIQCVINAVFAKILIQFFDTARVDRTRSWLYAACSISYLGAMVSSNSALQFVNYPTQVLGKSCKPIPVMLLGVTLLKKKYPLAKYLCVLLIVAGVALFMYKPKKVVGIEEHTVGYGELLLLLSLTLDGLTGVSQDHMRAHYQTGSNHMMLNINLWSTLLLGMGILFTGELWEFLSFAERYPAIIYNILLFGLTSALGQSFIFMTVVYFGPLTCSIITTTRKFFTILASVILFANPISPMQWVGTVLVFLGLGLDAKFGKGAKKTSH

SEQ ID NO: 738266 - protein, 255 aa, Homo sapiens
MCDQCCVCQDLVDRTRSWLYAACSISYLGAMVSSNSALQFVNYPTQVLGKSCKPIPVMLLGVTLLKKKYPLAKYLCVLLIVAGVALFMYKPKKVVGIEEHTVGYGELLLLLSLTLDGLTGVSQDHMRAHYQTGSNHMMLNINLWSTLLLGMGILFTGELWEFLSFAERYPAIIYNILLFGLTSALGQSFIFMTVVYFGPLTCSIITTTRKFFTILASVILFANPISPMQWVGTVLVFLGLGLDAKFGKGAKKTSH

SEQ ID NO: 738267 - protein, 255 aa, Homo sapiens; identical to SEQ ID NO: 738266

SEQ ID NO: 738268 - protein, 198 aa, Homo sapiens
MLLGVTLLKKKYPLAKYLCVLLIVAGVALFMYKPKKVVGIEEHTVGYGELLLLLSLTLDGLTGVSQDHMRAHYQTGSNHMMLNINLWSTLLLGMGILFTGELWEFLSFAERYPAIIYNILLFGLTSALGQSFIFMTVVYFGPLTCSIITTTRKFFTILASVILFANPISPMQWVGTVLVFLGLGLDAKFGKGAKKTSH

SEQ ID NO: 738269 - protein, 180 aa, Homo sapiens
AAPMRPLPPVGDVRLELSPPPPLLPVPVVSGSPVGSSGRLMASSSSLVPDRLRLPLCFLGVFVCYFYYGILQEKITRGKYGEGAKQETFTFALTLVFIQCVINAVFAKILIQFFDTARVDRTRSWLYAACSISYLGAMVSSNSALQFVNYPTQGETSGWDDGWLRYHLKRTKSSSLRSVS

SEQ ID NO: 738270 - protein, 198 aa, Homo sapiens; identical to SEQ ID NO: 738268

SEQ ID NO: 738271 - protein, 216 aa, Homo sapiens
MLCLPRSVLGKSCKPIPVMLLGVTLLKKKYPLAKYLCVLLIVAGVALFMYKPKKVVGIEEHTVGYGELLLLLSLTLDGLTGVSQDHMRAHYQTGSNHMMLNINLWSTLLLGMGILFTGELWEFLSFAERYPAIIYNILLFGLTSALGQSFIFMTVVYFGPLTCSIITTTRKFFTILASVILFANPISPMQWVGTVLVFLGLGLDAKFGKGAKKTSH

SEQ ID NO: 738272 - protein, 198 aa, Homo sapiens; identical to SEQ ID NO: 738268

SEQ ID NO: 738273 - protein, 192 aa, Homo sapiens
MCDQCCVCQDLVDRTRSWLYAACSISYLGAMVSSNSALQFVNYPTQLLSLTLDGLTGVSQDHMRAHYQTGSNHMMLNINLWSTLLLGMGILFTGELWEFLSFAERYPAIIYNILLFGLTSALGQSFIFMTVVYFGPLTCSIITTTRKFFTILASVILFANPISPMQWVGTVLVFLGLGLDAKFGKGAKKTSH

SEQ ID NO: 738274 - protein, 255 aa, Homo sapiens; identical to SEQ ID NO: 738266

SEQ ID NO: 738275 - protein, 118 aa, Homo sapiens
MLNINLWSTLLLGMGILFTGELWEFLSFAERYPAIIYNILLFGLTSALGQSFIFMTVVYFGPLTCSIITTTRKFFTILASVILFANPISPMQWVGTVLVFLGLGLDAKFGKGAKKTSH

SEQ ID NO: 738276 - protein, 159 aa, Homo sapiens
AAPMRPLPPVGDVRLELSPPPPLLPVPVVSGSPVGSSGRLMASSSSLVPDRLRLPLCFLGVFVCYFYYGILQEKITRGKYGEGAKQETFTFALTLVFIQCVINAVFAKIWWIVPGAGSMLPVLSPIWVPWSPAIQHYSLSTTQLRVKPQGGMMVGSDII

SEQ ID NO: 738277 - protein, 159 aa, Homo sapiens; identical to SEQ ID NO: 738276

SEQ ID NO: 738278 - protein, 76 aa, Homo sapiens
RPIGQGWGAGALRARRVPGSCWESLFPVPPRTVRSARGGVRRARLRRAAAAADELRETEFRHVGQAHLRSLKISST

SEQ ID NO: 738279 - protein, 132 aa, Homo sapiens
MKVKIKCWNGVATWLWVANDENCGICRMAFNGCCPDCKVPGDDCPLVWGQCSHCFHMHCILKWLHAPAGAAALPHVPPGMEVQGVRPTWLSLEGHPETPSSCWRRWLLGTAPLSCNKVETRAGAAFVLPSLC

SEQ ID NO: 738280 - protein, 196 aa, Homo sapiens
MKVKIKCWNGVATWLWVANDENCGICRMAFNGCCPDCPLHGESISRCLGWCPQPVPVLGGRAHPQVPINTASPTPGQHTGSLMSREESSRSPDPTPPALDQETSSLLRCTSPWCLDHSCDLFGITDQVSADGPRACRQGARRRLPAGVGPVLPLLPHALHPQVAARTAGAAALPHVPPGMEVQGVRPDLALAGGAS

SEQ ID NO: 738281 - protein, 76 aa, Homo sapiens; identical to SEQ ID NO: 738278

SEQ ID NO: 738282 - protein, 132 aa, Homo sapiens
MSGVPWSLLVFAWGRAGQETDWVTLLISASLKHERLQCWSHCPGSLPAPLPGLSHALCPAWSCLSFSPPPLRRQGARRRLPAGVGPVLPLLPHALHPQVAARTAGAAALPHVPPGMEVQGVRPDLALAGGAS

SEQ ID NO: 738283 - protein, 211 aa, Homo sapiens
  misc_feature (119)..(119): Xaa can be any naturally occurring amino acid
MNIYVNQRTRTTRHNQYDKYPDILNTQNSGAPTYESHPTEEGGHSFMMVSPVGGASPLMCASHQDGFCSDTEGLRPPVGGAILKKRDVRTPGHRHLLTHGATLLRWRQHNPHSTSLWWXLFVTYSRDGTPHHFRLPGAARTQSMAGQSKAPTYRAREVMITAALFIGRDTSWQHSNVSKYDSFPRCSNTHPSPPPYTQCLRPAETYFSVPP

SEQ ID NO: 738284 - protein, 84 aa, Homo sapiens
MKVKIKCWNGVATWLWVANDENCGICRMAFNGCCPDCKVPGDDCPLVWGQCSHCFHMHCILKWLHAQQVQQHCPMCRQEWKFKE

SEQ ID NO: 738285 - protein, 129 aa, Homo sapiens
HITIRARTRAATVVVFIPSRADAGAANGRAGRARCVIRLAKGSAAMKVKIKCWNGVATWLWVANDENCGICRMAFNGCCPDCKVPGDDCPLVWGQCSHCFHMHCILKWLHAQQVQQHCPMCRQEWKFKE

SEQ ID NO: 738286 - protein, 84 aa, Homo sapiens; identical to SEQ ID NO: 738284

SEQ ID NO: 738287 - protein, 145 aa, Homo sapiens
MKVKIKCWNGVATWLWVANDENCGICRMAFNGCCPDCWSAMARSRLAATSASRVQTVLLPQPSKQLGLQARCPATTARWCGASAPTASTCIASSSGCTHSRCSSTAPCAARNGSSRSEARPGSRWRGILRLLPHAGADGCWGQRP

SEQ ID NO: 738288 - protein, 106 aa, Homo sapiens
MPQREGSAAMKVKIKCWNGVATWLWVANDENCGICRMAFNGCCPDCECPLHAVLSGPDCKVPGDDCPLVWGQCSHCFHMHCILKWLHAQQVQQHCPMCRQEWKFKE

SEQ ID NO: 738289 - protein, 196 aa, Homo sapiens; identical to SEQ ID NO: 738280

SEQ ID NO: 738290 - protein, 42 aa, Homo sapiens
NISVKRQGPRQTLSHDWEEKEQDQTVEPGACSSGMLLPAGLP

SEQ ID NO: 738291 - protein, 132 aa, Homo sapiens; identical to SEQ ID NO: 738279

SEQ ID NO: 738292 - protein, 132 aa, Homo sapiens; identical to SEQ ID NO: 738279

SEQ ID NO: 738293 - protein, 84 aa, Homo sapiens; identical to SEQ ID NO: 738284

SEQ ID NO: 738294 - protein, 132 aa, Homo sapiens; identical to SEQ ID NO: 738279

SEQ ID NO: 738295 - protein, 432 aa, Homo sapiens
AEAAGVRRWAGLPRPALRRGGGWARGERDGAGAVRPRRRCLGGRVGCRTGGTAEAVGPRPARQVWKPPLRPVRADREAAGGWRRVSGTMKDLGAEHLAGHEGVQLLGLLNVYLEQEERFQPREKGLSLIEATPENDNTLCPGLRNAKVEDLRSLANFFGSCTETFVLAVNILDRFLALMKVKPKHLSCIGVCSFLLAARIVEEDCNIPSTHDVIRISQCKCTASDIKRMEKIISEKLHYELEATTALNFLHLYHTIILCHTSERKEILSLDKLEAQLKACNCRLIFSKAKPSVLALCLLNLEVETLKSVELLEILLLVKKHSKINDTEFFYWRELVSKCLAEYSSPECCKPDLKKLVWIVSRRTAQNLHNSYYSVPELPTIPEGGCFDESESEDSCEDMSCGEESLSSSPPSDQECTFFFNFKVAQTLCFPS

SEQ ID NO: 738296 - protein, 344 aa, Homo sapiens
MKDLGAEHLAGHEGVQLLGLLNVYLEQEERFQPREKGLSLIEATPENDNTLCPGLRNAKVEDLRSLANFFGSCTETFVLAVNILDRFLALMKVKPKHLSCIGVCSFLLAARIVEEDCNIPSTHDVIRISQCKCTASDIKRMEKIISEKLHYELEATTALNFLHLYHTIILCHTSERKEILSLDKLEAQLKACNCRLIFSKAKPSVLALCLLNLEVETLKSVELLEILLLVKKHSKINDTEFFYWRELVSKCLAEYSSPECCKPDLKKLVWIVSRRTAQNLHNSYYSVPELPTIPEGGCFDESESEDSCEDMSCGEESLSSSPPSDQECTFFFNFKVAQTLCFPS

SEQ ID NO: 738297 - protein, 432 aa, Homo sapiens; identical to SEQ ID NO: 738295

SEQ ID NO: 738298 - protein, 432 aa, Homo sapiens; identical to SEQ ID NO: 738295

SEQ ID NO: 738299 - protein, 412 aa, Homo sapiens
KKKQHQLEAGCSLACVLRSSASVSLPDNPGSNACGAAHCPQTFCTCVTPVTSSVSRFPDFSAPPLQQQMKDLGAEHLAGHEGVQLLGLLNVYLEQEERFQPREKGLSLIEATPENDNTLCPGLRNAKVEDLRSLANFFGSCTETFVLAVNILDRFLALMKVKPKHLSCIGVCSFLLAARIVEEDCNIPSTHDVIRISQCKCTASDIKRMEKIISEKLHYELEATTALNFLHLYHTIILCHTSERKEILSLDKLEAQLKACNCRLIFSKAKPSVLALCLLNLEVETLKSVELLEILLLVKKHSKINDTEFFYWRELVSKCLAEYSSPECCKPDLKKLVWIVSRRTAQNLHNSYYSVPELPTIPEGGCFDESESEDSCEDMSCGEESLSSSPPSDQECTFFFNFKVAQTLCFPS

SEQ ID NO: 738300 - protein, 432 aa, Homo sapiens; identical to SEQ ID NO: 738295

SEQ ID NO: 738301 - protein, 432 aa, Homo sapiens; identical to SEQ ID NO: 738295

SEQ ID NO: 738302 - protein, 420 aa, Homo sapiens
AEAAGVRRWAGLPRPALRRGGGWARGERDGAGAVRPRRRCLGGRVGCRTGGTAEAVGPRPARQVWKPPLRPVRADREAAGGWRRVSGTMKDLGAEHLAGHEGVQLLGLLNVYLEQEERFQPREKGLSLIEATPENDNTLCPGLRNAKVEDLRSLANFFGSCTETFVLAVNILDRFLALMKVKPKHLSCIGVCSFLLAARIVEEDCNIPSTHDVIRISQCKCTASDIKRMEKIISEKLHYELEATTALNFLHLYHTIILCHTSERKEILSLDKLEAQLKACNCRLIFSKAKPSVLALCLLNLEVETLKSVELLEILLLVKKHSKINDTEFFYWRELVSKCLAEYSSPECCKPDLKKLVWIVSRRTAQNLHNSYYSVPELPTIPEGGCFDESERFQYGVPATSHLPPPSSHMQIVSLLRQPT

SEQ ID NO: 738303 - protein, 392 aa, Homo sapiens
AEAAGVRRWAGLPRPALRRGGGWARGERDGAGAVRPRRRCLGGRVGCRTGGTAEAVGPRPARQVWKPPLRPVRADREAAGGWRRVSGTMKDLGAEHLAGHEGVQLLGLLNVYLEQEERFQPREKGLSLIEATPENDNTLCPGLRNAKVEDLRSLANFFGSCTETFVLAVNILDRFLALMKVKPKHLSCIGVCSFLLAARIVEEDCNIPSTHDVIRISQCKCTASDIKRMEKIISEKLHYELEATTALNFLHLYHTIILCHTSERKEILSLDKLEAQLKACNCRLIFSKAKPSVLALCLLNLEVETLKSVELLEILLLVKKHSKINDTEFFYWRELVSKCLAEYSSPECCKPDLKKLVWIVSRRTAQNLHNSYYSVPELPTIPEGGCFDESER

SEQ ID NO: 738304 - protein, 420 aa, Homo sapiens; identical to SEQ ID NO: 738302

SEQ ID NO: 738305 - protein, 412 aa, Homo sapiens
AEAAGVRRWAGLPRPALRRGGGWARGERDGAGAVRPRRRCLGGRVGCRTGGTAEAVGPRPARQVWKPPLRPVRADREAAGGWRRVSGTMKDLGAEHLAGHEGVQLLGLLNVYLEQEERFQPREKGLSLIEATPENDNTLCPGLRNAKVEDLRSLANFFGSCTETFVLAVNILDRFLALMKVKPKHLSCIGVCSFLLAARIVEEDCNIPSTHDVIRISQCKCTASDIKRMEKIISEKLHYELEATTALNFLHLYHTIILCHTSERKEILSLDKLEAQLKACNCRLIFSKAKPSVLALCLLNLEVETLKSVELLEILLLVKKHSKINDTEFFYWRELVSKCLAEYSSPECCKPDLKKLVWIVSRRTAQNLHNSYYSVPERVLTTTWHRGQSLMTCQIELLMMPHEDSLQQTILN

SEQ ID NO: 738306 - protein, 399 aa, Homo sapiens
MQSLSLGQTSISKGLNYLTIMAPGNLWHMRNNFLFGSRCWMTRFSAENIFKSVSFRLFGVKCHNTDSEPLKNEDLLKNLLTMGVDIDMARKRQPGVFHRMITNEQDLKMFLLSKGASKEVIASIISRYPRAITRTPENLSKRWDLWRKIVTSDLEIVNILERSPESFFRSNNNLNLENNIKFLYSVGLTRKCLCRLLTNAPRTFSNSLDLNKQMVEFLQAAGLSLGHNDPADFVRKIIFKNPFILIQSTKRVKANIEFLRSTFNLNSEELLVLICGPGAEILDLSNDYARRSYANIKEKLFSLGCTEEEVQKFVLSYPDVIFLAEKKFNDKIDCLMEENISISQIIENPRVLDSSISTLKSRIKELVNAGCNLSTLNITLLSWSKKRYEAKLKKLSRFA

SEQ ID NO: 738307 - protein, 399 aa, Homo sapiens; identical to SEQ ID NO: 738306

SEQ ID NO: 738308 - protein, 109 aa, Homo sapiens [sequence omitted]

SEQ ID NO: 738309 - protein, 128 aa, Homo sapiens
EAAGPQLRGRRKVLLDTFEYPGLVHHTGGCHCGAVRFAVWAPADLRVVDCSCRLCRKKQHRHFLVPASRFTLLQGAESIVTYRSNTHPALHSFCSRCGVQSFHAAVFDPRVYGVAPHCLDEGTVRSVV

SEQ ID NO: 738310 - protein, 78 aa, Homo sapiens
ERSLGRPHPSSHTQLLTVWYVGIFCPTAACAFAEHLQESHVGDGLDVAGTRAELLRFSECGQTRCSDMALGGVGTQAG

SEQ ID NO: 738311 - protein, 143 aa, Homo sapiens [sequence omitted]

SEQ ID NO: 738312 - protein, 124 aa, Homo sapiens
CASCSDLPPTPPPPQTEGKCEGTSSGKKLDLQEERGALLKMEIALLQFAGYTRSLSLSPPTSSFSSSKFVPVQCLHRAGLKLWQTRIHCIHFFPLVLVWFSGMKEASCFTNLFAFLMWFLSDFY

SEQ ID NO: 738313 - protein, 239 aa, Homo sapiens
MPKSCAARQCCNRYSSRRKQLTFHRFPFSRPELLKEWVLNIGRGNFKPKQHTVICSEHFRPECFSAFGNRKNLKHNAVPTVFAFQDPTQQVRENTDPASERGNASSSQKEKVLPEAGAGEDSPGRNMDTALEELQLPPNAEGHVKQVSPRRPQATEAVGRPTGPAGLRRTPNKQPSDHSYALLDLDSLKKKLFLTLKENEKLRKRLQAQRLVMRRMSSRLRACKGHQGLQARLGPEQQS

SEQ ID NO: 738314 - protein, 249 aa, Homo sapiens
QLSREVLCSDVKIPNDSEALGPALLGLTPRASALRFPFSRPELLKEWVLNIGRGNFKPKQHTVICSEHFRPECFSAFGNRKNLKHNAVPTVFAFQDPTQQVRENTDPASERGNASSSQKEKVLPEAGAGEDSPGRNMDTALEELQLPPNAEGHVKQVSPRRPQATEAVGRPTGPAGLRRTPNKQPSDHSYALLDLDSLKKKLFLTLKENEKLRKRLQAQRLVMRRMSSRLRACKGHQGLQARLGPEQQS

SEQ ID NO: 738315 - protein, 279 aa, Homo sapiens
MSAPWRRARPVTTSQRPRPSPQVPPLSAGPAAAAIFVGGSQAWLEMPKSCAARQCCNRYSSRRKQLTFHRFPFSRPELLKEWVLNIGRGNFKPKQHTVICSEHFRPECFSAFGNRKNLKHNAVPTVFAFQDPTQQVRENTDPASERGNASSSQKEKVLPEAGAGEDSPGRNMDTALEELQLPPNAEGHVKQVRLSAKVVCGWTQDDLLQTKWKPVSTHHETCVAEAGCAAWVSELPSQILHHGVGTSGFWGSSPECLAALGLCCVRVWWPAHHGPPSCW

SEQ ID NO: 738316 - protein, 239 aa, Homo sapiens; identical to SEQ ID NO: 738313

SEQ ID NO: 738317 - protein, 239 aa, Homo sapiens; identical to SEQ ID NO: 738313

SEQ ID NO: 738318 - protein, 807 aa, Homo sapiens
FPEITTRSNQSRVVPGAGAGQLSPAQPGPAQSPRRPRAQSRVPLAVRRTGSPEEQLLRPPPGSSVHRARRRPGRGSEPRAPGPGPGPRAPGPDVPMREPALAASAMAYHPFHAPRPADFPMSAFLAAAQPSFFPALALPPGALAKPLPDPGLAGAAAAAAAAAAAAEAGLHVSALGPHPPAAHLRSLKSLEPEDEVEDDPKVTLEAKELWDQFHKLGTEMVITKSGRRMFPPFKVRVSGLDKKAKYILLMDIVAADDCRYKFHNSRWMVAGKADPEMPKRMYIHPDSPATGEQWMAKPVAFHKLKLTNNISDKHGFTILNSMHKYQPRFHIVRANDILKLPYSTFRTYVFPETDFIAVTAYQNDKITQLKIDNNPFAKGFRDTGNGRREKRKQLTLPSLRLYEEHCKPERDGAESDASSCDPPPAREPPTSPGAAPSPLRLHRARAEEKSCAADSDPEPERLSEERAGAPLGRSPAPDSASPTRLTEPERARERRSPERGKEPAESGGDGPFGLRSLEKERAEARRKDEGRKEAAEGKEQGLAPLVVQTDSASPLGAGHLPGLAFSSHLHGQQFFGPLGAGQPLFLHPGQFTMGPGAFSAMGMGHLLASVAGGGNGGGGGPGTAAGLDAGGLGPAASAASTAAPFPFHLSQHMLASQGIPMPTFGGLFPYPYTYMAAAAAAASALPATSAAAAAAAAAGSLSRSPFLGSARPRLRFSPYQIPVTIPPSTSLLTTGLASEGSKAAGGNSREPSPLPELALRKVGAPSRGALSPSGSAKEAANELQSIQRLVSGLESQRALSPGRESPK

SEQ ID NO: 738319 - protein, 807 aa, Homo sapiens; identical to SEQ ID NO: 738318

SEQ ID NO: 738320 - protein, 147 aa, Homo sapiens [sequence omitted]

SEQ ID NO: 738321 - protein, 489 aa, Homo sapiens
FPEITTRSNQSRVVPGAGAGQLSPAQPGPAQSPRRPRAQSRVPLAVRRTGSPEEQLLRPPPGSSVHRARRRPGRGSEPRAPGPGPGPRAPGPDVPMREPALAASAMAYHPFHAPRPADFPMSAFLAAAQPSFFPALALPPGALAKPLPDPGLAGAAAAAAAAAAAAEAGLHVSALGPHPPAAHLRSLKSLEGPFGLRSLEKERAEARRKDEGRKEAAEGKEQGLAPLVVQTDSASPLGAGHLPGLAFSSHLHGQQFFGPLGAGQPLFLHPGQFTMGPGAFSAMGMGHLLASVAGGGNGGGGGPGTAAGLDAGGLGPAASAASTAAPFPFHLSQHMLASQGIPMPTFGGLFPYPYTYMAAAAAAASALPATSAAAAAAAAAGSLSRSPFLGSARPRLRFSPYQIPVTIPPSTSLLTTGLASEGSKAAGGNSREPSPLPELALRKVGAPSRGALSPSGSAKEAANELQSIQRLVSGLESQRALSPGRESPK

SEQ ID NO: 738322 - protein, 379 aa, Homo sapiens
FPEITTRSNQSRVVPGAGAGQLSPAQPGPAQSPRRPRAQSRVPLAVRRTGSPEEQLLRPPPGSSVHRARRRPGRGSEPRAPGPGPGPRAPGPDVPMREPALAASAMAYHPFHAPRPADFPMSAFLAAAQPSFFPALALPPGALAKPLPDPGLAGAAAAAAAAAAAAEAGLHVSALGPHPPAAHLRSLKSLEPEDEVEDDPKVTLEAKELWDQFHKLGTEMVITKSGRRMFPPFKVRVSGLDKKAKYILLMDIVAADDCRTSAAAAAAAAAGSLSRSPFLGSARPRLRFSPYQIPVTIPPSTSLLTTGLASEGSKAAGGNSREPSPLPELALRKVGAPSRGALSPSGSAKEAANELQSIQRLVSGLESQRALSPGRESPK

SEQ ID NO: 738323 - protein, 648 aa, Homo sapiens
PRAGGATAAGGNARERDRTQSVNTAFTALRTLIPTEPVDRKLSKIETLRLASSYIAHLANVLLLGDSGRRRAAVLPLPLGSCQGLPSPPAADGGRQPRSICTVLPQQPAQGGKADPEMPKRMYIHPDSPATGEQWMAKPVAFHKLKLTNNISDKHGFTILNSMHKYQPRFHIVRANDILKLPYSTFRTYVFPETDFIAVTAYQNDKITQLKIDNNPFAKGFRDTGNGRREKRKQLTLPSLRLYEEHCKPERDGAESDASSCDPPPAREPPTSPGAAPSPLRLHRARAEEKSCAADSDPEPERLSEERAGAPLGRSPAPDSASPTRLTEPERARERRSPERGKEPAESGGDGPFGLRSLEKERAEARRKDEGRKEAAEGKEQGLAPLVVQTDSASPLGAGHLPGLAFSSHLHGQQFFGPLGAGQPLFLHPGQFTMGPGAFSAMGMGHLLASVAGGGNGGGGGPGTAAGLDAGGLGPAASAASTAAPFPFHLSQHMLASQGIPMPTFGGLFPYPYTYMAAAAAAASALPATSAAAAAAAAAGSLSRSPFLGSARPRLRFSPYQIPVTIPPSTSLLTTGLASEGSKAAGGNSREPSPLPELALRKVGAPSRGALSPSGSAKEAANELQSIQRLVSGLESQRALSPGRESPK

SEQ ID NO: 738324 - protein, 242 aa, Homo sapiens
FPEITTRSNQSRVVPGAGAGQLSPAQPGPAQSPRRPRAQSRVPLAVRRTGSPEEQLLRPPPGSSVHRARRRPGRGSEPRAPGPGPGPRAPGPDVPMREPALAASAMAYHPFHAPRPADFPMSAFLAAAQPSFFPALALPPGALAKPLPDPGLAGAAAAAAAAAAAAEAGLHVSALGPHPPAAHLRSLKSLEPEDEVEDDPKVTLEAKELWDQFHKLGTEPLPGQCPAPTAFQPLSDPGHHPA

SEQ ID NO: 738325 - protein, 198 aa, Homo sapiens
FGGSLHLCLSKAPANGGVDAGGLGPAASAASTAAPFPFHLSQHMLASQGIPMPTFGGLFPYPYTYMAAAAAAASALPATSAAAAAAAAAGSLSRSPFLGSARPRLRFSPYQIPVTIPPSTSLLTTGLASEGSKAAGGNSREPSPLPELALRKVGAPSRGALSPSGSAKEAANELQSIQRLVSGLESQRALSPGRESPK

SEQ ID NO: 738326 - protein, 345 aa, Homo sapiens
FPEITTRSNQSRVVPGAGAGQLSPAQPGPAQSPRRPRAQSRVPLAVRRTGSPEEQLLRPPPGSSVHRARRRPGRGSEPRAPGPGPGPRAPGPDVPMREPALAASAMAYHPFHAPRPADFPMSAFLAAAQPSFFPALALPPGALAKPLPDPGLAGAAAAAAAAAAAAEAGLHVSALGPHPPAAHLRSLKSLEAGSRPSEGLPSCSPATQATRAACPCCLGRVQHRMSIYLNKGEKWAAAAGIEPRLASRGLGHFPGPQQGSGCWKHSHLGAAGLGPDPLQRQGGIRRCLWSSSEVGEASSRAQRSLQKPEGAGARGGSIGGSPRALDLGPRPRDKTGLRDAGTSYD

SEQ ID NO: 738327 - protein, 89 aa, Homo sapiens
HVHAHPHPRACIPCCFPGRHTGAHESLLASLQGGDPQNPAPGPNLGKKLLLCQQLLFGLRHSHLDPTLSRLLLLLPGRGSSKRRLVKTH

SEQ ID NO: 738328 - protein, 730 aa, Homo sapiens [sequence omitted]

SEQ ID NO: 738329 - protein, 730 aa, Homo sapiens [sequence omitted]

SEQ ID NO: 738330 - protein, 69 aa, Homo sapiens
HVAWGKISTLHAGCLDINSMLLAGQGGNGMRQALLAAWELGEACHCQLFLAFLGALYEAAKAAITSLKT

SEQ ID NO: 738331 - protein, 112 aa, Homo sapiens
MDEPSPLAQPLELNQHSRFIIGSVSEDNSEDEISNLVKLDLLEEKEGSLSPASVGSDTLSDLGISSLQDGLALHISSWIKRSGSVVLGSHCSSESPRGALGDKPHPQRFRFI

SEQ ID NO: 738332 - protein, 2346 aa, Homo sapiens
MDEPSPLAQPLELNQHSRFIIGSVSEDNSEDEISNLVKLDLLEEKEGSLSPASVGSDTLSDLGISSLQDGLALHIRSSMSGLHLVKQGRDRKKIDSQRDFTVASPAEFVTRFGGNKVIEKVLIANNGIAAVKCMRSIRRWSYEMFRNERAIRFVVMVTPEDLKANAEYIKMADHYVPVPGGPNNNNYANVELILDIAKRIPVQAVWAGWGHASENPKLPELLLKNGIAFMGPPSQAMWALGDKIASSIVAQTAGIPTLPWSGSGLRVDWQENDFSKRILNVPQELYEKGYVKDVDDGLQAAEEVGYPVMIKASEGGGGKGIRKVNNADDFPNLFRQVQAEVPGSPIFVMRLAKQSRHLEVQILADQYGNAISLFGRDCSVQRRHQKIIEEAPATIATPAVFEHMEQCAVKLAKMVGYVSAGTVEYLYSQDGSFYFLELNPRLQVEHPCTEMVADVNLPAAQLQIAMGIPLYRIKDIRMMYGVSPWGDSPIDFEDSAHVPCPRGHVIAARITSENPDEGFKPSSGTVQELNFRSNKNVWGYFSVAAAGGLHEFADSQFGHCFSWGENREEAISNMVVALKELSIRGDFRTTVEYLIKLLETESFQMNRIDTGWLDRLIAEKVQAERPDTMLGVVCGALHVADVSLRNSVSNFLHSLERGQVLPAHTLLNTVDVELIYEGVKYVLKVTRQSPNSYVVIMNGSCVEVDVHRLSDGGLLLSYDGSSYTTYMKEEVDRYRITIGNKTCVFEKENDPSVMRSPSAGKLIQYIVEDGGHVFAGQCYAEIEVMKMVMTLTAVESGCIHYVKRPGAALDPGCVLAKMQLDNPSKVQQAELHTGSLPRIQSTALRGEKLHRVFHYVLDNLVNVMNGYCLPDPFFSSKVKDWVERLMKTLRDPSLPLLELQDIMTSVSGRIPPNVEKSIKKEMAQYASNITSVLCQFPSQQIANILDSHAATLNRKSEREVFFMNTQSIVQLVQRYRSGIRGHMKAVVMDLLRQYLRVETQFQNGHYDKCVFALREENKSDMNTVLNYIFSHAQVTKKNLLVTMLIDQLCGRDPTLTDELLNILTELTQLSKTTNAKVALRARQVLIASHLPSYELRHNQVESIFLSAIDMYGHQFCIENLQKLILSETSIFDVLPNFFYHSNQVVRMAALEVYVRRAYIAYELNSVQHRQLKDNTCVVEFQFMLPTSHPNRGNIPTLNRMSFSSNLNHYGMTHVASVSDVLLDNSFTPPCQRMGGMVSFRTFEDFVRIFDEVMGCFSDSPPQSPTFPEAGHTSLYDEDKVPRDEPIHILNVAIKTDCDIEDDRLAAMFREFTQQNKATLVDHGIRRLTFLVAQKDFRKQVNYEVDRRFHREFPKFFTFRARDKFEEDRIYRHLEPALAFQLELNRMRNFDLTAIPCANHKMHLYLGAAKVEVGTEVTDYRFFVRAIIRHSDLVTKEASFEYLQNEGERLLLEAMDELEVAFNNTNVRTDCNHIFLNFVPTVIMDPSKIEESVRSMVMRYGSRLWKLRVLQAELKINIRLTPTGKAIPIRLFLTNESGYYLDISLYKEVTDSRTAQIMFQAYGDKQGPLHGMLINTPYVTKDLLQSKRFQAQSLGTTYIYDIPEMFRQSLIKLWESMSTQAFLPSPPLPSDMLTYTELVLDDQGQLVHMNRLPGGNEIGMVAWKMTFKSPEYPEGRDIIVIGNDITYRIGSFGPQEDLLFLRASELARAEGIPRIYVSANSGARIGLAEEIRHMFHVAWVDPEDPYKGYRYLYLTPQDYKRVSALNSVHCEHVEDEGESRYKITDIIGKEEGIGPENLRGSGMIAGESSLAYNEIITISLVTCRAIGIGAYLVRLGQRTIQVENSHLILTGAGALNKVLGREVYTSNNQLGGIQIMHNNGVTHCTVCDDFEGVFTVLHWLSYMPKSVHSSVPLLNSKDPIDRIIEFVPTKTPYDPRWMLAGRPHPTQKGQWLSGFFDYGSFSEIMQPWAQTVVVGRARLGGIPVGVVAVETRTVELSIPADPANLDSEAKIIQQAGQVWFPDSAFKTYQAIKDFNREGLPLMVFANWRGFSGGMKDMYDQVLKFGAYIVDGLRECCQPVLVYIPPQAELRGGSWVVIDSSINPRHMEMYADRESRGSVLEPEGTVEIKFRRKDLVKTMRRVDPVYIHLAERLGTPELSTAERKELENKLKEREEFLIPIYHQVAVQFADLHDTPGRMQEKGVISDILDWKTSRTFFYWRLRRLLLEDLVKKKIHNANPELTDGQIQAMLRRWFVEVEGTVKAYVWDNNKDLAEWLEKQLTEEDGVHSVIEENIKCISRDYVLKQIRSLVQANPEVAMDSIIHMTQHISPTQRAEVIRILSTMDSPST

SEQ ID NO: 738333 - protein, 2411 aa, Homo sapiens
GPAWCCTPVSHRPSRRRLLPPSSSSTQGLRNRPTAHVATLRSFWKWISTQTVRIIRAVRAHFGGIMDEPSPLAQPLELNQHSRFIIGSVSEDNSEDEISNLVKLDLLEEKEGSLSPASVGSDTLSDLGISSLQDGLALHIRSSMSGLHLVKQGRDRKKIDSQRDFTVASPAEFVTRFGGNKVIEKVLIANNGIAAVKCMRSIRRWSYEMFRNERAIRFVVMVTPEDLKANAEYIKMADHYVPVPGGPNNNNYANVELILDIAKRIPVQAVWAGWGHASENPKLPELLLKNGIAFMGPPSQAMWALGDKIASSIVAQTAGIPTLPWSGSGLRVDWQENDFSKRILNVPQELYEKGYVKDVDDGLQAAEEVGYPVMIKASEGGGGKGIRKVNNADDFPNLFRQVQAEVPGSPIFVMRLAKQSRHLEVQILADQYGNAISLFGRDCSVQRRHQKIIEEAPATIATPAVFEHMEQCAVKLAKMVGYVSAGTVEYLYSQDGSFYFLELNPRLQVEHPCTEMVADVNLPAAQLQIAMGIPLYRIKDIRMMYGVSPWGDSPIDFEDSAHVPCPRGHVIAARITSENPDEGFKPSSGTVQELNFRSNKNVWGYFSVAAAGGLHEFADSQFGHCFSWGENREEAISNMVVALKELSIRGDFRTTVEYLIKLLETESFQMNRIDTGWLDRLIAEKVQAERPDTMLGVVCGALHVADVSLRNSVSNFLHSLERGQVLPAHTLLNTVDVELIYEGVKYVLKVTRQSPNSYVVIMNGSCVEVDVHRLSDGGLLLSYDGSSYTTYMKEEVDRYRITIGNKTCVFEKENDPSVMRSPSAGKLIQYIVEDGGHVFAGQCYAEIEVMKMVMTLTAVESGCIHYVKRPGAALDPGCVLAKMQLDNPSKVQQAELHTGSLPRIQSTALRGEKLHRVFHYVLDNLVNVMNGYCLPDPFFSSKVKDWVERLMKTLRDPSLPLLELQDIMTSVSGRIPPNVEKSIKKEMAQYASNITSVLCQFPSQQIANILDSHAATLNRKSEREVFFMNTQSIVQLVQRYRSGIRGHMKAVVMDLLRQYLRVETQFQNGHYDKCVFALREENKSDMNTVLNYIFSHAQVTKKNLLVTMLIDQLCGRDPTLTDELLNILTELTQLSKTTNAKVALRARQVLIASHLPSYELRHNQVESIFLSAIDMYGHQFCIENLQKLILSETSIFDVLPNFFYHSNQVVRMAALEVYVRRAYIAYELNSVQHRQLKDNTCVVEFQFMLPTSHPNRGNIPTLNRMSFSSNLNHYGMTHVASVSDVLLDNSFTPPCQRMGGMVSFRTFEDFVRIFDEVMGCFSDSPPQSPTFPEAGHTSLYDEDKVPRDEPIHILNVAIKTDCDIEDDRLAAMFREFTQQNKATLVDHGIRRLTFLVAQKDFRKQVNYEVDRRFHREFPKFFTFRARDKFEEDRIYRHLEPALAFQLELNRMRNFDLTAIPCANHKMHLYLGAAKVEVGTEVTDYRFFVRAIIRHSDLVTKEASFEYLQNEGERLLLEAMDELEVAFNNTNVRTDCNHIFLNFVPTVIMDPSKIEESVRSMVMRYGSRLWKLRVLQAELKINIRLTPTGKAIPIRLFLTNESGYYLDISLYKEVTDSRTAQIMFQAYGDKQGPLHGMLINTPYVTKDLLQSKRFQAQSLGTTYIYDIPEMFRQSLIKLWESMSTQAFLPSPPLPSDMLTYTELVLDDQGQLVHMNRLPGGNEIGMVAWKMTFKSPEYPEGRDIIVIGNDITYRIGSFGPQEDLLFLRASELARAEGIPRIYVSANSGARIGLAEEIRHMFHVAWVDPEDPYKGYRYLYLTPQDYKRVSALNSVHCEHVEDEGESRYKITDIIGKEEGIGPENLRGSGMIAGESSLAYNEIITISLVTCRAIGIGAYLVRLGQRTIQVENSHLILTGAGALNKVLGREVYTSNNQLGGIQIMHNNGVTHCTVCDDFEGVFTVLHWLSYMPKSVHSSVPLLNSKDPIDRIIEFVPTKTPYDPRWMLAGRPHPTQKGQWLSGFFDYGSFSEIMQPWAQTVVVGRARLGGIPVGVVAVETRTVELSIPADPANLDSEAKIIQQAGQVWFPDSAFKTYQAIKDFNREGLPLMVFANWRGFSGGMKDMYDQVLKFGAYIVDGLRECCQPVLVYIPPQAELRGGSWVVIDSSINPRHMEMYADRESRGSVLEPEGTVEIKFRRKDLVKTMRRVDPVYIHLAERLGTPELSTAERKELENKLKEREEFLIPIYHQVAVQFADLHDTPGRMQEKGVISDILDWKTSRTFFYWRLRRLLLEDLVKKKIHNANPELTDGQIQAMLRRWFVEVEGTVKAYVWDNNKDLAEWLEKQLTEEDGVHSVIEENIKCISRDYVLKQIRSLVQANPEVAMDSIIHMTQHISPTQRAEVIRILSTMDSPST

SEQ ID NO: 738334 - protein, 2346 aa, Homo sapiens; identical to SEQ ID NO: 738332

SEQ ID NO: 738335 - protein, 2346 aa, Homo sapiens; identical to SEQ ID NO: 738332

SEQ ID NO: 738336 - protein, 1156 aa, Homo sapiens
MNVIELPFRMSFSSNLNHYGMTHVASVSDVLLDNSFTPPCQRMGGMVSFRTFEDFVRIFDEVMGCFSDSPPQSPTFPEAGHTSLYDEDKVPRDEPIHILNVAIKTDCDIEDDRLAAMFREFTQQNKATLVDHGIRRLTFLVAQKDFRKQVNYEVDRRFHREFPKFFTFRARDKFEEDRIYRHLEPALAFQLELNRMRNFDLTAIPCANHKMHLYLGAAKVEVGTEVTDYRFFVRAIIRHSDLVTKEASFEYLQNEGERLLLEAMDELEVAFNNTNVRTDCNHIFLNFVPTVIMDPSKIEESVRSMVMRYGSRLWKLRVLQAELKINIRLTPTGKAIPIRLFLTNESGYYLDISLYKEVTDSRTAQIMFQAYGDKQGPLHGMLINTPYVTKDLLQSKRFQAQSLGTTYIYDIPEMFRQSLIKLWESMSTQAFLPSPPLPSDMLTYTELVLDDQGQLVHMNRLPGGNEIGMVAWKMTFKSPEYPEGRDIIVIGNDITYRIGSFGPQEDLLFLRASELARAEGIPRIYVSANSGARIGLAEEIRHMFHVAWVDPEDPYKGYRYLYLTPQDYKRVSALNSVHCEHVEDEGESRYKITDIIGKEEGIGPENLRGSGMIAGESSLAYNEIITISLVTCRAIGIGAYLVRLGQRTIQVENSHLILTGAGALNKVLGREVYTSNNQLGGIQIMHNNGVTHCTVCDDFEGVFTVLHWLSYMPKSVHSSVPLLNSKDPIDRIIEFVPTKTPYDPRWMLAGRPHPTQKGQWLSGFFDYGSFSEIMQPWAQTVVVGRARLGGIPVGVVAVETRTVELSIPADPANLDSEAKIIQQAGQVWFPDSAFKTYQAIKDFNREGLPLMVFANWRGFSGGMKDMYDQVLKFGAYIVDGLRECCQPVLVYIPPQAELRGGSWVVIDSSINPRHMEMYADRESRGSVLEPEGTVEIKFRRKDLVKTMRRVDPVYIHLAERLGTPELSTAERKELENKLKEREEFLIPIYHQVAVQFADLHDTPGRMQEKGVISDILDWKTSRTFFYWRLRRLLLEDLVKKKIHNANPELTDGQIQAMLRRWFVEVEGTVKAYVWDNNKDLAEWLEKQLTEEDGVHSVIEENIKCISRDYVLKQIRSLVQANPEVAMDSIIHMTQHISPTQRAEVIRILSTMDSPST

SEQ ID NO: 738337 - protein, 472 aa, Homo sapiens [sequence omitted]

SEQ ID NO: 738338 - protein, 353 aa, Homo sapiens
MSTPPADPANLDSEAKIIQQAGQVWFPDSAFKTYQAIKDFNREGLPLMVFANWRGFSGGMKDMYDQVLKFGAYIVDGLRECCQPVLVYIPPQAELRGGSWVVIDSSINPRHMEMYADRESRGSVLEPEGTVEIKFRRKDLVKTMRRVDPVYIHLAERLGTPELSTAERKELENKLKEREEFLIPIYHQVAVQFADLHDTPGRMQEKGVISDILDWKTSRTFFYWRLRRLLLEDLVKKKIHNANPELTDGQIQAMLRRWFVEVEGTVKAYVWDNNKDLAEWLEKQLTEEDGVHSVIEENIKCISRDYVLKQIRSLVQANPEVAMDSIIHMTQHISPTQRAEVIRILSTMDSPST

SEQ ID NO: 738339 - protein, 1784 aa, Homo sapiens
MDEPSPLAQPLELNQHSRFIIGSVSEDNSEDEISNLVKLDLLEEKEGSLSPASVGSDTLSDLGISSLQDGLALHIRSSMSGLHLVKQGRDRKKIDSQRDFTVASPAEFVTRFGGNKVIEKVLIANNGIAAVKCMRSIRRWSYEMFRNERAIRFVVMVTPEDLKANAEYIKMADHYVPVPGGPNNNNYANVELILDIAKRIPVQAVWAGWGHASENPKLPELLLKNGIAFMGPPSQAMWALGDKIASSIVAQTAGIPTLPWSGSGLRVDWQENDFSKRILNVPQELYEKGYVKDVDDGLQAAEEVGYPVMIKASEGGGGKGIRKVNNADDFPNLFRQVQAEVPGSPIFVMRLAKQSRHLEVQILADQYGNAISLFGRDCSVQRRHQKIIEEAPATIATPAVFEHMEQCAVKLAKMVGYVSAGTVEYLYSQDGSFYFLELNPRLQVEHPCTEMVADVNLPAAQLQIAMGIPLYRIKDIRMMYGVSPWGDSPIDFEDSAHVPCPRGHVIAARITSENPDEGFKPSSGTVQELNFRSNKNVWGYFSVAAAGGLHEFADSQFGHCFSWGENREEAISNMVVALKELSIRGDFRTTVEYLIKLLETESFQMNRIDTGWLDRLIAEKVQAERPDTMLGVVCGALHVADVSLRNSVSNFLHSLERGQVLPAHTLLNTVDVELIYEGVKYVLKVTRQSPNSYVVIMNGSCVEVDVHRLSDGGLLLSYDGSSYTTYMKEEVDRYRITIGNKTCVFEKENDPSVMRSPSAGKLIQYIVEDGGHVFAGQCYAEIEVMKMVMTLTAVESGCIHYVKRPGAALDPGCVLAKMQLDNPSKVQQAELHTGSLPRIQSTALRGEKLHRVFHYVLDNLVNVMNGYCLPDPFFSSKVKDWVERLMKTLRDPSLPLLELQDIMTSVSGRIPPNVEKSIKKEMAQYASNITSVLCQFPSQQIANILDSHAATLNRKSEREVFFMNTQSIVQLVQRYRSGIRGHMKAVVMDLLRQYLRVETQFQNGHYDKCVFALREENKSDMNTVLNYIFSHAQVTKKNLLVTMLIDQLCGRDPTLTDELLNILTELTQLSKTTNAKVALRARQVLIASHLPSYELRHNQVESIFLSAIDMYGHQFCIENLQKLILSETSIFDVLPNFFYHSNQVVRMAALEVYVRRAYIAYELNSVQHRQLKDNTCVVEFQFMLPTSHPNRGNIPTLNRMSFSSNLNHYGMTHVASVSDVLLDNSFTPPCQRMGGMVSFRTFEDFVRIFDEVMGCFSDSPPQSPTFPEAGHTSLYDEDKVPRDEPIHILNVAIKTDCDIEDDRLAAMFREFTQQNKATLVDHGIRRLTFLVAQKDFRKQVNYEVDRRFHREFPKFFTFRARDKFEEDRIYRHLEPALAFQLELNRMRNFDLTAIPCANHKMHLYLGAAKVEVGTEVTDYRFFVRAIIRHSDLVTKEASFEYLQNEGERLLLEAMDELEVAFNNTNVRTDCNHIFLNFVPTVIMDPSKIEESVRSMVMRYGSRLWKLRVLQAELKINIRLTPTGKAIPIRLFLTNESGYYLDISLYKEVTDSRTAQIMFQAYGDKQGPLHGMLINTPYVTKDLLQSKRFQAQSLGTTYIYDIPEMFRQSLIKLWESMSTQAFLPSPPLPSDMLTYTELVLDDQGQLVHMNRLPGGNEIGMVAWKMTFKSPEYPEGRDIIVIGNDITYRIGSFGPQEDLLFLRASELARAEGIPRIYVSANSGARIGLAEEIRHMFHVAWVDPEDPYKGYRYLYLTPQDYKRVSALNSVHCEHVEDEGESRMPTLS

SEQ ID NO: 738340 - protein, 174 aa, Homo sapiens [sequence omitted]

SEQ ID NO: 738341 - protein, 174 aa, Homo sapiens [sequence omitted]

SEQ ID NO: 738342 - protein, 174 aa, Homo sapiens [sequence omitted]

SEQ ID NO: 738343 - protein, 174 aa, Homo sapiens [sequence omitted]

SEQ ID NO: 738344 - protein, 2342 aa, Homo sapiens
MDEPSPLAQPLELNQHSRFIIGSVSEDNSEDEISNLVKLDLLEEKEGSLSPASVGSDTLSDLGISSLQDGLALHIRSSMSGLHLVKQGRDRKKIDSQRDFTVASPAEFVTRFGGNKVIEKVLIANNGIAAVKCMRSIRRWSYEMFRNERAIRFVVMVTPEDLKANAEYIKMADHYVPVPGGPNNNNYANVELILDIAKRIPVQAVWAGWGHASENPKLPELLLKNGIAFMGPPSQAMWALGDKIASSIVAQTAGIPTLPWSGSGLRVDWQENDFSKRILNVPQELYEKGYVKDVDDGLQAAEEVGYPVMIKASEGGGGKGIRKVNNADDFPNLFRQVQAEVPGSPIFVMRLAKQSRHLEVQILADQYGNAISLFGRDCSVQRRHQKIIEEAPATIATPAVFEHMEQCAVKLAKMVGYVSAGTVEYLYSQDGSFYFLELNPRLQVEHPCTEMVADVNLPAAQLQIAMGIPLYRIKDIRMMYGVSPWGDSPIDFEDSAHVPCPRGHVIAARITSENPDEGFKPSSGTVQELNFRSNKNVWGYFSVAAAGGLHEFADSQFGHCFSWGENREEAISNMVVALKELSIRGDFRTTVEYLIKLLETESFQMNRIDTGWLDRLIAEKVQAERPDTMLGVVCGALHVADVSLRNSVSNFLHSLERGQVLPAHTLLNTVDVELIYEGVKYVLKVTRQSPNSYVVIMNGSCVEVDVHRLSDGGLLLSYDGSSYTTYMKEEVDRYRITIGNKTCVFEKENDPSVMRSPSAGKLIQYIVEDGGHVFAGQCYAEIEVMKMVMTLTAVESGCIHYVKRPGAALDPGCVLAKMQLDNPSKVQQAELHTGSLPRIQSTALRGEKLHRVFHYVLDNLVNVMNGYCLPDPFFSSKVKDWVERLMKTLRDPSLPLLELQDIMTSVSGRIPPNVEKSIKKEMAQYASNITSVLCQFPSQQIANILDSHAATLNRKSEREVFFMNTQSIVQLVQRYRSGIRGHMKAVVMDLLRQYLRVETQFQNGHYDKCVFALREENKSDMNTVLNYIFSHAQVTKKNLLVTMLIDQLCGRDPTLTDELLNILTELTQLSKTTNAKVALRARQVLIASHLPSYELRHNQVESIFLSAIDMYGHQFCIENLQKLILSETSIFDVLPNFFYHSNQVVRMAALEVYVRRAYIAYELNSVQHRQLKDNTCVVEFQFMLPTSHPNRGNIPTLNRMSFSSNLNHYGMTHVASVSDVLLDNSFTPPCQRMGGMVSFRTFEDFVRIFDEVMGCFSDSPPQSPTFPEAGHTSLYDEDKVPRDEPIHILNVAIKTDCDIEDDRLAAMFREFTQQNKATLVDHGIRRLTFLVAQKDFRKQVNYEVDRRFHREFPKFFTFRARDKFEEDRIYRHLEPALAFQLELNRMRNFDLTAIPCANHKMHLYLGAAKVEVGTEVTDYRFFVRAIIRHSDLVTKEASFEYLQNEGERLLLEAMDELEVAFNNTNVRTDCNHIFLNFVPTVIMDPSKVHFSVSYMVMRYGSRLWKLRVLQAELKINIRLTPTGKAIPIRLFLTNESGYYLDISLYKEVTDSRQHRSGNIMFHSFGNKQGPQHGMLINTPYVTKDLLQAKRFQAQTLGTTYIYDFPEMFRQALFKLWGSPDKYPKDILTYTELVLDSQGQLVEMNRLPGGNEVGMVAFKMRFKTQEYPEGRDVIVIGNDITFRIGSFGPGEDLLYLRASEMARAEAIPKIYVAANSGARIGMAEEIKHMFHVAWVDPEDPHKGFKYLYLTPQDYTRISSLNSVHCKHIEEGGESRYMITDIIGKDDGLGVENLRGSGMIAGESSLAYEEIVTISLVTCRAIGIGAYLVRLGQRVIQVENSHIILTGASALNKVLGREVYTSNNQLGGVQIMHYNGVSHITVPDDFEGVYTILEWLSYMPKDNHSPVPIITPTDPIDREIEFLPSRAPYDPRWMLAGRPHPTLKGTWQSGFFDHGSFKEIMAPWAQTVVTGRARLGGIPVGVIAVETRTVEVAVPADPANLDSEAKIIQQAGQVWFPDSAFKTYQAIKDFNREGLPLMVFANWRGFSGGMKDMYDQVLKFGAYIVDGLRECCQPVLVYIPPQAELRGGSWVVIDSSINPRHMEMYADRESRGGVLEPEGTVEIKFRKEDLIKSMRRIDPAYKKLMEQLGEPDLSDKDRKDLEGRLKAREDLLLPIYHQVAVQFADFHDTPGRMLEKGVISDILEWKTARTFLYWRLRRLLLEDQVKQEILQASGELSHVHIQSMLRRWFVETEGAVKAYLWDNNQVVVQWLEQHWQAGDGPRSTIRENITYLKHDSVLKTIRGLVEENPEVAVDCVIYLSQHISPAERAQVVHLLSTMDSPAST

SEQ ID NO: 738345 - protein, 733 aa, Homo sapiens
MDEPSPLAQPLELNQHSRFIIGSVSEDNSEDEISNLVKLDLLEEKEGSLSPASVGSDTLSDLGISSLQDGLALHIRSSMSGLHLVKQGRDRKKIDSQRDFTVASPAEFVTRFGGNKVIEKVLIANNGIAAVKCMRSIRRWSYEMFRNERAIRFVVMVTPEDLKANAEYIKMADHYVPVPGGPNNNNYANVELILDIAKRIPVQAVWAGWGHASENPKLPELLLKNGIAFMGPPSQAMWALGDKIASSIVAQTAGIPTLPWSGSGLRVDWQENDFSKRILNVPQELYEKGYVKDVDDGLQAAEEVGYPVMIKASEGGGGKGIRKVNNADDFPNLFRQVQAEVPGSPIFVMRLAKQSRHLEVQILADQYGNAISLFGRDCSVQRRHQKIIEEAPATIATPAVFEHMEQCAVKLAKMVGYVSAGTVEYLYSQDGSFYFLELNPRLQVEHPCTEMVADVNLPAAQLQIAMGIPLYRIKDIRMMYGVSPWGDSPIDFEDSAHVPCPRGHVIAARITSENPDEGFKPSSGTVQELNFRSNKNVWGYFSVAAAGGLHEFADSQFGHCFSWGENREEAISNMVVALKELSIRGDFRTTVEYLIKLLETESFQMNRIDTGWLDRLIAEKVQAERPDTMLGVVCGALHVADVSLRNSVSNFLHSLERGQVLPAHTLLNTVDVELIYEGVKYVLKVTRQSPNSYVVIMNGSCVEVDVHRLSDGGLLLSYDGSSYTTYMKEEVDR

SEQ ID NO: 738346 - protein, 85 aa, Homo sapiens
NLTLLQSFLLVPFPYCYFPSPCSYPPCLMNVIELPFRMSFSSNLNHYGMTHVASVSDVLLDNSFTPPCQRMGGMVSFRTFEDFVR

SEQ ID NO: 738347 - protein, 507 aa, Homo sapiens
MEKWYLMTVVVLIGLTVRWTVSLNSYSGAGKPPMFGDYEAQRHWQEITFNLPVKQWYFNSSDNNLQYWGLDYPPLTAYHSLLCAYVAKFINPDWIALHTSRGYESQAHKLFMRTTVLIADLLIYIPAVVLYCCCLKEISTKKKIANALCILLYPGLILIDYGHFQYNSVSLGFALWGVLGISCDCDLLGSLAFCLAINYKQMELYHALPFFCFLLGKCFKKGLKGKGFVLLVKLACIVVASFVLCWLPFFTEREQTLQVLRRLFPVDRGLFEDKVANIWCSFNVFLKIKDILPRHIQLIMSFCFTFLSLLPACIKLILQPSSKGFKFTLVSCALSFFLFSFQVHEKSILLVSLPVCLVLSEIPFMSTWFLLVSTFSMLPLLLKDELLMPSVVTTMAFFIACVTSFSIFEKTSEEELQLKSFSISVRKYLPCFTFLSRIIQYLFLISVITMVLLTLMTVTLDPPQKLPDLFSVLVCFVSCLNFLFFLVYFNIIIMWDSKSGRNQKKIS

SEQ ID NO: 738348 - protein, 507 aa, Homo sapiens; identical to SEQ ID NO: 738347

SEQ ID NO: 738349 - protein, 507 aa, Homo sapiens; identical to SEQ ID NO: 738347

SEQ ID NO: 738350 - protein, 507 aa, Homo sapiens; identical to SEQ ID NO: 738347

SEQ ID NO: 738351 - protein, 474 aa, Homo sapiens
MFGDYEAQRHWQEITFNLPVKQWYFNSSDNNLQYWGLDYPPLTAYHSLLCAYVAKFINPDWIALHTSRGYESQAHKLFMRTTVLIADLLIYIPAVVLYCCCLKEISTKKKIANALCILLYPGLILIDYGHFQYNSVSLGFALWGVLGISCDCDLLGSLAFCLAINYKQMELYHALPFFCFLLGKCFKKGLKGKGFVLLVKLACIVVASFVLCWLPFFTEREQTLQVLRRLFPVDRGLFEDKVANIWCSFNVFLKIKDILPRHIQLIMSFCFTFLSLLPACIKLILQPSSKGFKFTLVSCALSFFLFSFQVHEKSILLVSLPVCLVLSEIPFMSTWFLLVSTFSMLPLLLKDELLMPSVVTTMAFFIACVTSFSIFEKTSEEELQLKSFSISVRKYLPCFTFLSRIIQYLFLISVITMVLLTLMTVTLDPPQKLPDLFSVLVCFVSCLNFLFFLVYFNIIIMWDSKSGRNQKKIS

SEQ ID NO: 738352 - protein, 443 aa, Homo sapiens
MEKWYLMTVVVLIGLTVRWTVSLNSYSGAGKPPMFGDYEAQRHWQEITFNLPVKQWYFNSSDNNLQYWGLDYPPLTAYHSLLCAYVAKFINPDWIALHTSRGYESQAHKLFMRTTVLIADLLIYIPAVVLYCCCLKEISTKKKIANALCILLYPGLILIDYGHFQYNSVSLGFALWGVLGISCDCDLLGSLAFCLAINYKQMELYHALPFFCFLLGKCFKKGLKGKGFVLLVKLACIVVASFVLCWLPFFTEREQTLQVLRRLFPVDRGLFEDKVANIWCSFNVFLKIKDILPRHIQLIMSFCFTFLSLLPACIKLILQPSSKGFKFTLVSCALSFFLFSFQVHEKSILLVSLPVCLVLSEIPFMSTWFLLVSTFSMLPLLLKDELLMPSVVTTMAFFIACVTSFSIFEKTSEEELQLKSFSISVRKYLPCFTFLSRIIQYLF

SEQ ID NO: 738353 - protein, 104 aa, Homo sapiens
YLLFHSETTSLDGLIRQWKDNLKFLQRAVEMQEPSPTHFMMPENLDTKTWQKLYEKGTVFHSPQHQCKNPKQNTSKLNYAHTHATHTHTHTHTHTNPSVFLCMW

SEQ ID NO: 738354 - protein, 116 aa, Homo sapiens
SHPNLYTTLLCGRFHMALRTSSTLLKGVPDPDKTKNQCQPLGKWRPRQEVRRFLRSAFWVEEQGLKPRSSGTEVWLPRKYGSPPEVTCAPGCGPAPPTTPFVTPGTSLTPGASGWR

SEQ ID NO: 738355 - protein, 79 aa, Homo sapiens
NLLPDSLLSPRMAVWELEAAVLPVFLGHLVADFKHLILDVYLTILFRHLGILALRNILRILLIRNPKCSLREEKYIRRE

SEQ ID NO: 738356 - protein, 75 aa, Homo sapiens
GGGGGGGDGREGSVGGRRSLRQKEALGPRPDRDLARRDRPRARDPTPTHSSIYPLPAPPPPTLSRAAEDDKHPGQ

SEQ ID NO: 738357 - protein, 75 aa, Homo sapiens; identical to SEQ ID NO: 738356

SEQ ID NO: 738358 - protein, 69 aa, Homo sapiens
IYGLGSEAWVLRSLRQKEALGPRPDRDLARRDRPRARDPTPTHSSIYPLPAPPPPTLSRAAEDDKHPGQ

SEQ ID NO: 738359 - protein, 75 aa, Homo sapiens; identical to SEQ ID NO: 738356

SEQ ID NO: 738360 - protein, 75 aa, Homo sapiens; identical to SEQ ID NO: 738356

SEQ ID NO: 738361 - protein, 75 aa, Homo sapiens; identical to SEQ ID NO: 738356

SEQ ID NO: 738362 - protein, 205 aa, Homo sapiens
GGGGGGGDGREGSVGGRRSLRQKEALGPRPDRDLARRDRPRARDPTPTHSSIYPLPAPPPPTLSRAAEDDKHPGQDEKLTVTQDLPVNDGKPHIVHFQYEVTEVKVSSWDAVLSSQSLFVEIPDGLLADGSKEGLLALLEFAEEKMKVNYVFICFRKGREDRAPLLKTFSFLGFEIVRPGHPCVPSRPDVMFMVYPLDQNLSDED

SEQ ID NO: 738363 - protein, 75 aa, Homo sapiens; identical to SEQ ID NO: 738356

SEQ ID NO: 738364 - protein, 87 aa, Homo sapiens
GGGGGGGGGREGSVGGRRSLRQKEALGPRPDRDLARRDRPRARDPTPTHSSIYPLPAPPPPTLSRAAEDDKHPGQSLVLFWHLVKLA

SEQ ID NO: 738365 - protein, 205 aa, Homo sapiens; identical to SEQ ID NO: 738362

SEQ ID NO: 738366 - protein, 78 aa, Homo sapiens
GGGGGGGDGREGSVGGRRSLRQKEALGPRPDRDLARRDRPRARDPTPTHSSIYPLPAPPPPTLSRAAEDDKHPGQGLG

SEQ ID NO: 738367 - protein, 75 aa, Homo sapiens; identical to SEQ ID NO: 738356

SEQ ID NO: 738368 - protein, 117 aa, Homo sapiens
GESSNSIKNQELPLRTTWDFWRKMYLREPQNYQSRCQQIDVKNKLCKCDHCVRQRIAHQHDDHGVHKREKAFSHNNCGKDCVKESSQHSIIQSGEQTSDENGKGLSVGSNLELHQQL

SEQ ID NO: 738369 - protein, 493 aa, Homo sapiens
TSHSQFHRSILGPTAALSSESRASAEQSGRRTPGAGADGTRGMNLEGGGRGGEFGMSAVSCGNGKLRQWLIDQIDSGKYPGLVWENEEKSIFRIPWKHAGKQDYNREEDAALFKAWALFKGKFREGIDKPDPPTWKTRLRCALNKSNDFEELVERSQLDISDPYKVYRIVPEGAKKGAKQLTLEDPQMSMSHPYTMTTPYPSLPAQQVHNYMMPPLDRSWRDYVPDQPHPEIPYQCPMTFGPRGHHWQGPACENGCQVTGTFYACAPPESQAPGVPTEPSIRSAEALAFSDCRLHICLYYREILVKELTTSSPEGCRISHGHTYDASNLDQVLFPYPEDNGQRKNIEKLLSHLERGVVLWMAPDGLYAKRLCQSRIYWDGPLALCNDRPNKLERDQTCKLFDTQQFLSELQAFAHHGRSLPRFQVTLCFGEEFPDPQRQRKLITAHVEPLLARQLYYFAQQNSGHFLRGYDLPEHISNPEDYHRSIRHSSIQE

SEQ ID NO: 738370 - protein, 452 aa, Homo sapiens
TSHSQFHRSILGPTAALSSESRASAEQSGRRTPGAGADGTRGMNLEGGGRGGEFGMSAVSCGNGKLRQWLIDQIDSGKYPGLVWENEEKSIFRIPWKHAGKQDYNREEDAALFKAWALFKGKFREGIDKPDPPTWKTRLRCALNKSNDFEELVERSQLDISDPYKVYRIVPEGAKKGAKQLTLEDPQMSMSHPYTMTTPYPSLPAQQVHNYMMPPLDRSWRDYVPDQPHPEIPYQCPMTFGPRGHHWQGPACENGCQVTGTFYACAPPESQAPGVPTEPSIRSAEALAFSDCRLHICLYYREILVKELTTSSPEGCRISHGHTYDASNLDQVLFPYPEDNGQRKNIEKLLSHLERGVVLWMAPDGLYAKRLCQSRIYWDGPLALCNDRPNKLERDQTCKLFDTQQFLSELQAFAHHGRSLPRFQVTLCFGEEFPDPQRQRKLITAHVLRSLA

SEQ ID NO: 738371 - protein, 177 aa, Homo sapiens
LALSVSPLDLGTHRCPQLRVQGEAWALFKGKFREGIDKPDPPTWKTRLRCALNKSNDFEELVERSQLDISDPYKVYRIVPEGAKKGAKQLTLEDPQMSMSHPYTMTTPYPSLPAQQVHNYMMPPLDRSWRDYVPDQPHPEIPYQCPMTFGPRGHHWQGPACENGKEDTSAGNRRANC

SEQ ID NO: 738372 - protein, 420 aa, Homo sapiens
TSHSQFHRSILGPTAALSSESRASAEQSGRRTPGAGADGTRGMNLEGGGRGGEFGMSAVSCGNGKLRQWLIDQIDSGKYPGLVWENEEKSIFRIPWKHAGKQDYNREEDAALFKAWALFKGKFREGIDKPDPPTWKTRLRCALNKSNDFEELVERSQLDISDPYKVYRIVPEGAKKGAKQLTLEDPQMSMSHPYTMTTPYPSLPAQQVHNYMMPPLDRSWRDYVPDQPHPEIPYQCPMTFGPRGHHWQGPACENGCQVTGTFYACAPPESQAPGVPTEPSIRSAEALAFSDCRLHICLYYREILVKELTTSSPEGCRISHGHTYDASNLDQVLFPYPEDNGQRKNIEKLLSHLERGVVLWMAPDGLYAKRLCQSRIYWDGPLALCNDRPNKLERDQTCKLFDTQQFLSGKAPRYLLEWRW

SEQ ID NO: 738373 - protein, 75 aa, Homo sapiens
IHALNTTEGRSFMHINNANFSKDSGITYLGIKANEVQEFNLSTYFERATDFTDQALAQNGQVLVQCWEGYSHLQL

SEQ ID NO: 738374 - protein, 76 aa, Homo sapiens
VLKQQNLPPQPRGILPGTPEEMRASLAELGEVQGPHLDLPSSPEGAEQNWCSGAHGLRSLKQLLLQPCGTELIQQA

SEQ ID NO: 738375 - protein, 275 aa, Homo sapiens
MPLLWITGPRYHLILLSEASCLRANYVHLCPLFQHRWLETCNAPPQLIQGKARSAPKPSQASGHFSVELVRGYAGFGLTLGGGRDVAGDTPLAVRGLLKDGPAQRCGRLEVGDLVLHINGESTQGLTHAQAVERIRAGGPQLHLVIRRPLETHPGKPRGVGEPRKGVVPSWPDRSPDPGGPEVTGSRSSSTSLVQHPPSRTTLKKTRGSPEPSPEAAADGPTVSPPERRAEDPNDQIPGSPGPWLVPSEERLSRALGVRGAAQLAQEMAAGRRRH

SEQ ID NO: 738376 - protein, 275 aa, Homo sapiens; identical to SEQ ID NO: 738375

SEQ ID NO: 738377 - protein, 280 aa, Homo sapiens
AWGVSSYCPVLAVSVLDSADIEVTDSRLPHATIVDHRPQHRWLETCNAPPQLIQGKARSAPKPSQASGHFSVELVRGYAGFGLTLGGGRDVAGDTPLAVRGLLKDGPAQRCGRLEVGDLVLHINGESTQGLTHAQAVERIRAGGPQLHLVIRRPLETHPGKPRGVGEPRKGVVPSWPDRSPDPGGPEVTGSRSSSTSLVQHPPSRTTLKKTRGSPEPSPEAAADGPTVSPPERRAEDPNDQIPGSPGPWLVPSEERLSRALGVRGAAQLAQEMAAGRRRH

SEQ ID NO: 738378 - protein, 275 aa, Homo sapiens; identical to SEQ ID NO: 738375

SEQ ID NO: 738379 - protein, 326 aa, Homo sapiens
RLQQSEAKHSSWLLQPGLLAGLPGRGPSPLAGPSARQLLARLDARPLAARAAVDVAALVRRAGATLRLRRKEAVSVLDSADIEVTDSRLPHATIVDHRPQGKARSAPKPSQASGHFSVELVRGYAGFGLTLGGGRDVAGDTPLAVRGLLKDGPAQRCGRLEVGDLVLHINGESTQGLTHAQAVERIRAGGPQLHLVIRRPLETHPGKPRGVGEPRKGVVPSWPDRSPDPGGPEVTGSRSSSTSLVQHPPSRTTLKKTRGSPEPSPEAAADGPTVSPPERRAEDPNDQIPGSPGPWLVPSEERLSRALGVRGAAQLAQEMAAGRRRH

SEQ ID NO: 738380 - protein, 206 aa, Homo sapiens
MSPNSPLHCFYLPAVSVLDSADIEVTDSRLPHATIVDHRPQVGDLVLHINGESTQGLTHAQAVERIRAGGPQLHLVIRRPLETHPGKPRGVGEPRKGVVPSWPDRSPDPGGPEVTGSRSSSTSLVQHPPSRTTLKKTRGSPEPSPEAAADGPTVSPPERRAEDPNDQIPGSPGPWLVPSEERLSRALGVRGAAQLAQEMAAGRRRH

SEQ ID NO: 738381 - protein, 117 aa, Homo sapiens [sequence omitted]

SEQ ID NO: 738382 - protein, 263 aa, Homo sapiens
GRLLAMEPRTGGAANPKGSRGSRGPSPLAGPSARQLLARLDARPLAARAAVDVAALVRRAGATLRLRRKEAVSVLDSADIEVTDSRLPHATIVDHRPQVGDLVLHINGESTQGLTHAQAVERIRAGGPQLHLVIRRPLETHPGKPRGVGEPRKGVVPSWPDRSPDPGGPEVTGSRSSSTSLVQHPPSRTTLKKTRGSPEPSPEAAADGPTVSPPERRAEDPNDQIPGSPGPWLVPSEERLSRALGVRGAAQLAQEMAAGRRRH

SEQ ID NO: 738383 - protein, 533 aa, Homo sapiens
MDLIPNLAVETWLLLAVSLILLYLYGTRTHGLFKKLGIPGPTPLPFLGNALSFRKGYWTFDMECYKKYRKVWGIYDCQQPMLAITDPDMIKTVLVKECYSVFTNRRPFGPVGFMKNAISIAEDEEWKRIRSLLSPTFTSGKLKEMVPIIAQYGDVLVRNLRREAETGKPVTLKHVFGAYSMDVITSTSFGVSIDSLNNPQDPFVENTKKLLRFNPLDPFVLSIKVFPFLTPILEALNITVFPRKVISFLTKSVKQIKEGRLKETQKHRVDFLQLMIDSQNSKDSETHKALSDLELMAQSIIFIFAGYETTSSVLSFIIYELATHPDVQQKVQKEIDTVLPNKAPPTYDTVLQLEYLDMVVNETLRLFPVAMRLERVCKKDVEINGMFIPKGVVVMIPSYVLHHDPKYWTEPEKFLPERFSKKNKDNIDPYIYTPFGSGPRNCIGMRFALVNMKLALVRVLQNFSFKPCKETQIPLKLRFGGLLLTEKPIVLKAESRDETFVDMEPIHMDFLRSLAFQGPHLCFFWELLCPTIR

SEQ ID NO: 738384 - protein, 503 aa, Homo sapiens
MDLIPNLAVETWLLLAVSLILLYLYGTRTHGLFKKLGIPGPTPLPFLGNALSFRKGYWTFDMECYKKYRKVWGIYDCQQPMLAITDPDMIKTVLVKECYSVFTNRRPFGPVGFMKNAISIAEDEEWKRIRSLLSPTFTSGKLKEMVPIIAQYGDVLVRNLRREAETGKPVTLKHVFGAYSMDVITSTSFGVSIDSLNNPQDPFVENTKKLLRFNPLDPFVLSIKVFPFLTPILEALNITVFPRKVISFLTKSVKQIKEGRLKETQKHRVDFLQLMIDSQNSKDSETHKALSDLELMAQSIIFIFAGYETTSSVLSFIIYELATHPDVQQKVQKEIDTVLPNKAPPTYDTVLQLEYLDMVVNETLRLFPVAMRLERVCKKDVEINGMFIPKGVVVMIPSYVLHHDPKYWTEPEKFLPERFSKKNKDNIDPYIYTPFGSGPRNCIGMRFALVNMKLALVRVLQNFSFKPCKETQIPLKLRFGGLLLTEKPIVLKAESRDETVSGA

SEQ ID NO: 738385 - protein, 485 aa, Homo sapiens
MDLIPNLAVETWLLLAVSLILLYLYGTRTHGLFKKLGIPGPTPLPFLGNALSFRKGYWTFDMECYKKYRKVWGIYDCQQPMLAITDPDMIKTVLVKECYSVFTNRRPFGPVGFMKNAISIAEDEEWKRIRSLLSPTFTSGKLKEMVPIIAQYGDVLVRNLRREAETGKPVTLKHVFGAYSMDVITSTSFGVSIDSLNNPQDPFVENTKKLLRFNPLDPFVLSIKVFPFLTPILEALNITVFPRKVISFLTKSVKQIKEGRLKETQKHRVDFLQLMIDSQNSIIFIFAGYETTSSVLSFIIYELATHPDVQQKVQKEIDTVLPNKAPPTYDTVLQLEYLDMVVNETLRLFPVAMRLERVCKKDVEINGMFIPKGVVVMIPSYVLHHDPKYWTEPEKFLPERFSKKNKDNIDPYIYTPFGSGPRNCIGMRFALVNMKLALVRVLQNFSFKPCKETQIPLKLRFGGLLLTEKPIVLKAESRDETVSGA

SEQ ID NO: 738386 - protein, 442 aa, Homo sapiens
MECYKKYRKVWGIYDCQQPMLAITDPDMIKTVLVKECYSVFTNRRPFGPVGFMKNAISIAEDEEWKRIRSLLSPTFTSGKLKEMVPIIAQYGDVLVRNLRREAETGKPVTLKHVFGAYSMDVITSTSFGVSIDSLNNPQDPFVENTKKLLRFNPLDPFVLSIKVFPFLTPILEALNITVFPRKVISFLTKSVKQIKEGRLKETQKHRVDFLQLMIDSQNSKDSETHKALSDLELMAQSIIFIFAGYETTSSVLSFIIYELATHPDVQQKVQKEIDTVLPNKAPPTYDTVLQLEYLDMVVNETLRLFPVAMRLERVCKKDVEINGMFIPKGVVVMIPSYVLHHDPKYWTEPEKFLPERFSKKNKDNIDPYIYTPFGSGPRNCIGMRFALVNMKLALVRVLQNFSFKPCKETQIPLKLRFGGLLLTEKPIVLKAESRDETVSGA

SEQ ID NO: 738387 - protein, 229 aa, Homo sapiens
MIDSQNSKDSETHKALSDLELMAQSIIFIFAGYETTSSVLSFIIYELATHPDVQQKVQKEIDTVLPNKAPPTYDTVLQLEYLDMVVNETLRLFPVAMRLERVCKKDVEINGMFIPKGVVVMIPSYVLHHDPKYWTEPEKFLPERFSKKNKDNIDPYIYTPFGSGPRNCIGMRFALVNMKLALVRVLQNFSFKPCKETQIPLKLRFGGLLLTEKPIVLKAESRDETVSGA

SEQ ID NO: 738388 - protein, 267 aa, Homo sapiens
MDLIPNLAVETWLLLAVSLILLYLYGTRTHGLFKKLGIPGPTPLPFLGNALSFRKGYWTFDMECYKKYRKVWGIYDCQQPMLAITDPDMIKTVLVKECYSVFTNRRPFGPVGFMKNAISIAEDEEWKRIRSLLSPTFTSGKLKEMVPIIAQYGDVLVRNLRREAETGKPVTLKHVFGAYSMDVITSTSFGVSIDSLNNPQDPFVENTKKLLRFNPLDPFVLSIKVFPFLTPILEALNITVFPRKVISFLTKSVKQIKEGRLKETQKR

SEQ ID NO: 738389 - protein, 1460 aa, Homo sapiens
MPENPATDKLQVLQVLDRLKMKLQEKGDTSQNEKLSMFYETLKSPLFNQILTLQQSIKQLKGQLNHIPSDCSANFDFSRKGLLVFTDGSITNGNVHRPSNNSTVSGLFPWTPKLGNEDFNSVIQQMAQGRQIEYIDIERPSTGGLGFSVVALRSQNLGKVDIFVKDVQPGSVADRDQRLKENDQILAINHTPLDQNISHQQAIALLQQTTGSLRLIVAREPVHTKSSTSSSLNDTTLPETVCWGHVEEVELINDGSGLGFGIVGGKTSGVVVRTIVPGGLADRDGRLQTGDHILKIGGTNVQGMTSEQVAQVLRNCGNSVRMLVARDPAGDISVTPPAPAALPVALPTVASKGPGSDSSLFETYNVELVRKDGQSLGIRIVGYVGTSHTGEASGIYVKSIIPGSAAYHNGHIQVNDKIVAVDGVNIQGFANHDVVEVLRNAGQVVHLTLVRRKTSSSTSPLEPPSDRGTVVEPLKPPALFLTGAVETETNVDGEDEEIKERIDTLKNDNIQALEKLEKVPDSPENELKSRWENLLGPDYEVMVATLDTQIADDAELQKYSKLLPIHTLRLGVEVDSFDGHHYISSIVSGGPVDTLGLLQPEDELLEVNGMQLYGKSRREAVSFLKEVPPPFTLVCCRRLFDDEASVDEPRRTETSLPETEVDHNMDVNTEEDDDGELALWSPEVKIVELVKDCKGLGFSILDYQDPLDPTRSVIVIRSLVADGVAERSGGLLPGDRLVSVNEYCLDNTSLAEAVEILKAVPPGLVHLGICKPLVEDNEEESCYILHSSSNEDKTEFSGTIHDINSSLILEAPKGFRDEPYFKEELVDEPFLDLGKSFHSQQKEIEQSKEAWEMHEFLTPRLQEMDEEREMLVDEEYELYQDPSPSMELYPLSHIQEATPVPSVNELHFGTQWLHDNEPSESQEARTGRTVYSQEAQPYGYCPENVMKENFVMESLPSVPSTEGNSQQGRFDDLENLNSLAKTSLDLGMIPNDVQGPSLLIDLPVVAQRREQEDLPLYQHQATRVISKASAYTGMLSSRYATDTCELPEREEGEGEETPNFSHWGPPRIVEIFREPNVSLGISIVGGQTVIKRLKNGEELKGIFIKQVLEDSPAGKTNALKTGDKILEVSGVDLQNASHSEAVEAIKNAGNPVVFIVQSLSSTPRVIPNVHNKANKITGNQNQDTQEKKEKRQGTAPPPMKLPPPYKALTDDSDENEEEDAFTDQKIRQRYADLPGELHIIELEKDKNGLGLSLAGNKDRSRMSIFVVGINPEGPAAADGRMRIGDELLEINNQILYGRSHQNASAIIKTAPSKVKLVFIRNEDAVNQMAVTPFPVPSSSPSSIEDQSGTEPISSEEDGSLEVGIKQLPESESFKLAVSQMKQQKYPTKVSFSSQEIPLAPASSYHSTDADFTGYGGFQAPLSVDPATCPIVPGQEMIIEISKGRSGLGLSIVGGKDTPLG

SEQ ID NO: 738390 - protein, 1552 aa, Homo sapiens
MPENPATDKLQVLQVLDRLKMKLQEKGDTSQNEKLSMFYETLKSPLFNQILTLQQSIKQLKGQLNHIPSDCSANFDFSRKGLLVFTDGSITNGNVHRPSNNSTVSGLFPWTPKLGNEDFNSVIQQMAQGRQIEYIDIERPSTGGLGFSVVALRSQNLGKVDIFVKDVQPGSVADRDQRLKENDQILAINHTPLDQNISHQQAIALLQQTTGSLRLIVAREPVHTKSSTSSSLNDTTLPETVCWGHVEEVELINDGSGLGFGIVGGKTSGVVVRTIVPGGLADRDGRLQTGDHILKIGGTNVQGMTSEQVAQVLRNCGNSVRMLVARDPAGDISVTPPAPAALPVALPTVASKGPGSDSSLFETYNVELVRKDGQSLGIRIVGYVGTSHTGEASGIYVKSIIPGSAAYHNGHIQVNDKIVAVDGVNIQGFANHDVVEVLRNAGQVVHLTLVRRKTSSSTSPLEPPSDRGTVVEPLKPPALFLTGAVETETNVDGEDEEIKERIDTLKNDNIQALEKLEKVPDSPENELKSRWENLLGPDYEVMVATLDTQIADDAELQKYSKLLPIHTLRLGVEVDSFDGHHYISSIVSGGPVDTLGLLQPEDELLEVNGMQLYGKSRREAVSFLKEVPPPFTLVCCRRLFDDEASVDEPRRTETSLPETEVDHNMDVNTEEDDDGELALWSPEVKIVELVKDCKGLGFSILDYQDPLDPTRSVIVIRSLVADGVAERSGGLLPGDRLVSVNEYCLDNTSLAEAVEILKAVPPGLVHLGICKPLVEDNEEESCYILHSSSNEDKTEFSGTIHDINSSLILEAPKGFRDEPYFKEELVDEPFLDLGKSFHSQQKEIEQSKEAWEMHEFLTPRLQEMDEEREMLVDEEYELYQDPSPSMELYPLSHIQEATPVPSVNELHFGTQWLHDNEPSESQEARTGRTVYSQEAQPYGYCPENVMKENFVMESLPSVPSTEGNSQQGRFDDLENLNSLAKTSLDLGMIPNDVQGPSLLIDLPVVAQRREQEDLPLYQHQATRVISKASAYTGMLSSRYATDTCELPEREEGEGEETPNFSHWGPPRIVEIFREPNVSLGISIVGGQTVIKRLKNGEELKGIFIKQVLEDSPAGKTNALKTGDKILEVSGVDLQNASHSEAVEAIKNAGNPVVFIVQSLSSTPRVIPNVHNKANKITGNQNQDTQEKKEKRQGTAPPPMKLPPPYKALTDDSDENEEEDAFTDQKIRQRYADLPGELHIIELEKDKNGLGLSLAGNKDRSRMSIFVVGINPEGPAAADGRMRIGDELLEINNQILYGRSHQNASAIIKTAPSKVKLVFIRNEDAVNQMAVTPFPVPSSSPSSIEDQSGTEPISSEEDGSLEVGIKQLPESESFKLAVSQMKQQKYPTKVSFSSQEIPLAPASSYHSTDADFTGYGGFQAPLSVDPATCPIVPGQEMIIEISKGRSGLGLSIVGGKDTPLNAIVIHEVYEEGAAARDGRLWAGDQILEVNGVDLRNSSHEEAITALRQTPQKVRLVVYRDEAHYRDEENLEIFPVDLQKKAGRGLGLSIVGKR

SEQ ID NO: 738391 - protein, 1582 aa, Homo sapiens
MPENPATDKLQVLQVLDRLKMKLQEKGDTSQNEKLSMFYETLKSPLFNQILTLQQSIKQLKGQLNHIPSDCSANFDFSRKGLLVFTDGSITNGNVHRPSNNSTVSGLFPWTPKLGNEDFNSVIQQMAQGRQIEYIDIERPSTGGLGFSVVALRSQNLGKVDIFVKDVQPGSVADRDQRLKENDQILAINHTPLDQNISHQQAIALLQQTTGSLRLIVAREPVHTKSSTSSSLNDTTLPETVCWGHVEEVELINDGSGLGFGIVGGKTSGVVVRTIVPGGLADRDGRLQTGDHILKIGGTNVQGMTSEQVAQVLRNCGNSVRMLVARDPAGDISVTPPAPAALPVALPTVASKGPGSDSSLFETYNVELVRKDGQSLGIRIVGYVGTSHTGEASGIYVKSIIPGSAAYHNGHIQVNDKIVAVDGVNIQGFANHDVVEVLRNAGQVVHLTLVRRKTSSSTSPLEPPSDRGTVVEPLKPPALFLTGAVETETNVDGEDEEIKERIDTLKNDNIQALEKLEKVPDSPENELKSRWENLLGPDYEVMVATLDTQIADDAELQKYSKLLPIHTLRLGVEVDSFDGHHYISSIVSGGPVDTLGLLQPEDELLEVNGMQLYGKSRREAVSFLKEVPPPFTLVCCRRLFDDEASVDEPRRTETSLPETEVDHNMDVNTEEDDDGELALWSPEVKIVELVKDCKGLGFSILDYQDPLDPTRSVIVIRSLVADGVAERSGGLLPGDRLVSVNEYCLDNTSLAEAVEILKAVPPGLVHLGICKPLVEDNEEESCYILHSSSNEDKTEFSGTIHDINSSLILEAPKGFRDEPYFKEELVDEPFLDLGKSFHSQQKEIEQSKEAWEMHEFLTPRLQEMDEEREMLVDEEYELYQDPSPSMELYPLSHIQEATPVPSVNELHFGTQWLHDNEPSESQEARTGRTVYSQEAQPYGYCPENVMKENFVMESLPSVPSTEGNSQQGRFDDLENLNSLAKTSLDLGMIPNDVQGPSLLIDLPVVAQRREQEDLPLYQHQATRVISKASAYTGMLSSRYATDTCELPEREEGEGEETPNFSHWGPPRIVEIFREPNVSLGISIVGGQTVIKRLKNGEELKGIFIKQVLEDSPAGKTNALKTGDKILEVSGVDLQNASHSEAVEAIKNAGNPVVFIVQSLSSTPRVIPNVHNKANKITGNQNQDTQEKKEKRQGTAPPPMKLPPPYKALTDDSDENEEEDAFTDQKIRQRYADLPGELHIIELEKDKNGLGLSLAGNKDRSRMSIFVVGINPEGPAAADGRMRIGDELLEINNQILYGRSHQNASAIIKTAPSKVKLVFIRNEDAVNQMAVTPFPVPSSSPSSIEDQSGTEPISSEEDGSLEVGIKQLPESESFKLAVSQMKQQKYPTKVSFSSQEIPLAPASSYHSTDADFTGYGGFQAPLSVDPATCPIVPGQEMIIEISKGRSGLGLSIVGGKDTPLFWRLGSPRAWSQHLVRAFMLHHPVTEVEGQNAIVIHEVYEEGAAARDGRLWAGDQILEVNGVDLRNSSHEEAITALRQTPQKVRLVVYRDEAHYRDEENLEIFPVDLQKKAGRGLGLSIVGKR

SEQ ID NO: 738392 - protein, 1300 aa, Homo sapiens
MPENPATDKLQVLQVLDRLKMKLQEKGDTSQNEKLSMFYETLKSPLFNQILTLQQSIKQLKGQLNHIPSDCSANFDFSRKGLLVFTDGSITNGNVHRPSNNSTVSGLFPWTPKLGNEDFNSVIQQMAQGRQIEYIDIERPSTGGLGFSVVALRSQNLGKVDIFVKDVQPGSVADRDQRLKENDQILAINHTPLDQNISHQQAIALLQQTTGSLRLIVAREPVHTKSSTSSSLNDTTLPETVCWGHVEEVELINDGSGLGFGIVGGKTSGVVVRTIVPGGLADRDGRLQTGDHILKIGGTNVQGMTSEQVAQVLRNCGNSVRMLVARDPAGDISVTPPAPAALPVALPTVASKGPGSDSSLFETYNVELVRKDGQSLGIRIVGYVGTSHTGEASGIYVKSIIPGSAAYHNGHIQVNDKIVAVDGVNIQGFANHDVVEVLRNAGQVVHLTLVRRKTSSSTSPLEPPSDRGTVVEPLKPPALFLTGAVETETNVDGEDEEIKERIDTLKNDNIQALEKLEKVPDSPENELKSRWENLLGPDYEVMVATLDTQIADDAELQKYSKLLPIHTLRLGVEVDSFDGHHYISSIVSGGPVDTLGLLQPEDELLEVNGMQLYGKSRREAVSFLKEVPPPFTLVCCRRLFDDEASVDEPRRTETSLPETEVDHNMDVNTEEDDDGELALWSPEVKIVELVKDCKGLGFSILDYQDPLDPTRSVIVIRSLVADGVAERSGGLLPGDRLVSVNEYCLDNTSLAEAVEILKAVPPGLVHLGICKPLVEDNEEESCYILHSSSNEDKTEFSGTIHDINSSLILEAPKGFRDEPYFKEELVDEPFLDLGKSFHSQQKEIEQSKEAWEMHEFLTPRLQEMDEEREMLVDEEYELYQDPSPSMELYPLSHIQEATPVPSVNELHFGTQWLHDNEPSESQEARTGRTVYSQEAQPYGYCPENVMKENFVMESLPSVPSTEGNSQQGRFDDLENLNSLAKTSLDLGMIPNDVQGPSLLIDLPVVAQRREQEDLPLYQHQATRVISKASAYTGMLSSRYATDTCELPEREEGEGEETPNFSHWGPPRIVEIFREPNVSLGISIVGGQTVIKRLKNGEELKGIFIKQVLEDSPAGKTNALKTGDKILEVSGVDLQNASHSEAVEAIKNAGNPVVFIVQSLSSTPRVIPNVHNKANKITGNQNQDTQEKKEKRQGTAPPPMKLPPPYKALTDDSDENEEEDAFTDQKIRQRYADLPGELHIIELEKDKNGLGLSLAGNKDRSRMSIFVVGINPEGPAAADGRMRIGDELLETLTQNRIYSHP

SEQ ID NO: 738393 - protein, 1386 aa, Homo sapiens
  misc_feature (1385)..(1385): Xaa can be any naturally occurring amino acid
MPENPATDKLQVLQVLDRLKMKLQEKGDTSQNEKLSMFYETLKSPLFNQILTLQQSIKQLKGQLNHIPSDCSANFDFSRKGLLVFTDGSITNGNVHRPSNNSTVSGLFPWTPKLGNEDFNSVIQQMAQGRQIEYIDIERPSTGGLGFSVVALRSQNLGKVDIFVKDVQPGSVADRDQRLKENDQILAINHTPLDQNISHQQAIALLQQTTGSLRLIVAREPVHTKSSTSSSLNDTTLPETVCWGHVEEVELINDGSGLGFGIVGGKTSGVVVRTIVPGGLADRDGRLQTGDHILKIGGTNVQGMTSEQVAQVLRNCGNSVRMLVARDPAGDISVTPPAPAALPVALPTVASKGPGSDSSLFETYNVELVRKDGQSLGIRIVGYVGTSHTGEASGIYVKSIIPGSAAYHNGHIQVNDKIVAVDGVNIQGFANHDVVEVLRNAGQVVHLTLVRRKTSSSTSPLEPPSDRGTVVEPLKPPALFLTGAVETETNVDGEDEEIKERIDTLKNDNIQALEKLEKVPDSPENELKSRWENLLGPDYEVMVATLDTQIADDAELQKYSKLLPIHTLRLGVEVDSFDGHHYISSIVSGGPVDTLGLLQPEDELLEVNGMQLYGKSRREAVSFLKEVPPPFTLVCCRRLFDDEASVDEPRRTETSLPETEVDHNMDVNTEEDDDGELALWSPEVKIVELVKDCKGLGFSILDYQDPLDPTRSVIVIRSLVADGVAERSGGLLPGDRLVSVNEYCLDNTSLAEAVEILKAVPPGLVHLGICKPLVEDNEEESCYILHSSSNEDKTEFSGTIHDINSSLILEAPKGFRDEPYFKEELVDEPFLDLGKSFHSQQKEIEQSKEAWEMHEFLTPRLQEMDEEREMLVDEEYELYQDPSPSMELYPLSHIQEATPVPSVNELHFGTQWLHDNEPSESQEARTGRTVYSQEAQPYGYCPENVMKENFVMESLPSVPSTEGNSQQGRFDDLENLNSLAKTSLDLGMIPNDVQGPSLLIDLPVVAQRREQEDLPLYQHQATRVISKASAYTGMLSSRYATDTCELPEREEGEGEETPNFSHWGPPRIVEIFREPNVSLGISIVGGQTVIKRLKNGEELKGIFIKQVLEDSPAGKTNALKTGDKILEVSGVDLQNASHSEAVEAIKNAGNPVVFIVQSLSSTPRVIPNVHNKANKITGNQNQDTQEKKEKRQGTAPPPMKLPPPYKALTDDSDENEEEDAFTDQKIRQRYADLPGELHIIELEKDKNGLGLSLAGNKDRSRMSIFVVGINPEGPAAADGRMRIGDELLEINNQILYGRSHQNASAIIKTAPSKVKLVFIRNEDAVNQMAVTPFPVPSSSPSSIEDQSGTEPISSEEDGSLEVGIKQLPESESFKLEDMSQAIGQXM

SEQ ID NO: 738394 - protein, 1145 aa, Homo sapiens
MPENPATDKLQVLQVLDRLKMKLQEKGDTSQNEKLSMFYETLKSPLFNQILTLQQSIKQLKGQLNHIPSDCSANFDFSRKGLLVFTDGSITNGNVHRPSNNSTVSGLFPWTPKLGNEDFNSVIQQMAQGRQIEYIDIERPSTGGLGFSVVALRSQNLGKVDIFVKDVQPGSVADRDQRLKENDQILAINHTPLDQNISHQQAIALLQQTTGSLRLIVAREPVHTKSSTSSSLNDTTLPETVCWGHVEEVELINDGSGLGFGIVGGKTSGVVVRTIVPGGLADRDGRLQTGDHILKIGGTNVQGMTSEQVAQVLRNCGNSVRMLVARDPAGDISVTPPAPAALPVALPTVASKGPGSDSSLFETYNVELVRKDGQSLGIRIVGYVGTSHTGEASGIYVKSIIPGSAAYHNGHIQVNDKIVAVDGVNIQGFANHDVVEVLRNAGQVVHLTLVRRKTSSSTSPLEPPSDRGTVVEPLKPPALFLTGAVETETNVDGEDEEIKERIDTLKNDNIQALEKLEKVPDSPENELKSRWENLLGPDYEVMVATLDTQIADDAELQKYSKLLPIHTLRLGVEVDSFDGHHYISSIVSGGPVDTLGLLQPEDELLEVNGMQLYGKSRREAVSFLKEVPPPFTLVCCRRLFDDEASVDEPRRTETSLPETEVDHNMDVNTEEDDDGELALWSPEVKIVELVKDCKGLGFSILDYQDPLDPTRSVIVIRSLVADGVAERSGGLLPGDRLVSVNEYCLDNTSLAEAVEILKAVPPGLVHLGICKPLVEDNEEESCYILHSSSNEDKTEFSGTIHDINSSLILEAPKGFRDEPYFKEELVDEPFLDLGKSFHSQQKEIEQSKEAWEMHEFLTPRLQEMDEEREMLVDEEYELYQDPSPSMELYPLSHIQEATPVPSVNELHFGTQWLHDNEPSESQEARTGRTVYSQEAQPYGYCPENVMKENFVMESLPSVPSTEGNSQQGRFDDLENLNSLAKTSLDLGMIPNDVQGPSLLIDLPVVAQRREQEDLPLYQHQATRVISKASAYTGMLSSRYATDTCELPEREEGEGEETPNFSHWGPPRIVEIFREPNVSLGISIVGGQTVIKRLKNGEELKGIFIKQVLEDSPAGKTNALKTGDKILEVNDVKVLFLLETYGKTVK

SEQ ID NO: 738395 - protein, 1098 aa, Homo sapiens
MPENPATDKLQVLQVLDRLKMKLQEKGDTSQNEKLSMFYETLKSPLFNQILTLQQSIKQLKGQLNHIPSDCSANFDFSRKGLLVFTDGSITNGNVHRPSNNSTVSGLFPWTPKLGNEDFNSVIQQMAQGRQIEYIDIERPSTGGLGFSVVALRSQNLGKVDIFVKDVQPGSVADRDQRLKENDQILAINHTPLDQNISHQQAIALLQQTTGSLRLIVAREPVHTKSSTSSSLNDTTLPETVCWGHVEEVELINDGSGLGFGIVGGKTSGVVVRTIVPGGLADRDGRLQTGDHILKIGGTNVQGMTSEQVAQVLRNCGNSVRMLVARDPAGDISVTPPAPAALPVALPTVASKGPGSDSSLFETYNVELVRKDGQSLGIRIVGYVGTSHTGEASGIYVKSIIPGSAAYHNGHIQVNDKIVAVDGVNIQGFANHDVVEVLRNAGQVVHLTLVRRKTSSSTSPLEPPSDRGTVVEPLKPPALFLTGAVETETNVDGEDEEIKERIDTLKNDNIQALEKLEKVPDSPENELKSRWENLLGPDYEVMVATLDTQIADDAELQKYSKLLPIHTLRLGVEVDSFDGHHYISSIVSGGPVDTLGLLQPEDELLEVNGMQLYGKSRREAVSFLKEVPPPFTLVCCRRLFDDEASVDEPRRTETSLPETEVDHNMDVNTEEDDDGELALWSPEVKIVELVKDCKGLGFSILDYQDPLDPTRSVIVIRSLVADGVAERSGGLLPGDRLVSVNEYCLDNTSLAEAVEILKAVPPGLVHLGICKPLVEDNEEESCYILHSSSNEDKTEFSGTIHDINSSLILEAPKGFRDEPYFKEELVDEPFLDLGKSFHSQQKEIEQSKEAWEMHEFLTPRLQEMDEEREMLVDEEYELYQDPSPSMELYPLSHIQEATPVPSVNELHFGTQWLHDNEPSESQEARTGRTVYSQEAQPYGYCPENVMKENFVMESLPSVPSTEGNSQQGRFDDLENLNSLAKTSLDLGMIPNDVQGPSLLIDLPVVAQRREQEDLPLYQHQATRVISKASAYTGMLSSRYATDTCELPEREEGEGEETPNFSHWGPPRMYVDDIIVAFSIGAQPVALFFNLTEHYLVLL

SEQ ID NO: 738396 - protein, 993 aa, Homo sapiens
MPENPATDKLQVLQVLDRLKMKLQEKGDTSQNEKLSMFYETLKSPLFNQILTLQQSIKQLKGQLNHIPSDCSANFDFSRKGLLVFTDGSITNGNVHRPSNNSTVSGLFPWTPKLGNEDFNSVIQQMAQGRQIEYIDIERPSTGGLGFSVVALRSQNLGKVDIFVKDVQPGSVADRDQRLKENDQILAINHTPLDQNISHQQAIALLQQTTGSLRLIVAREPVHTKSSTSSSLNDTTLPETVCWGHVEEVELINDGSGLGFGIVGGKTSGVVVRTIVPGGLADRDGRLQTGDHILKIGGTNVQGMTSEQVAQVLRNCGNSVRMLVARDPAGDISVTPPAPAALPVALPTVASKGPGSDSSLFETYNVELVRKDGQSLGIRIVGYVGTSHTGEASGIYVKSIIPGSAAYHNGHIQVNDKIVAVDGVNIQGFANHDVVEVLRNAGQVVHLTLVRRKTSSSTSPLEPPSDRGTVVEPLKPPALFLTGAVETETNVDGEDEEIKERIDTLKNDNIQALEKLEKVPDSPENELKSRWENLLGPDYEVMVATLDTQIADDAELQKYSKLLPIHTLRLGVEVDSFDGHHYISSIVSGGPVDTLGLLQPEDELLEVNGMQLYGKSRREAVSFLKEVPPPFTLVCCRRLFDDEASVDEPRRTETSLPETEVDHNMDVNTEEDDDGELALWSPEVKIVELVKDCKGLGFSILDYQDPLDPTRSVIVIRSLVADGVAERSGGLLPGDRLVSVNEYCLDNTSLAEAVEILKAVPPGLVHLGICKPLVEDNEEESCYILHSSSNEDKTEFSGTIHDINSSLILEAPKGFRDEPYFKEELVDEPFLDLGKSFHSQQKEIEQSKEAWEMHEFLTPRLQEMDEEREMLVDEEYELYQDPSPSMELYPLSHIQEATPVPSVNELHFGTQWLHDNEPSESQEARTGRTVYSQEAQPYGYCPENVGLSLSPRLECSAVAYSWLTAASTSQAPWILSPRLPELLGPQACTTMPG

SEQ ID NO: 738397 - protein, 988 aa, Homo sapiens
MPENPATDKLQVLQVLDRLKMKLQEKGDTSQNEKLSMFYETLKSPLFNQILTLQQSIKQLKGQLNHIPSDCSANFDFSRKGLLVFTDGSITNGNVHRPSNNSTVSGLFPWTPKLGNEDFNSVIQQMAQGRQIEYIDIERPSTGGLGFSVVALRSQNLGKVDIFVKDVQPGSVADRDQRLKENDQILAINHTPLDQNISHQQAIALLQQTTGSLRLIVAREPVHTKSSTSSSLNDTTLPETVCWGHVEEVELINDGSGLGFGIVGGKTSGVVVRTIVPGGLADRDGRLQTGDHILKIGGTNVQGMTSEQVAQVLRNCGNSVRMLVARDPAGDISVTPPAPAALPVALPTVASKGPGSDSSLFETYNVELVRKDGQSLGIRIVGYVGTSHTGEASGIYVKSIIPGSAAYHNGHIQVNDKIVAVDGVNIQGFANHDVVEVLRNAGQVVHLTLVRRKTSSSTSPLEPPSDRGTVVEPLKPPALFLTGAVETETNVDGEDEEIKERIDTLKNDNIQALEKLEKVPDSPENELKSRWENLLGPDYEVMVATLDTQIADDAELQKYSKLLPIHTLRLGVEVDSFDGHHYISSIVSGGPVDTLGLLQPEDELLEVNGMQLYGKSRREAVSFLKEVPPPFTLVCCRRLFDDEASVDEPRRTETSLPETEVDHNMDVNTEEDDDGELALWSPEVKIVELVKDCKGLGFSILDYQDPLDPTRSVIVIRSLVADGVAERSGGLLPGDRLVSVNEYCLDNTSLAEAVEILKAVPPGLVHLGICKPLVEDNEEESCYILHSSSNEDKTEFSGTIHDINSSLILEAPKGFRDEPYFKEELVDEPFLDLGKSFHSQQKEIEQSKEAWEMHEFLTPRLQEMDEEREMLVDEEYELYQDPSPSMELYPLSHIQEATPVPSVNELHFGTQWLHDNEPSESQEARTGRTVYSQEAQPYGYCPENVMKENFVMESLPSVPSTEGNSQQGRFDDLENLNSLAKTSLDLGL

SEQ ID NO: 738398 - protein, 675 aa, Homo sapiens
MPENPATDKLQVLQVLDRLKMKLQEKGDTSQNEKLSMFYETLKSPLFNQILTLQQSIKQLKGQLNHIPSDCSANFDFSRKGLLVFTDGSITNGNVHRPSNNSTVSGLFPWTPKLGNEDFNSVIQQMAQGRQIEYIDIERPSTGGLGFSVVALRSQNLGKVDIFVKDVQPGSVADRDQRLKENDQILAINHTPLDQNISHQQAIALLQQTTGSLRLIVAREPVHTKSSTSSSLNDTTLPETVCWGHVEEVELINDGSGLGFGIVGGKTSGVVVRTIVPGGLADRDGRLQTGDHILKIGGTNVQGMTSEQVAQVLRNCGNSVRMLVARDPAGDISVTPPAPAALPVALPTVASKGPGSDSSLFETYNVELVRKDGQSLGIRIVGYVGTSHTGEASGIYVKSIIPGSAAYHNGHIQVNDKIVAVDGVNIQGFANHDVVEVLRNAGQVVHLTLVRRKTSSSTSPLEPPSDRGTVVEPLKPPALFLTGAVETETNVDGEDEEIKERIDTLKNDNIQALEKLEKVPDSPENELKSRWENLLGPDYEVMVATLDTQIADDAELQKYSKLLPIHTLRLGVEVDSFDGHHYISSIVSGGPVDTLGLLQPEDELLEVNGMQLYGKSRREAVSFLKEVPPPFTLVCCRRLFDDEASVDEPRRTETSLPETEADHMSHPKSHTACQV

SEQ ID NO: 738399 - protein, 183 aa, Homo sapiens
MTKIKADPDGPEAQAEACSGERTYQELLVNQNPIAQPLASRRLTRKLYKCIKKAVKQKQIRRGVKEVQKFVNKGEKGIMVLAGDTLPIEVYCHLPVMCEDRNLPYVYIPSKTDLGAAAGSKRPTCVIMVKPHEEYQEAYDECLEEGAVPAPTPMRGSGSTWAPAAGSYWAGSRTTGCPPAHPH

SEQ ID NO: 738400 - protein, 183 aa, Homo sapiens; identical to SEQ ID NO: 738399

SEQ ID NO: 738401 - protein, 183 aa, Homo sapiens; identical to SEQ ID NO: 738399

SEQ ID NO: 738402 - protein, 183 aa, Homo sapiens; identical to SEQ ID NO: 738399

SEQ ID NO: 738403 - protein, 183 aa, Homo sapiens; identical to SEQ ID NO: 738399

SEQ ID NO: 738404 - protein, 183 aa, Homo sapiens; identical to SEQ ID NO: 738399

SEQ ID NO: 738405 - protein, 183 aa, Homo sapiens; identical to SEQ ID NO: 738399

SEQ ID NO: 738406 - protein, 183 aa, Homo sapiens; identical to SEQ ID NO: 738399

SEQ ID NO: 738407 - protein, 183 aa, Homo sapiens; identical to SEQ ID NO: 738399

SEQ ID NO: 738408 - protein, 183 aa, Homo sapiens; identical to SEQ ID NO: 738399

SEQ ID NO: 738409 - protein, 183 aa, Homo sapiens; identical to SEQ ID NO: 738399

SEQ ID NO: 738410 - protein, 183 aa, Homo sapiens; identical to SEQ ID NO: 738399

SEQ ID NO: 738411 - protein, 187 aa, Homo sapiens
AAAETKSQGGEPTRSTAQAEACSGERTYQELLVNQNPIAQPLASRRLTRKLYKCIKKAVKQKQIRRGVKEVQKFVNKGEKGIMVLAGDTLPIEVYCHLPVMCEDRNLPYVYIPSKTDLGAAAGSKRPTCVIMVKPHEEYQEAYDECLEEGAVPAPTPMRGSGSTWAPAAGSYWAGSRTTGCPPAHPH

SEQ ID NO: 738412 - protein, 186 aa, Homo sapiens
MTKIKADPDGPEAQAEACSGERTYQELLVNQNPIAQPLASRRLTRKLYKCIKKAVKQKQIRRGVKEVQKFVNKGEKGIMVLAGDTLPIEVYCHLPVMCEDRNLPYVYIPSKTDLGAAAGSKRPTCVIMVKPHEEYQEAYDECLEEGAVPAPTKPHSLASLGSGEGWAWPRWKVDCWLAGLRVCGTC

SEQ ID NO: 738413 - protein, 274 aa, Homo sapiens
MTKIKADPDGPEAQAEACSGERTYQELLVNQNPIAQPLASRRLTRKLYKCIKKARASQHKGPRTIGAGAATEVQTHTFVQPHKGGQNHRGRSTAGYYGPRDDQPTLAPTLQRLNFQPGGATIVHTRSRCPFGLATVTPRDDTGACGPPESAVHSRSTRRSLEETPGNPYGGLLAKWRPAEGDLPNTGSTTPTEHDGTWRIGRNFTARLAAVPREALPAPNCTRHGLARKAGTKAGPLATPGSWTASAPWANSQRAGKRYPSVSPGSDPLIEAGR

SEQ ID NO: 738414 - protein, 137 aa, Homo sapiens
  misc_feature (81)..(81): Xaa can be any naturally occurring amino acid
EAAVNSLVNLYLQASYTYLSLGFYFDRDDVALEGVHFFRELAEEKREGYERLLKMQNQRGGRALFQDIKKPAEDEWGKTQXAMKAAMALGEKAEPGPFGSSCPGVLPARTPIFCDFLETHFLDEEVKLIKKMGDHLT

SEQ ID NO: 738415 - protein, 110 aa, Homo sapiens
  misc_feature (54)..(54): Xaa can be any naturally occurring amino acid
MAHAFQSHIIAVEIEAHTEEGYERLLKMQNQRGGRALFQDIKKPAEDEWGKTQXAMKAAMALEKKLNQALLDLHALGFCPHGPPSSVDFLETHFLDEEVKLIKKMGDHLT

SEQ ID NO: 738416 - protein, 162 aa, Homo sapiens
PSSRWPWLAHNFLKPSSPAPAQASRWPLQAQLLPSDSVSRPRTASSRWIPLCPAWASRQPLLAQIVLKSPSPGPAPASRQPLQAQRVVNEGPSGVSSCLSSASRGQSGGLCRPRLPLSQALQGQLQPPGRLCRPKSSSSRPGSGPGRAAFWPPRAQLRPLGG

SEQ ID NO: 738417 - protein, 81 aa, Homo sapiens
MNDYKLEEDPVTKERTFKRFAPRKGDKIYQEFKKLYFYSDAYRPLKFACETIIEEYEDEISSLIAQETHYLADKLCSEKSG

SEQ ID NO: 738418 - protein, 93 aa, Homo sapiens
INPSLKAGPSSQVQSLLLFELLCQDWFRAEAIGDDILSAAGQGCGPNMAALAINLPKPEGHSDPDKQKTYPAIKIVRWPGGVAHAYNPSTLGG

SEQ ID NO: 738419 - protein, 1360 aa, Homo sapiens
RSQSSDNYLPVSLRSEVPGVRGPQPVTMTADKLVFFVNGRKVVEKNADPETTLLAYLRRKLGLSGTKLGCGEGGCGACTVMLSKYDRLQNKIVHFSANACLAPICSLHHVAVTTVEGIGSTKTRLHPVQERIAKSHGSQCGFCTPGIVMSMYTLLRNQPEPTMEEIENAFQGNLCRCTGYRPILQGFRTFARDGGCCGGDGNNPNCCMNQKKDHSVSLSPSLFKPEEFTPLDPTQEPIFPPELLRLKDTPRKQLRFEGERVTWIQASTLKELLDLKAQHPDAKLVVGNTEIGIEMKFKNMLFPMIVCPAWIPELNSVEHGPDGISFGAACPLSIVEKTLVDAVAKLPAQKTEVFRGVLEQLRWFAGKQVKSVASVGGNIITASPISDLNPVFMASGAKLTLVSRGTRRTVQMDHTFFPGYRKTLLSPEEILLSIEIPYSREGEYFSAFKQASRREDDIAKVTSGMRVLFKPGTTEVQELALCYGGMANRTISALKTTQRQLSKLWKEELLQDVCAGLAEELHLPPDAPGGMVDFRCTLTLSFFFKFYLTVLQKLGQENLEDKCGKLDPTFASATLLFQKDPPADVQLFQEVPKGQSEEDMVGRPLPHLAADMQASGEAVYCDDIPRYENELSLRLVTSTRAHAKIKSIDTSEAKKVPGFVCFISADDVPGSNITGICNDETVFAKDKVTCVGHIIGAVVADTPEHTQRAAQGVKITYEELPAIITIEDAIKNNSFYGPELKIEKGDLKKGFSEADNVVSGEIYIGGQEHFYLETHCTIAVPKGEAGEMELFVSTQNTMKTQSFVAKMLGVPANRIVVRVKRMGGGFGGKETRSTVVSTAVALAAYKTGRPVRCMLDRDEDMLITGGRHPFLARYKVGFMKTGTVVALEVDHFSNVGNTQDLSQSIMERALFHMDNCYKIPNIRGTGRLCKTNLPSNTAFRGFGGPQGMLIAECWMSEVAVTCGMPAEEVRRKNLYKEGDLTHFNQKLEGFTLPRCWEECLASSQYHARKSEVDKFNKENCWKKRGLCIIPTKFGISFTVPFLNQAGALLHVYTDGSVLLTHGGTEMGQGLHTKMVQVASRALKIPTSKIYISETSTNTVPNTSPTAASVSADLNGQAVYAACQTILKRLEPYKKKNPSGSWEDWVTAAYMDTVSLSATGFYRTPNLGYSFETNSGNPFHYFSYGVACSEVEIDCLTGDHKNLRTDIVMDVGSSLNPAIDIGQVEGAFVQGLGLFTLEELHYSPEGSLHTRGPSTYKIPAFGSIPIEFRVSLLRDCPNKKAIYASKAVGEPPLFLAASIFFAIKDAIRAARAQHTGNNVKELFRLDSPATPEKIRNACVDKFTTLCVTGVPENCKPWSVRV

SEQ ID NO: 738420 - protein, 1153 aa, Homo sapiens [sequence omitted]

SEQ ID NO: 738421 - protein, 74 aa, Homo sapiens
EEPQGQTNPPSADLNTVGEGGIWVPIQVFLGSTKSFSYGVRTTQTVWHSQAVKMPTSVQQPTHSPEPSHYGSQC

SEQ ID NO: 738422 - protein, 635 aa, Homo sapiens
MNQKKDHSVSLSPSLFKPEEFTPLDPTQEPIFPPELLRLKDTPRKQLRFEGERVTWIQASTLKELLDLKAQHPDAKLVVGNTEIGIEMKFKNMLFPMIVCPAWIPELNSVEHGPDGISFGAACPLSIVEKTLVDAVAKLPAQKTEVFRGVLEQLRWFAGKQVKSVASVGGNIITASPISDLNPVFMASGAKLTLVSRGTRRTVQMDHTFFPGYRKTLLSPEEILLSIEIPYSREGEYFSAFKQASRREDDIAKVTSGMRVLFKPGTTEVQELALCYGGMANRTISALKTTQRQLSKLWKEELLQDVCAGLAEELHLPPDAPGGMVDFRCTLTLSFFFKFYLTVLQKLGQENLEDKCGKLDPTFASATLLFQKDPPADVQLFQEVPKGQSEEDMVGRPLPHLAADMQASGEAVYCDDIPRYENELSLRLVTSTRAHAKIKSIDTSEAKKVPGFVCFISADDVPGSNITGICNDETVFAKDKVTCVGHIIGAVVADTPEHTQRAAQGVKITYEELPAIITIEDAIKNNSFYGPELKIEKGDLKKGFSEADNVVSGEIYIGGQEHFYLETHCTIAVPKGEAGEMELFVSTQNTMKTQSFVAKMLGVPANRIVVRVKRMGGRSYMQPGPHAVTPQCSGL

SEQ ID NO: 738423 - protein, 679 aa, Homo sapiens
APCSLTELHFPTLPTRPVTLCGPRARSRVSTAAPHFLGPGPGPSPRLRHGSTMEEADRILIHSLRQAGTAVPPDVQTLRAFTTELVVEAVVRCLRVINPAVGSGLSPLLPLAMSARFRLAMSLAQACMDLGYPLELGYQNFLYPSEPDLRDLLLFLAERLPTDASEDADQPAGDSAILLRAIGSQIRDQLALPWVPPHLRTPKLQHLQGSALQKPFHASRLVVPELSSRGEPREFQASPLLLPVPTQVPQPVGRVASLLEHHALQLCQQTGRDRPGDEDWVHRTSRLPPQEDTRAQRQRLQKQLTEHLRQSWGLLGAPIQARDLGELLQAWGAGAKTGAPKGSRFTHSEKFTFHLEPQAQATQVSDVPATSRRPEQVTWAAQEQELESLREQLEGVNRSIEEVEADMKTLGVSFVQAESECRHSKLSTAEREQALRLKSRAVELLPDGTANLAKLQLVVENSAQRVIHLAGQWEKHRVPLLAEYRHLRKLQDCRELESSRRLAEIQELHQSVRAAAEEARRKEEVYKQLMSELETLPRDVSRLAYTQRILEIVGNIRKQKEEITKILSDTKELQKEINSLSGKLDRTFAVTDELVFKDAKKDDAVRKAYKYLAALHENCSQLIQTIEDTGTIMREVRDLEEQIETELGKKTLSNLEKIREDYRALRQENAGLLGRVREA

SEQ ID NO: 738424 - protein, 869 aa, Homo sapiens
APCSLTELHFPTLPTRPVTLCGPRARSRVSTAAPHFLGPGPGPSPRLRHGSTMEEADRILIHSLRQAGTAVPPDVQTLRAFTTELVVEAVVRCLRVINPAVGSGLSPLLPLAMSARFRLAMSLAQACMDLGYPLELGYQNFLYPSEPDLRDLLLFLAERLPTDASEDADQPAGDSAILLRAIGSQIRDQLALPWVPPHLRTPKLQHLQGSALQKPFHASRLVVPELSSRGEPREFQASPLLLPVPTQVPQPVGRVASLLEHHALQLCQQTGRDRPGDEDWVHRTSRLPPQEDTRAQRQRLQKQLTEHLRQSWGLLGAPIQARDLGELLQAWGAGAKTGAPKGSRFTHSEKFTFHLVGAPEDMRCVDGRGRLGGWLFVSAPHLYPHRFLCSHWTGPRPTVGWVPRGVPKLIRDLTGENVEGGNHAKVWGCSWGNTPFPQAVSFEHIFCPKMFTLRAPHPSHGHLRLERWGRWVGAVTGSGRFLHEQALWPEVADGAFTHIVTVWPPSVLQWACMPHWGQFSGEAEAGPREEGPSLAARMPLVTPLEEPQAQATQVSDVPATSRRPEQVTWAAQEQELESLREQLEGVNRSIEEVEADMKTLGVSFVQAESECRHSKLSTAEREQALRLKSRAVELLPDGTANLAKLQLVVENSAQRVIHLAGQWEKHRVPLLAEYRHLRKLQDCRELESSRRLAEIQELHQSVRAAAEEARRKEEVYKQLMSELETLPRDVSRLAYTQRILEIVGNIRKQKEEITKILSDTKELQKEINSLSGKLDRTFAVTDELVFKDAKKDDAVRKAYKYLAALHENCSQLIQTIEDTGTIMREVRDLEEQIETELGKKTLSNLEKIREDYRALRQENAGLLGRVREA

SEQ ID NO: 738425 - protein, 679 aa, Homo sapiens; identical to SEQ ID NO: 738423

SEQ ID NO: 738426 - protein, 273 aa, Homo sapiens
MKTLGVSFVQAESECRHSKLSTAEREQALRLKSRAVELLPDGTANLAKLQLVVENSAQRVIHLAGQWEKHRVPLLAEYRHLRKLQDCRELESSRRLAEIQELHQSVRAAAEEARRKEEVYKQLMSELETLPRDVSRLAYTQRILEIVGNIRKQKEEITKILSDTKELQKEINSLSGKLDRTFAVTDELVFKDAKKDDAVRKAYKYLAALHENCSQLIQTIEDTGTIMREVRDLEEQIETELGKKTLSNLEKIREDYRALRQENAGLLGRVREA

SEQ ID NO: 738427 - protein, 679 aa, Homo sapiens; identical to SEQ ID NO: 738423

SEQ ID NO: 738428 - protein, 531 aa, Homo sapiens
APCSLTELHFPTLPTRPVTLCGPRARSRVSTAAPHFLGPGPGPSPRLRHGSTMEEADRILIHSLRQAGTAVPPDVQTLRAFTTELVVEAVVRCLRVINPAVGSGLSPLLPLAMSARFRLAMSLAQACMDLGYPLELGYQNFLYPSEPDLRDLLLFLAERLPTDASEDADQPAGDSAILLRAIGSQIRDQLALPWVPPHLRTPKLQHLQGSALQKPFHASRLVVPELSSRGEPREFQASPLLLPVPTQVPQPVGRVASLLEHHALQLCQQTGRDRPGDEDWVHRTSRLPPQEDTRAQRQRLQKQLTEHLRQSWGLLGAPIQARDLGELLQAWGAGAKTGAPKGSRFTHSEKFTFHLEPQAQATQVSDVPATSRRPEQVTWAAQEQELESLREQLEGVNRSIEEVEADMKTLGVSFVQAESECRHSKLSTAEREQALRLKSRAVELLPDGTANLAKLQLVVENSAQRVIHLAGQWEKHRVPLLAEYRHLRKLQDCRELESSRRLAEIQELHQSVRAGGLGPRPLPTDRNPYMG

SEQ ID NO: 738429 - protein, 237 aa, Homo sapiens
LEGPACVTCTHPHQLVVENSAQRVIHLAGQWEKHRVPLLAEYRHLRKLQDCRELESSRRLAEIQELHQSVRAAAEEARRKEEVYKQLMSELETLPRDVSRLAYTQRILEIVGNIRKQKEEITKILSDTKELQKEINSLSGKLDRTFAVTDELVFKDAKKDDAVRKAYKYLAALHENCSQLIQTIEDTGTIMREVRDLEEQIETELGKKTLSNLEKIREDYRALRQENAGLLGRVREA

SEQ ID NO: 738430 - protein, 112 aa, Homo sapiens
RGCRVAALRLSPTHLGETDRRTRVARSTRNNEFLSRSWGTQARGCVQGRGWRGRDPRGSRDGLFKILYLRRSLALSPRLERNGAKSAHCSLDVQDSSDPPASASREGGGPRL

SEQ ID NO: 738431 - protein, 299 aa, Homo sapiens
RGCRVAALRLSPTHLGETDRRTRVARSTRNNEFLSRSWGTQARGCVQGRGWRGRDPRGSRDGLFKILYLRRSLALSPRLERNGAKSAHCSLDVQDSSDPPASASREGGPEGSSPGLTEGNTGLVRDLRPAHQDRSGTREDPAGQETTAITNPSPSLAADLAGDALPGCLGAAAHQGPLLDRSSESTLGPQALELEHCHERGCCRGCASFSPFPAPRCPSERLGAHSSRWAIRGRSKINPPPWAPACLPGFPVSWRTRMRAFHLSLPGGAQLLTYLVKVLKRRTWRRNVDNNPGCLCVPS

SEQ ID NO: 738432 - protein, 336 aa, Homo sapiens
RGCRVAALRLSPTHLGETDRRTRVARSTRNNEFLSRSWGTQARGCVQGRGWRGRDPRGSRDGLFKILYLRRSLALSPRLERNGAKSAHCSLDVQDSSDPPASASREAAQNREDSDKDTHLYKGGSFKRSHSCMGWDCRRTTVENPSPIRNCVNQEWPEGSSPGLTEGNTGLVRDLRPAHQDRSGTREDPAGQETTAITNPSPSLAADLAGDALPGCLGAAAHQGPLLDRSSESTLGPQALELEHCHERGCCRGCASFSPFPAPRCPSERLGAHSSRWAIRGRSKINPPPWAPACLPGGFPACLPAPKSSTDSASSCFKGGREFSDPLDIPGAGAMG

SEQ ID NO: 738433 - protein, 138 aa, Homo sapiens
RGCRVAALRLSPTHLGETDRRTRVARSTRNNEFLSRSWGTQARGCVQGRGWRGRDPRGSRDGLFKILYLRRSLALSPRLERNGAKSAHCSLDVQDSSDPPASASREGVARRLLSRPHRGKHWSSERPASCPSGPKRHA

SEQ ID NO: 738434 - protein, 138 aa, Homo sapiens
WTPGRSAGLVLLLALNAVGGRDWTSPETGGLLPLPATGGPSSQRGLLHDRLKSGNFMKSHPSTAPFPYCISSPAHSERIRPLSVSSGPFGVPHRQDKRGIAFSYRSGKSRHSGGNRDSQRASSHTCALPSSSKPNKAL

SEQ ID NO: 738435 - protein, 321 aa, Homo sapiens
AFPTQHPHSATAGEEGTRPGSQELRNMELIQDISRPPLEYVKGVPLIKYFAEALGPLQSFQARPDDLLISTYPKSGTTWVSQILDMIYQGGDLEKCHRAPIFMRVPFLEFKVPGIPSGMETLKNTPAPRLLKTHLPLALLPQTLLDQKVKVVYVARNAKDVAVSYYHFYHMAKVYPHPGTWESFLEKFMAGEVSYGSWYQHVQEWWELSRTHPVLYLFYEDMKENPKREIQKILEFVGRSLPEETVDLMVEHTSFKEMKKNPMTNYTTVRREFMDHSISPFMRKGMAGDWKTTFTVAQNERFDADYAEKMAGCSLSFRSEL

SEQ ID NO: 738436 - protein, 295 aa, Homo sapiens
MELIQDISRPPLEYVKGVPLIKYFAEALGPLQSFQARPDDLLISTYPKSGTTWVSQILDMIYQGGDLEKCHRAPIFMRVPFLEFKVPGIPSGMETLKNTPAPRLLKTHLPLALLPQTLLDQKVKVVYVARNAKDVAVSYYHFYHMAKVYPHPGTWESFLEKFMAGEVSYGSWYQHVQEWWELSRTHPVLYLFYEDMKENPKREIQKILEFVGRSLPEETVDLMVEHTSFKEMKKNPMTNYTTVRREFMDHSISPFMRKGMAGDWKTTFTVAQNERFDADYAEKMAGCSLSFRSEL

SEQ ID NO: 738437 - protein, 295 aa, Homo sapiens; identical to SEQ ID NO: 738436

SEQ ID NO: 738438 - protein, 323 aa, Homo sapiens
MELIQDISRPPLEYVKGVPLIKYFAEALGPLQSFQARPDDLLISTYPKSGTTWVSQILDMIYQGGDLEKCHRAPIFMRVPFLEFKVPGIPSGVCVLGARGVEEDRAGASAHQTFPDHCSGMETLKNTPAPRLLKTHLPLALLPQTLLDQKVKVVYVARNAKDVAVSYYHFYHMAKVYPHPGTWESFLEKFMAGEVSYGSWYQHVQEWWELSRTHPVLYLFYEDMKENPKREIQKILEFVGRSLPEETVDLMVEHTSFKEMKKNPMTNYTTVRREFMDHSISPFMRKGMAGDWKTTFTVAQNERFDADYAEKMAGCSLSFRSEL

SEQ ID NO: 738439 - protein, 221 aa, Homo sapiens
MELIQDISRPPLEYVKGVPLIKYFAEALGPLQSFQARPDDLLISTYPKSGTTWVSQILDMIYQGGDLEKCHRAPIFMRVPFLEFKVPGIPSGMETLKNTPAPRLLKTHLPLALLPQTLLDQKVKNPKREIQKILEFVGRSLPEETVDLMVEHTSFKEMKKNPMTNYTTVRREFMDHSISPFMRKGMAGDWKTTFTVAQNERFDADYAEKMAGCSLSFRSEL

SEQ ID NO: 738440 - protein, 99 aa, Homo sapiens
EVREVDPFYFPESAIQASTEEPSAAQNPKREIQKILEFVGRSLPEETVDLMVEHTSFKEMKKNPMTNYTTVRREFMDHSISPFMRKGRCRPARGFGAGG

SEQ ID NO: 738441 - protein, 108 aa, Homo sapiens
MQGWAQAGLSPFSQVPRRLLPQTTSQGQHQPSEPAVTALRNICLEAFFPDGEGQYSRTCKSTIPCISPSSRPPVGRPTDRGDEARDTAGGLWTAQPPAPTPRVGLQQP

SEQ ID NO: 738442 - protein, 1822 aa, Homo sapiens
AEGKSKDKGDMEVYIQPGPYVDPFTTVTLGWPDNDKELRFQWSCGSCWALWSSCVERQLLRTDQRELVVPASCLPPPDSAVTLRLAVLRGQELENRAEQCLYVSAPWELRPRVSCERNCRPVNASKDILLRVTMGEDSPVAMFSWYLDNTPTEQAEPLPDACRLRGFWPRSLTLLQSNTSTLLLNSSFLQSRGEVIRIRATALTRHAYGEDTYVISTVPPREVPACTIAPEEGTVLTSFAIFCNASTALGPLEFCFCLESGSCLHCGPEPALPSVYLPLGEENNDFVLTVVISATNRAGDTQQTQAMAKVALGDTCVEDVAFQAAVSEKIPTALQGEGGPEQLLQLAKAVSSMLNQEHESQGSGQSLSIDVRQKVREHVLGSLSAVTTGLEDVQRVQELAEVLREVTCRSKELTPSAQWEASLALQHASEALLTVSAKARPEDQRRQAATRDLFQAVGSVLEASLSNRPEEPAEASSSQIATVLRLLRVMEHVQTTLLLGKLPGGLPAMLATPSISVYTNRYKPAALQVPKKAHPLTWFIPHRHSKALCYGRAQETSLGAREVMGPRAGKGFPPREGPLVTMLSVCTAQEGRHGVPSPVLDPPEGVLRDGHMAAVQARGLNEWDSLLLTMLCMCLTSHCSLGLQGLKILLLLACARTHKHTHTQRAHLSVSTDAIPGMLHTFHSSTCQAGAGQCCWQHWDPLPQASVPPARVSLLDLTDSFPKQYPDSEERSEVGSPTRSERGKVKDQKRWGGVEDMTSEVQVGRGDNPGEKPASKLIYSFNENTDGLPVICQALLLDIGDTVVNQAGKAPPSWSLQSSCLLCCFCCNKHAEPPMGIKTHPHSDGEAGLPVVQEVWGLPRTLTFSSLPCHLCPHLVARIQPWSWQGSSLRPDAADSATFMLPAASSLSSLEGGQEPVDIKIMSFPKSPFPARSHFDVSGTVGGLRVTSPSGQLIPVKNLSENIEILLPRHSQRHSQPTVLNLTSPEALWVNVTSGEATLGIQLHWRPDIALTLSLGYGYHPNKSSYDAQTHLVPMVAPDELPTWILSPQDLRFGEGVYYLTVVPESDLEPAPGRDLTVGITTFLSHCVFWDEVQETWDDSGCQVGPRTSPYQTHCLCNHLTFFGSTFLVMSNAINIHQTAELFATFEDNPVVVTTVGCLCVVYVLVVIWARRKDAQDQAKVKVTVLEDNDPFAQYHYLVTVYTGHRRGAATSSKVTVTLYGLDGEREPHHLADPDTPVFERGAVDAFLLSTLFPLGELRSLRLWHDNSGDRPSWYVSRVLVYDLVMDRKWYFLCNSWLSINVGDCVLDKVFPVATEQDRKQFSHLFFMKTSAGFQDGHIWYSIFSRCARSSFTRVQRVSCCFSLLLCTMLTSIMFWGVPKDPAEQKMDLGKIEFTWQEVMIGLESSILMFPINLLIVQIFQNTRPRVAKEQNTGKWDRGSPNLTPSPQPMEDGLLTPEAVTKDVSRIVSSLFKALKVPSPALGWDSVNLMDINSLLALVEDVIYPQNTSGQVFWEEAKKREDPVTLTLGSSEMKEKSQCPKPKAARSGPWKDSAYRQCLYLQLEHVEQELRLVGPRGFSQPHSHAQALRQLQTLKGGLGVQPGTWAPAHASALQVSKPPQGLPWWCILVGWLLVAATSGVAAFFTMLYGLHYGRASSLRWLISMAVSFVESMFVTQPLKVLGFAAFFALVLKRVDDEEDTVAPLPGHLLGPDPYALFRARRNSSRDVYQPPLTAAIEKMKTTHLKEQKAFALIREILAYLGFLWMLLLVAYGQRDPSAYHLNRHLQHSFTRGFSGVLGFREFFKWANTTLVSNLYGHPPGKS

SEQ ID NO: 738443 - protein, 306 aa, Homo sapiens [sequence omitted]

SEQ ID NO: 738444 - protein, 1635 aa, Homo sapiens
MGEDSPVAMFSWYLDNTPTEQAEPLPDACRLRGFWPRSLTLLQSNTSTLLLNSSFLQSRGEVIRIRATALTRHAYGEDTYVISTVPPREVPACTIAPEEGTVLTSFAIFCNASTALGPLEFCFCLESGSCLHCGPEPALPSVYLPLGEENNDFVLTVVISATNRAGDTQQTQAMAKVALGDTCVEDVAFQAAVSEKIPTALQGEGGPEQLLQLAKAVSSMLNQEHESQGSGQSLSIDVRQKVREHVLGSLSAVTTGLEDVQRVQELAEVLREVTCRSKELTPSAQWEASLALQHASEALLTVSAKARPEDQRRQAATRDLFQAVGSVLEASLSNRPEEPAEASSSQIATVLRLLRVMEHVQTTLLLGKLPGGLPAMLATPSISVYTNRYKPAALQVPKKAHPLTWFIPHRHSKALCYGRAQETSLGAREVMGPRAGKGFPPREGPLVTMLSVCTAQEGRHGVPSPVLDPPEGVLRDGHMAAVQARGLNEWDYLLLTMLCMCLTSHCSLGLQGLKILLLLACARTHKHTHTQRAHLSVSTDAIPGMLHTFHSSTCQAGAGQCCWQHWDPLPQASVPPARVSLLDLTDSFPKQYPDSEERSEVGSPTRSERGKVKDQKRWGGVEDMTSEVQVGRGDNPGEKPASKLIYSFNENTDGLPVICQALLLDIGDTVVNQAGKAPPSWSLQSSCLLCCFCCNKHAEPPMGIKTHPHSDGEAGLPVVQEVWGLPRTLTFSSLPCHLCPHLVARIQPWSWQGSSLRPDAADSATFMLPAASSLSSLEGGQEPVDIKIMSFPKSPFPARSHFDVSGTVGGLRVTSPSGQLIPVKNLSENIEILLPRHSQRHSQPTVLNLTSPEALWVNVTSGEATLGIQLHWRPDIALTLSLGYGYHPNKSSYDAQTHLVPMVAPDELPTWILSPQDLRFGEGVYYLTVVPESDLEPAPGRDLTVGITTFLSHCVFWDEVQETWDDSGCQVGPRTSPYQTHCLCNHLTFFGSTFLVMSNAINIHQTAELFATFEDNPVVVTTVGCLCVVYVLVVIWARRKDAQDQAKVKVTVLEDNDPFAQYHYLVTVYTGHRRGAATSSKVTVTLYGLDGEREPHHLADPDTPVFERGAVDAFLLSTLFPLGELRSLRLWHDNSGDRPSWYVSRVLVYDLVMDRKWYFLCNSWLSINVGDCVLDKVFPVATEQDRKQFSHLFFMKTSAGFQDGHIWYSIFSRCARSSFTRVQRVSCCFSLLLCTMLTSIMFWGVPKDPAEQKMDLGKIEFTWQEVMIGLESSILMFPINLLIVQIFQNTRPRVAKEQNTGKWDRGSPNLTPSPQPMEDGLLTPEAVTKDVSRIVSSLFKALKVPSPALGWDSVNLMDINSLLALVEDVIYPQNTSGQVFWEEAKKREDPVTLTLGSSEMKEKSQCPKPKAARSGPWKDSAYRQCLYLQLEHVEQELRLVGPRGFSQPHSHAYGPQAAADPEGRPGGTAGHLGPCTCQVLGFAAFFALVLKRVDDEEDTVAPLPGHLLGPDPYALFRARRNSSRDVYQPPLTAAIEKMKTTHLKEQKAFALIREILAYLGFLWMLLLVAYGQRDPSAYHLNRHLQHSFTRGFSGVLGFREFFKWANTTLVSNLYGHPPAAAGISQRMPCTIFPGC

SEQ ID NO: 738445 - protein, 1664 aa, Homo sapiens
AALSPPGMQSCERNCRPVNASKDILLRVTMGEDSPVAMFSWYLDNTPTEQAEPLPDACRLRGFWPRSLTLLQSNTSTLLLNSSFLQSRGEVIRIRATALTRHAYGEDTYVISTVPPREVPACTIAPEEGTVLTSFAIFCNASTALGPLEFCFCLESGSCLHCGPEPALPSVYLPLGEENNDFVLTVVISATNRAGDTQQTQAMAKVALGDTCVEDVAFQAAVSEKIPTALQGEGGPEQLLQLAKAVSSMLNQEHESQGSGQSLSIDVRQKVREHVLGSLSAVTTGLEDVQRVQELAEVLREVTCRSKELTPSAQWEASLALQHASEALLTVSAKARPEDQRRQAATRDLFQAVGSVLEASLSNRPEEPAEASSSQIATVLRLLRVMEHVQTTLLLGKLPGGLPAMLATPSISVYTNRYKPAALQVPKKAHPLTWFIPHRHSKALCYGRAQETSLGAREVMGPRAGKGFPPREGPLVTMLSVCTAQEGRHGVPSPVLDPPEGVLRDGHMAAVQARGLNEWDSLLLTMLCMCLTSHCSLGLQGLKILLLLACARTHKHTHTQRAHLSVSTDAIPGMLHTFHSSTCQAGAGQCCWQHWDPLPQASVPPARVSLLDLTDSFPKQYPDSEERSEVGSPTRSERGKVKDQKRWGGVEDMTSEVQVGRGDNPGEKPASKLIYSFNENTDGLPVICQALLLDIGDTVVNQAGKAPPSWSLQSSCLLCCFCCNKHAEPPMGIKTHPHSDGEAGLPVVQEVWGLPRTLTFSSLPCHLCPHLVARIQPWSWQGSSLRPDAADSATFMLPAASSLSSLEGGQEPVDIKIMSFPKSPFPARSHFDVSGTVGGLRVTSPSGQLIPVKNLSENIEILLPRHSQRHSQPTVLNLTSPEALWVNVTSGEATLGIQLHWRPDIALTLSLGYGYHPNKSSYDAQTHLVPMVAPDELPTWILSPQDLRFGEGVYYLTVVPESDLEPAPGRDLTVGITTFLSHCVFWDEVQETWDDSGCQVGPRTSPYQTHCLCNHLTFFGSTFLVMSNAINIHQTAELFATFEDNPVVVTTVGCLCVVYVLVVIWARRKDAQDQAKVKVTVLEDNDPFAQYHYLVTVYTGHRRGAATSSKVTVTLYGLDGEREPHHLADPDTPVFERGAVDAFLLSTLFPLGELRSLRLWHDNSGDRPSWYVSRVLVYDLVMDRKWYFLCNSWLSINVGDCVLDKVFPVATEQDRKQFSHLFFMKTSAGFQDGHIWYSIFSRCARSSFTRVQRVSCCFSLLLCTMLTSIMFWGVPKDPAEQKMDLGKIEFTWQEVMIGLESSILMFPINLLIVQIFQNTRPRVAKEQNTGKWDRGSPNLTPSPQPMEDGLLTPEAVTKDVSRIVSSLFKALKVPSPALGWDSVNLMDINSLLALVEDVIYPQNTSGQVFWEEAKKREDPVTLTLGSSEMKEKSQCPKPKAARSGPWKDSAYRQCLYLQLEHVEQELRLVGPRGFSQPHSHAYGPQAAADPEGRPGGTAGHLGPCTCQVLGFAAFFALVLKRVDDEEDTVAPLPGHLLGPDPYALFRARRNSSRDVYQPPLTAAIEKMKTTHLKEQKAFALIREILAYLGFLWMLLLVAYGQRDPSAYHLNRHLQHSFTRGFSGVLGFREFFKWANTTLVSNLYGHPPAAAGISQRMPCTIFPGC

SEQ ID NO: 738446 - protein, 333 aa, Homo sapiens
MRRLAGRAGHSQVTQDSKFSPKTPSDAERHKGLPRDWLQSLLLSLRGPPAPHCLLLFLREARGRDQPGSGQRDRRGGLPEGRVGAPDLRALQDSPPQAQVEPPQGPPGQEGREPTSFFSSQPRPSPRRGSRGEGEEEEGGGERELVLSLSSALRAEVRHRDMKLEDKFPSRASSGSPSRRKFDTWISRTTNNKKARQRQQLAVSRGAGLRRPGEQRRPRRKYEDSTWRLRAGALLLSPQHLSSQSPAGAPTGSQRGMAATDFVQEMRAVGERLLLKLQRLPQAEPVEIVAFSVIILFTATVLLLLLIACSCCCTHCCCPERRGRKVQVQPTPP

SEQ ID NO: 738447 - protein, 333 aa, Homo sapiens; identical to SEQ ID NO: 738446

SEQ ID NO: 738448 - protein, 34 aa, Homo sapiens
MTLESEREGEAPLDISCGVSSARPIVAARSGVPK

SEQ ID NO: 738449 - protein, 104 aa, Homo sapiens
GCRNRPVKERPPGLQCLLHPRSAVATMGSGLPLVLLLTLLGSSHGTGPGMTLQLKLKESFLTNSSYESSFLELLEKLCLLLHLPSGTSVTLHHARSQHHVVCNT

SEQ ID NO: 738450 - protein, 104 aa, Homo sapiens; identical to SEQ ID NO: 738449

SEQ ID NO: 738451 - protein, 535 aa, Homo sapiens
MGSSATEIEELENTTFKYLTGEQTEKMWQRLKGILRCLVKQLERGDVNVVDLKKNIEYAASVLEAVYIDETRRLLDTEDELSDIQTDSVPSEVRDWLASTFTRKMGMTKKKPEEKPKFRSIVHAVQAGIFVERMYRKTYHMVGLAYPAAVIVTLKDVDKWSFDVFALNEASGEHSLKFMIYELFTRYDLINRFKIPVSCLITFAEALEVGYSKYKNPYHNLIHAADVTQTVHYIMLHTGIMHWLTELEILAMVFAAAIHDYEHTGTTNNFHIQTRSDVAILYNDRSVLENHHVSAAYRLMQEEEMNILINLSKDDWRDLRNLVIEMVLSTDMSGHFQQIKNIRNSLQQPEGIDRAKTMSLILHAADISHPAKSWKLHYRWTMALMEEFFLQGDKEAELGLPFSPLCDRKSTMVAQSQIGFIDFIVEPTFSLLTDSTEKIVIPLIEEASKAETSSYVASSSTTIVGLHIADALRRSNTKGSMSDGSYSPDYSLAAVDLKSFKNNLVDIIQQNKERWKELAAQEARTSSQKCEFIHQ

SEQ ID NO: 738452 - protein, 212 aa, Homo sapiens
MGKKINKLFCFNFLVQCFRGKSKPSKCQIRKKVKNHIERLLDTEDELSDIQTDSVPSEVRDWLASTFTRKMGMTKKKPEEKPKFRSIVHAVQAGIFVERMYRKTYHMVGLAYPAAVIVTLKDVDKWSFDVFALNEASGEHSLKFMIYELFTRYDLINRFKIPVSCLITFAEALEVGYSKYKNPYHNLIHAADVTQTVHYIMLHTGIMVRQSL

SEQ ID NO: 738453 - protein, 247 aa, Homo sapiens
MTLKERLRCLVKQLERGDVNVVDLKKNIEYAASVLEAVYIDETRRLLDTEDELSDIQTDSVPSEVRDWLASTFTRKMGMTKKKPEEKPKFRSIVHAVQAGIFVERMYRKTYHMVGLAYPAAVIVTLKDVDKWSFDVFALNEASGEHSLKFMIYELFTRYDLINRFKIPVSCLITFAEALEVGYSKYKNPYHNLIHAADVTQTVHYIMLHTGIMHWLTELEILAMVFAAAIHDYEHTGTTNNFHIQTR

SEQ ID NO: 738454 - protein, 519 aa, Homo sapiens
MDDHVTIRKKHLQRPIFRLRCLVKQLERGDVNVVDLKKNIEYAASVLEAVYIDETRRLLDTEDELSDIQTDSVPSEVRDWLASTFTRKMGMTKKKPEEKPKFRSIVHAVQAGIFVERMYRKTYHMVGLAYPAAVIVTLKDVDKWSFDVFALNEASGEHSLKFMIYELFTRYDLINRFKIPVSCLITFAEALEVGYSKYKNPYHNLIHAADVTQTVHYIMLHTGIMHWLTELEILAMVFAAAIHDYEHTGTTNNFHIQTRSDVAILYNDRSVLENHHVSAAYRLMQEEEMNILINLSKDDWRDLRNLVIEMVLSTDMSGHFQQIKNIRNSLQQPEGIDRAKTMSLILHAADISHPAKSWKLHYRWTMALMEEFFLQGDKEAELGLPFSPLCDRKSTMVAQSQIGFIDFIVEPTFSLLTDSTEKIVIPLIEEASKAETSSYVASSSTTIVGLHIADALRRSNTKGSMSDGSYSPDYSLAAVDLKSFKNNLVDIIQQNKERWKELAAQEARTSSQKCEFIHQ

SEQ ID NO: 738455 - protein, 519 aa, Homo sapiens; identical to SEQ ID NO: 738454

SEQ ID NO: 738456 - protein, 529 aa, Homo sapiens
MDDHVTIRKKHLQRPIFRLRCLVKQLERGDVNVVDLKKNIEYAASVLEAVYIDETRRLLDTEDELSDIQTDSVPSEVRDWLASTFTRKMGMTKKKPEEKPKFRSIVHAVQAGIFVERMYRKTYHMVGLAYPAAVIVTLKDVDKWSFDVFALNEASGEHSLKFMIYELFTRYDLINRFKIPVSCLITFAEALEVGYSKYKNPYHNLIHAADVTQTVHYIMLHTGIMHWLTELEILAMVFAAAIHDYEHTGTTNNFHIQTRSDVAILYNDRSVLENHHVSAAYRLMQEEEMNILINLSKDDWRDLRNLVIEMVLSTDMSGHFQQIKNIRNSLQQPEGIDRAKTMSLILHAADISHPAKSWKLHYRWTMALMEEFFLQGDKEAELGLPFSPLCDRKSTMVAQSQIGFIDFIVEPTFSLLTDSTEKIVIPLIEEASKAETSSYVASSSTTIVGLHIADALRRSNTKGSMSDGSYSPDYSLAAVDLKSFKNNLVDIIQQNKERWKELAAQGESDLHKNSEDLVNAEEKHDETHS

SEQ ID NO: 738457 - protein, 535 aa, Homo sapiens; identical to SEQ ID NO: 738451

SEQ ID NO: 738458 - protein, 501 aa, Homo sapiens
MGKKINKLFCFNFLVQCFRGKSKPSKCQIRKKVKNHIERLLDTEDELSDIQTDSVPSEVRDWLASTFTRKMGMTKKKPEEKPKFRSIVHAVQAGIFVERMYRKTYHMVGLAYPAAVIVTLKDVDKWSFDVFALNEASGEHSLKFMIYELFTRYDLINRFKIPVSCLITFAEALEVGYSKYKNPYHNLIHAADVTQTVHYIMLHTGIMHWLTELEILAMVFAAAIHDYEHTGTTNNFHIQTRSDVAILYNDRSVLENHHVSAAYRLMQEEEMNILINLSKDDWRDLRNLVIEMVLSTDMSGHFQQIKNIRNSLQQPEGIDRAKTMSLILHAADISHPAKSWKLHYRWTMALMEEFFLQGDKEAELGLPFSPLCDRKSTMVAQSQIGFIDFIVEPTFSLLTDSTEKIVIPLIEEASKAETSSYVASSSTTIVGLHIADALRRSNTKGSMSDGSYSPDYSLAAVDLKSFKNNLVDIIQQNKERWKELAAQEARTSSQKCEFIHQ

SEQ ID NO: 738459 - protein, 535 aa, Homo sapiens; identical to SEQ ID NO: 738451

SEQ ID NO: 738460 - protein, 535 aa, Homo sapiens; identical to SEQ ID NO: 738451

SEQ ID NO: 738461 - protein, 535 aa, Homo sapiens; identical to SEQ ID NO: 738451

SEQ ID NO: 738462 - protein, 537 aa, Homo sapiens
MDDHVTIRKKHLQRPIFRLRCLVKQLERGDVNVVDLKKNIEYAASVLEAVYIDETRRLLDTEDELSDIQTDSVPSEVRDWLASTFTRKMGMTKKKPEEKPKFRSIVHAVQAGIFVERMYRKTYHMVGLAYPAAVIVTLKDVDKWSFDVFALNEASGEHSLKFMIYELFTRYDLINRFKIPVSCLITFAEALEVGYSKYKNPYHNLIHAADVTQTVHYIMLHTGIMHWLTELEILAMVFAAAIHDYEHTGTTNNFHIQTRSDVAILYNDRSVLENHHVSAAYRLMQEEEMNILINLSKDDWRDLRNLVIEMVLSTDMSGHFQQIKNIRNSLQQPEGIDRAKTMSLILHAADISHPAKSWKLHYRWTMALMEEFFLQGDKEAELGLPFSPLCDRKSTMVAQSQIGFIDFIVEPTFSLLTDSTEKIVIPLIEEASKAETSSYVASSSTTIVGLHIADALRRSNTKGSMSDGSYSPDYSLAAVDLKSFKNNLVDIIQQNKERWKELAAQEGSVVYEALLPSLSVFTSPLRVWITSSRFLLL

SEQ ID NO: 738463 - protein, 537 aa, Homo sapiens
MDDHVTIRKKHLQRPIFRLRCLVKQLERGDVNVVDLKKNIEYAASVLEAVYIDETRRLLDTEDELSDIQTDSVPSEVRDWLASTFTRKMGMTKKKPEEKPKFRSIVHAVQAGIFVERMYRKTYHMVGLAYPAAVIVTLKDVDKWSFDVFALNEASGEHSLKFMIYELFTRYDLINRFKIPVSCLITFAEALEVGYSKYKNPYHNLIHAADVTQTVHYIMLHTGIMHWLTELEILAMVFAAAIHDYEHTGTTNNFHIQTRSDVAILYNDRSVLENHHVSAAYRLMQEEEMNILINLSKDDWRDLRNLVIEMVLSTDMSGHFQQIKNIRNSLQQPEGIDRAKTMSLILHAADISHPAKSWKLHYRWTMALMEEFFLQGDKEAELGLPFSPLCDRKSTMVAQSQIGFIDFIVEPTFSLLTDSTEKIVIPLIEEASKAETSSYVASSSTTIVGLHIADALRRSNTKGSMSDGSYSPDYSLAAVDLKSFKNNLVDIIQQNKERWKELAAQGQSWRGRWRSGSNFRQEGHRFLLFLPECPTIF

SEQ ID NO: 738464 - protein, 537 aa, Homo sapiens; identical to SEQ ID NO: 738463

SEQ ID NO: 738465 - protein, 508 aa, Homo sapiens
MDDHVTIRKKHLQRPIFRLRCLVKQLERGDVNVVDLKKNIEYAASVLEAVYIDETRRLLDTEDELSDIQTDSVPSEVRDWLASTFTRKMGMTKKKPEEKPKFRSIVHAVQAGIFVERMYRKTYHMVGLAYPAAVIVTLKDVDKWSFDVFALNEASGEHSLKFMIYELFTRYDLINRFKIPVSCLITFAEALEVGYSKYKNPYHNLIHAADVTQTVHYIMLHTGIMHWLTELEILAMVFAAAIHDYEHTGTTNNFHIQTRSDVAILYNDRSVLENHHVSAAYRLMQEEEMNILINLSKDDWRDLRNLVIEMVLSTDMSGHFQQIKNIRNSLQQPEGIDRAKTMSLILHAADISHPAKSWKLHYRWTMALMEEFFLQGDKEAELGLPFSPLCDRKSTMVAQSQIGFIDFIVEPTFSLLTDSTEKIVIPLIEEASKAETSSYVASSSTTIVGLHIADALRRSNTKGSMSDGSYSPDYSLAAVDLKSFKNNLVDIIQQNKERWKELAAQGYR

SEQ ID NO: 738466 - protein, 268 aa, Homo sapiens
GILFLILRSDVAILYNDRSVLENHHVSAAYRLMQEEEMNILINLSKDDWRDLRNLVIEMVLSTDMSGHFQQIKNIRNSLQQPEGIDRAKTMSLILHAADISHPAKSWKLHYRWTMALMEEFFLQGDKEAELGLPFSPLCDRKSTMVAQSQIGFIDFIVEPTFSLLTDSTEKIVIPLIEEASKAETSSYVASSSTTIVGLHIADALRRSNTKGSMSDGSYSPDYSLAAVDLKSFKNNLVDIIQQNKERWKELAAQEARTSSQKCEFIHQ

SEQ ID NO: 738467 - protein, 71 aa, Homo sapiens
APLIPPQGGCRLWIREREHLGKLDLWGVCCFARFERGRKGIPLTLNSGRSGCDPGSWVECTGLSRAQLVIA

SEQ ID NO: 738468 - protein, 173 aa, Homo sapiens [sequence omitted]

SEQ ID NO: 738469 - protein, 858 aa, Homo sapiens
RRCRWAALALGLLRLCLAQANFAPHFFDNGVGSTNGNMALFSLPEDTPVGSHVYTLNGTDPEGDPISYHISFDPSTRSVFSVDPTFGNITLVEELDREREDEIEAIISISDGLNLVAEKVVILVTDANDEAPRFIQEPYVALVPEDIPAGSIIFKVHAVDRDTGSGGSVTYFLQNLHSPFAVDRHSGVLRLQAGATLDYERSRTHYITVVAKDGGGRLHGADVVFSATTTVTVNVEDVQDMAPVFVGTPYYGYVYEDTLPGSEVLKVVAMDGDRGKPNRILYSLVNGNDGAFEINETSGAISITQSPAQLQREVYELHVQVTEMSPAGSPAAQATVPVTIRIVDLNNHPPTFYGESGPQNRFELSMNEHPPQGEILRGLKITVNDSDQGANAKFNLQLVGPRGIFRVVPQTVLNEAQVTIIVENSAAIDFEKSKVLTFKLLAVEVNTPEKFSSTADVVIQLLDTNDNVPKFDSLYYVARIPENAPGGSSVVAVTAVDPDTGPWGEVKYSTYGTGADLFLIHPSTGLIYTQPWASLDAEATARYNFYVKAEDMEGKYSVAEVFITLLDVNDHPPQFGKSVQKKTMVLGTPVKIEAIDEDAEEPNNLVDYSITHAEPANVFDINSHTGEIWLKNSIRSLDALHNITPGRDCLWSLEVQAKDRGSPSFSTTALLKIDITDAETLSRSPMAAFLIQTKDNPMKAVGVLAGTMATVVAITVLISTATFWRNKKSNKVLPMRRVLRKRPSPAPRTIRIEWLKSKSTKAATKFMLKEKPPNENCNNNSPESSLLPRAPALPPPPSVAPSTGAAQWTVPTVSGSLTPQPTQPPPKPKTMGSPVQSTLISELKQKFEKKSVHNKAYF

SEQ ID NO: 738470 - protein, 858 aa, Homo sapiens; identical to SEQ ID NO: 738469

SEQ ID NO: 738471 - protein, 858 aa, Homo sapiens; identical to SEQ ID NO: 738469

SEQ ID NO: 738472 - protein, 853 aa, Homo sapiens
MALFSLPEDTPVGSHVYTLNGTDPEGDPISYHISFDPSTRSVFSVDPTFGNITLVEELDREREDEIEAIISISDGLNLVAEKVVILVTDANDEAPRFIQEPYVALVPEDIPAGSIIFKVHAVDRDTGSGGSVTYFLQNLHSPFAVDRHSGVLRLQAGATLDYERSRTHYITVVAKDGGGRLHGADVVFSATTTVTVNVEDVQDMAPVFVGTPYYGYVYEDTLPGSEVLKVVAMDGDRGKPNRILYSLVNDFPEAMQDDPVARLPCASLWSCAELQGASPLTGNDGAFEINETSGAISITQSPAQLQREVYELHVQVTEMSPAGSPAAQATVPVTIRIVDLNNHPPTFYGESGPQNRFELSMNEHPPQGEILRGLKITVNDSDQGANAKFNLQLVGPRGIFRVVPQTVLNEAQVTIIVENSAAIDFEKSKVLTFKLLAVEVNTPEKFSSTADVVIQLLDTNDNVPKFDSLYYVARIPENAPGGSSVVAVTAVDPDTGPWGEVKYSTYGTGADLFLIHPSTGLIYTQPWASLDAEATARYNFYVKAEDMEGKYSVAEVFITLLDVNDHPPQFGKSVQKKTMVLGTPVKIEAIDEDAEEPNNLVDYSITHAEPANVFDINSHTGEIWLKNSIRSLDALHNITPGRDCLWSLEVQAKDRGSPSFSTTALLKIDITDAETLSRSPMAAFLIQTKDNPMKAVGVLAGTMATVVAITVLISTATFWRNKKSNKVLPMRRVLRKRPSPAPRTIRIEWLKSKSTKAATKFMLKEKPPNENCNNNSPESSLLPRAPALPPPPSVAPSTGAAQWTVPTVSGSLTPQPTQPPPKPKTMGSPVQSTLISELKQKFEKKSVHNKAYF

SEQ ID NO: 738473 - protein, 307 aa, Homo sapiens
MEGKYSVAEVFITLLDVNDHPPQFGKSVQKKTMVLGTPVKIEAIDEDAEEPNNLVDYSITHAEPANVFDINSHTGEIWLKNSIRSLDALHNITPGRDCLWSLEVQAKDRGSPSFSTTALLKIDITDAETLSRSPMAAFLIQTKDNPMKAVGVLAGTMATVVAITVLISTATFWRNKKSNKVLPMRRVLRKRPSPAPRTIRIEWLKSKSTKAATKFMLKEKPPNENCNNNSPESSLLPRAPALPPPPSVAPSTGAAQWTVPTVSGSLTPQPTQPPPKPKTMGSPVQSTLISELKQKFEKKSVHNKAYF

SEQ ID NO: 738474 - protein, 853 aa, Homo sapiens; identical to SEQ ID NO: 738472

SEQ ID NO: 738475 - protein, 113 aa, Homo sapiens
NSIRSLDALHNITPGRDCLWSLEVQAKDRGSPSFSTTALLKIDITDAEVSTKPWSGKRGQQASSDLSATWAEREGPSPGFLQKTLNVIKGSLCHQTHSLWKRVEFLVQYLLMV

SEQ ID NO: 738476 - protein, 362 aa, Homo sapiens
MSGMWEDQSIEDWYKNQGRILRNHMEEGLSESKEYDKCGKAFSQKENFLSHQKHHTGEKPYECEKVSIQMPTIIRHQKNHTGTKPYACKECGKAFNGKAYLTEHEKIHTGEKPFECNQCGRAFSQKQYLIKHQNIHTGKKPFKCSECGKAFSQKENLIIHQRIHTGEKPYECKGCGKAFIQKSSLIRHQRSHTGEKPYTCKECGKAFSGKSNLTEHEKIHIGEKPYKCNECGTIFRQKQYLIKHHNIHTGEKPYECNKCGKAFSRITSLIVHVGIHTGDKPYECKVCGKAFCQSSSLTVHMRSHTGEKPYGCNECGKAFSQFSTLALHMRIHTGEKPYQCSECGKAFSQKSHHIRHQRIHTH

SEQ ID NO: 738477 - protein, 66 aa, Homo sapiens
GVRRRGISDLPWSSLSAGLLPCISTGAAKPLRVLRALPEFWDAALFPNHNIQVQCHFSAHKFKVST

SEQ ID NO: 738478 - protein, 66 aa, Homo sapiens; identical to SEQ ID NO: 738477

SEQ ID NO: 738479 - protein, 409 aa, Homo sapiens
MLESLQHESDLLQHDQIHTGEKPYECNECRKTFSLKQNLVEHKKMHTGEKSHECTECGKVCSRVSSLTLHLRSHTGKKAYKCNKCGKAFSQKENFLSHQKHHTGEKPYECEKVSIQMPTIIRHQKNHTGTKPYACKECGKAFNGKAYLTEHEKIHTGEKPFECNQCGRAFSQKQYLIKHQNIHTGKKPFKCSECGKAFSQKENLIIHQRIHTGEKPYECKGCGKAFIQKSSLIRHQRSHTGEKPYTCKECGKAFSGKSNLTEHEKIHIGEKPYKCNECGTIFRQKQYLIKHHNIHTGEKPYECNKCGKAFSRITSLIVHVGIHTGDKPYECKVCGKAFCQSSSLTVHMRSHTGEKPYGCNECGKAFSQFSTLALHMRIHTGEKPYQCSECGKAFSQKSHHIRHQRIHTH

SEQ ID NO: 738480 - protein, 409 aa, Homo sapiens; identical to SEQ ID NO: 738479

SEQ ID NO: 738481 - protein, 113 aa, Homo sapiens
MCICRNAPLHLCDTPAHLHTPICIQAQTHSHTFAHTATNLHKQHLYTDTYPFVPIQCTLTHLHTAVLAHTFAHTHLHTCTHTTHLSVQHTYLCAYMHICTCTQQWHTLLYHSP

SEQ ID NO: 738482 - protein, 114 aa, Homo sapiens
VSGPCLQDDKEKKEQWSCQKGPRHVQPIRCTNCARCVPKDKAIKKFVIRNIVEAAAVRDISEASVFDAYVLPKLYVKLHYCVSGAIHSKVVRNRSREFVNIWILIQTSLLTSLW

SEQ ID NO: 738483 - protein, 150 aa, Homo sapiens
MRRGWKMALSGGLRCCRRVLSWVPVLVIVLVVLWSYYAYVFELCLVTVLSPAEKVIYLILYHAIFVFFTWTYWKSIFTLPQQPNQKFHLSYTDKERYENEERPEVQKQMLVDMAKKLPVYTRTGSGAVRFCDRCHLIKPDRCHHCSVCAM

SEQ ID NO: 738484 - protein, 119 aa, Homo sapiens
TDHPSAPTWLVLNAVTQACCARQGALSSAAPQVAKAPREGSRQLDSGVPHSAPSSLAAATLAVPTRRQQACLVDLRAKDAARLEDGSVWGAAVLPPGTVLGASARYCPRRALVLLCLRL

SEQ ID NO: 738485 - protein, 152 aa, Homo sapiens
MRRGWKMALSGGLRCCRRVLSWVPVLVIVLVVLWSYYAYVFELCLVTVLSPAEKVIYLILYHAIFVFFTWTYWKSIFTLPQQPNQKFHLSYTDKERYENEERPEVQKQMLVDMAKKLPVYTRTGSGGQFIQRQLERQLSKYLRKAKSYMFSN

SEQ ID NO: 738486 - protein, 67 aa, Homo sapiens
AEQGAEVFPGGADLWPRVAAQPRVALAAVRHLVLPSLTSPFPSLDAGFLPKSSEPPGVFCLFGNNSS

SEQ ID NO: 738487 - protein, 350 aa, Homo sapiens
MEVPNVKDFQWKRLAPLPSRRVYCSLLETGGQVYAIGGCDDNGVPMDCFEVYSPEADQWTALPRLPTARAGVAVTALGKRIMVIGGVGTNQLPLKVVEMYNIDEGKWKKRSMLREAAMGISVTAKDYRVYAAGGMGLDLRPHNHLQHYDMLKDMWVSLAPMPTPRYAATSFLRGSKIYVLGGRQSKYAVNAFEVFDIETRSWTKFPNIPYKRAFSSFVTLDNHLYSLGGLRQGRLYRQPKFLRTMDVFDMEQGGWLKMERSFFLKKRRADFVAGSLSGRVIVAGGLGNQPTVLETAEAFHPGKNKWEILPAMPTPRCACSSIVVKNCLLAVGGVNQGLSDAVEALCVSDS

SEQ ID NO: 738488 - protein, 242 aa, Homo sapiens
SCCTCELSQGHVWPFFLDYRVYAAGGMGLDLRPHNHLQHYDMLKDMWVSLAPMPTPRYAATSFLRGSKIYVLGGRQSKYAVNAFEVFDIETRSWTKFPNIPYKRAFSSFVTLDNHLYSLGGLRQGRLYRQPKFLRTMDVFDMEQGGWLKMERSFFLKKRRADFVAGSLSGRVIVAGGLGNQPTVLETAEAFHPGKNKWEILPAMPTPRCACSSIVVKNCLLAVGGVNQGLSDAVEALCVSDS

SEQ ID NO: 738489 - protein, 350 aa, Homo sapiens; identical to SEQ ID NO: 738487

SEQ ID NO: 738490 - protein, 350 aa, Homo sapiens; identical to SEQ ID NO: 738487

SEQ ID NO: 738491 - protein, 354 aa, Homo sapiens
DYENPSNLAAGNKYTVIIQVTVNILEENDEKPICTPNSYFLALPVDLKVGTNIQNFKLTCTDLDSSPRSFRYSIGPGNVNNHFTFSPNAGSNVTRLLLTSRFDYAGGFDKIWDYKLLVYVTDGQLDVLTGKKAEALVETGTVTLSIKVIPHPTTIITTTPRPRVTYQVLRKNVYSPSAWYVPFVITLGSILLLGLLVYLVVLLAKAIHRHCPCKTGKNKEPLKLPVETKTAERDVVVETIQMNTIFDGEAIDPVTGETYEFNSKTGARKWKDPLTQMPKWKESSHQGAAPRRVTAGEGMGSLRSANWEEDELSGKAWAEDAGLGSRNEGGKLGNPKNRNPAFMNRAYPKPHPGK

SEQ ID NO: 738492 - protein, 375 aa, Homo sapiens
MDAIHIGMSSTPLVKHTAGAGLKANRPRVMSKSGHSNVRIDKVDGIYLLYLQDLWTTVIDMKWRYKLTLFAATFVMTWFLFGVIYYAIAFIHGDLEPGEPISNHTPCIMKVDSLTGAFLFSLESQTTIGYGVRSITEECPHAIFLLVAQLVITTLIEIFITGTFLAKIARPKKRAETIKFSHCAVITKQNGKLCLVIQVANMRKSLLIQCQLSGKLLQTHVTKEGERILLNQATVKFHVDSSSESPFLILPMTFYHVLDETSPLRDLTPQNLKEKEFELVVLLNATVESTSAVCQSRTSYIPEEIYWGFEFVPVVSLSKNGKYVADFSQFEQIRKSPDCTFYCADSEKQQLEEKYRQEDQRERELRTLLLQQSNV

SEQ ID NO: 738493 - protein, 375 aa, Homo sapiens; identical to SEQ ID NO: 738492

SEQ ID NO: 738494 - protein, 375 aa, Homo sapiens; identical to SEQ ID NO: 738492

SEQ ID NO: 738495 - protein, 375 aa, Homo sapiens; identical to SEQ ID NO: 738492

SEQ ID NO: 738496 - protein, 375 aa, Homo sapiens; identical to SEQ ID NO: 738492

SEQ ID NO: 738497 - protein, 375 aa, Homo sapiens; identical to SEQ ID NO: 738492

SEQ ID NO: 738498 - protein, 127 aa, Homo sapiens
MSKGEFSFHSNKDRFAHSLKQNVAMNIQPLHTYKDVRMIPPTKHTHSHTRTHTHMHTRACTHAHMHTHIRTRKHMHTCTHVHTCTHAHTCTGPGSSSIIMVVISERHLRLRQQVLDKYVHVYLVLVL

SEQ ID NO: 738499 - protein, 236 aa, Homo sapiens
MDAIHIGMSSTPLVKHTAGAGLKANRPRVMSKSGHSNVRIDKVDGIYLLYLQDLWTTVIDMKWRYKLTLFAATFVMTWFLFGVIYYAIAFIHGDLEPGEPISNHTPCIMKVDSLTGAFLFSLESQTTIGYGVRSITEECPHAIFLLVAQLVITTLIEIFITGTFLAKIARPKKRAETIKFSHCAVITKQNGKLCLVIQVANMRKSLLIQCQLSGKLQWNPRFAGITLRVRLAGCKR

SEQ ID NO: 738500 - protein, 474 aa, Homo sapiens
MGTLRPSSPLCWREESSFAAPNSLKGSRLVSGEPGGAVTIQCHYAPSSVNRHQRKYWCRLGPPRWICQTIVSTNQYTHHRYRDRVALTDFPQRGLFVVRLSQLSPDDIGCYLCGIGSENNMLFLSMNLTISAGPASTLPTATPAAGELTMRSYGTASPVANRWTPGTTQTLGQGTAWDTVASTPGTSKTTASAEGRRTPGATRPAAPGTGSWAEGSVKAPAPIPESPPSKSRSMSNTTEGVWEGTRSSVTNRARASKDRREMTTTKADRPREDIEGVRIALDAAKKVLGTIGPPALVSETLAWEILPQATPVSKQQSQGSIGETTPAAGMWTLGTPAADVWITSMEAASGEGSAAGDLDAATGDRGPQATLSQTPAVGPWGPPGKESSVKRATCPGLSTLKEIKVSAVLTQNPHSLLCVSAAQEAERVTLIQMTHFLEVNPQADQLPHVERKMLQDDSLPAGASLTAPERNPGP

SEQ ID NO: 738501 - protein, 558 aa, Homo sapiens
MDGEATVKPGEQRSGEERKRSGLLHAHCGTLPQSHVTSRRAGWKMPLFLILCLLQGSSFALPQKRPHPRWLWEGSLPSRTHLRAMGTLRPSSPLCWREESSFAAPNSLKGSRLVSGEPGGAVTIQCHYAPSSVNRHQRKYWCRLGPPRWICQTIVSTNQYTHHRYRDRVALTDFPQRGLFVVRLSQLSPDDIGCYLCGIGSENNMLFLSMNLTISAGPASTLPTATPAAGELTMRSYGTASPVANRWTPGTTQTLGQGTAWDTVASTPGTSKTTASAEGRRTPGATRPAAPGTGSWAEGSVKAPAPIPESPPSKSRSMSNTTEGVWEGTRSSVTNRARASKDRREMTTTKADRPREDIEGVRIALDAAKKVLGTIGPPALVSETLAWEILPQATPVSKQQSQGSIGETTPAAGMWTLGTPAADVWITSMEAASGEGSAAGDLDAATGDRGPQATLSQTPAVGPWGPPGKESSVKRATCPGLSTLKEIKVSAVLTQNPHSLLCVSAAQEAERVTLIQMTHFLEVNPQADQLPHVERKMLQDDSLPAGASLTAPERNPGP

SEQ ID NO: 738502 - protein, 394 aa, Homo sapiens
MDGEATVKPGEQRSGEERKRSGLLHAHCGTLPQSHVTSRRAGWKMPLFLILCLLQGSSFALPQKRPHPRWLWEGSLPSRTHLRAMGTLRPSSPLCWREESSFAAPNSLKGSRLVSGEPGGAVTIQCHYAPSSVNRHQRKYWCRLGPPRWICQTIVSTNQYTHHRYRDRVALTDFPQRGLFVVRLSQLSPDDIGCYLCGIGSENNMLFLSMNLTISAGPASTLPTATPAAGELTMRSYGTASPVANRWTPGTTQTLGQGTAWDTVASTPGTSKTTASAEGRRTPGATRPAAPGTGSWAEGSVKAPAPIPESPPSKSRSMSNTTEGVWEGTRSSVTNRARASKDRREMTTTKADRPREDIEGVRIALDAAKKVLGTIGPPALVSETLAWEILPQQH

SEQ ID NO: 738503 - protein, 263 aa, Homo sapiens
MALVPGRSKEDGLWTRNSPGSSQHPESPRLPNPLWDRGKIGKVEGHQHIQDFSQKSHLPSIVVESSEVNEESGDLHLPHEELLLLTDGEEEDAEAFFQDQSEEPGWAWSPQDPRSPLRTFNAGLSWGQDQDEEDACWILEDTACLEATNHCPFWDSTGSRVCRSGLWEYSHLLPPNSFEGAEEEAVQTPAGVESGAASEAPGGRGCDRPRADHAAPPQEAGVQCTCQHYTVREEAQKTPPADPACPEREDSHGSGSPFKASQD

SEQ ID NO: 738504 - protein, 138 aa, Homo sapiens
AGVEVRTVNWSGIATMGAPGGKINRPRTELKKKLFKRRRVLNRERRLRHRVVGAVIDQGLITRHHLKKRASSARANITLSGKKRRKLLQQIRLAQKEKTAMEVEAPSKPARTSEPQLKRQKKTKAPQDVEMKDLEDES

SEQ ID NO: 738505 - protein, 138 aa, Homo sapiens; identical to SEQ ID NO: 738504

SEQ ID NO: 738506 - protein, 191 aa, Homo sapiens
SGSGSTDRELEWNRDYGSSGGKDQPAPNGDCVGAATLFPQAFLSPFISHEMGSVRGRGCLVEEAPGRGEPTPSDSHLSPRQELKKKLFKRRRVLNRERRLRHRVVGAVIDQGLITRHHLKKRASSARANITLSGKKRRKLLQQIRLAQKEKTAMEVEAPSKPARTSEPQLKRQKKTKAPQDVEMKDLEDES

SEQ ID NO: 738507 - protein, 191 aa, Homo sapiens; identical to SEQ ID NO: 738506

SEQ ID NO: 738508 - protein, 132 aa, Homo sapiens
MSALVGNIRPGPNCAVVYRMNGVQYAVVVVEYCESCQSERDRLRSGSSNTTTELIRRNHLIKVSPDVTDAIHLLMCRRYINAPRKTSIQTEFGLVPMQHTKPCLRSVNDVTMLHSKFLPGTVVITSGIKRMC

SEQ ID NO: 738509 - protein, 254 aa, Homo sapiens
MALVPGRSKEDGLWTRNSPGSSQHPESPRLPNPLWDRGKIGKVEGHQHIQDFSQKSHLPSIVVESSEVNEESGDLHLPHEELLLLTDGEEEDAEAFFQDQSEEPGWAWSPQDPRSPLRTFNAGLSWGQDQDEEDACWILEDTACLEATNHCPFWDSTGSRVCRSGLWEYSHLLPPNSFEGAEEEAVQTPAGVESGAASEAPGGRGCDRPRADHAAPPQEAGVQCTCQHYTVREEAQKTPPADPACPEREDSHGR

SEQ ID NO: 738510 - protein, 254 aa, Homo sapiens; identical to SEQ ID NO: 738509

SEQ ID NO: 738511 - protein, 371 aa, Homo sapiens
MPGCPCPGCGMAGPRLLFLTALALELLGRAGGSQPALRSRGTATACRLDNKESESWGALLSGERLDTWICSLLGSLMVGLSGVFPLLVIPLEMGTMLRSEAGAWRLKQLLSFALGGLLGNVFLHLLPEAWAYTCSASPGGEGQSLQQQQQLGLWVIAGILTFLALEKMFLDSKEEGTSQAPNKDPTAAAAALNGGHCLAQPAAEPGLGAVVRSIKVSGYLNLLANTIDNFTHGLAVAASFLVSKKIGLLTTMAILLHEIPHEVGDFAILLRAGFDRWSAAKLQLSTALGGLLGAGFAICTQSPKGVVGCSPAAEETAAWVLPFTSGGFLYIALVNVLPDLLEEEDPWRSLQQLLLLCAGIVVMVLFSLFVD

SEQ ID NO: 738512 - protein, 364 aa, Homo sapiens
MPGCPCPGCGMAGPRLLFLTALALELLGRAGGSQPALRSRGTATACRLDNKESESWGALLSGERLDTWICSLLGSLMVGLSGVFPLLVIPLEMGTMLRSEAGAWRLKQLLSFALGGLLGNVFLHLLPEAWAYTCSASPGGEGQSLQQQQQLGLWVIAGILTFLALEKMFLDSKEEGTSQAPNKDPTAAAAALNGGHCLAQPAAEPGLGAVVRSIKVSGYLNLLANTIDNFTHGLAVAASFLVSKKIGLLTTMAILLHEIPHEVGDFAILLRAGFDRWSAAKLQLSTALGGLLGAGFAICTQSPKGVEETAAWVLPFTSGGFLYIALVNVLPDLLEEEDPWRSLQQLLLLCAGIVVMVLFSLFVD

SEQ ID NO: 738513 - protein, 340 aa, Homo sapiens
MPGCPCPGCGMAGPRLLFLTALALELLGRAGGSQPALRSRGTATACRLDNKESESWGALLSGERLDTWICSLLGSLMVGLSGVFPLLVIPLEMGTMLRSEAGAWRLKQLLSFALGGLLGNVFLHLLPEAWAYTCSASPGGEGQSLQQQQQLGLWVIAGILTFLALEKMFLDSKEEGTSQAPNKDPTAAAAALNGGHCLAQPAAEPGLGAVVRSIKVSGYLNLLANTIDNFTHGLAVAASFLVSKKIGLLTTMAILLHEIPHEVGDFAILLRAGFDRWSAAKLQLSTALGGLLGAGFAICTQSPKGVEETAAWVLPFTSGGFLYIALVNVLPDLLEEEDPW

SEQ ID NO: 738514 - protein, 405 aa, Homo sapiens
MPGCPCPGCGMAGPRLLFLTALALELLGRAGGSQPALRSRGTATACRLDNKESESWGALLSGERLDTWICSLLGSLMVGLSGVFPLLVIPLEMGTMLRSEAGAWRLKQLLSFALGGLLGNVFLHLLPEAWAYTCSASPGGEGQSLQQQQQLGLWVIAGILTFLALEKMFLDSKEEGTSQAPNKDPTAAAAALNGGHCLAQPAAEPGLGAVVRSIKVSGYLNLLANTIDNFTHGLAVAASFLVSKKWPTQCPPRASSEQSKPLWNEWAMWGAQPSTQTPQPRLPSLQIGLLTTMAILLHEIPHEVGDFAILLRAGFDRWSAAKLQLSTALGGLLGAGFAICTQSPKGVEETAAWVLPFTSGGFLYIALVNVLPDLLEEEDPWRSLQQLLLLCAGIVVMVLFSLFVD

SEQ ID NO: 738515 - protein, 414 aa, Homo sapiens
MPGCPCPGCGMAGPRLLFLTALALELLGRAGGSQPALRSRGTATACRLDNKESESWGALLSGERLDTWICSLLGSLMVGLSGVFPLLVIPLEMGTMLRSEAGAWRLKQLLSFALGGLLGNVFLHLLPEAWAYTCSASPGGEGQSLQQQQQLGLWVIAGILTFLALEKMFLDSKEEGTSQAPNKDPTAAAAALNGGHCLAQPAAEPGLGAVVRSIKVSGYLNLLANTIDNFTHGLAVAASFLVSKKIGLLTTMAILLHEIPHEVGDFAILLRAGFDRWSAAKLQLSTALGGLLGAGFAICTQSPKGVGTGVAGGCGGWHQQRGTSQRVWLPHCWSPGPGGGEHTQCLGYPVGCSPAAEETAAWVLPFTSGGFLYIALVNVLPDLLEEEDPWRSLQQLLLLCAGIVVMVLFSLFVD

SEQ ID NO: 738516 - protein, 328 aa, Homo sapiens
MPGCPCPGCGMAGPRLLFLTALALELLGRAGGSQPALRSRGTATACRLDNKESESWGALLSGERLDTWICSLLGSLMVGLSGVFPLLVIPLEMGTMLRSEAGAWRLKQLLSFALGGLLGNVFLHLLPEAWAYTCSASPGGEGQSLQQQQQLGLWVIAGILTFLALEKMFLDSKEEGTSQVSGYLNLLANTIDNFTHGLAVAASFLVSKKIGLLTTMAILLHEIPHEVGDFAILLRAGFDRWSAAKLQLSTALGGLLGAGFAICTQSPKGVEETAAWVLPFTSGGFLYIALVNVLPDLLEEEDPWRSLQQLLLLCAGIVVMVLFSLFVD

SEQ ID NO: 738517 - protein, 364 aa, Homo sapiens; identical to SEQ ID NO: 738512

SEQ ID NO: 738518 - protein, 328 aa, Homo sapiens; identical to SEQ ID NO: 738516

SEQ ID NO: 738519 - protein, 377 aa, Homo sapiens
MRPDRCRAAHVRGMPGCPCPGCGMAGPRLLFLTALALELLGRAGGSQPALRSRGTATACRLDNKESESWGALLSGERLDTWICSLLGSLMVGLSGVFPLLVIPLEMGTMLRSEAGAWRLKQLLSFALGGLLGNVFLHLLPEAWAYTCSASPGGEGQSLQQQQQLGLWVIAGILTFLALEKMFLDSKEEGTSQAPNKDPTAAAAALNGGHCLAQPAAEPGLGAVVRSIKVSGYLNLLANTIDNFTHGLAVAASFLVSKKIGLLTTMAILLHEIPHEVGDFAILLRAGFDRWSAAKLQLSTALGGLLGAGFAICTQSPKGVEETAAWVLPFTSGGFLYIALVNVLPDLLEEEDPWRSLQQLLLLCAGIVVMVLFSLFVD

SEQ ID NO: 738520 - protein, 364 aa, Homo sapiens; identical to SEQ ID NO: 738512

SEQ ID NO: 738521 - protein, 364 aa, Homo sapiens; identical to SEQ ID NO: 738512

SEQ ID NO: 738522 - protein, 364 aa, Homo sapiens; identical to SEQ ID NO: 738512

SEQ ID NO: 738523 - protein, 364 aa, Homo sapiens; identical to SEQ ID NO: 738512

SEQ ID NO: 738524 - protein, 364 aa, Homo sapiens; identical to SEQ ID NO: 738512

SEQ ID NO: 738525 - protein, 292 aa, Homo sapiens
MPGCPCPGCGMAGPRLLFLTALALELLGRAGGSQPALRSRGTATACRLDNKESESWGALLSGERLDTWICSLLGSLMVGLSGVFPLLVIPLEMGTMLRSEAGAWRLKQLLSFALGGLLGNVFLHLLPEAWAYTCSASPGGEGQSLQQQQQLGLWVIAGILTFLALEKMFLDSKEEGTSQAPNKDPTAAAAALNGGHCLAQPAAEPGLGAVVRSIKVSGYLNLLANTIDNFTHGLAVAASFLVSKKVRGLGPVGLWRFQWQPCGFHLCLESLLLAPPLPAPSSKALIPHPPCC

SEQ ID NO: 738526 - protein, 78 aa, Homo sapiens
RISTSVRLGSRSLYPVPQGVEETAAWVLPFTSGGFLYIALVNVLPDLLEEEDPWRSLQQLLLLCAGIVVMVLFSLFVD

SEQ ID NO: 738527 - protein, 231 aa, Homo sapiens
MPGCPCPGCGMAGPRLLFLTALALELLGRAGGSQPALRSRGTATACRLDNKESESWGALLSGERLDTWICSLLGSLMVGLSGVFPLLVIPLEMGTMLRSEAGAWRLKQLLSFALGGLLGNVFLHLLPEAWAYTCSASPGGEGQSLQQQQQLGLWVIAGILTFLALEKMFLDSKEEGTSQAPNKDPTAAAAALNGGHCLAQPAAEPGLGAVVRSIKRQRYLNLLPDDDTTWA

SEQ ID NO: 738528 - protein, 238 aa, Homo sapiens
MPGCPCPGCGMAGPRLLFLTALALELLGRAGGSQPALRSRGTATACRLDNKESESWGALLSGERLDTWICSLLGSLMVGLSGVFPLLVIPLEMGTMLRSEAGAWRLKQLLSFALGGLLGNVFLHLLPEAWAYTCSASPGNEATRQGQDSARSGGLVPTPRDGQDDQERDSGFLAGACLGGREGHCPGLWALVPVGVLGPSCPTHPCHCPGALDEIPFQMAPSYGPGLAWPGLAWHCRP

SEQ ID NO: 738529 - protein, 320 aa, Homo sapiens
FNNMLLYCVPKFSLVGSKFTVRTRVGIDGMKIVETQNEEYPHTFQVSGKERTLELQASSAQDKEEWIKALQETIDAFHQRHETFRNAIAKDNDIHSEVSTAELGKRAPRWIRDNEVTMCMKCKEPFNALTRRRHHCRACGYVVCWKCSDYKAQLEYDGGKLSKVCKDCYQIISGFTDSEEKKRKGILEIESAEVSGNSVVCSFLQYMEKSKPWQKAWCVIPKQDPLVLYMYGAPQDVRAQATIPLLGYVVDEMPRSADLPHSFKLTQSKSVHSFAADSEELKQKWLKVILLAVTGETPGGPNEHPATLDDHPEPKKKSEC

SEQ ID NO: 738530 - protein, 144 aa, Homo sapiens
AYYYYKIRGRVDIESAEVSGNSVVCSFLQYMEKSKPWQKAWCVIPKQDPLVLYMYGAPQDVRAQATIPLLGYVVDEMPRSADLPHSFKLTQSKSVHSFAADSEELKQKWLKVILLAVTGETPGGPNEHPATLDDHPEPKKKSEC

SEQ ID NO: 738531 - protein, 304 aa, Homo sapiens
FNNMLLYCVPKFSLVGSKFTVRTRVGIDGMKIVETQNEEYPHTFQVSGKERTLELQASSAQDKEEWIKALQETIDAFHQRHETFRNAIAKDNDIHSEVSTAELGKRAPRWIRDNEVTMCMKCKEPFNALTRRRHHCRACGYVVCWKCSDYKAQLEYDGGKLSKVCKDCYQIISGFTDSEEKKRKGILEIESAEVSGNSVVCSFLQYMEKSKPWQKAWCVIPKQDPLVLYMYGAPQDVRAQATIPLLGYVVDEMPRSADLPHSFKLTQSKSVHSFAADSEELKQKWLKVILLAVTERAERNKIRN

SEQ ID NO: 738532 - protein, 87 aa, Homo sapiens
DSPTLSLVVVGGFTGDAIAVSGLLAHFQVQSMLLTLAVPSGDWLCGAAPQLAPAEFGVWMAAGRADECDFVSFPPAAICLGLYFRCL

SEQ ID NO: 738533 - protein, 104 aa, Homo sapiens
YTRSGIAGSYGNSLIFLGELLSHFPQQLHHFMFPPTVYNNFNFSTSLFLLIVATLMCMRCHLVVWCGLCFNQMLGPLSVLHLGRVRNHLRSVCCLPILKFLVCT

SEQ ID NO: 738534 - protein, 494 aa, Homo sapiens
MDGSGERSLPEPGSQSSAASDDIEIVVNVGGVRQVLYGDLLSQYPETRLAELINCLAGGYDTIFSLCDDYDPGKREFYFDRDPDAFKCVIEVYYFGEVHMKKGICPICFKNEMDFWKVDLKFLDDCCKSHLSEKREELEEIARRVQLILDDLGVDAAEGRWRRCQKCVWKFLEKPESSCPARVVAVLSFLLILVSSVVMCMGTIPELQVLDAEGNRVEHPTLENVETACIGWFTLEYLLRLFSSPNKLHFALSFMNIVDVLAILPFYVSLTLTHLGARMMELTNVQQAVQALRIMRIARIFKLARHSSGLQTLTYALKRSFKELGLLLMYLAVGIFVFSALGYTMEQSHPETLFKSIPQSFWWAIITMTTVGYGDIYPKTTLGKLNAAISFLCGVIAIALPIHPIINNFVRYYNKQRVLETAAKHELELMELNSSSGGEGKTGGSRSDLDNLPPEPAGKEAPSCSSRLKLSHSDTFIPLLTEEKHHRTRLQSCK

SEQ ID NO: 738535 - protein, 396 aa, Homo sapiens
MDGSGERSLPEPGSQSSAASDDIEIVVNVGGVRQVLYGDLLSQYPETRLAELINCLAGGYDTIFSLCDDYDPGKREFYFDRDPDAFKCVIEVYYFGEVHMKKGICPICFKNEMDFWKVDLKFLDDCCKSHLSEKREELEEIARRVQLILDDLGVDAAEGRWRRCQKCVWKFLEKPESSCPARVVAVLSFLLILVSSVVMCMGTIPELQVLDAEGNRVEHPTLENVETACIGWFTLEYLLRLFSSPNKLHFALSFMNIVDVLAILPFYVSLTLTHLGARMMELTNVQQAVQALRIMRIARIFKLARHSSGLQTLTYALKRSFKELGLLLMYLAVGIFVFSALGYTMEQSHPETLFKSIPQSFWWAIITMTTVGYGDIYPKTTLGKLNHHRTRLQSCK

SEQ ID NO: 738536 - protein, 472 aa, Homo sapiens
KFNSILLIHTKKVLYGDLLSQYPETRLAELINCLAGGYDTIFSLCDDYDPGKREFYFDRDPDAFKCVIEVYYFGEVHMKKGICPICFKNEMDFWKVDLKFLDDCCKSHLSEKREELEEIARRVQLILDDLGVDAAEGRWRRCQKCVWKFLEKPESSCPARVVAVLSFLLILVSSVVMCMGTIPELQVLDAEGNRVEHPTLENVETACIGWFTLEYLLRLFSSPNKLHFALSFMNIVDVLAILPFYVSLTLTHLGARMMELTNVQQAVQALRIMRIARIFKLARHSSGLQTLTYALKRSFKELGLLLMYLAVGIFVFSALGYTMEQSHPETLFKSIPQSFWWAIITMTTVGYGDIYPKTTLGKLNAAISFLCGVIAIALPIHPIINNFVRYYNKQRVLETAAKHELELMELNSSSGGEGKTGGSRSDLDNLPPEPAGKEAPSCSSRLKLSHSDTFIPLLTEEKHHRTRLQSCK

SEQ ID NO: 738537 - protein, 304 aa, Homo sapiens
MSSIKHLVYAVIRFLREQSQMDTYTSDEQESLEVAIQCLETVFKISPEDTHLAVSQPLTEMFTSSFCKNDVLPLSNSVPEDVGKADQLKDEGNNHMKEENYAAAVDCYTQAIELDPNNAVYYCNRAAAQSKLGHYTDAIKDCEKAIAIDSKYSKAYGRMGLALTALNKFEEAVTSYQKALDLDPENDSYKSNLKIAEQKLREVSSPTGTGLSFDMASLINNPAFISMAASLMQNPQVQQLMSGMMTNAIGGPAAGVGGLTDLSSLIQAGQQFAQQIQQQNPELIEQLRNHIRSRSFSSSAEEHS

SEQ ID NO: 738538 - protein, 82 aa, Homo sapiens
VFQFQAASLMQNPQVQQLMSGMMTNAIGGPAAGVGGLTDLSSLIQAGQQFAQQIQQQNPELIEQLRNHIRSRSFSSSAEEHS

SEQ ID NO: 738539 - protein, 236 aa, Homo sapiens
TRGSTHASAVPEDVGKADQLKDEGNNHMKEENYAAAVDCYTQAIELDPNNAVYYCNRAAAQSKLGHYTDAIKDCEKAIAIDSKYSKAYGRMGLALTALNKFEEAVTSYQKALDLDPENDSYKSNLKIAEQKLREVSSPTGTGLSFDMASLINNPAFISMAASLMQNPQVQQLMSGMMTNAIGGPAAGVGGLTDLSSLIQAGQQFAQQIQQQNPELIEQLRNHIRSRSFSSSAEEHS

SEQ ID NO: 738540 - protein, 230 aa, Homo sapiens [sequence omitted]

SEQ ID NO: 738541 - protein, 82 aa, Homo sapiens; identical to SEQ ID NO: 738538

SEQ ID NO: 738542 - protein, 133 aa, Homo sapiens
ARTVSQDPVQLDVKYTRDRERLLGHCLWSAGGRLGWELLSWGHLGSRSLMADSRVTLPGQPPFNPGLPPGGVVTWLSVFRPQKNSHDVRIGCSQIWGVPRSQEVQQNWWGAGTFSSTSHSLFLLITPTKIFSL

SEQ ID NO: 738543 - protein, 301 aa, Homo sapiens
EKEKIPFILEGSLKAWKEEQHRLAEEERLREEKKAEKKGKEAGKKKGKDNAEKEDSRSLKKKSPYKEKSKEEQVKIQEVTEESPHQPEPKITYPFHGYNMGNIPTQISGSNYYLYPSDGGQIEVEKTMFEKGPTFIKVRVVKDNHNFMIHLNDPKEIVKKEEKGDYYLEEEEEGDEEQSLETEVSDAKNKAFSKFGSFSATLENGICLSISYYGSNGMAPEDKDPDLETILNIPSALTPTVVPVIVTVPQSKAKGKIKGKEKPKESLKEEEHPKEEEKKVNEPCHRFPNSVSASVLTFLKP

SEQ ID NO: 738544 - protein, 299 aa, Homo sapiens
EKEKIPFILEGSLKAWKEEQHRLAEEERLREEKKAEKKGKEAGKKKGKDNAEKEDSRSLKKKSPYKEKSKEEQVKIQEVTEESPHQPEPKITYPFHGYNMGNIPTQISGSNYYLYPSDGGQIEVEKTMFEKGPTFIKVRVVKDNHNFMIHLNDPKEIVKKEEKGDYYLEEEEEGDEEQSLETEVSDAKNKAFSKFGSFSATLENGICLSISYYGSNGMAPEDKDPDLETILNIPSALTPTVVPVIVTVPQSKAKGKIKGKEKPKESLKEEEHPKEEEKKEEEVEPEPVLQETLDVPTFQ

SEQ ID NO: 738545 - protein, 73 aa, Homo sapiens
RVLAVVFFPGILLCVGFVGFFHKHILCLVFKTYTCSTAIYSPFIPTLFNVTPHTCISPCTDPLLAPACKSALF

SEQ ID NO: 738546 - protein, 120 aa, Homo sapiens [sequence omitted]

SEQ ID NO: 738547 - protein, 1023 aa, Homo sapiens
MWDQRLVKLALLQHLRAFYGIKVKGVRGQCDRRRHETAATEIGGKIFGVPFNALPHSAVPEYGHIPSFLVDACTSLEEHIHTEGLFRKSGSVIRLKALKNKVDHGEGCLSSAPPCDIAGLLKQFFRELPEPILPADLHEALLKAQQLGTEEKNKAILLLSCLLADHTVHVLRYFFNFLRNVSLRSSENKMDSSNLAVIFAPNLLQTSEGHEKMSSNAEKKVRLQAAVVQTLIDYASDIGRVPDFILEKIPAMLGIDGLCATPSLEGFEEGEYETPGEYKRKRRQSVGDFVSGALNKFKPNRTPSITPQEERIAQLSESPVILTPNAKRTLPVDSSHGFSSKKRKSIKHNFNFELLPSNLFNSSSTPVSVHIDTSSEGSSQSSLSPVLIGGNHLITAGVPRRSKRIAGKKVCRVESGKAGCFSPKISHKEKVRRSLRLKFNLGKNGREVNGCSGVNRYESVGWRLANQQSLKNRIESVKTGLLFSPDVDEKLPKKGSEKISKSEETLLTPERLVGTNYRMSWTGPNNSSFQEVDANEASSMVENLEVENSLEPDIMVEKSPATSCELTPSNLNNKHNSNITSSPLSGDENNMTKETLVKVQKAFSESGSNLHALMNQRQSSVTNVGKVKLTEPSYLEDSPEENLFETNDLTIVESKEKYEHHTGKGEKCFSERDFSPLQTQTFNRETTIKCYSTQMKMEHEKDIHSNMPKDYLSKQEFSSDEEIKKQQSPKDKLNNKLKENENMMEGNLPKCAAHSKDEARSSFSQQSTCVVTNLSKPRPMRIAKQQSLETCEKTVSESSQMTEHRKVSDHIQWFNKLSLNEPNRIKVKSPLKFQRTPVRQSVRRINSLLEYSRQPTGHKLASLGDTASPLVKSVSCDGALSSCIESASKDSSVSCIKSGPKEQKSMSCEESNIGAISKSSMELPSKSFLKMRKHPDSVNASLRSTTVYKQKILSDGQVKVPLDDLTNHDIVKPVVNNNMGISSGINNRVLRRPSERGRAWYKGSPKHPIGKTQLLPTSKPVDL

SEQ ID NO: 738548 - protein, 772 aa, Homo sapiens [sequence omitted]

SEQ ID NO: 738549 - protein, 241 aa, Homo sapiens
MWDQRLVKLALLQHLRAFYGIKVKGVRGQCDRRRHETAATEIGGKIFGVPFNALPHSAVPEYGHIPSFLVDACTSLEEHIHTEGLFRKSGSVIRLKALKNKVDHGEGCLSSAPPCDIAGLLKQFFRELPEPILPADLHEALLKAQQLGTEEKNKAILLLSCLLADHTVHVLRYFFNFLRNVSLRSSENKMDSSNLAVIFAPNLLQTSEGHEKMSSNAEKKVRLQAAVVQTLIDYASDIGKM

SEQ ID NO: 738550 - protein, 772 aa, Homo sapiens [sequence omitted]

SEQ ID NO: 738551 - protein, 772 aa, Homo sapiens [sequence omitted]

SEQ ID NO: 738552 - protein, 1007 aa, Homo sapiens
SDSRARKRTGISCLLHFLKYCEWSEAQGKIFGVPFNALPHSAVPEYGHIPSFLVDACTSLEEHIHTEGLFRKSGSVIRLKALKNKVDHGEGCLSSAPPCDIAGLLKQFFRELPEPILPADLHEALLKAQQLGTEEKNKAILLLSCLLADHTVHVLRYFFNFLRNVSLRSSENKMDSSNLAVIFAPNLLQTSEGHEKMSSNAEKKVRLQAAVVQTLIDYASDIGRVPDFILEKIPAMLGIDGLCATPSLEGFEEGEYETPGEYKRKRRQSVGDFVSGALNKFKPNRTPSITPQEERIAQLSESPVILTPNAKRTLPVDSSHGFSSKKRKSIKHNFNFELLPSNLFNSSSTPVSVHIDTSSEGSSQSSLSPVLIGGNHLITAGVPRRSKRIAGKKVCRVESGKAGCFSPKISHKEKVRRSLRLKFNLGKNGREVNGCSGVNRYESVGWRLANQQSLKNRIESVKTGLLFSPDVDEKLPKKGSEKISKSEETLLTPERLVGTNYRMSWTGPNNSSFQEVDANEASSMVENLEVENSLEPDIMVEKSPATSCELTPSNLNNKHNSNITSSPLSGDENNMTKETLVKVQKAFSESGSNLHALMNQRQSSVTNVGKVKLTEPSYLEDSPEENLFETNDLTIVESKEKYEHHTGKGEKCFSERDFSPLQTQTFNRETTIKCYSTQMKMEHEKDIHSNMPKDYLSKQEFSSDEEIKKQQSPKDKLNNKLKENENMMEGNLPKCAAHSKDEARSSFSQQSTCVVTNLSKPRPMRIAKQQSLETCEKTVSESSQMTEHRKVSDHIQWFNKLSLNEPNRIKVKSPLKFQRTPVRQSVRRINSLLEYSRQPTGHKLASLGDTASPLVKSVSCDGALSSCIESASKDSSVSCIKSGPKEQKSMSCEESNIGAISKSSMELPSKSFLKMRKHPDSVNASLRSTTVYKQKILSDGQVKVPLDDLTNHDIVKPVVNNNMGISSGINNRVLRRPSERGRAWYKGSPKHPIGKTQLLPTSKPVDL

SEQ ID NO: 738553 - protein, 123 aa, Homo sapiens
RSTGALPCGFERLLAHRVSGIQPCFLPPPFLAVPDASPEIYHIKEVHCQIQQETQVIGNNLAAEALVSLRNMRALVLGLQTAPEAPFLSEVLLTWPGRVAHGYSPSYWEAMVGGSFEARSLRL

SEQ ID NO: 738554 - protein, 76 aa, Homo sapiens
RACAPPAARRPPRLGVRRFHLVMVSVRLSNGGYGYVEDSWGCRTPRGYCRAPGGRGRRWGGGGLPRPQKPHSQKRF

SEQ ID NO: 738555 - protein, 68 aa, Homo sapiens
TAQRVQRTPLAKADLPGLGGGERKTEVETTCPAENYPQAYSNHFSVELIPSVHTKGANPSCIPPTDTG

SEQ ID NO: 738556 - protein, 264 aa, Homo sapiens [sequence omitted]

SEQ ID NO: 738557 - protein, 309 aa, Homo sapiens
MAVGKNKRLTKGGKKGAKKKVVDPFSKKDWYDVKAPAMFNIRNIGKTLVTRTQGTKIASDGLKGSLLFDTLSSLACTLRRTPDVTRSATFSRTDIFTRLDSTLTRLVSTRPTETLWPWNLSLSPLRQWALVYPAARTHWCSHSAHPHTTHWADATDLALCTGLHDLQCSQNLTGLRSPCFVCSVLVLLKNATIRYGRPLMLSTNRSAKSGKKMMEIMTREVQTNDLKEVVNKLIPDSIGKDIEKACQSIYPLHDVFVRKVKMLKKPKFELGKLMELHGEGSSSGKATGDETGAKVERADGYEPPVQESV

SEQ ID NO: 738558 - protein, 117 aa, Homo sapiens
MNQEDRQTHTHTHTPHQDESALYSPHLKPVVSVTTAEGLSSVLVLLNPIPVVAEAASSAQSPTEGFLSPFGIRSGFTTHSLHVPLFLSLAHFPSVYWRQDWQEHRHSAEHAPARPQC

SEQ ID NO: 738559 - protein, 111 aa, Homo sapiens
NSPVSASRVAGITGVCHHAQLIFVFFVKTGLRHVGQAGLKFLTLGDPPALASQSAGITGISHHARPYHKFAIENYIHVRHLSAFFVCFNVNKSLGILINILAILEIFDTFM

SEQ ID NO: 738560 - protein, 191 aa, Homo sapiens
MSLYPSLEDLKVDKVIQAQTAFSANPANPAILSEASAPIPHDGNLYPRLYPELSQYMGLSLNEEEIRANVAVVSGAPLQGQLVARPSSINYMVAPVTGNDVGIRRAEIKQGIREVILCKDQDGKIGLRLKSIDNGIFVQLVQANSPASLVGLRFGDQVLQINGENCAGWSSDKAHKVLKTGFWREDYHDHS

SEQ ID NO: 738561 - protein, 191 aa, Homo sapiens; identical to SEQ ID NO: 738560

SEQ ID NO: 738562 - protein, 191 aa, Homo sapiens; identical to SEQ ID NO: 738560

SEQ ID NO: 738563 - protein, 177 aa, Homo sapiens
MSLYPSLEDLKVDKVIQAQTAFSANPANPAILSEASAPIPHDGNLYPRLYPELSQYMGLSLNEEEIRANVAVVSGAPLQGQLVARPSSINYMVAPVTGNDVGIRRAEIKQGIREVILCKDQDLYRLTFQTNWKDLTINHQFLHLKGAYLASRYLFQAHTVLTQFPSTNLNLAHCHKP

SEQ ID NO: 738564 - protein, 124 aa, Homo sapiens
MSLYPSLEDLKVDKVIQAQTAFSANPANPAILSEASAPIPHDGNLYPRLYPELSQYMGLSLNEEEIRANVAVVSGAPLQGQLVARPSSINYMVAPVTGNDVGIRRAEIKQGIREVILCKDQDQA

SEQ ID NO: 738565 - protein, 191 aa, Homo sapiens; identical to SEQ ID NO: 738560

SEQ ID NO: 738566 - protein, 191 aa, Homo sapiens; identical to SEQ ID NO: 738560

SEQ ID NO: 738567 - protein, 191 aa, Homo sapiens; identical to SEQ ID NO: 738560

SEQ ID NO: 738568 - protein, 191 aa, Homo sapiens; identical to SEQ ID NO: 738560

SEQ ID NO: 738569 - protein, 191 aa, Homo sapiens; identical to SEQ ID NO: 738560

SEQ ID NO: 738570 - protein, 191 aa, Homo sapiens; identical to SEQ ID NO: 738560

SEQ ID NO: 738571 - protein, 191 aa, Homo sapiens; identical to SEQ ID NO: 738560

SEQ ID NO: 738572 - protein, 203 aa, Homo sapiens
LQEFGTLKNPAKMSLYPSLEDLKVDKVIQAQTAFSANPANPAILSEASAPIPHDGNLYPRLYPELSQYMGLSLNEEEIRANVAVVSGAPLQGQLVARPSSINYMVAPVTGNDVGIRRAEIKQGIREVILCKDQDGKIGLRLKSIDNGIFVQLVQANSPASLVGLRFGDQVLQINGENCAGWSSDKAHKVLKTGFWREDYHDHS

SEQ ID NO: 738573 - protein, 212 aa, Homo sapiens
MIKLWTNRDLHIIVMVKNPAKMSLYPSLEDLKVDKVIQAQTAFSANPANPAILSEASAPIPHDGNLYPRLYPELSQYMGLSLNEEEIRANVAVVSGAPLQGQLVARPSSINYMVAPVTGNDVGIRRAEIKQGIREVILCKDQDGKIGLRLKSIDNGIFVQLVQANSPASLVGLRFGDQVLQINGENCAGWSSDKAHKVLKTGFWREDYHDHS

SEQ ID NO: 738574 - protein, 135 aa, Homo sapiens
MGLSLNEEEIRANVAVVSGAPLQGQLVARPSSINYMVAPVTGNDVGIRRAEIKQGIREVILCKDQDGKIGLRLKSIDNGIFVQLVQANSPASLVGLRFGDQVLQINGENCAGWSSDKAHKVLKTGFWREDYHDHS

SEQ ID NO: 738575 - protein, 167 aa, Homo sapiens
GRVGRPTRSRSFCPIPHDGNLYPRLYPELSQYMGLSLNEEEIRANVAVVSGAPLQGQLVARPSSINYMVAPVTGNDVGIRRAEIKQGIREVILCKDQDGKIGLRLKSIDNGIFVQLVQANSPASLVGLRFGDQVLQINGENCAGWSSDKAHKVLKTGFWREDYHDHS

SEQ ID NO: 738576 - protein, 191 aa, Homo sapiens; identical to SEQ ID NO: 738560

SEQ ID NO: 738577 - protein, 173 aa, Homo sapiens
MSLYPSLEDLKVDKVIQAQTAFSANPANPAILSEASAPIPHDGNLYPRLYPELSQYMGLSLNEEEIRANVAVVSGAPLQGQLVARPSSINYMVAPVTGNDVGIRRAEIKQGIREVILCKDQDGKIGLRLKSIDNGIFVQLVQANSPASLVGLRFGDQVLQINGFWREDYHDHS

SEQ ID NO: 738578 - protein, 191 aa, Homo sapiens; identical to SEQ ID NO: 738560

SEQ ID NO: 738579 - protein, 158 aa, Homo sapiens
MIKLWTNRDLHIIVMVKNPAKMSLYPSLEDLKVDKVIQAQTAFSANPANPAILSEASAPIPHDGNLYPRLYPELSQYMGLSLNEEEIRANVAVVSGAPLQGGIFVQLVQANSPASLVGLRFGDQVLQINGENCAGWSSDKAHKVLKTGFWREDYHDHS

SEQ ID NO: 738580 - protein, 93 aa, Homo sapiens
MSLYPSLEDLKVDKVIQAQTAFSANPANPAILSEASAPIPHDGNLYPRLYPELSQYMGLSLNEEEIRANVAVVSGAPLQGLGSKTSDDNVLLT

SEQ ID NO: 738581 - protein, 254 aa, Homo sapiens
LGHFRRVRLASARCTMAALKSWLSRSVTSFFRYRQCLCVPVVANFKKRCFSELIRPWHKTVTIGFGVTLCAVPIAQKSEPHSLSSEALMRRAVSLVTDSTSTFLSQTTYALIEAITEYTKAVYTLTSLYRQYTSLLGKMNSEEEDEVWQVIIGARAEMTSKHQEYLKLETTWMTAVGLSEMAAEAAYQTGADQASITARNHIQLVKLQVEEVHQLSRKAETKLAEAQIEELRQKTQEEGEERAESEQEAYLRED

SEQ ID NO: 738582 - protein, 253 aa, Homo sapiens
APGWYGPELWDRCTMAALKSWLSRSVTSFFRYRQCLCVPVVANFKKRCFSELIRPWHKTVTIGFGVTLCAVPIAQKSEPHSLSSEALMRRAVSLVTDSTSTFLSQTTYALIEAITEYTKAVYTLTSLYRQYTSLLGKMNSEEEDEVWQVIIGARAEMTSKHQEYLKLETTWMTAVGLSEMAAEAAYQTGADQASITARNHIQLVKLQVEEVHQLSRKAETKLAEAQIEELRQKTQEEGEERAESEQEAYLRED

SEQ ID NO: 738583 - protein, 102 aa, Homo sapiens
APGWYGPELWDRCTMAALKSWLSRSVTSFFRYRCGRVEGTGPEGGTDADSAVARPTAPAFLTRSSLVRPAGSRRLAPVGRTEDSPASAPWVKPGFLFSSSIF

SEQ ID NO: 738584 - protein, 312 aa, Homo sapiens
APGWYGPELWDRCTMAALKSWLSRSVTSFFRYRCGRVEGTGPEGGTDADSAVARPTAPPSLRAHLSSAQLGRGVSLRSGGLRTAPPPPPGYRQCLCVPVVANFKKRCFSELIRPWHKTVTIGFGVTLCAVPIAQKSEPHSLSSEALMRRAVSLVTDSTSTFLSQTTYALIEAITEYTKAVYTLTSLYRQYTSLLGKMNSEEEDEVWQVIIGARAEMTSKHQEYLKLETTWMTAVGLSEMAAEAAYQTGADQASITARNHIQLVKLQVEEVHQLSRKAETKLAEAQIEELRQKTQEEGEERAESEQEAYLRED

SEQ ID NO: 738585 - protein, 166 aa, Homo sapiens
MRRAVSLVTDSTSTFLSQTTYALIEAITEYTKAVYTLTSLYRQYTSLLGKMNSEEEDEVWQVIIGARAEMTSKHQEYLKLETTWMTAVGLSEMAAEAAYQTGADQASITARNHIQLVKLQVEEVHQLSRKAETKLAEAQIEELRQKTQEEGEERAESEQEAYLRED

SEQ ID NO: 738586 - protein, 186 aa, Homo sapiens
MKSDFYFQKSEPHSLSSEALMRRAVSLVTDSTSTFLSQTTYALIEAITEYTKAVYTLTSLYRQYTSLLGKMNSEEEDEVWQVIIGARAEMTSKHQEYLKLETTWMTAVGLSEMAAEAAYQTGADQASITARNHIQLVKLQVEEVHQLSRKAETKLAEAQIEELRQKTQEEGEERAESEQEAYLRED

SEQ ID NO: 738587 - protein, 224 aa, Homo sapiens [sequence omitted]

SEQ ID NO: 738588 - protein, 166 aa, Homo sapiens; identical to SEQ ID NO: 738585

SEQ ID NO: 738589 - protein, 166 aa, Homo sapiens; identical to SEQ ID NO: 738585

SEQ ID NO: 738590 - protein, 210 aa, Homo sapiens
AGSLPACASGVRALHNGGSEELAVAQRNFILQKSEPHSLSSEALMRRAVSLVTDSTSTFLSQTTYALIEAITEYTKAVYTLTSLYRQYTSLLGKMNSEEEDEVWQVIIGARAEMTSKHQEYLKLETTWMTAVGLSEMAAEAAYQTGADQASITARNHIQLVKLQVEEVHQLSRKAETKLAEAQIEELRQKTQEEGEERAESEQEAYLRED

SEQ ID NO: 738591 - protein, 166 aa, Homo sapiens; identical to SEQ ID NO: 738585

SEQ ID NO: 738592 - protein, 237 aa, Homo sapiens
RSVAPIFRVQSKVRVSLVGGQPLEGERMYHQDMSNQHWRPNSGTYRLRSKPCVRFLCIRKSEPHSLSSEALMRRAVSLVTDSTSTFLSQTTYALIEAITEYTKAVYTLTSLYRQYTSLLGKMNSEEEDEVWQVIIGARAEMTSKHQEYLKLETTWMTAVGLSEMAAEAAYQTGADQASITARNHIQLVKLQVEEVHQLSRKAETKLAEAQIEELRQKTQEEGEERAESEQEAYLRED

SEQ ID NO: 738593 - protein, 210 aa, Homo sapiens
LGHFRRVRLASARCTMAALKSWLSRSVTSFFRYRQCLCVPVVANFKKRCFSELIRPWHKTVTIGFGVTLCAVPIAQAVYTLTSLYRQYTSLLGKMNSEEEDEVWQVIIGARAEMTSKHQEYLKLETTWMTAVGLSEMAAEAAYQTGADQASITARNHIQLVKLQVEEVHQLSRKAETKLAEAQIEELRQKTQEEGEERAESEQEAYLRED

SEQ ID NO: 738594 - protein, 308 aa, Homo sapiens
LGHFRRVRLASARCTMAALKSWLSRSVTSFFRYRQCLCVPVVANFKKRCFSELIRPWHKTVTIGFGVTLCAVPIAQKSEPHSLSSEALMRRAVSLVTDSTSTFLSQTTYALIEAITEYTKAVYTLTSLYRQYTSLLGKMNSEEEDEVWQVIIGARAEMTSKHQEYLKLETTWMTAVGLSEMAAEAAYQTEVFSSKLEEEDACHSPLPVNIVLKVLVNAVRSKCSTDELIKCIYPDGEIHYLAAGADQASITARNHIQLVKLQVEEVHQLSRKAETKLAEAQIEELRQKTQEEGEERAESEQEAYLRED

SEQ ID NO: 738595 - protein, 99 aa, Homo sapiens
TAWVDPRVRYLKLETTWMTAVGLSEMAAEAAYQTGADQASITARNHIQLVKLQVEEVHQLSRKAETKLAEAQIEELRQKTQEEGEERAESEQEAYLRED

SEQ ID NO: 738596 - protein, 1438 aa, Homo sapiens
RLREASPCDFREETSLRSVVAARPQTLCALSPAPAAQPSPVRPAETMDTEDDPLLQDVWLEEEQEEEEATGETFLGAQKPGPQPGAGGQCCWRHWPLASRPPASGFWSTLGWAFTNPCCAGLVLFLGCSIPMALSAFMFLYYPPLDIDISYNAFEIRNHEASQRFDALTLALKSQFGSWGRNRRDLADFTSETLQRLISEQLQQLHLGNRSRQASRAPRVIPAASLGSPGPYRDTSAAQKPTANRSGRLRRETPPLEDLAANQSEDPRNQRLSKNGRYQPSIPPHAAVAANQSRARRGASRWDYSRAYVSANTQTHAHWRIELIFLARGDAERNIFTSERLVTIHEIERKIMDHPGFREFCWKPHEVLKDLPLGSYSYCSPPSSLMTYFFPTERGGKIYYDGMGQDLADIRGSLELAMTHPEFYWYVDEGLSADNLKSSLLRSEILFGAPLPNYYSVDDRWEEQRAKFQSFVVTYVAMLAKQSTSKVQVLYGGTDLFDYEVRRTFNNDMLLAFISSSCIAALVYILTSCSVFLSFFGIASIGLSCLVALFLYHVVFGIQYLGILNGVAAFVIVGIGVDDVFVFINTYRQATHLEDPQLRMIHTVQTAGKATFFTSLTTAAAYAANVFSQIPAVHDFGLFMSLIVSCCWLAVLVTMPAALGLWSLYLAPLESSCQTSCHQNCSRKTSLHFPGDVFAAPEQVGGSPAQGPIPYLDDDIPLLEVEEEPVSLELGDVSLVSVSPEGLQPASNTGSRGHLIVQLQELLHHWVLWSAVKSRWVIVGLFVSILILSLVFASRLRPASRAPLLFRPDTNIQVLLDLKYNLSAEGISCITCSGLFQEKPHSLQNNIRTSLEKKRRGSGVPWASRPEATLQDFPGTVYISKVKSQGHPAVYRLSLNASLPAPWQAVSPGDGEVPSFQVYRAPFGNFTKKLTACMSTVGLLQAASPSRKWMLTTLACDAKRGWKFDFSFYVATKEQQHTRKLYFAQSHKPPFHGRVCMAPPGCLLSSSPDGPTKGFFFVPSEKVPKARLSATFGFNPCVNTGCGKPAVRPLVDTGAMVFVVFGIIGVNRTRQVDNHVIGDPGSVVYDSSFDLFKEIGHLCHLCKAIAANSELVKPGGAQCLPSGYSISSFLQMLHPECKELPEPNLLPGQLSHGAVGVREGRVQWISMAFESTTYKGKSSFQTYSDYLRWESFLQQQLQALPEGSVLRRGFQTCEHWKQIFMEIVGVQSALCGLVLSLLICVAAVAVFTTHILLLLPVLLSILGIVCLVVTIMYWSGWEMGAVEAISLSILVGSSVDYCVHLVEGYLLAGENLPPHQAEDARTQRQWRTLEAVRHVGVAIVSSALTTVIATVPLFFCIIAPFAKFGKIVALNTGVSILYTLTVSTALLGIMAPSSFTRTRTSFLKALGAVLLAGALGLGACLVLLQSGYKIPLPAGASL

SEQ ID NO: 738597 - protein, 278 aa, Homo sapiens
MSRYLKNLLEQTTYKGKSSFQTYSDYLRWESFLQQQLQALPEGSVLRRGFQTCEHWKQIFMEIVGVQSALCGLVLSLLICVAAVAVFTTHILLLLPVLLSILGIVCLVVTIMYWSGWEMGAVEAISLSILVGSSVDYCVHLVEGYLLAGENLPPHQAEDARTQRQWRTLEAVRHVGVAIVSSALTTVIATVPLFFCIIAPFAKFGKIVALNTGVSILYTLTVSTALLGIMAPSSFTRTRTSFLKALGAVLLAGALGLGACLVLLQSGYKIPLPAGASL

SEQ ID NO: 738598 - protein, 979 aa, Homo sapiens
RLREASPCDFREETSLRSVVAARPQTLCALSPAPAAQPSPVRPAETMDTEDDPLLQDVWLEEEQEEEEATGETFLGAQKPGPQPGAGGQCCWRHWPLASRPPASGFWSTLGWAFTNPCCAGLVLFLGCSIPMALSAFMFLYYPPLDIDISYNAFEIRNHEASQRFDALTLALKSQFGSWGRNRRDLADFTSETLQRLISEQLQQLHLGNRSRQASRAPRVIPAASLGSPGPYRDTSAAQKPTANRSGRLRRETPPLEDLAANQSEDPRNQRLSKNGRYQPSIPPHAAVAANQSRARRGASRWDYSRAYVSANTQTHAHWRIELIFLARGDAERNIFTSERLVTIHEIERKIMDHPGFREFCWKPHEVLKDLPLGSYSYCSPPSSLMTYFFPTERGGKIYYDGMGQDLADIRGSLELAMTHPEFYWYVDEGLSADNLKSSLLRSEILFGAPLPNYYSVDDRWEEQRAKFQSFVVTYVAMLAKQSTSKVQVLYGGTDLFDYEVRRTFNNDMLLAFISSSCIAALVYILTSCSVFLSFFGIASIGLSCLVALFLYHVVFGIQYLGILNGVAAFVIVGIGVDDVFVFINTYRQATHLEDPQLRMIHTVQTAGKATFFTSLTTAAAYAANVFSQIPAVHDFGLFMSLIVSCCWLAVLVTMPAALGLWSLYLAPLESSCQTSCHQNCSRKTSLHFPGDVFAAPEQVGGSPAQGPIPYLDDDIPLLEVEEEPVSLELGDVSLVSVSPEGLQPASNTGSRGHLIVQLQELLHHWVLWSAVKSRWVIVGLFVSILILSLVFASRLRPASRAPLLFRPDTNIQVLLDLKYNLSAEGISCITCSGLFQEKPHSLQNNIRTSLEKKRRGSGVPWASRPEATLQDFPGTVYISKVKSQGHPAVYRLSLNASLPAPWQAVSPGDGEVPSFQVYRAPFGNFTKKLTACMSTVGLLQAASPSRKWMLTTLACDAKRGWKFDFSFYVATKEQQHTR

SEQ ID NO: 738599 - protein, 278 aa, Homo sapiens; identical to SEQ ID NO: 738597

SEQ ID NO: 738600 - protein, 1424 aa, Homo sapiens
RLREASPCDFREETSLRSVVAARPQTLCALSPAPAAQPSPVRPAETMDTEDDPLLQDVWLEEEQEEEEATGETFLGAQKPGPQPGAGGQCCWRHWPLASRPPASGFWSTLGWAFTNPCCAGLVLFLGCSIPMALSAFMFLYYPPLDIDISYNAFEIRNHEASQRFDALTLALKSQFGSWGRNRRDLADFTSETLQRLISEQLQQLHLGNRSRQASRAPRVIPAASLGSPGPYRDTSAAQKPTANRSGRLRRETPPLEDLAANQSEDPRNQRLSKNGRYQPSIPPHAAVAANQSRARRGASRWDYSRAYVSANTQTHAHWRIELIFLARGDAERNIFTSERLVTIHEIERKIMDHPGFREFCWKPHEVLKDLPLGSYSYCSPPSSLMTYFFPTERGGKIYYDGMGQDLADIRGSLELAMTHPEFYWYVDEGLSADNLKSSLLRSEILFGAPLPNYYSVDDRWEEQRAKFQSFVVTYVAMLAKQSTSKVQVLYGGTDLFDYEVRRTFNNDMLLAFISSSCIAALVYILTSCSVFLSFFGIASIGLSCLVALFLYHVVFGIQYLGILNGVAAFVIVGIGVDDVFVFINTYRQATHLEDPQLRMIHTVQTAGKATFFTSLTTAAAYAANVFSQIPAVHDFGLFMSLIVSCCWLAVLVTMPAALGLWSLYLAPLESSCQTSCHQNCSRKTSLHFPGDVFAAPEQVGGSPAQGPIPYLDDDIPLLEVEEEPVSLELGDVSLVSVSPEGLQPASNTGSRGHLIVQLQELLHHWVLWSAVKSRWVIVAGSAPPAGPRYSSGLITNIQVLLDLKYNLSAEGISCITCSGLFQEKPHSLQNNIRTSLEKKRRGSGVPWASRPEATLQDFPGTVYISKVKSQGHPAVYRLSLNASLPAPWQAVSPGDGEVPSFQVYRAPFGNFTKKLTACMSTVGLLQAASPSRKWMLTTLACDAKRGWKFDFSFYVATKEQQHTRKLYFAQSHKPPFHGRVCMAPPGCLLSSSPDGPTKGFFFVPSEKVPKARLSATFGFNPCVNTGCGKPAVRPLVDTGAMVFVVFGIIGVNRTRQVDNHVIGDPGSVVYDSSFDLFKEIGHLCHLCKAIAANSELVKPGGAQCLPSGYSISSFLQMLHPECKELPEPNLLPGQLSHGAVGVREGRVQWISMAFESTTYKGKSSFQTYSDYLRWESFLQQQLQALPEGSVLRRGFQTCEHWKQIFMEIVGVQSALCGLVLSLLICVAAVAVFTTHILLLLPVLLSILGIVCLVVTIMYWSGWEMGAVEAISLSILVGSSVDYCVHLVEGYLLAGENLPPHQAEDARTQRQWRTLEAVRHVGVAIVSSALTTVIATVPLFFCIIAPFAKFGKIVALNTGVSILYTLTVSTALLGIMAPSSFTRTRTSFLKALGAVLLAGALGLGACLVLLQSGYKIPLPAGASL

SEQ ID NO: 738601 - protein, 1542 aa, Homo sapiens
RLREASPCDFREETSLRSVVAARPQTLCALSPAPAAQPSPVRPAETMDTEDDPLLQDVWLEEEQEEEEATGETFLGAQKPGPQPGAGGQCCWRHWPLASRPPASGFWSTLGWAFTNPCCAGLVLFLGCSIPMALSAFMFLYYPPLDIDISYNAFEIRNHEASQRFDALTLALKSQFGSWGRNRRDLADFTSETLQRLISEQLQQLHLGNRSRQASRAPRVIPAASLGSPGPYRDTSAAQKPTANRSGRLRRETPPLEDLAANQSEDPRNQRLSKNGRYQPSIPPHAAVAANQSRARRGASRWDYSRAYVSANTQTHAHWRIELIFLARGDAERNIFTSERLVTIHEIERKIMDHPGFREFCWKPHEVLKDLPLGSYSYCSPPSSLMTYFFPTERGGKIYYDGMGQDLADIRGSLELAMTHPEFYWYVDEGLSADNLKSSLLRSEILFGAPLPNYYSVDDRWEEQRAKFQSFVVTYVAMLAKQSTSKVQVLYGGTDLFDYEVRRTFNNDMLLAFISSSCIAALVYILTSCSVFLSFFGIASIGLSCLVALFLYHVVFGIQYLGILNGVAAFVIVGIGVDDVFVFINTYRQATHLEDPQLRMIHTVQTAGKATFFTSLTTAAAYAANVFSQIPAVHDFGLFMSLIVSCCWLAVLVTMPAALGLWSLYLAPLESSCQTSCHQNCSRKTSLHFPGDVFAAPEQVGGSPAQGPIPYLDDDIPLLEVEEEPVSLELGDVSLVSVSPEGLQPASNTGSRGHLIVQLQELLHHWVLWSAVKSRWVIVAGSAPPAGPRYSSGLITNIQVLLDLKYNLSAEGISCITCSGLFQEKPHSLQNNIRTSLEKKRRGSGVPWASRPEATLQDFPGTVYISKVKSQGHPAVYRLSLNASLPAPWQAVSPGDGEVPSFQVYRAPFGNFTKKLTACMSTVGLLQAASPSRKWMLTTLACDAKRGWKFDFSFYVATKEQQHTRKLYFAQSHKPPFHGRVCMAPPGCLLSSSPDGPTKGFFFVPSEKVPKARLSATFGFNPCVNTGCGKPAVRPLVDTGAMVFVVFGIIGVNRTRQVDNHVIGDPGSVVYDSSFDLFKEIGHLCHLCKAIAANSELVKPGGAQCLPSGYSISSFLQMLHPECKELPEPNLLPGQLSHGAVGVREGRVQWISMAFESTTYKGKSSFQTYSDYLRWESFLQQQLQALPEGSVLRRGFQTCEHWKQIFMEIVGVQSALCGLVLSLLICVAAVAVFTTHILLLLPVLLSILGTWARGWQAPCWEGREQTVSPVAPGSLQASEPFTVTSQGRLIGLSLLHVCAPEQSRGTQVVALSSVMCYCTCPLPQGSPRCALFLLSPEGGGWTPDLPVPLRPPGRGIRAAPPAVSYAGIVCLVVTIMYWSGWEMGAVEAISLSILVGSSVDYCVHLVEGYLLAGENLPPHQAEDARTQRQWRTLEAVRHVGVAIVSSALTTVIATVPLFFCIIAPFAKFGKIVALNTGVSILYTLTVSTALLGIMAPSSFTRTRTSFLKALGAVLLAGALGLGACLVLLQSGYKIPLPAGASL

SEQ ID NO: 738602 - protein, 496 aa, Homo sapiens
PGLSPRLTERPGPACFSLGKGSVVYDSSFDLFKEIGHLCHLCKAIAANSELVKPGGAQCLPSGYSISSFLQMLHPECKELPEPNLLPGQLSHGAVGVREGRVQWISMAFESTTYKGKSSFQTYSDYLRWESFLQQQLQALPEGSVLRRGFQTCEHWKQIFMEIVGVQSALCGLVLSLLICVAAVAVFTTHILLLLPVLLSILGTWARGWQAPCWEGREQTVSPVAPGSLQASEPFTVTSQGRLIGLSLLHVCAPEQSRGTQVVALSSVMCYCTCPLPQGSPRCALFLLSPEGGGWTPDLPVPLRPPGRGIRAAPPAVSYAGIVCLVVTIMYWSGWEMGAVEAISLSILVGSSVDYCVHLVEGYLLAGENLPPHQAEDARTQRQWRTLEAVRHVGVAIVSSALTTVIATVPLFFCIIAPFAKFGKIVALNTGVSILYTLTVSTALLGIMAPSSFTRTRTSFLKALGAVLLAGALGLGACLVLLQSGYKIPLPAGASL

SEQ ID NO: 738603 - protein, 499 aa, Homo sapiens
PGTVATRDLDHALALSMSLLAERGSVVYDSSFDLFKEIGHLCHLCKAIAANSELVKPGGAQCLPSGYSISSFLQMLHPECKELPEPNLLPGQLSHGAVGVREGRVQWISMAFESTTYKGKSSFQTYSDYLRWESFLQQQLQALPEGSVLRRGFQTCEHWKQIFMEIVGVQSALCGLVLSLLICVAAVAVFTTHILLLLPVLLSILGTWARGWQAPCWEGREQTVSPVAPGSLQASEPFTVTSQGRLIGLSLLHVCAPEQSRGTQVVALSSVMCYCTCPLPQGSPRCALFLLSPEGGGWTPDLPVPLRPPGRGIRAAPPAVSYAGIVCLVVTIMYWSGWEMGAVEAISLSILVGSSVDYCVHLVEGYLLAGENLPPHQAEDARTQRQWRTLEAVRHVGVAIVSSALTTVIATVPLFFCIIAPFAKFGKIVALNTGVSILYTLTVSTALLGIMAPSSFTRTRTSFLKALGAVLLAGALGLGACLVLLQSGYKIPLPAGASL

SEQ ID NO: 738604 - protein, 77 aa, Homo sapiens
FGNYTADLVLSSGREVQQADRAQVGVQWLTDLCLGTAIRLRPLCAGSGPSFITGWYWHQPGGAVHGAGCAGRDVLRS

SEQ ID NO: 738605 - protein, 103 aa, Homo sapiens [sequence omitted]

SEQ ID NO: 738606 - protein, 114 aa, Homo sapiens [sequence omitted]

SEQ ID NO: 738607 - protein, 277 aa, Homo sapiens
GVQRARRWETSHTVTEMSSTAAFYLLSTLGGYLVTSFLLLKYPTLLHQRKKQRFLSKHISHRGGAGENLENTMAAFQHAVKIGTDMLELDCHITKDEQVVVSHDENLKRATGVNVNISDLKYCELPPYLGKLDVSFQRACQCEGKDNRIPLLKEVFEAFPNTPINIDIKVNNNVLIKKVSEVVKRYNREHLTVWGNANYEHCRNSATKRIQIFLYSSVYNVVLPHSWPFLHWALALVPIREQFFEIPKASIILELKRNHTPWSQKSQSFSSGFWISY

SEQ ID NO: 738608 - protein, 115 aa, Homo sapiens
GVQRARRWETSHTVTEMSSTAAFYLLSTLGGYLVTSFLLLKYPTLLHQRKKQRFLSKHISHRGGAGENLENTMAAFQHAVKIGTDMLELDCHITKDEQVVVSHDENLKRAMGLQV

SEQ ID NO: 738609 - protein, 150 aa, Homo sapiens
GVQRARRWETSHTVTEMSSTAAFYLLSTLGGYLVTSFLLLKYPTLLHQRKKQRFLSKHISHRGGAGENLENTMAAFQHAVKIGTDMLELDCHITKDEQVVVSHDENLKRATGVNVNISDLKYCELPPYLGKLDVSFQRGNIFCLWLKHLC

SEQ ID NO: 738610 - protein, 112 aa, Homo sapiens
LPPSAPPSADDNIKTPAERLRGPLPPSADDNLKTPSERQLISPSTLKTRQNKLQEMLLEGGKGKAKDEAWGPPSTLPLCSPHSITLQSLQIFQGKEKTKVCCNALPQYSFPF

SEQ ID NO: 738611 - protein, 118 aa, Homo sapiens
MCVPLTPSSLFLSLCLCRLSRWLFKNEEPLLECSGQSTELLLKSARRGCNRNPHASSTAPPDGEYPSRRDSPPSLTERSPTRTVAEGAGLGFSPSLPAWLSVAQGCKMKRRGKANSKF

SEQ ID NO: 738612 - protein, 194 aa, Homo sapiens
MCVPLTPSSLFLSLCLCRLSRWLFKNEEPLLECSGQSTELLLKSARRGCNRQQKGKRLPEIRTPAPPPRPMVPVPLGIVLYATSSQEWQAVESLAFVGPLDIWQRTRKPRFPSVSPSAGKLQGASCPAQCHGTVGPGATMPGISTRYSFEIFMMKLAPIQGLSGGVCGSAANLSLMSVRPLSWTFSPAADRVSL

SEQ ID NO: 738613 - protein, 118 aa, Homo sapiens
FELGLCASPSPPPLFFFLSVSVVSLAGFLKMRNRSLNVLDRAQNCFLSQPGAVAIDSKKVNVCLKSARQLHRPARWSQFLWESSCMQHLHKSGRQLNLWPSWDHWTSGREPGNHGSLL

SEQ ID NO: 738614 - protein, 92 aa, Homo sapiens
IFSGMKLYPCHTKDRVEEISLFDGTRGFYCKTFYAEALVYMKASLSKSCLHWLQESCLHWLQNWDEGGSLVESKAKRNSNWIHIKEEKDGFV

SEQ ID NO: 738615 - protein, 197 aa, Homo sapiens [sequence omitted]

SEQ ID NO: 738616 - protein, 409 aa, Homo sapiens
MEEGGSTGSAGSDSSTSGSGGAQQRELERMAEVLVTGEQLRLRLHEEKVIKDRRHHLKTYPNCFVAKELIDWLIEHKEASDRETAIKLMQKLADRGIIHHVCDEHKEFKDVKLFYRFRKDDGTFPLDNEVKAFMRGQRLYEKLMSPENTLLQPREEEGVKYERTFMASEFLDWLVQEGEATTRKEAEQLCHRLMEHGIIQHVSNKHPFVDSNLLYQFRMNFRRRRRLMELLNEKSPSSQETHDSPFCLRKQSHDNRKSTSFMSVSPSKEIKIVSAVRRSSMSSCGSSGYFSSSPTLSSSPPVLCNPKSVLKRPVTSEELLTPGAPYARKTFTIVGDAVGWGFVVRGSKPCHIQAVDPSGPAAAAGMKVCQFVVSVNGLNVLHVDYRTVSNLILTGPRTIVMEVMEELEC

SEQ ID NO: 738617 - protein, 409 aa, Homo sapiens; identical to SEQ ID NO: 738616

SEQ ID NO: 738618 - protein, 159 aa, Homo sapiens
MEEGGSTGSAGSDSSTSGSGGAQQRELERMAEVLVTGEQLRLRLHEEKVIKDRRHHLKTYPNCFVAKELIDWLIEHKEASDRETAIKLMQKLADRGIIHHVCDEHKEFKDVKLFYRFRKDDGTFPLDNEVKAFMRGQRLYEKYVPHEIPPVILTYRKKQ

SEQ ID NO: 738619 - protein, 385 aa, Homo sapiens
MEEGGSTGSAGSDSSTSGSGGAQQRELERMAEVLVTGEQLRLRLHEEKVIKDRRHHLKTYPNCFVAKELIDWLIEHKEASDRETAIKLMQKLADRGIIHHVCDEHKEFKDVKLFYRFRKDDGTFPLDNEVKAFMRGQRLYEKLMSPENTLLQPREEEGVKYERTFMASEFLDWLVQEVSNKHPFVDSNLLYQFRMNFRRRRRLMELLNEKSPSSQETHDSPFCLRKQSHDNRKSTSFMSVSPSKEIKIVSAVRRSSMSSCGSSGYFSSSPTLSSSPPVLCNPKSVLKRPVTSEELLTPGAPYARKTFTIVGDAVGWGFVVRGSKPCHIQAVDPSGPAAAAGMKVCQFVVSVNGLNVLHVDYRTVSNLILTGPRTIVMEVMEELEC

SEQ ID NO: 738620 - protein, 409 aa, Homo sapiens; identical to SEQ ID NO: 738616

SEQ ID NO: 738621 - protein, 344 aa, Homo sapiens
MEEGGSTGSAGSDSSTSGSGGAQQRELERMAEVLVTGEQLRLRLHEEKVIKDRRHHLKTYPNCFVAKELIDWLIEHKEASDRETAIKLMQKLADRGIIHHVCDEHKEFKDVKLFYRFRKDDGTFPLDNEVKAFMRGQRLYEKLMSPENTLLQPREEEGVKYERTFMASEFLDWLVQEGEATTRKEAEQLCHRLMEHGIIQHVSNKHPFVDSNLLYQFRMNFRRRRRLMELLNEKSPSSQETHDSPFCLRKQSHDNRKSTSFMSVSPSKEIKIVSAVRRSSMSSCGSSGYFSSSPTLSSSPPVLCNPKSVLKRPVTSEELLTPGAPYARKTFTIVGWLAEGNELD

SEQ ID NO: 738622 - protein, 66 aa, Homo sapiens
MGPATANSGKQSLGQPWAAQPPGRIAHCSVSAEKVYMTSGILERPLPPGLATKPPCPAEPCPPGPA

SEQ ID NO: 738623 - protein, 120 aa, Homo sapiens
RGTDLCAAQAAARTHRARLLRAPARPRGARGAGEARGLPLAAWSAAPCAHPPRTWGPSPREDGVLDDLQSRGAGVWNALSCILFIQSCENKKREGISAMDLNHWGRPTHPDPKGSLLKQL

SEQ ID NO: 738624 - protein, 255 aa, Homo sapiens
MVSWMISRAVVLVFGMLYPAYYSYKAVKTKNVKEYVRWMMYWIVFALYTVIETVADQTVAWFPLYYELKIAFVIWLLSPYTKGASLIYRKFLHPLLSSKEREIDDYIVQAKERGYETMVNFGRQGLNLAATAAVTAAVKSQGAITERLRSFSMHDLTTIQGDEPVGQRPYQPLPEAKKKSKPAPSESAGYGIPLKDGDEKTDEEAEGPYSDNEMLTHKGLRRSQSMKSVKTTKGRKEVRYGSLKYKVKKRPQVYF

SEQ ID NO: 738625 - protein, 255 aa, Homo sapiens; identical to SEQ ID NO: 738624

SEQ ID NO: 738626 - protein, 146 aa, Homo sapiens
MVSWMISRAVVLVFGMLYPAYYSYKAVKTKNVKEYVRWMMYWIVFALYTVIETVADQTVAWFPLYYELKIAFVIWLLSPYTKGASLIYRKFLHPLLSSKEREIDDYIVQAKERGYETMVNFGRQGLNLAATAAVTAAVKVIVHLPF

SEQ ID NO: 738627 - protein, 115 aa, Homo sapiens
  misc_feature (78)..(78): Xaa can be any naturally occurring amino acid
MAKAFEHQAEAPGFLLQAEGSQDRMSSRGGPGAGRGGRGDRRQDSCEEAAGMGRGDGAGPKAEAVSTGDRCRHPGRPXRLGRPLLSFCPLLPQHVTPGTARASDVSREVGSEIYA

SEQ ID NO: 738628 - protein, 130 aa, Homo sapiens
FLCWGLDFGRHEFQTVNCLCLIININDSCQLSACFSPIFKVGSQNVQSQQCKSIQGKLSKLADDRTTAVSHLKTTHLTRGKSMSEDWNKVNLLPAPFLEGAFEIFRSSSHSSETTFLFSFFPFFSLSQRI

SEQ ID NO: 738629 - protein, 628 aa, Homo sapiens
MDSGSSSSDSAPDCWDQVDMESPGSAPSGDGVSSAVAEAQREPLSSAFSRKLNVNAKPFVPNVHAAEFVPSFLRGPTQPPTLPAGSGSNDETCTGAGYPQGKRMGRGAPVEPSREEPLVSLEGSNSAVTMELSEPVVENGEVEMALEESWEHSKEVSEAEPGGGSSGDSGPPEESGQEMMEEKEEIRKSKSVIVPSGAPKKEHVNVVFIGHVDAGKSTIGGQIMFLTGMVDKRTLEKYEREAKEKNRETWYLSWALDTNQEERDKGKTVEVGRAYFETERKHFTILDAPGHKSFVPNMIGGASQADLAVLVISARKGEFETGFEKGGQTREHAMLAKTAGVKHLIVLINKMDDPTVNWSIERYEECKEKLVPFLKKVGFSPKKDIHFMPCSGLTGANIKEQSDFCPWYTGLPFIPYLDNLPNFNRSIDGPIRLPIVDKYKDMGTVVLGKLESGSIFKGQQLVMMPNKHNVEVLGILSDDTETDFVAPGENLKIRLKGIEEEEILPGFILCDPSNLCHSGRTFDVQIVIIEHKSIICPGYNAVLHIHTCIEEVEITALISLVDKKSGEKSKTRPRFVKQDQVCIARLRTAGTICLETFKDFPQMGRFTLRDEGKTIAIGKVLKLVPEKD

SEQ ID NO: 738630 - protein, 507 aa, Homo sapiens
MDSGSSSSDSAPDCWDQVDMESPGSAPSGDGVSSAVAEAQREPLSSAFSRKLNVNAKPFVPNVHAAEFVPSFLRGPTQPPTLPAGSGSNDETCTGAGYPQGKRMGRGAPVEPSREEPLVSLEGSNSAVTMELSEPVVENGEVEMALEESWEHSKEVSEAEPGGGSSGDSGPPEESGQEMMEEKEEIRKSKSVIVPSGAPKKEHVNVVFIGHVDAGKSTIGGQIMFLTGMVDKRTLEKYEREAKEKNRETWYLSWALDTNQEERDKGKTVEVGRAYFETERKHFTILDAPGHKSFVPNMIGGASQADLAVLVISARKGEFETGFEKGGQTREHAMLAKTAGVKHLIVLINKMDDPTVNWSIERYEECKEKLVPFLKKVGFSPKKDIHFMPCSGLTGANIKEQSDFCPWYTGLPFIPYLDNLPNFNRSIDGPIRLPIVDKYKDMGTVVLGKLESGSIFKGQQLVMMPNKHNVEVLGILSDDTETDFVAPGENFVILVTSAILDARLMFR

SEQ ID NO: 738631 - protein, 115 aa, Homo sapiens
FETNARSVLFAGDNMYSCEKCKKLRNGVKFCKVQNFPEILCIHLKRFRHELMFSTKISTHVSFPLEGLDLQPFLAKDSPAQIVTYDLLSVICHHGTASSKYIGLTVVPRFKKKLK

SEQ ID NO: 738632 - protein, 1000 aa, Homo sapiens
GPGDTGRSRGCCGKWPVQEADPPRAALRGRFPALLTRHCPSPRAEKEKRSLRRCGCRPLLVELAGPAGQAVEVLPHFESLGKQEKIPNKMSAFRNHCPHLDSVGEITKEDLIQKSLGTCQDCKVQGPNLWACLENRCSYVGCGESQVDHSTIHSQETKHYLTVNLTTLRVWCYACSKEVFLDRKLGTQPSLPHVRQPHQIQENSVQDFKIPSNTTLKTPLVAVFDDLDIEADEEDELRARGLTGLKNIGNTCYMNAALQALSNCPPLTQFFLDCGGLARTDKKPAICKSYLKLMTELWHKSRPGSVVPTTLFQGIKTVNPTFRGYSQQDAQEFLRCLMDLLHEELKEQVMEVEEDPQTITTEETMEEDKSQSDVDFQSCESCSNSDRAENENGSRCFSEDNNETTMLIQDDENNSEMSKDWQKEKMCNKINKVNSEGEFDKDRDSISETVDLNNQETVKVQIHSRASEYITDVHSNDLSTPQILPSNEGVNPRLSASPPKSGNLWPGLAPPHKKAQSASPKRKKQHKKYRSVISDIFDGTIISSVQCLTCDRVSVTLETFQDLSLPIPGKEDLAKLHSSSHPTSIVKAGSCGEAYAPQGWIAFFMEYVKRFVVSCVPSWFWGPVVTLQDCLAAFFARDELKGDNMYSCEKCKKLRNGVKFCKVQNFPEILCIHLKRFRHELMFSTKISTHVSFPLEGLDLQPFLAKDSPAQIVTYDLLSVICHHGTASSGHYIAYCRNNLNNLWYEFDDQSVTEVSESTVQNAEAYVLFYRKSSEEAQKERRRISNLLNIMEPSLLQFYISRQWLNKFKTFAEPGPISNNDFLCIHGGVPPRKAGYIEDLVLMLPQNIWDNLYSRYGGGPAVNHLYICHTCQIEAEKIEKRRKTELEIFIRLNRAFQKEDSPATFYCISMQWFREWESFVKGKDGDPPGPIDNTKIAVTKCGNVMLRQGADSGQISEETWNFLQSIYGGGPEVILRPPVVHVDPDILQAEEKIEVETRSL

SEQ ID NO: 738633 - protein, 836 aa, Homo sapiens
MTGSNSHITILTLKVLPHFESLGKQEKIPNKMSAFRNHCPHLDSVGEITKEDLIQKSLGTCQDCKVQGPNLWACLENRCSYVGCGESQVDHSTIHSQETKHYLTVNLTTLRVWCYACSKEVFLDRKLGTQPSLPHVRQPHQIQENSVQDFKIPSNTTLKTPLVAVFDDLDIEADEEDELRARGLTGLKNIGNTCYMNAALQALSNCPPLTQFFLDCGGLARTDKKPAICKSYLKLMTELWHKSRPGSVVPTTLFQGIKTVNPTFRGYSQQDAQEFLRCLMDLLHEELKEQVMEVEEDPQTITTEETMEEDKSQSDVDFQSCESCSNSDRAENENGSRCFSEDNNETTMLIQDDENNSEMSKDWQKEKMCNKINKVNSEGEFDKDRDSISETVDLNNQETVKVQIHSRASEYITDVHSNDLSTPQILPSNEGVNPRLSASPPKSGNLWPGLAPPHKKAQSASPKRKKQHKKYRSVISDIFDGTIISSVQCLTCDRVSVTLETFQDLSLPIPGKEDLAKLHSSSHPTSIVKAGSCGEAYAPQGWIAFFMEYVKRFVVSCVPSWFWGPVVTLQDCLAAFFARDELKGDNMYSCEKCKKLRNGVKFCKVQNFPEILCIHLKRFRHELMFSTKISTHVSFPLEGLDLQPFLAKDSPAQIVTYDLLSVICHHGTASSGHYIAYCRNNLNNLWYEFDDQSVTEVSESTVQNAEAYVLFYRKSSEEAQKERRRISNLLNIMEPSLLQFYISRQWLNKFKTFAEPGPISNNDFLCIHGGVPPRKAGYIEDLVLMLPQNIWDNLYSRYGGGPAVNHLYICHTCQIEAEKIEKRRKTELEIFIRVKK

SEQ ID NO: 738634 - protein, 116 aa, Homo sapiens
DFCCKFKYTKFFCRLIDFLFSPLRLRNGVKFCKVQNFPEILCIHLKRFRHELMFSTKISTHVSFPLEGLDLQPFLAKDSPAQIVTYDLLSVICHHGTASSKYIGLTVVPRFKKKLK

SEQ ID NO: 738635 - protein, 139 aa, Homo sapiens
MIIYFNNSLSNTPNSLKSSEEAQKERRRISNLLNIMEPSLLQFYISRQWLNKFKTFAEPGPISNNDFLCIHGGVPPRKAGYIEDLVLMLPQNIWDNLYSRYGGGPAVNHLYICHTCQIEAEKIEKRRKTELEIFIRVKK

SEQ ID NO: 738636 - protein, 252 aa, Homo sapiens
MEPSLLQFYISRQWLNKFKTFAEPGPISNNDFLCIHGGSSNTSRNIEDLIMKINKKIWDSLTYLTGRRTYLKPIMVITPTSHAVANPSYHHSYEMNSNPESHPIIKLLPKLPLNMTKHPSPPPRIYMKSASLIQLRNEYTHIIIKTHMKSYISGTRQTAYSNESNVGGESHSYYELEIDNKNTARNIIEIISRAHAILHNSLTHITNLVIELFKRSNFHYNVNSKPDAEAELKIRKSANYRILKPSPYYDHH

SEQ ID NO: 738637 - protein, 851 aa, Homo sapiens
MTGSNSHITILTLKVLPHFESLGKQEKIPNKMSAFRNHCPHLDSVGEITKEDLIQKSLGTCQDCKVQGPNLWACLENRCSYVGCGESQVDHSTIHSQETKHYLTVNLTTLRVWCYACSKEVFLDRKLGTQPSLPHVRQPHQIQENSVQDFKIPSNTTLKTPLVAVFDDLDIEADEEDELRARGLTGLKNIGNTCYMNAALQALSNCPPLTQFFLDCGGLARTDKKPAICKSYLKLMTELWHKSRPGSVVPTTLFQGIKTVNPTFRGYSQQDAQEFLRCLMDLLHEELKEQVMEVEEDPQTITTEETMEEDKSQSDVDFQSCESCSNSDRAENENGSRCFSEDNNETTMLIQDDENNSEMSKDWQKEKMCNKINKVNSEGEFDKDRDSISETVDLNNQETVKVQIHSRASEYITDVHSNDLSTPQILPSNEGVNPRLSASPPKSGNLWPGLAPPHKKAQSASPKRKKQHKKYRSVISDIFDGTIISSVQCLTCDRVSVTLETFQDLSLPIPGKEDLAKLHSSSHPTSIVKAGSCGEAYAPQGWIAFFMEYVKRFVVSCVPSWFWGPVVTLQDCLAAFFARDELKGDNMYSCEKCKKLRNGVKFCKVQNFPEILCIHLKRFRHELMFSTKISTHVSFPLEGLDLQPFLAKDSPAQIVTYDLLSVICHHGTASSGHYIAYCRNNLNNLWYEFDDQSVTEVSESTVQNAEAYVLFYRKSSEEAQKERRRISNLLNIMEPSLLQFYISRQWLNKFKTFAEPGPISNNDFLCIHGGVPPRKAGYIEDLVLMLPQNIWDNLYSRYGGGPAVNHLYICHTCQIEAEKIEKRRKTELEIFIRILQVLLTILRLQSLNVVM

SEQ ID NO: 738638 - protein, 851 aa, Homo sapiens; identical to SEQ ID NO: 738637

SEQ ID NO: 738639 - protein, 731 aa, Homo sapiens
SDCFTLKGTQPSLPHVRQPHQIQENSVQDFKIPSNTTLKTPLVAVFDDLDIEADEEDELRARGLTGLKNIGNTCYMNAALQALSNCPPLTQFFLDCGGLARTDKKPAICKSYLKLMTELWHKSRPGSVVPTTLFQGIKTVNPTFRGYSQQDAQEFLRCLMDLLHEELKEQVMEVEEDPQTITTEETMEEDKSQSDVDFQSCESCSNSDRAENENGSRCFSEDNNETTMLIQDDENNSEMSKDWQKEKMCNKINKVNSEGEFDKDRDSISETVDLNNQETVKVQIHSRASEYITDVHSNDLSTPQILPSNEGVNPRLSASPPKSGNLWPGLAPPHKKAQSASPKRKKQHKKYRSVISDIFDGTIISSVQCLTCDRVSVTLETFQDLSLPIPGKEDLAKLHSSSHPTSIVKAGSCGEAYAPQGWIAFFMEYVKRFVVSCVPSWFWGPVVTLQDCLAAFFARDELKGDNMYSCEKCKKLRNGVKFCKVQNFPEILCIHLKRFRHELMFSTKISTHVSFPLEGLDLQPFLAKDSPAQIVTYDLLSVICHHGTASSGHYIAYCRNNLNNLWYEFDDQSVTEVSESTVQNAEAYVLFYRKSSEEAQKERRRISNLLNIMEPSLLQFYISRQWLNKFKTFAEPGPISNNDFLCIHGGVPPRKAGYIEDLVLMLPQNIWDNLYSRYGGGPAVNHLYICHTCQIEAEKIEKRRKTELEIFIRILQVLLTILRLQSLNVVM

SEQ ID NO: 738640 - protein, 625 aa, Homo sapiens
DDALLTRYVSAGIIPPMYYIEACKPPILPHSFRNKLNPHSGYTQDAQEFLRCLMDLLHEELKEQVMEVEEDPQTITTEETMEEDKSQSDVDFQSCESCSNSDRAENENGSRCFSEDNNETTMLIQDDENNSEMSKDWQKEKMCNKINKVNSEGEFDKDRDSISETVDLNNQETVKVQIHSRASEYITDVHSNDLSTPQILPSNEGVNPRLSASPPKSGNLWPGLAPPHKKAQSASPKRKKQHKKYRSVISDIFDGTIISSVQCLTCDRVSVTLETFQDLSLPIPGKEDLAKLHSSSHPTSIVKAGSCGEAYAPQGWIAFFMEYVKRFVVSCVPSWFWGPVVTLQDCLAAFFARDELKGDNMYSCEKCKKLRNGVKFCKVQNFPEILCIHLKRFRHELMFSTKISTHVSFPLEGLDLQPFLAKDSPAQIVTYDLLSVICHHGTASSGHYIAYCRNNLNNLWYEFDDQSVTEVSESTVQNAEAYVLFYRKSSEEAQKERRRISNLLNIMEPSLLQFYISRQWLNKFKTFAEPGPISNNDFLCIHGGVPPRKAGYIEDLVLMLPQNIWDNLYSRYGGGPAVNHLYICHTCQIEAEKIEKRRKTELEIFIRILQVLLTILRLQSLNVVM

SEQ ID NO: 738641 - protein, 396 aa, Homo sapiens [sequence omitted]

SEQ ID NO: 738642 - protein, 475 aa, Homo sapiens
RPPTTTKFAAASTGTIISSVQCLTCDRVSVTLETFQDLSLPIPGKEDLAKLHSSSHPTSIVKAGSCGEAYAPQGWIAFFMEYVKRFVVSCVPSWFWGPVVTLQDCLAAFFARDELKGDNMYSCEKCKKLRNGVKFCKVQNFPEILCIHLKRFRHELMFSTKISTHVSFPLEGLDLQPFLAKDSPAQIVTYDLLSVICHHGTASSGHYIAYCRNNLNNLWYEFDDQSVTEVSESTVQNAEAYVLFYRKSSEEAQKERRRISNLLNIMEPSLLQFYISRQWLNKFKTFAEPGPISNNDFLCIHGGVPPRKAGYIEDLVLMLPQNIWDNLYSRYGGGPAVNHLYICHTCQIEAEKIEKRRKTELEIFIRLNRAFQKEDSPATFYCISMQWFREWESFVKGKDGDPPGPIDNTKIAVTKCGNVMLRQGADSGQISEETWNFLQSIYGGGPEVILRPPVVHVDPDILQAEEKIEVETRSL

SEQ ID NO: 738643 - protein, 713 aa, Homo sapiens
MTGSNSHITILTLKVLPHFESLGKQEKIPNKMSAFRNHCPHLDSVGEITKEDLIQKSLGTCQDCKVQGPNLWACLENRCSYVGCGESQVDHSTIHSQETKHYLTVNLTTLRVWCYACSKEVFLDRKLGTQPSLPHVRQPHQIQENSVQDFKIPSNTTLKTPLVAVFDDLDIEADEEDELRARGLTGLKNIGNTCYMNAALQALSNCPPLTQFFLDCGGLARTDKKPAICKSYLKLMTELWHKSRPGSVVPTTLFQGIKTVNPTFRGYSQQDAQEFLRCLMDLLHEELKEQVMEVEEDPQTITTEETMEEDKSQSDVDFQSCESCSNSDRAENENGSRCFSEDNNETTMLIQDDENNSEMSKDWQKEKMCNKINKVNSEGEFDKDRDSISETVDLNNQETVKVQIHSRASEYITDVHSNDLSTPQILPSNEGVNPRLSASPPKSGNLWPGLAPPHKKAQSASPKRKKQHKKYRSVISDIFDGTIISSVQCLTCDRVSVTLETFQDLSLPIPGKEDLAKLHSSSHPTSIVKAGSCGEAYAPQGWIAFFMEYVKRFVVSCVPSWFWGPVVTLQDCLAAFFARDELKGDNMYSCEKCKKLRNGVKFCKVQNFPEILCIHLKRFRHELMFSTKISTHVSFPLEGLDLQPFLAKDSPAQIVTYDLLSVICHHGTASSGHYIAYCRNNLNNLWYEFDDQSVTEVSESTVQNAEAYVLFYR

SEQ ID NO: 738644 - protein, 942 aa, Homo sapiens
MTGSNSHITILTLKVLPHFESLGKQEKIPNKMSAFRNHCPHLDSVGEITKEDLIQKSLGTCQDCKVQGPNLWACLENRCSYVGCGESQVDHSTIHSQETKHYLTVNLTTLRVWCYACSKEVFLDRKLGTQPSLPHVRQPHQIQENSVQDFKIPSNTTLKTPLVAVFDDLDIEADEEDELRARGLTGLKNIGNTCYMNAALQALSNCPPLTQFFLDCGGLARTDKKPAICKSYLKLMTELWHKSRPGSVVPTTLFQGIKTVNPTFRGYSQQDAQEFLRCLMDLLHEELKEQVMEVEEDPQTITTEETMEEDKSQSDVDFQSCESCSNSDRAENENGSRCFSEDNNETTMLIQDDENNSEMSKDWQKEKMCNKINKVNSEGEFDKDRDSISETVDLNNQETVKVQIHSRASEYITDVHSNDLSTPQILPSNEGVNPRLSASPPKSGNLWPGLAPPHKKAQSASPKRKKQHKKYRSVISDIFDGTIISSVQCLTCDRVSVTLETFQDLSLPIPGKEDLAKLHSSSHPTSIVKAGSCGEAYAPQGWIAFFMEYVKRFVVSCVPSWFWGPVVTLQDCLAAFFARDELKGDNMYSCEKCKKLRNGVKFCKVQNFPEILCIHLKRFRHELMFSTKISTHVSFPLEGLDLQPFLAKDSPAQIVTYDLLSVICHHGTASSGHYIAYCRNNLNNLWYEFDDQSVTEVSESTVQNAEAYVLFYRKSSEEAQKERRRISNLLNIMEPSLLQFYISRQWLNKFKTFAEPGPISNNDFLCIHGGVPPRKAGYIEDLVLMLPQNIWDNLYSRYGGGPAVNHLYICHTCQIEAEKIEKRRKTELEIFIRLNRAFQKEDSPATFYCISMQWFREWESFVKGKDGDPPGPIDNTKIAVTKCGNVMLRQGADSGQISEETWNFLQSIYGGGPEVILRPPVVHVDPDILQAEEKIEVETRSL

SEQ ID NO: 738645 - protein, 192 aa, Homo sapiens
MFERNIIKSMKQICLYIFLGVPPRKAGYIEDLVLMLPQNIWDNLYSRYGGGPAVNHLYICHTCQIEAEKIEKRRKTELEIFIRLNRAFQKEDSPATFYCISMQWFREWESFVKGKDGDPPGPIDNTKIAVTKCGNVMLRQGADSGQISEETWNFLQSIYGGGPEVILRPPVVHVDPDILQAEEKIEVETRSL

SEQ ID NO: 738646 - protein, 942 aa, Homo sapiens; identical to SEQ ID NO: 738644

SEQ ID NO: 738647 - protein, 900 aa, Homo sapiens
MTGSNSHITILTLKVLPHFESLGKQEKIPNKMSAFRNHCPHLDSVGEITKEDLIQKSLGTCQDCKVQGPNLWACLENRCSYVGCGESQVDHSTIHSQETKHYLTVNLTTLRVWCYACSKEVFLDRKLGTQPSLPHVRQPHQIQENSVQDFKIPSNTTLKTPLVAVFDDLDIEADEEDELRARGLTGLKNIGNTCYMNAALQALSNCPPLTQFFLDCGGLARTDKKPAICKSYLKLMTELWHKSRPGSVVPTTLFQGIKTVNPTFRGYSQQDAQEFLRCLMDLLHEELKEQVMEVEEDPQTITTEETMEEDKSQSDVDFQSCESCSNSDRAENENGSRCFSEDNNETTMLIQDDENNSEMSKDWQKEKMCNKINKVNSEGEFDKDRDSISETVDLNNQETVKVQIHSRASEYITDVHSNDLSTPQILPSNEGVNPRLSASPPKSGNLWPGLAPPHKKAQSASPKRKKQHKKYRSVISDIFDGTIISSVQCLTCDRVSVTLETFQDLSLPIPGKEDLAKLHSSSHPTSIVKAGSCGEAYAPQGWIAFFMEYVKRFVVSCVPSWFWGPVVTLQDCLAAFFARDELKGDNMYSCEKCKKLRNGVKFCKVQNFPEILCIHLKRFRHELMFSTKISTHVSFPLEGLDLQPFLAKDSPAQIVTYDLLSVICHHGTASSGHYIAYCRNNLNNLWYEFDDQSVTEVSESTVQNAEAYVLFYRKSSEEAQKERRRISNLLNIMEPSLLQFYISRQWLNKFKTFAEPGPISNNDFLCIHGGVPPRKAGYIEDLVLMLPQNIWDNLYSRYGGGPAVNHLYICHTCQIEAEKIEKRRKTELEIFIRLNRAFQKEDSPATFYCISMQWFREWESFVKGKDGGKWLTEKFFFGKLFVFLFDKYFLNICVHLGLHY

SEQ ID NO: 738648 - protein, 778 aa, Homo sapiens
MTGSNSHITILTLKVLPHFESLGKQEKIPNKMSAFRNHCPHLDSVGEITKEDLIQKSLGTCQDCKVQGPNLWACLENRCSYVGCGESQVDHSTIHSQETKHYLTVNLTTLRVWCYACSKEVFLDRKLGTQPSLPHVRQPHQIQENSVQDFKIPSNTTLKTPLVAVFDDLDIEADEEDELRARGLTGLKNIGNTCYMNAALQALSNCPPLTQFFLDCGGLARTDKKPAICKSYLKLMTELWHKSRPGSVVPTTLFQGIKTVNPTFRGYSQQDAQEFLRCLMDLLHEELKEQVMEVEEDPQTITTEETMEEDKSQSDVDFQSCESCSNSDRAENENGSRCFSEDNNETTMLIQDDENNSEMSKDWQKEKMCNKINKVNSEGEFDKDRDSISETVDLNNQETVKVQIHSRASEYITDVHSNDLSTPQILPSNEGVNPRLSASPPKSGNLWPGLAPPHKKAQSASPKRKKQHKKYRSVISDIFDGTIISSVQCLTCDRVSVTLETFQDLSLPIPGKEDLAKLHSSSHPTSIVKAGSCGEAYAPQGWIAFFMEYVKRFVVSCVPSWFWGPVVTLQDCLAAFFARDELKGDNMYSCEKCKKLRNGVKFCKVQNFPEILCIHLKRFRHELMFSTKISTHVSFPLEGLDLQPFLAKDSPAQIVTYDLLSVICHHGTASSGHYIAYCRNNLNNLWYEFDDQSVTEVSESTVQNAEAYVLFYRKSSEEAQKERRRISNLLNIMEPSLLQFYISRQWLNKFKTFAEPGPISNNDFLCIHGGKNSCNANR

SEQ ID NO: 738649 - protein, 722 aa, Homo sapiens
MTGSNSHITILTLKVLPHFESLGKQEKIPNKMSAFRNHCPHLDSVGEITKEDLIQKSLGTCQDCKVQGPNLWACLENRCSYVGCGESQVDHSTIHSQETKHYLTVNLTTLRVWCYACSKEVFLDRKLGTQPSLPHVRQPHQIQENSVQDFKIPSNTTLKTPLVAVFDDLDIEADEEDELRARGLTGLKNIGNTCYMNAALQALSNCPPLTQFFLDCGGLARTDKKPAICKSYLKLMTELWHKSRPGSVVPTTLFQGIKTVNPTFRGYSQQDAQEFLRCLMDLLHEELKEQVMEVEEDPQTITTEETMEEDKSQSDVDFQSCESCSNSDRAENENGSRCFSEDNNETTMLIQDDENNSEMSKDWQKEKMCNKINKVNSEGEFDKDRDSISETVDLNNQETVKVQIHSRASEYITDVHSNDLSTPQILPSNEGVNPRLSASPPKSGNLWPGLAPPHKKAQSASPKRKKQHKKYRSVISDIFDGTIISSVQCLTCDRVSVTLETFQDLSLPIPGKEDLAKLHSSSHPTSIVKAGSCGEAYAPQGWIAFFMEYVKRFVVSCVPSWFWGPVVTLQDCLAAFFARDELKGDNMYSCEKCKKLRNGVKFCKVQNFPEILCIHLKRFRHELMFSTKISTHVSFPLEGLDLQPFLAKDSPAQIVTYDLLSVICHHGTASSGHYIAYCRNNLNNLWYEFDDQSVTEVSESTVQNAEAYVLFYRCSSKKSWLY

SEQ ID NO: 738650 - protein, 687 aa, Homo sapiens
MTGSNSHITILTLKVLPHFESLGKQEKIPNKMSAFRNHCPHLDSVGEITKEDLIQKSLGTCQDCKVQGPNLWACLENRCSYVGCGESQVDHSTIHSQETKHYLTVNLTTLRVWCYACSKEVFLDRKLGTQPSLPHVRQPHQIQENSVQDFKIPSNTTLKTPLVAVFDDLDIEADEEDELRARGLTGLKNIGNTCYMNAALQALSNCPPLTQFFLDCGGLARTDKKPAICKSYLKLMTELWHKSRPGSVVPTTLFQGIKTVNPTFRGYSQQDAQEFLRCLMDLLHEELKEQVMEVEEDPQTITTEETMEEDKSQSDVDFQSCESCSNSDRAENENGSRCFSEDNNETTMLIQDDENNSEMSKDWQKEKMCNKINKVNSEGEFDKDRDSISETVDLNNQETVKVQIHSRASEYITDVHSNDLSTPQILPSNEGVNPRLSASPPKSGNLWPGLAPPHKKAQSASPKRKKQHKKYRSVISDIFDGTIISSVQCLTCDRVSVTLETFQDLSLPIPGKEDLAKLHSSSHPTSIVKAGSCGEAYAPQGWIAFFMEYVKRFVVSCVPSWFWGPVVTLQDCLAAFFARDELKGDNMYSCEKCKKLRNGVKFCKVQNFPEILCIHLKRFRHELMFSTKISTHVSFPLEGLDLQPFLAKDSPAQIVTYDLLSVICHHGTASSKYIGLTVVPRFKKKLK

SEQ ID NO: 738651 - protein, 417 aa, Homo sapiens
MTGSNSHITILTLKVLPHFESLGKQEKIPNKMSAFRNHCPHLDSVGEITKEDLIQKSLGTCQDCKVQGPNLWACLENRCSYVGCGESQVDHSTIHSQETKHYLTVNLTTLRVWCYACSKEVFLDRKLGTQPSLPHVRQPHQIQENSVQDFKIPSNTTLKTPLVAVFDDLDIEADEEDELRARGLTGLKNIGNTCYMNAALQALSNCPPLTQFFLDCGGLARTDKKPAICKSYLKLMTELWHKSRPGSVVPTTLFQGIKTVNPTFRGYSQQDAQEFLRCLMDLLHEELKEQVMEVEEDPQTITTEETMEEDKSQSDVDFQSCESCSNSDRAENENGSRCFSEDNNETTMLIQDDENNSEMSKDWQKEKMCNKINKVNSEGEFDKDRDSISETVDLNNQETVKVQIHSRASGDNLVVCS

SEQ ID NO: 738652 - protein, 152 aa, Homo sapiens
HAATDSLNPPRLHVTICTVVKNPKRLRNGVKFCKVQNFPEILCIHLKRFRHELMFSTKISTHVSFPLEGLDLQPFLAKDSPAQIVTYDLLSVICHHGTASSGHYIAYCRNNLNNLWYEFDDQSVTEVSESTVQNAEAYVLFYRCSSKKSWLY

SEQ ID NO: 738653 - protein, 123 aa, Homo sapiens
VYLFFSFSDPPELGAGSLCTEWTHRQLFVECLGNAHGFCPQGRGLTALMQGAPLSFLASSFFLLCAFSQNNDSHSFPSLLPLPHLPYTNLCPPWLDTLCCTAENELKIKTHSKECPPYIFCEL

SEQ ID NO: 738654 - protein, 93 aa, Homo sapiens
ANVQSFTQRPQQQPLTVWMLNRGRKPAQGTLTVICPIGPGHLLTSTITESVCVPRRNKYHSRTLPAAQHCQWLVTAVPTALGLVIRAGSKKLC

SEQ ID NO: 738655 - protein, 120 aa, Homo sapiens
LVNLPTKPAPFPARLGRLNAFWRIWPCLMEMCTKASNTWRVTQCESSGDGELLGLRVAQGARRPCLLPWPSLPPAPCKAIGERLGGGRDKRNQASLKATAVVSRLTAPSSPQTPTLSLRS

SEQ ID NO: 738656 - protein, 89 aa, Homo sapiens
RQPPGILRGGPDRAGGGERKPTGAGPPLTRRLRLPPPGLWAQRAQMPGRTPPPAAGTPIAALEPLGRRNWGLHRHLLLPSPRSLPHLLI

SEQ ID NO: 738657 - protein, 89 aa, Homo sapiens; identical to SEQ ID NO: 738656

SEQ ID NO: 738658 - protein, 89 aa, Homo sapiens; identical to SEQ ID NO: 738656

SEQ ID NO: 738659 - protein, 89 aa, Homo sapiens; identical to SEQ ID NO: 738656

SEQ ID NO: 738660 - protein, 101 aa, Homo sapiens
GWYRVGGGERSSIQEPSFRMEKALEEANALQEGHSVPEINSDTDKSETEESIVTEELIVVTSYTLGQCRQSEKEKMEQKAISKRFKFEEPLLQEIPGEFIY

SEQ ID NO: 738661 - protein, 476 aa, Homo sapiens
AGRGARGGPELPVVCLPQSERRAGESGCLKAPRTGTRSRGRVRDPPAARSEQAARKEAGLNTMIPLEKPGSGGSSPGATSGSGRAGRGLSGPCRPPPPPQARGLLTEIRAVVRTEPFQDGYSLCPGRELGRGKFAVVRKCIKKDSGKEFAAKFMRKRRKGQDCRMEIIHEIAVLELAQDNPWVINLHEVYETASEMILVLEYAAGGEIFDQCVADREEAFKEKDVQRLMRQILEGVHFLHTRDVVHLDLKPQNILLTSESPLGDIKIVDFGLSRILKNSEELREIMGTPEYVAPEILSYDPISMATDMWSIGVLTYVMLTGISPFLGNDKQETFLNISQMNLSYSEEEFDVLSESAVDFIRTLLVKKPEDRATAEECLKHPWLTQSSIQEPSFRMEKALEEANALQEGHSVPEINSDTDKSETEESIVTEELIVVTSYTLGQCRQSEKEKMEQKAISKRFKFEEPLLQEIPGEFIY

SEQ ID NO: 738662 - protein, 476 aa, Homo sapiens; identical to SEQ ID NO: 738661

SEQ ID NO: 738663 - protein, 476 aa, Homo sapiens; identical to SEQ ID NO: 738661

SEQ ID NO: 738664 - protein, 476 aa, Homo sapiens; identical to SEQ ID NO: 738661

SEQ ID NO: 738665 - protein, 369 aa, Homo sapiens
AGRGARGGPELPVVCLPQSERRAGESGCLKAPRTGTRSRGRVRDPPAARSEQAARKEAGLNTMIPLEKPGSGGSSPGATSGSGRAGRGLSGPCRPPPPPQARGLLTEIRAVVRTEPFQDGYSLCPGRELGRGKFAVVRKCIKKDSGKEFAAKFMRKRRKGQDCRMEIIHEIAVLELAQDNPWVINLHEVYETASEMILVLEYAAGGEIFDQCVADREEAFKEKDVQRLMRQILEGVHFLHTRDVVHLDLKPQNILLTSESPLGDIKIVDFGLSRILKNSEELREIMGTPEYVAPEILSYDPISMATDMWSIGVLTYVMLTGISPFLGNDKQETFLNISQMNLSYSEEEFDVLSESAVDFIRTLLVKKPE

SEQ ID NO: 738666 - protein, 476 aa, Homo sapiens; identical to SEQ ID NO: 738661

SEQ ID NO: 738667 - protein, 103 aa, Homo sapiens
YSDLSVSELISDSSIQEPSFRMEKALEEANALQEGHSVPEINSDTDKSETEESIVTEELIVVTSYTLGQCRQSEKEKMEQKAISKRFKFEEPLLQEIPGEFIY

SEQ ID NO: 738668 - protein, 80 aa, Homo sapiens
TTQPEKYEIDKVIIETKTESYNKIKENRTAKITSNEKHLESLKNAGSLLRALERLAPGSGSFADSAVAPLALEILQAVGH

SEQ ID NO: 738669 - protein, 534 aa, Homo sapiens
DSPSTCIRAKAFLVLLYILIYNREMLLLSCQARLVMYIERDSRKTTPGKEQQSGNEYLSKCLDLLICHIVQELPRILGDILNSLANVSGRKHPSTVQVKQLKLCLPLMPVVLHLVTSQVFRPQVVTEEFLFSYGTILSHIKSVDSGETNIDGAIGLTASEEFIKITLSAFEAIIQYPILLKDYRSTVVDYILPPLVSLVQSQNVEWRLFSLRLLSETTSLLVNQEFGDGKEKASVDSDSNLLALIRDVLLPQYEHILLEPDPVPAYALKLLVAMTEHNPTFTRLVEESKLIPLIFEVTLEHQESILGNTMQSVIALLSNLVACKDSNMELLYEQGLVSHICNLLTETATLCLDVDNKNNNEMAAPLLFSLLDILHSMLTYTSGIVRLALQAQKSGSGEDPQAAEDLLLLNRPLTDLISLLIPLLPNEDPEIFDVSSKCLSILVQLYGGENPDSLSPENVEIFAHLLTSKEDPKEQKLLLRILRRMITSNEKHLESLKNAGSLLRALERLAPGSGSFADSAVAPLALEILQAVGH

SEQ ID NO: 738670 - protein, 534 aa, Homo sapiens; identical to SEQ ID NO: 738669

SEQ ID NO: 738671 - protein, 296 aa, Homo sapiens
DSPSTCIRAKAFLVLLYILIYNREMLLLSCQARLVMYIERDSRKTTPGKEQQSGNEYLSKCLDLLICHIVQELPRILGDILNSLANVSGRKHPSTVQVKQLKLCLPLMPVVLHLVTSQVFRPQVVTEEFLFSYGTILSHIKSVDSGETNIDGAIGLTASEEFIKITLSAFEAIIQYPILLKDYRSTVVDYILPPLVSLVQSQNVEWRLFSLRLLSETTSLLVNQEFGDGKEKASVDSDSNLLALIRDVLLPQYEHILLEPDPVPAYALKLLVAMTEHNPTFTRYWKFKFLFLVSHL

SEQ ID NO: 738672 - protein, 156 aa, Homo sapiens
DSPSTCIRAKAFLVLLYILIYNREMLLLSCQARLVMYIERDSRKTTPGKEQQSGNEYLSKCLDLLICHIVQELPRILGDILNSLANVSGRKHPSTVQVKQLKLCLPLMPVVLHLVTSQVFRPQVVTEEFLFSYGTILSHIKSVDSGETNIDGAIGC

SEQ ID NO: 738673 - protein, 762 aa, Homo sapiens
SGGIAMLLRLLLAWAAAGPTLGQDPWAAEPRAACGPSSCYALFPRRRTFLEAWRACRELGGDLATPRTPEEAQRVDSLVGAGPASRLLWIGLQRQARQCQLQRPLRGFTWTTGDQDTAFTNWAQPASGGPCPAQRCVALEASGEHRWLEGSCTLAVDGYLCQFGFEGACPALQDEAGQAGPAVYTTPFHLVSTEFEWLPFGSVAAVQCQAGRGASLLCVKQPEGGVGWSRAGPLCLGTGCSPDNGGCEHECVEEVDGHVSCRCTEGFRLAADGRSCEDPCAQAPCEQQCEPGGPQGYSCHCRLGFRPAEDDPHRCVDTDECQIAGVCQQMCVNYVGGFECYCSEGHELEADGISCSPAGAMGAQASQDLGDELLDDGEDEEDEDEAWKAFNGGWTEMPGILWMEPTQPPDFALAYRPSFPEDREPQIPYPEPTWPPPLSAPRVPYHSSVLSVTRPVVVSATHPTLPSAHQPPVIPATHPALSRDHQIPVIAANYPDLPSAYQPGILSVSHSAQPPAHQPPMISTKYPELFPAHQSPMFPDTRVAGTQTTTHLPGIPPNHAPLVTTLGAQLPPQAPDALVLRTQATQLPIIPTAQPSLTTTSRSPVSPAHQISVPAATQPAALPTLLPSQSPTNQTSPISPTHPHSKAPQIPREDGPSPKLALWLPSPAPTAAPTALGEAGLAEHSQRDDRWLLVALLVPTCVFLVVLLALGIVYCTRCGPHAPNKRITDCYRWVIHAGSKSPTEPMPPRGSLTGVQTCRTSV

SEQ ID NO: 738674 - protein, 486 aa, Homo sapiens
SGGIAMLLRLLLAWAAAGPTLGQDPWAAEPRAACGPSSCYALFPRRRTFLEAWRACRELGGDLATPRTPEEAQRVDSLVGAGPASRLLWIGLQRQARQCQLQRPLRGFTWTTGDQDTAFTNWAQPASGGPCPAQRCVALEASGEHRWLEGSCTLAVDGYLCQFGFEGACPALQDEAGQAGPAVYTTPFHLVSTEFEWLPFGSVAAVQCQAGRGASLLCVKQPEGGVGWSRAGPLCLGTGCSPDNGGCEHECVEEVDGHVSCRCTEGFRLAADGRSCEDPCAQAPCEQQCEPGGPQGYSCHCRLGFRPAEDDPHRCVDTDECQIAGVCQQMCVNYVGGFECYCSEGHELEADGISCSPAGAMGAQASQDLGDELLDDGEDEEDEDEAWKAFNGGWTEMPGILWMEPTQPPDFALAYRPSFPEDREPQIPYPEPTWPPPLSAPRVPYHSSVLSVTRPVVVSATHPTLPIRSPTQRVPRGTATHRAARS

SEQ ID NO: 738675 - protein, 457 aa, Homo sapiens
SGGIAMLLRLLLAWAAAGPTLGQDPWAAEPRAACGPSSCYALFPRRRTFLEAWRACRELGGDLATPRTPEEAQRVDSLVGAGPASRLLWIGLQRQARQCQLQRPLRGFTWTTGDQDTAFTNWAQPASGGPCPAQRCVALEASGEHRWLEGSCTLAVDGYLCQFGFEGACPALQDEAGQAGPAVYTTPFHLVSTEFEWLPFGSVAAVQCQAGRGASLLCVKQPEGGVGWSRAGPLCLGTGCSPDNGGCEHECVEEVDGHVSCRCTEGFRLAADGRSCEDPCAQAPCEQQCEPVGHKATAATVAWVSGQRRMIRTAVWTQMSARLPVCASRCVSTTLVASSVIVARDMSWRLMASAAALQGPWVPRLPRTSEMSCWMTGRMRKMKTRPGRPSTVAGRRCLGSCGWSLRSRLTLPWPIDRASQRTESHRYPTRSPPGHPRAQLDRWLPAPQAQPGSSLNH

SEQ ID NO: 738676 - protein, 762 aa, Homo sapiens; identical to SEQ ID NO: 738673

SEQ ID NO: 738677 - protein, 309 aa, Homo sapiens
EGGSQRVSQLWSSSAHQPPVIPATHPALSRDHQIPVIAANYPDLPSAYQPGILSVSHSAQPPAHQPPMISTKYPELFPAHQSPMFPDTRVAGTQTTTHLPGIPPNHAPLVTTLGAQLPPQAPDALVLRTQATQLPIIPTAQPSLTTTSRSPVSPAHQISVPAATQPAALPTLLPSQSPTNQTSPISPTHPHSKAPQIPREDGPSPKLALWLPSPAPTAAPTALGEAGLAEHSQRDDRWLLVALLVPTCVFLVVLLALGIVYCTRCGPHAPNKRITDCYRWVIHAGSKSPTEPMPPRGSLTGVQTCRTSV

SEQ ID NO: 738678 - protein, 127 aa, Homo sapiens
SQGLCLRTFLRPSMRSSHRGPGFLLRPFSVPGHLFSLLLSPNLHLPPSSLSVLSHPCPWFRSHSTCLSGQAQGYRCSHLFPATFPPIFGRQKSQLSLEGRPGHPAGSSLRGAWSLVLFPSQPGCRPL

SEQ ID NO: 738679 - protein, 204 aa, Homo sapiens
GDASKAGSTTLLCRDGPGFYPHQSLHAWHRDTDAEALELDGRPHLLLASASQRPVLFHWTGGRFERRTDIPEAEDVYATRHFQAGGDVFLCLTRYIGDSMVMRWDGSMFRLLQQLPSRGAHVFQPLLIARDQLAILGSDFAFSQVLRLEPDKGLLEPLQELGPPALVAPRAFAHITMAGRRFLFAACFKGPTQIYQHHEIDLSA

SEQ ID NO: 738680 - protein, 204 aa, Homo sapiens; identical to SEQ ID NO: 738679

SEQ ID NO: 738681 - protein, 103 aa, Homo sapiens
TYSPSATASSSTSTTPSGAPRSLQSPWPAPPPLRPPESRACLAQAGRTEGQTDSSSLALRRCCLTRPRVGRTGIAPRAPRGVISGWLHASAEDPSSCQCHLSA

SEQ ID NO: 738682 - protein, 103 aa, Homo sapiens; identical to SEQ ID NO: 738681

SEQ ID NO: 738683 - protein, 103 aa, Homo sapiens; identical to SEQ ID NO: 738681

SEQ ID NO: 738684 - protein, 111 aa, Homo sapiens
EAPDPYTQAAAVAGSQLSQDSATVEESPGKLPATWFRPTASKRNCSAAPGVMQKMGSFWSTHGLGDRAWTAAATMQLMGLATGLHLSAGPPRRSCDISSYFRTNAEDCHGV

SEQ ID NO: 738685 - protein, 486 aa, Homo sapiens
MPRPAPARRLPGLLLLLWPLLLLPSAAPDPVARPGFRRLETRGPGGSPGRRPSPAAPDGAPASGTSEPGRARGAGVCKSRPLDLVFIIDSSRSVRPLEFTKVKTFVSRIIDTLDIGPADTRVAVVNYASTVKIEFQLQAYTDKQSLKQAVGRITPLSTGTMSGLAIQTAMDEAFTVEAGAREPSSNIPKVAIIVTDGRPQDQVNEVAARAQASGIELYAVGVDRADMASLKMMASEPLEEHVFYVETYGVIEKLSSRFQETFCALDPCVLGTHQCQHVCISDGEGKHHCECSQGYTLNADKKTCSALDRCALNTHGCEHICVNDRSGSYHCECYEGYTLNEDRKTCSAQDKCALGTHGCQHICVNDRTGSHHCECYEGYTLNADKKTCSVRDKCALGSHGCQHICVSDGAASYHCDCYPGYTLNEDKKTCSATEEARRLVSTEDACGCEATLAFQDKVSSYLQRLNTKLDDILEKLKINEYGQIHR

SEQ ID NO: 738686 - protein, 486 aa, Homo sapiens; identical to SEQ ID NO: 738685

SEQ ID NO: 738687 - protein, 110 aa, Homo sapiens
HLRPRTRPFCGGSPQRPSAQLRRLTRDAPKLLKAFQSFPTLENRPVRVSPSSRTPPWRGEERTGNAEPPRRLGETDPLPLPAHFPVLVTRGAAHSLSGGTSAKTPEEMKR

SEQ ID NO: 738688 - protein, 32 aa, Homo sapiens
MGGLRGGAEPGPLAPTLVSFRSAGASWDPAVC

SEQ ID NO: 738689 - protein, 119 aa, Homo sapiens
LGDRVRLCQKERKEGERKRKKERKKERKKERKRKKIETIWHEIPLLPASLPQKYLGLPALTSSPPVSENWVRHLYRHQNLFPSALDSSAFTPHIFPRGLCSTSFHLPLSLSLSLALSMC

SEQ ID NO: 738690 - protein, 107 aa, Homo sapiens
RESENWLDEGEKAHKLLYVLTYFILQQSCEADTVTTSTPIVLARIQWLRDLPKAIELIAKLELEPMSSAAASTAGPPQPSRLDTVSSCASQLRGIRNPSPCRGFLES

SEQ ID NO: 738691 - protein, 46 aa, Homo sapiens
MTRYQLQNKGGPGVPLQLSGGRTATSNGPTSAHCVTGYREYPWVRP

SEQ ID NO: 738692 - protein, 182 aa, Homo sapiens
MAEFPSKVSTRTSSPAQGAEASVSALRPDLGFVRSRLGALMLLQLVLGLLVWALIADTPYHLYPAYGWVMFVAVFLWLVTIVLFNLYLFQLHMKLYMVPWPLVLMIFNISATVLYITAFIACSAAVDLTSLRGTRPYNQRAAASFFACLVMIAYGVSAFFSYQAWRGVGSNAATSQMAGGYA

SEQ ID NO: 738693 - protein, 182 aa, Homo sapiens; identical to SEQ ID NO: 738692

SEQ ID NO: 738694 - protein, 182 aa, Homo sapiens; identical to SEQ ID NO: 738692

SEQ ID NO: 738695 - protein, 182 aa, Homo sapiens; identical to SEQ ID NO: 738692

SEQ ID NO: 738696 - protein, 182 aa, Homo sapiens; identical to SEQ ID NO: 738692

SEQ ID NO: 738697 - protein, 113 aa, Homo sapiens
MFVAVFLWLVTIVLFNLYLFQLHMKLYMVPWPLVLMIFNISATVLYITAFIACSAAVDLTSLRGTRPYNQRAAASFFACLVMIAYGVSAFFSYQAWRGVGSNAATSQMAGGYA

SEQ ID NO: 738698 - protein, 260 aa, Homo sapiens
AEITPLHPNLGDRARLCLKKKKRNRKRSGAVAHNCNLKHFGRPRWEDHLCPGIWDQRGNIIEFLTGEFIYRMYTIDMHSQLELTASLIPQPGTSLIPLVMVSNPHSLGFQATFYENGYTSDGNTKYKLDIFLKQQQHWGRTDSNFTSSLKKATMSTLTVDIANKEISCVDIKPLSTLISVGCDLDKKIVIQNKVSACSMGILDPLTLQDNYSFIIEKEFYDPGFQGQQSSEDLHVFYSYQQLGCPLLVYYDTLWKPVVEL

SEQ ID NO: 738699 - protein, 73 aa, Homo sapiens
MTCSPCVYNPFLHVCTRSEQNPASTGEDQMRDGGCSSKVWDGGLREPLGVAKALHTSELQTLKKRAELHGAAR

SEQ ID NO: 738700 - protein, 73 aa, Homo sapiens; identical to SEQ ID NO: 738699

SEQ ID NO: 738701 - protein, 1893 aa, Homo sapiens [sequence omitted]

SEQ ID NO: 738702 - protein, 1839 aa, Homo sapiens
MMDLVLEEDVTVPGTLSGCSGLVPSVPDDLDGINPNAGLGNGLLPNVSEETVSPTRARNMKDFENQITELKKENFNLKLRIYFLEERMQQEFHGPTEHIYKTNIELKVEVESLKRELQEREQLLIKASKAVESLAEAGGSEIQRVKEDARKKVQQVEDLLTKRILLLEKDVTAAQAELEKAFAGTETEKALRLRLESKLSEMKKMHEGDLAMALVLDEKDRLHKWSIKKERNSFQERIQALEEDLREKEREIATEKKNSLKRDKAIQGLTMALKSKEKKVEELNSEIEKLSAAFAKAREALQKAQTQEFQGSEDYETALSGKEALSAALRSQNLTKSTENHRLRRSIKKITQELSDLQQERERLEKDLEEAHREKSKGDCTIRDLRNEVEKLRNEVNEREKAMENRYKSLLSESNKKLHNQEQVIKHLTESTNQKDVLLQKFNEKDLEVIQQNCYLMAAEDLELRSEGLITEKCSSQQPPGSKTIFSKEKKQSSDYEELIQVLKKEQDIYTHLVKSLQESDSINNLQAELNKIFALRKQLEQDVLSYQNLRKTLEEQISEIRRREEESFSLYSDQTSYLSICLEENNRFQVEHFSQEELKKKVSDLIQLVKELYTDNQHLKKTIFDLSCMGFQGNGFPDRLASTEQTELLASKEDEDTIKIGEDDEINFLSDQHLQQSNEIMKDLSKGGCKNGYLRHTESKISDCDGAHAPGCLEEGAFINLLAPLFNEKATLLLESRPDLLKVVRELLLGQLFLTEQEVSGEHLDGKTEKTPKQKGELVHFVQTNSFSKPHDELKLSCEAQLVKAGEVPKVGLKDASVQTVATEGDLLRFKHEATREAWEEKPINTALSAEHRPENLHGVPGWQAALLSLPGITNREAKKSRLPILIKPSRSLGNMYRLPATQEVVTQLQSQILELQGELKEFKTCNKQLHQKLILAEAVMEGRPTPDKTLLNAQPPVGAAYQDSPGEQKGIKTTSSVWRDKEMDSDQQRSYEIDSEICPPDDLASLPSCKENPEDVLSPTSVATYLSSKSQPSAKVSVMGTDQSESINTSNETEYLKQKIHDLETELEGYQNFIFQLQKHSQCSEAIITVLCGTEGAQDGLSKPKNGSDGEEMTFSSLHQVRYVKHVKILGPLAPEMIDSRVLENLKQQLEEQEYKLQKEQNLNMQLFSEIHNLQNKFRDLSPPRYDSLVQSQARELSLQRQQIKDGHGICVISRQHMNTMIKAFEELLQASDVDYCVAEGFQEQLNQCAELLEKLEKLFLNGKSVGVEMNTQNELMERIEEDNLTYQHLLPESPEPSASHALSDYETSEKSFFSRDQKQDNETEKTSVMVNSFSQDLLMEHIQEIRTLRKRLEESIKTNEKLRKQLERQGSEFVQGSTSIFASGSELHSSLTSEIHFLRKQNQALNAMLIKGSRDKQKENDKLRESLSRKTVSLEHLQREYASVKEENERLQKEGSEKERHNQQLIQEVRCSGQELSRVQEELKLRQQLLSQNDKLLQSLRVELKAYEKLDEEHRRLREASGEGWKGQDPFRDLHSLLMEIQALRLQLERSIETSSTLQSRLKEQLARGAEKAQEGALTLAVQAVSIPEVPLQPDKHDGDKYPMESDNSFDLFDSSQAVTPKSVSETPPLSGNDTDSLSCDSGSSATSTPCVSRLVTGHHLWASKNGRHVLGLIEDYEALLKQISQGQRLLAEMDIQTQEAPSSTSQELGTKGPHPAPLSKFVSSVSTAKLTLEEAYRRLKLLWRVSLPEDGQCPLHCEQIGEMKAEVTKLHKKLFEQEKKLQNTMKLLQLSKRQEKVIFDQLVVTHKILRKARGNLELRPGGAHPGTCSPSRPGS

SEQ ID NO: 738703 - protein, 1952 aa, Homo sapiens
HHHHQRPKVDKITKMGKKQNRKTGNSKTQSASPPPKERSSSPATEQSWMENDFDELREEGFRRSNYSELRDDIQTKGKEVENFEKNLEECITRITNTEKCLKELMGAGRAIFSHQSRNMKDFENQITELKKENFNLKLRIYFLEERMQQEFHGPTEHIYKTNIELKVEVESLKRELQEREQLLIKASKAVESLAEAGGSEIQRVKEDARKKVQQVEDLLTKRILLLEKDVTAAQAELEKAFAGTETEKALRLRLESKLSEMKKMHEGDLAMALVLDEKDRLIEELKLSLKSKEALIQCLKEEKSQMACPDENVSSGELRGLCAAPREEKERETEAAQMEHQKERNSFEERIQALEEDLREKEREIATEKKNSLKRDKAIQGLTMALKSKEKKVEELNSEIEKLSAAFAKAREALQKAQTQEFQGSEDYETALSGKEALSAALRSQNLTKSTENHRLRRSIKKITQELSDLQQERERLEKDLEEAHREKSKGDCTIRDLRNEVEKLRNEVNEREKAMENRYKSLLSESNKKLHNQEQVIKHLTESTNQKDVLLQKFNEKDLEVIQQNCYLMAAEDLELRSEGLITEKCSSQQPPGSKTIFSKEKKQSSDYEELIQVLKKEQDIYTHLVKSLQESDSINNLQAELNKIFALRKQLEQDVLSYQNLRKTLEEQISEIRRREEESFSLYSDQTSYLSICLEENNRFQVEHFSQEELKKKVSDLIQLVKELYTDNQHLKKTIFDLSCMGFQGNGFPDRLASTEQTELLASKEDEDTIKIGEDDEINFLSDQHLQQSNEIMKDLSKGGCKNGYLRHTESKISDCDGAHAPGCLEEGAFINLLAPLFNEKATLLLESRPDLLKVVRELLLGQLFLTEQEVSGEHLDGKTEKTPKQKGELVHFVQTNSFSKPHDELKLSCEAQLVKAGEVPKVGLKDASVQTVATEGDLLRFKHEATREAWEEKPINTALSAEHRPENLHGVPGWQAALLSLPGITNREAKKSRLPILIKPSRSLGNMYRLPATQEVVTQLQSQILELQGELKEFKTCNKQLHQKLILAEAVMEGRPTPDKTLLNAQPPVGAAYQDSPGEQKGIKTTSSVWRDKEMDSDQQRSYEIDSEICPPDDLASLPSCKENPEDVLSPTSVATYLSSKSQPSAKVSVMGTDQSESINTSNETEYLKQKIHDLETELEGYQNFIFQLQKHSQCSEAIITVLCGTEGAQDGLSKPKNGSDGEEMTFSSLHQVRYVKHVKILGPLAPEMIDSRVLENLKQQLEEQEYKLQKEQNLNMQLFSEIHNLQNKFRDLSPPRYDSLVQSQARELSLQRQQIKDGHGICVISRQHMNTMIKAFEELLQASDVDYCVAEGFQEQLNQCAELLEKLEKLFLNGKSVGVEMNTQNELMERIEEDNLTYQHLLPESPEPSASHALSDYETSEKSFFSRDQKQDNETEKTSVMVNSFSQDLLMEHIQEIRTLRKRLEESIKTNEKLRKQLERQGSEFVQGSTSIFASGSELHSSLTSEIHFLRKQNQALNAMLIKGSRDKQKENDKLRESLSRKTVSLEHLQREYASVKEENERLQKEGSEKERHNQQLIQEVRCSGQELSRVQEELKLRQQLLSQNDKLLQSLRVELKAYEKLDEEHRRLREASGEGWKGQDPFRDLHSLLMEIQALRLQLERSIETSSTLQSRLKEQLARGAEKAQEGALTLAVQAVSIPEVPLQPDKHDGDKYPMESDNSFDLFDSSQAVTPKSVSETPPLSGNDTDSLSCDSGSSATSTPCVSRLVTGHHLWASKNGRHVLGLIEDYEALLKQISQGQRLLAEMDIQTQEAPSSTSQELGTKGPHPAPLSKFVSSVSTAKLTLEEAYRRLKLLWRVSLPEDGQCPLHCEQIGEMKAEVTKLHKKLFEQEKKLQNTMKLLQLSKRQEKVIFDQLVVTHKILRKARGNLELRPGGAHPGTCSPSRPGS

SEQ ID NO: 738704 - protein, 543 aa, Homo sapiens
MDAFTGSGLKRKFDDVDVGSSVSNSDDEISSSDSADSCDSLNPPTTASFTPTSILKRQKQLRRKNVRFDQVTVYYFARRQGFTSVPSQGGSSLGMAQRHNSVRSYTLCEFAQEQEVNHREILREHLKEEKLHAKKMKLTKNGTVESVEADGLTLDDVSDEDIDVENVEVDDYFFLQPLPTKRRRALLRASGVHRIDAEEKQELRAIRLSREECGCDCRLYCDPEACACSQAGIKCQVDRMSFPCGCSRDGCGNMAGRIEFNPIRVRTHYLHTIMKLELESKRQVSRPAAPDEEPSPTASCSLTGAQGSETQDFQEFIAENETAVMHLQSAEELERLKAEEDSSGSSASLDSSIESLGVCILEEPLAVPEELCPGLTAPILIQAQLPPGSSVLCFTENSDHPTASTVNSPSYLNSGPLVYYQVEQRPVLGVKGEPGTEEGSASFPKEKDLNVFSLPVTSLVACSSTDPAALCKSEVGKTPTLEALLPEDCNPEEPENEDFHPSWSPSSLPFRTDNEEGCGMVKTSQQNEDRPPEDSSLELPLAV

SEQ ID NO: 738705 - protein, 543 aa, Homo sapiens; identical to SEQ ID NO: 738704

SEQ ID NO: 738706 - protein, 543 aa, Homo sapiens; identical to SEQ ID NO: 738704

SEQ ID NO: 738707 - protein, 543 aa, Homo sapiens; identical to SEQ ID NO: 738704

SEQ ID NO: 738708 - protein, 543 aa, Homo sapiens; identical to SEQ ID NO: 738704

SEQ ID NO: 738709 - protein, 543 aa, Homo sapiens; identical to SEQ ID NO: 738704

SEQ ID NO: 738710 - protein, 60 aa, Homo sapiens
MAQRHNSVRSYTLCEFAQEQEVNHREILREHLKEEKLHAKKMKLTKNGTVESVEADGLTL

SEQ ID NO: 738711 - protein, 153 aa, Homo sapiens
SGGLGQDVPAPIRASALRPDPIVSRSRGGSGRLLPGAPELPETPGPLCLPAGLPTALPPRPAALGAPRPSPRGPGLARSSLLPTGLGRRRQRGRQRPSREEAAAAGPVMGLGVRGGGCRLVLSRDRPSGGRGGVVKPRAVRMEGILMYLASWW

SEQ ID NO: 738712 - protein, 119 aa, Homo sapiens
SGGLGQDVPAPIRASALRPDPIVSRSRGGSGRLLPGAPELPETPGPLCLPAGLPTALPPRPAALGAPRPSPRGPGLARSSLLPTGLGRRRQRGRQRPSREEAAAAGPAQVTQPTATRPF

SEQ ID NO: 738713 - protein, 60 aa, Homo sapiens; identical to SEQ ID NO: 738710

SEQ ID NO: 738714 - protein, 60 aa, Homo sapiens; identical to SEQ ID NO: 738710

SEQ ID NO: 738715 - protein, 60 aa, Homo sapiens; identical to SEQ ID NO: 738710

SEQ ID NO: 738716 - protein, 532 aa, Homo sapiens
GPGRTEKGSALRVAGVTYLVSCFRDMAFNFGAPSGTSGTAAATAAPAGGFGGFGTTSTTAGSAFSFSAPTNTGTTGLFGGTQNKGFGFGTGFGTTTGTSTGLGTGLGTGLGFGGFNTQQQQQTTLGGLFSQPTQAPTQSNQLINTASALSAPTLLGDERDAILAKWNQLQAFWGTGKGYFNNNIPPVEFTQENPFCRFKAVGYSCMPSNKDEDGLVVLVFNKKETEIRSQQQQLVESLHKVLGGNQTLTVNVEGTKTLPDDQTEVVIYVVERSPNGTSRRVPATTLYAHFEQANIKTQLQQLGVTLSMTRTELSPAQIKQLLQNPPAGVDPIIWEQAKVDNPDSEKLIPVPMVGFKELLRRLKVQDQMTKQHQTRLDIISEDISELQKNQTTSVAKIAQYKRKLMDLSHRTLQVLIKQEIQRKSGYAIQADEEQLRVQLDTIQGELNAPTQFKGRLNELMSQIRMQNHFGAVRSEERYYIDADLLREIKQHLKQQQEGLSHLISIIKDDLEDIKLVEHGLNETIHIRGGVFS

SEQ ID NO: 738717 - protein, 121 aa, Homo sapiens
GPGRTEKGSALRVAGVTYLVSCFRDMAFNFGAPSGTSGTAAATAAPAGGFGGFGTTSTTAGSAFSFSAPTNTGTTGLFGGTQNKGFGFGTGFGTTTGTSTGLGTGLGTGLPFVALFLPSAL

SEQ ID NO: 738718 - protein, 149 aa, Homo sapiens
HIFYIVYFVIPQAVGYSCMPSNKDEDGLVVLVFNKKETEIRSQQQQLVESLHKVLGGNQTLTVNVEGTKTLPDDQTEVVIYVVERSPNGTSRRVPATTLYAHFEQANIKTQLQQLGVTLSMTRTELSPAQIKQLLQNPPAGMFLESQSS

SEQ ID NO: 738719 - protein, 346 aa, Homo sapiens
GPGRTEKGSALRVAGVTYLVSCFRDMAFNFGAPSGTSGTAAATAAPAGGFGGFGTTSTTAGSAFSFSAPTNTGTTGLFGGTQNKGFGFGTGFGTTTGTSTGLGTGLGTGLGFGGFNTQQQQQTTLGGLFSQPTQAPTQSNQLINTASALSAPTLLGDERDAILAKWNQLQAFWGTGKGYFNNNIPPVEFTQENPFCRFKAVGYSCMPSNKDEDGLVVLVFNKKETEIRSQQQQLVESLHKVLGGNQTLTVNVEGTKTLPDDQTEVVIYVVERSPNGTSRRVPATTLYAHFEQANIKTQLQQLGVTLSMTRTELSPAQIKQLLQNPPAGVDPIIWEQAKVDNPDSEK

SEQ ID NO: 738720 - protein, 463 aa, Homo sapiens
GPGRTEKGSALRVAGVTYLVSCFRDMAFNFGAPSGTSGTAAATAAPAGGFGGFGTTSTTAGSAFSFSAPTNTGTTGLFGGTQNKGFGFGTGFGTTTGTSTGLGTGLGTGLGFGGFNTQQQQQTTLGGLFSQPTQAPTQSNQLINTASALSAPTLLGDERDAILAKWNQLQAFWGTGKGYFNNNIPPVEFTQENPFCRFKAVGYSCMPSNKDEDGLVVLVFNKKETEIRSQQQQLVESLHKVLGGNQTLTVNVEGTKTLPDDQTEVVIYVVERSPNGTSRRVPATTLYAHFEQANIKTQLQQLGVTLSMTRTELSPAQIKQLLQNPPAGVDPIIWEQAKVDNPDSEKLIPVPMVGFKELLRRLKVQDQMTKQHQTRLDIISEDISELQKNQTTSVAKIAQYKRKLMDLSHRTLQVLIKQEIQRKSGYAIQADEEQLRVQLDTIQGELNAPTQFKDAESFWSSQI

SEQ ID NO: 738721 - protein, 327 aa, Homo sapiens
MPSNKDEDGLVVLVFNKKETEIRSQQQQLVESLHKVLGGNQTLTVNVEGTKTLPDDQTEVVIYVVERSPNGTSRRVPATTLYAHFEQANIKTQLQQLGVTLSMTRTELSPAQIKQLLQNPPAGVDPIIWEQAKVDNPDSEKLIPVPMVGFKELLRRLKVQDQMTKQHQTRLDIISEDISELQKNQTTSVAKIAQYKRKLMDLSHRTLQVLIKQEIQRKSGYAIQADEEQLRVQLDTIQGELNAPTQFKGRLNELMSQIRMQNHFGAVRSEERYYIDADLLREIKQHLKQQQEGLSHLISIIKDDLEDIKLVEHGLNETIHIRGGVFS

SEQ ID NO: 738722 - protein, 327 aa, Homo sapiens; identical to SEQ ID NO: 738721

SEQ ID NO: 738723 - protein, 128 aa, Homo sapiens
MDLSHRTLQVLIKQEIQRKSGYAIQADEEQLRVQLDTIQGELNAPTQFKGRLNELMSQIRMQNHFGAVRSEERYYIDADLLREIKQHLKQQQEGLSHLISIIKDDLEDIKLVEHGLNETIHIRGGVFS

SEQ ID NO: 738724 - protein, 109 aa, Homo sapiens
MSGRLWSKAIFAGYKRGLRNQREHTALLKIEGVYARDETEFYLGKRCAYVYKAKNNTVTPGGKPNKTRVIWGKVTRAHGNSGMVRAKFRSNLPAKAIGHRIRVMLYPSR

SEQ ID NO: 738725 - protein, 109 aa, Homo sapiens; identical to SEQ ID NO: 738724

SEQ ID NO: 738726 - protein, 105 aa, Homo sapiens
MSGRLWSKAIFAGYKRGLRNQREHTALLKIEGVYARDETEFYLGKRCAYVYKAKNNTVTPGGKPNKTRVIWGKVTRAHGNSGMGFVPNFRSNLPAKGHLDNRIPS

SEQ ID NO: 738727 - protein, 114 aa, Homo sapiens
GAMAGHSLPDIVPFRSPVSQQAIFAGYKRGLRNQREHTALLKIEGVYARDETEFYLGKRCAYVYKAKNNTVTPGGKPNKTRVIWGKVTRAHGNSGMVRAKFRSNLPAKAIGHRI

SEQ ID NO: 738728 - protein, 80 aa, Homo sapiens
ARKTLAHHIGHLWWAADENNFIVGIELCPPGKRFMITMVASFVAMAGQFLMPGLAALCRDWQVLQALIICPFLLMLLYWS

SEQ ID NO: 738729 - protein, 281 aa, Homo sapiens
RCLPSSPWWGEDDRDESSEKHFEGGGAEGHTWKGDLFLGRCQVSAAFTQKPMMSEPGFFKVSQPAYPQSLSDCGRSQRSLSRGTELSCRRLSVKIQGAEAWARSTGLRCRRTGLNPSTTASTLRNLGDYSAPWNLISKWDLVCDNAWKVHIAKFSLLVGLIFGYLITGCIADWVGRRPVLLFSIIFILIFGLTVALSVNVTMFSTLRFFEGFCLAGIILTLYALRIELCPPGKRFMITMVASFVAMAGQFLMPGLAALCRDWQVLQALIICPFLLMLLYWS

SEQ ID NO: 738730 - protein, 175 aa, Homo sapiens
GYQKTLVLLTWIPALFIGFSQFSDSFLLDQPNFWCRGAGKGTELAGVTTTGRGGDMGNWTSLPTTPFATAPWEVLFSIIFILIFGLTVALSVNVTMFSTLRFFEGFCLAGIILTLYALRIELCPPGKRFMITMVASFVAMAGQFLMPGLAALCRDWQVLQALIICPFLLMLLYWS

SEQ ID NO: 738731 - protein, 139 aa, Homo sapiens
PWVPAESSGQAGLTREWRPLVTPQEEMREHEGVADTTTRSTRPTAPRGADCESCLLPQSLTSIWWKHASFLLILQSQRRKGAGLKSPSKVGAETGERLAWGQSRCLGGKYLMGLESAEAQGGSKLHLLPAGTCGKSFSP

SEQ ID NO: 738732 - protein, 848 aa, Homo sapiens
RRRRHFSCWFRPHRVGCSSGRGGGPPELSGCPRLCPYSSQLSSLITARSKSARMSKRHRLDLGEDYPSGKKRAGTDGKDRDRDRDREDRSKDRDRERDRGDREREREKEKEKELRASTNAMLISAGLPPLKASHSAHSTHSAHSTHSTHSAHSTHAGHAGHTSLPQCINPFTNLPHTPRYYDILKKRLQLPVWEYKDRFTDILVRHQSFVLVGETGSGKTTQIPQWCVEYMRSLPGPKRGVACTQPRRVAAMSVAQRVADEMDVMLGQEVGYSIRFEDCSSAKTILKYMTDGMLLREAMNDPLLERYGVIILDEAHERTLATDILMGVLKEVVRQRSDLKVIVMSATLDAGKFQIYFDNCPLLTIPGRTHPVEIFYTPEPERDYLEAAIRTVIQIHMCEEEEGDLLLFLTGQEEIDEACKRIKREVDDLGPEVGDIKIIPLYSTLPPQQQQRIFEPPPPKKQNGAIGRKVVVSTNIAETSLTIDGVVFVIDPGFAKQKVYNPRIRVESLLVTAISKASAQQRAGRAGRTRPGKCFRLYTEKAYKTEMQDNTYPEILRSNLGSVVLQLKKLGIDDLVHFDFMDPPAPETLMRALELLNYLAALNDDGDLTELGSMMAEFPLDPQLAKMVIASCDYNCSNEVLSITAMLSVPQCFVRPTEAKKAADEAKMRFAHIDGDHLTLLNVYHAFKQNHESVQWCYDNFINYRSLMSADNVRQQLSRIMDRFNLPRRSTDFTSRDYYINIRKALVTGYFMQVAHLERTGHYLTVKDNQVVQLHPSTVLDHKPEWVLYNEFVLTTKNYIRTCTDIKPEWLVKIAPQYYDMSNFPQCEAKRQLDRIIAKLQSKEYSQY

SEQ ID NO: 738733 - protein, 614 aa, Homo sapiens
ADSKGIPLIAQPRRVAAMSVAQRVADEMDVMLGQEVGYSIRFEDCSSAKTILKYMTDGMLLREAMNDPLLERYGVIILDEAHERTLATDILMGVLKEVVRQRSDLKVIVMSATLDAGKFQIYFDNCPLLTIPGRTHPVEIFYTPEPERDYLEAAIRTVIQIHMCEEEEGDLLLFLTGQEEIDEACKRIKREVDDLGPEVGDIKIIPLYSTLPPQQQQRIFEPPPPKKQNGAIGRKVVVSTNIAETSLTIDGVVFVIDPGFAKQKVYNPRIRVESLLVTAISKASAQQRAGRAGRTRPGKCFRLYTEKAYKTEMQDNTYPEILRSNLGSVVLQLKKLGIDDLVHFDFMDPPAPETLMRALELLNYLAALNDDGDLTELGSMMAEFPLDPQLAKMVIASCDYNCSNEVLSITAMLSVPQCFVRPTEAKKAADEAKMRFAHIDGDHLTLLNVYHAFKQNHESVQWCYDNFINYRSLMSADNVRQQLSRIMDRFNLPRRSTDFTSRDYYINIRKALVTGYFMQVAHLERTGHYLTVKDNQVVQLHPSTVLDHKPEWVLYNEFVLTTKNYIRTCTDIKPEWLVKIAPQYYDMSNFPQCEAKRQLDRIIAKLQSKEYSQY

SEQ ID NO: 738734 - protein, 814 aa, Homo sapiens
RRRRHFSCWFRPHRVGCSSGRGGGPPELSGCPRLCPYSSQLSSLITARSKSARMSKRHRLDLGEDYPSGKKRAGTDGKDRDRDRDREDRSKDRDRERDRGDREREREKEKEKELRASTNAMLISAGLPPLKASHSAHSTHSAHSTHSTHSAHSTHAGHAGHTSLPQCINPFTNLPHTPRYYDILKKRLQLPVWEYKDRFTDILVRHQSFVLVGETGSGKTTQIPQWCVEYMRSLPGPKRGVACTQPRRVAAMSVAQRVADEMDVMLGQEVGYSIRFEDCSSAKTILKYMTDGMLLREAMNDPLLERYGVIILDEAHERTLATDILMGVLKEVVRQRSDLKVIVMSATLDAGKFQIYFDNCPLLTIPGRTHPVEIFYTPEPERDYLEAAIRTVIQIHMCEEEEGDLLLFLTGQEEIDEACKRIKREVDDLGPEVGDIKIIPLYSTLPPQQQQRIFEPPPPKKQNGAIGRKVVVSTNIAETSLTIDGVVFVIDPGFAKQKVYNPRIRVESLLVTAISKASAQQRAGRAGRTRPGKCFRLYTEKAYKTEMQAPAPETLMRALELLNYLAALNDDGDLTELGSMMAEFPLDPQLAKMVIASCDYNCSNEVLSITAMLSVPQCFVRPTEAKKAADEAKMRFAHIDGDHLTLLNVYHAFKQNHESVQWCYDNFINYRSLMSADNVRQQLSRIMDRFNLPRRSTDFTSRDYYINIRKALVTGYFMQVAHLERTGHYLTVKDNQVVQLHPSTVLDHKPEWVLYNEFVLTTKNYIRTCTDIKPEWLVKIAPQYYDMSNFPQCEAKRQLDRIIAKLQSKEYSQY

SEQ ID NO: 738735 - protein, 397 aa, Homo sapiens
HSKGHTFPKKQNGAIGRKVVVSTNIAETSLTIDGVVFVIDPGFAKQKVYNPRIRVESLLVTAISKASAQQRAGRAGRTRPGKCFRLYTEKAYKTEMQDNTYPEILRSNLGSVVLQLKKLGIDDLVHFDFMDPPAPETLMRALELLNYLAALNDDGDLTELGSMMAEFPLDPQLAKMVIASCDYNCSNEVLSITAMLSVPQCFVRPTEAKKAADEAKMRFAHIDGDHLTLLNVYHAFKQNHESVQWCYDNFINYRSLMSADNVRQQLSRIMDRFNLPRRSTDFTSRDYYINIRKALVTGYFMQVAHLERTGHYLTVKDNQVVQLHPSTVLDHKPEWVLYNEFVLTTKNYIRTCTDIKPEWLVKIAPQYYDMSNFPQCEAKRQLDRIIAKLQSKEYSQY

SEQ ID NO: 738736 - protein, 848 aa, Homo sapiens; identical to SEQ ID NO: 738732

SEQ ID NO: 738737 - protein, 848 aa, Homo sapiens; identical to SEQ ID NO: 738732

SEQ ID NO: 738738 - protein, 762 aa, Homo sapiens
RRRRHFSCWFRPHRVGCSSGRGGGPPELSGCPRLCPYSSQLSSLITARSKSARMSKRHRLDLGEDYPSGKKRAGTDGKDRDRDRDREDRSKDRDRERDRGDREREREKEKEKELRASTNAMLISAGLPPLKASHSAHSTHSAHSTHSTHSAHSTHAGHAGHTSLPQCINPFTNLPHTPRYYDILKKRLQLPVWEYKDRFTDILVRHQSFVLVGETGSGKTTQIPQWCVEYMRSLPGPKRGVACTQPRRVAAMSVAQRVADEMDVMLGQEVGYSIRFEDCSSAKTILKYMTDGMLLREAMNDPLLERYGVIILDEAHERTLATDILMGVLKEVVRQRSDLKVIVMSATLDAGKFQIYFDNCPLLTIPGRTHPVEIFYTPEPERDYLEAAIRTVIQIHMCEEEEGDLLLFLTGQEEIDEACKRIKREVDDLGPEVGDIKIIPLYSTLPPQQQQRIFEPPPPKKQNGAIGRKVVVSTNIAETSLTIDGVVFVIDPGFAKQKVYNPRIRVESLLVTAISKASAQQRAGRAGRTRPGKCFRLYTEKAYKTEMQDNTYPEILRSNLGSVVLQLKKLGIDDLVHFDFMDPPAPETLMRALELLNYLAALNDDGDLTELGSMMAEFPLDPQLAKMVIASCDYNCSNEVLSITAMLSVPQCFVRPTEAKKAADEAKMRFAHIDGDHLTLLNVYHAFKQNHESVQWCYDNFINYRSLMSADNVRQQLSRIMDRFNLPRRSTDFTSRDYYINIRKALVTGYFMQVGENCPSIL

SEQ ID NO: 738739 - protein, 826 aa, Homo sapiens
RRRRHFSCWFRPHRVGCSSGRGGGPPELSGCPRLCPYSSQLSSLITARSKSARMSKRHRLDLGEDYPSGKKRAGTDGKDRDRDRDREDRSKDRDRERDRGDREREREKEKEKELRASTNAMLISAGLPPLKASHSAHSTHSAHSTHSTHSAHSTHAGHAGHTSLPQCINPFTNLPHTPRYYDILKKRLQLPVWEYKDRFTDILVRHQSFVLVGETGSGKTTQIPQWCVEYMRSLPGPKRGVACTQPRRVAAMSVAQRVADEMDVMLGQEVGYSIRFEDCSSAKTILKYMTDGMLLREAMNDPLLERYGVIILDEAHERTLATDILMGVLKEVVRQRSDLKVIVMSATLDAGKFQIYFDNCPLLTIPGRTHPVEIFYTPEPERDYLEAAIRTVIQIHMCEEEEGDLLLFLTGQEEIDEACKRIKREVDDLGPEVGDIKIIPLYSTLPPQQQQRIFEPPPPKKQNGAIGRKVVVSTNIAETSLTIDGVVFVIDPGFAKQKVYNPRIRVESLLVTAISKASAQQRAGRAGRTRPGKCFRLYTEKAYKTEMQDNTYPEILRSNLGSVVLQLKKLGIDDLVHFDFMDPPAPETLMRALELLNYLAALNDDGDLTELGSMMAEFPLDPQLAKMVIASCDYNCSNEVLSITAMLSVPQCFVRPTEAKKAADEAKMRFAHIDGDHLTLLNVYHAFKQNHESVQWCYDNFINYRSLMSADNVRQQLSRIMDRFNLPRRSTDFTSRDYYINIRKALVTGYFMQVAHLERTGHYLTVKDNQVVQLHPSTVLDHKPEWVLYNEFVLTTKNYIRTCTDIKPEWLDRIIAKLQSKEYSQY

SEQ ID NO: 738740 - protein, 848 aa, Homo sapiens; identical to SEQ ID NO: 738732

SEQ ID NO: 738741 - protein, 831 aa, Homo sapiens
RRRRHFSCWFRPHRVGCSSGRGGGPPELSGCPRLCPYSSQLSSLITARSKSARMSKRHRLDLGEDYPSGKKRAGTDGKDRDRDRDREDRSKDRDRERDRGDREREREKEKEKELRASTNAMLISAGLPPLKASHSAHSTHSAHSTHSTHSAHSTHAGHAGHTSLPQCINPFTNLPHTPRYYDILKKRLQLPVWEYKDRFTDILVRHQSFVLVGETGSGKTTQIPQWCVEYMRSLPGPKRGVACTQPRRVAAMSVAQRVADEMDVMLGQEVGYSIRFEDCSSAKTILKYMTDGMLLREAMNDPLLERYGVIILDEAHERTLATDILMGVLKEVVRQRSDLKVIVMSATLDAGKFQIYFDNCPLLTIPGRTHPVEIFYTPEPERDYLEAAIRTVIQIHMCEEEEGDLLLFLTGQEEIDEACKRIKREVDDLGPEVGDIKIIPLYSTLPPQQQQRIFEPPPPKKQNGAIGRKVVVSTNIAETSLTIDGVVFVIDPGFAKQKVYNPRIRVESLLVTAISKASAQQRAGRAGRTRPGKCFRLYTEKAYKTEMQDNTYPEILRSNLGSVVLQLKKLGIDDLVHFDFMDPPAPETLMRALELLNYLAALNDDGDLTELGSMMAEFPLDPQLAKMVIASCDYNCSNEVLSITAMLSVPQCFVRPTEAKKAADEAKMRFAHIDGDHLTLLNVYHAFKQNHESVQWCYDNFINYRSLMSADNVRQQLSRIMDRFNLPRRSTDFTSRDYYINIRKALVTGYFMQVAHLERTGHYLTVKDNQVVQLHPSTVLDHKPEWVLYNEFVLTTKNYIRTCTDIKPEWFHSTSKGIWKMSFTVCVHGEP

SEQ ID NO: 738742 - protein, 840 aa, Homo sapiens
RRRRHFSCWFRPHRVGCSSGRGGGPPELSGCPRLCPYSSQLSSLITARSKSARMSKRHRLDLGEDYPSGKKRAGTDGKDRDRDRDREDRSKDRDRERDRGDREREREKEKEKELRASTNAMLISAGLPPLKASHSAHSTHSAHSTHSTHSAHSTHAGHAGHTSLPQCINPFTNLPHTPRYYDILKKRLQLPVWEYKDRFTDILVRHQSFVLVGETGSGKTTQIPQWCVEYMRSLPGPKRGVACTQPRRVAAMSVAQRVADEMDVMLGQEVGYSIRFEDCSSAKTILKYMTDGMLLREAMNDPLLERYGVIILDEAHERTLATDILMGVLKEVVRQRSDLKVIVMSATLDAGKFQIYFDNCPLLTIPGRTHPVEIFYTPEPERDYLEAAIRTVIQIHMCEEEEGDLLLFLTGQEEIDEACKRIKREVDDLGPEVGDIKIIPLYSTLPPQQQQRIFEPPPPKKQNGAIGRKVVVSTNIAETSLTIDGVVFVIDPGFAKQKVYNPRIRVESLLVTAISKASAQQRAGRAGRTRPGKCFRLYTEKAYKTEMQDNTYPEILRSNLGSVVLQLKKLGIDDLVHFDFMDPPAPETLMRALELLNYLAALNDDGDLTELGSMMAEFPLDPQLAKMVIASCDYNCSNEVLSITAMLSVPQCFVRPTEAKKAADEAKMRFAHIDGDHLTLLNVYHAFKQNHESVQWCYDNFINYRSLMSADNVRQQLSRIMDRFNLPRRSTDFTSRDYYINIRKALVTGYFMQVAHLERTGHYLTVKDNQVVQLHPSTVLDHKPEWVLYNEFVLTTKNYIRTCTDIKPEWLVKIAPQYYDMSNFPQCEAKRQTKAFLICR

SEQ ID NO: 738743 - protein, 447 aa, Homo sapiens
RRRRHFSCWFRPHRVGCSSGRGGGPPELSGCPRLCPYSSQLSSLITARSKSARMSKRHRLDLGEDYPSGKKRAGTDGKDRDRDRDREDRSKDRDRERDRGDREREREKEKEKELRASTNAMLISAGLPPLKASHSAHSTHSAHSTHSTHSAHSTHAGHAGHTSLPQCINPFTNLPHTPRYYDILKKRLQLPVWEYKDRFTDILVRHQSFVLVGETGSGKTTQIPQWCVEYMRSLPGPKRGVACTQPRRVAAMSVAQRVADEMDVMLGQEVGYSIRFEDCSSAKTILKYMTDGMLLREAMNDPLLERYGVIILDEAHERTLATDILMGVLKEVVRQRSDLKVIVMSATLDAGKFQIYFDNCPLLTIPGRTHPVEIFYTPEPERDYLEAAIRTVIQIHMCEEEEGDLLLFLTGQEEIDEACKRIKREVDDLGPEVGYTEDRVFEPPGQP

SEQ ID NO: 738744 - protein, 108 aa, Homo sapiens [sequence omitted]

SEQ ID NO: 738745 - protein, 129 aa, Homo sapiens
FFNTNILKITEQATLKLFIYQEAPKIPSQLNGTDFYGQLITKMRHHMQYVLRGFLKSIDQSINQSMYLCIYLPTYLPTYLPIYLPTYLPYLLFIEMESSHSVTHAGVQWRDLGSLQPPPLGDKSKTPAS

SEQ ID NO: 738746 - protein, 313 aa, Homo sapiens
MGNFDNANVTGEIEFAIHYCFKTHSLEICIKACKNLAYGEEKKKKCNPYVKTYLLPDRSSQGKRKTGVQRNTVDPTFQETLKYQVAPAQLVTRQLQVSVWHLGTLARRVFLGEVIISLATWDFEDSTTQSFRWHPLRAKAEKYEDSVPQSNGELTVRAKLVLPSRPRKLQEAQEGTDQPSLHGQLCLVVLGAKNLPVRPDGTLNSFVKGCLTLPDQQKLRLKSPVLRKQACPQWKHSFVFSGVTPAQLRQSSLELTVWDQALFGMNDRLLGGTRLGSKGDTAVGGDACSQSKLQWQKVLSSPNLWTDMTLVLH

SEQ ID NO: 738747 - protein, 313 aa, Homo sapiens; identical to SEQ ID NO: 738746

SEQ ID NO: 738748 - protein, 177 aa, Homo sapiens
MAQYTAELRRYINMLTKPRHVPWTRREIPAPGTLGPLHIPGHTLSPAQAPSPAPVPAPSRPLLGKQSICADQAWAHVPWARGCLQADMKPVGWHLGTVLPGMEKETKRTRWPSQSGVFPCCCPQRAQPAGLVTLPPAPYHSTGSASPALPSTLLALAEAHSLFLHRLNKASQSTKYL

SEQ ID NO: 738749 - protein, 156 aa, Homo sapiens
EKKKLKCLAYDFYPGKIDVHWTRAGEVQEPELRGDVLHGGNGTYLTWLLVHVPPQDTAPYSCHVQHSSLPSPSWCPGRPGRKQGLEAMWDLSPSSCPSCLMWELNHRNHGQWILKAQGAVWGDRQEVDLETEDWDACPELTRTQKPSHLEPPPAIV

SEQ ID NO: 738750 - protein, 71 aa, Homo sapiens
VCLFTCSGWSAMWCNYAHWSINFLGSSNSPASASRVAGTTGVCHHAQLIFVFLVETGFHHIGQDGLDLLIS

SEQ ID NO: 738751 - protein, 317 aa, Homo sapiens
MKTALILLSILGMACAFSMKNLHRRVKIEDSEENGVFKYRPRYYLYKHAYFYPHLKRFPVQGSSDSSEENGDDSSEEEEEEEETSNEGENNEESNEDEDSEAENTTLSATTLGYGEDATPGTGYTGLAAIQLPKKAGDITNKATKEKESDEEEEEEEEGNENEESEAEVDENEQGINGTSTNSTEAENGNGSSGGDNGEEGEEESVTGANAEGTTETGGQGKGTSKTTTSPNGGFEPTTPPQVYRTTSPPFGKTTTVEYEGEYEYTGVNEYDNGYEIYESENGEPRGDNYRAYEDEYSYFKGQGYDGYDGQNYYHHQ

SEQ ID NO: 738752 - protein, 317 aa, Homo sapiens; identical to SEQ ID NO: 738751

SEQ ID NO: 738753 - protein, 92 aa, Homo sapiens
MGPLQFRDVAIEFSLEEWHCLDTAQRNLYRNVMLENYSNLVFLGITVSKPDLITCLEQGRKPLTMKRNEMIAKPSVSFLQVHSESQSPLHDI

SEQ ID NO: 738754 - protein, 353 aa, Homo sapiens
MSKPPDLLLRLLRGAPRQRVCTLFIIGFKFTFFVSIMIYWHVVGEPKEKGQLYNLPAEIPCPTLTPPTPPSHGPTPGNIFFLETSDRTNPNFLFMCSVESAARTHPESHVLVLMKGLPGGNASLPRHLGISLLSCFPNVQMLPLDLRELFRDTPLADWYAAVQGRWEPYLLPVLSDASRIALMWKFGGIYLDTDFIVLKNLRNLTNVLGTQSRYVLNGAFLAFERRHEFMALCMRDFVDHYNGWIWGHQGPQLLTRVFKKWCSIRSLAESRACRGVTTLPPEAFYPIPWQDWKKYFEDINPEELPRLLSATYAVHVWNKKSQGTRFEATSRALLAQLHARYCPTTHEAMKMYL

SEQ ID NO: 738755 - protein, 353 aa, Homo sapiens; identical to SEQ ID NO: 738754

SEQ ID NO: 738756 - protein, 353 aa, Homo sapiens; identical to SEQ ID NO: 738754

SEQ ID NO: 738757 - protein, 163 aa, Homo sapiens
MSKPPDLLLRLLRGAPRQRVCTLFIIGFKFTFFVSIMIYWHVVGEPKEKGQLYNLPAEIPCPTLTPPTPPSHGPTPGNIFFLETSDRTNPNFLFMCSVESAARTHPESHVLVLMKGLPGGKGQPLLPTPSFFLSRDARGACMLCPFPQTGAGWGGSLGSGEAF

SEQ ID NO: 738758 - protein, 353 aa, Homo sapiens; identical to SEQ ID NO: 738754

SEQ ID NO: 738759 - protein, 164 aa, Homo sapiens
ALPSGRRAARPPGPRCPPPAAAGARDGFAAAASVWKGRVRVGKEGRLLSQGVSPGGLWAARIPTSLQWAAQAGQLPASDISEVPCSLPWEGPSLSYQAPGSQYHPQPMWIATPPSACPWEGTGQPLLPTPSFFLSRDARGACMLCPFPQTGAGWGGSLGSGEAF

SEQ ID NO: 738760 - protein, 212 aa, Homo sapiens
QSQDLSMAATRCLRWGLSRAGVWLLPPPARCPRRALHKQKDGTEFKSIYSLDKLYPESQGSDTAWRVPNGAKQADSDIPLDRLTISYCRSSGPGGQNVNKVNSKAEVRFHLATAEWIAEPVRQKIAITHKNKINRLGELILTSESSRYQFRNLADCLQKIRDMITEASQTPKEPTKEDVKLHRIRIENMNRERLRQKRIHSAVKTSRRVDMD

SEQ ID NO: 738761 - protein, 164 aa, Homo sapiens
YARSWRGSAEEGSDTAWRVPNGAKQADSDIPLDRLTISYCRSSGPGGQNVNKVNSKAEVRFHLATAEWIAEPVRQKIAITHKNKINRLGELILTSESSRYQFRNLADCLQKIRDMITEASQTPKEPTKEDVKLHRIRIENMNRERLRQKRIHSAVKTSRRVDMD

SEQ ID NO: 738762 - protein, 199 aa, Homo sapiens
QSQDLSMAATRCLRWGLSRAGVWLLPPPARCPRRALHKQKDGTEFKSIYSLDKLYPESQGSDTAWRVPNGAKQADSDIPLDRLTISYCRSSGPGGQNVNKVNSKAEVRFHLATAEWIAEPVRQKIAITHKNKINRLGELILTSESSRYQFRNLADCLQKIRDMITEASQTPKEPTKEDVKLHRIRIRNMNRGKLETLPL

SEQ ID NO: 738763 - protein, 208 aa, Homo sapiens
QSQDLSMAATRCLRWGLSRAGVWLLPPPARCPRRALHKQKDGTEFKSIYSLDKLYPESQGSDTAWRVPVSREGLDEKGRFVRLLGDVRNPRPIGRMWSYVGGLRDGRRGRGLAVCANLAGSGVLAVARDVQEPGRPAGYASFKAASFSTFVSLALKTKFQSQGEIRAFWPSKADNKGKRLPSCLLPFGTLQCPLSLVTPGRANKTASL

SEQ ID NO: 738764 - protein, 212 aa, Homo sapiens; identical to SEQ ID NO: 738760

SEQ ID NO: 738765 - protein, 212 aa, Homo sapiens; identical to SEQ ID NO: 738760

SEQ ID NO: 738766 - protein, 212 aa, Homo sapiens; identical to SEQ ID NO: 738760

SEQ ID NO: 738767 - protein, 199 aa, Homo sapiens
  misc_feature (12)..(12): Xaa can be any naturally occurring amino acid
RVRYWDIDYPNXCPRPRCPRRALHKQKDGTEFKSIYSLDKLYPESQGSDTAWRVPNGAKQADSDIPLDRLTISYCRSSGPGGQNVNKVNSKAEVRFHLATAEWIAEPVRQKIAITHKNKINRLGELILTSESSRYQFRNLADCLQKIRDMITEASQTPKEPTKEDVKLHRIRIENMNRERLRQKRIHSAVKTSRRVDMD

SEQ ID NO: 738768 - protein, 72 aa, Homo sapiens
QSQDLSMAATRCLRWGLSRAGVWLLPPPARCPRRALHKQKDGTEFKSIYSLDKLYPESQGSDTAWRVPTESR

SEQ ID NO: 738769 - protein, 93 aa, Homo sapiens
QSQDLSMAATRCLRWGLSRAGVWLLPPPARCPRRALHKQKDGTEFKSIYSLDKLYPESQGSDTAWRVPNGAKQADSDIPLERYLYLKGTPWIQ

SEQ ID NO: 738770 - protein, 125 aa, Homo sapiens
QSQDLSMAATRCLRWGLSRAGVWLLPPPARCPRRALHKQKDGTEFKSIYSLDKLYPESQGSDTAWRVPVSREGLDGRGVLSGCWVTLGTPGPLAGCGATSGGYVMVAAGGGWLSALTWPGVGCSL

SEQ ID NO: 738771 - protein, 41 aa, Homo sapiens
MCSISNEQLPGLQDNLWLTSPRTGHLLNLASSPHRMGTRFK

SEQ ID NO: 738772 - protein, 140 aa, Homo sapiens
MESLVLMKPRGSLIRSACPDCFLLFCFSFFHEAEGCASRMLTPTLHWLFIDNIHRSPWDWSLQECGAAPVQLKPVGDHLPFKLDLVPVARGGLLMSEGQNFQPQIMLRLPFLVPVSCEMPCTPTTPAQNGPAGPPCLRSS

SEQ ID NO: 738773 - protein, 124 aa, Homo sapiens
PCAVNPWTVLRATLPDLDCIQTEACGMKPSAVSKFLVPRQYVPRLPFKVAVMAVVSCTLRTVLSLTLTHSPGDGRVPGAFYASVLAFAGVSTAQTRVRDHPSSASMIPPTGWGRAVPGPEARPR

SEQ ID NO: 738774 - protein, 113 aa, Homo sapiens
QMPYTLTFLIFGSIVAFLLKPILSILFNTAAVYLPDREIPYPFHLLYVFHITYHPRYFTYLCLLFTVVSPGYNVSSMWAGAFVFFTDISQVPKTVPDTQKGLSKYVLNGFDLN

SEQ ID NO: 738775 - protein, 600 aa, Homo sapiens
MRSCLWRCRHLSQGVQWSLLLAVLVFFLFALPSFIKEPQTKPSRHQRTENIKERSLQSLAKPKSQAPTRARRTTIYAEPVPENNALNTQTQPKAHTTGDRGKEANQAPPEEQDKVPHTAQRAAWKSPEKEKTMVNTLSPRGQDAGMASGRTEAQSWKSQDTKTTQGNGGQTRKLTASRTVSEKHQGKAATTAKTLIPKSQHRMLAPTGAVSTRTRQKGVTTAVIPPKEKKPQATPPPAPFQSPTTQRNQRLKAANFKSEPRWDFEEKYSFEIGGLQTTCPDSVKIKASKSLWLQKLFLPNLTLFLDSRHFNQSEWDRLEHFAPPFGFMELNYSLVQKVVTRFPPVPQQQLLLASLPAGSLRCITCAVVGNGGILNNSHMGQEIDSHDYVFRLSGALIKGYEQDVGTRTSFYGFTAFSLTQSLLILGNRGFKNVPLGKDVRYLHFLEGTRDYEWLEALLMNQTVMSKNLFWFRHRPQEAFREALHMDRYLLLHPDFLRYMKNRFLRSKTLDGAHWRIYRPTTGALLLLTALQLCDQVSAYGFITEGHERFSDHYYDTSWKRLIFYINHDFKLEREVWKRLHDEGIIRLYQRPGPGTAKAKN

SEQ ID NO: 738776 - protein, 565 aa, Homo sapiens
MRSCLWRCRHLSQGVQWSLLLAVLVFFLFALPSFIKEPQTKPSRHQRTENIKERSLQSLAKPKSQAPTRARRTTIYAEPVPENNALNTQTQPKAHTTGDRGKEANQAPPEEQDKVPHTAQRAAWKSPEKEKTMVNTLSPRGQDAGMASGRTEAQSWKSQDTKTTQGNGGQTRKLTASRTVSEKHQGKAATTAKTLIPKSQHRMLAPTGAVSTRTRQKGVTTAVIPPKEKKPQATPPPAPFQSPTTQRNQRLKAANFKSEPRWDFEEKYSFEIGGLQTTCPDSVKIKASKSLWLQKLFLPNLTLFLDSRHFNQSEWDRLEHFAPPFGFMELNYSLVQKVVTRFPPVPQQQLLLASLPAGSLRCITCAVVGNGGILNNSHMGQEIDSHDYVFRLSGALIKGYEQDVGTRTSFYGFTAFSLTQSLLILGNRGFKNVPLGKAQTPGSFSGSPAHGQYLLLHPDFLRYMKNRFLRSKTLDGAHWRIYRPTTGALLLLTALQLCDQVSAYGFITEGHERFSDHYYDTSWKRLIFYINHDFKLEREVWKRLHDEGIIRLYQRPGPGTAKAKN

SEQ ID NO: 738777 - protein, 585 aa, Homo sapiens
MRSCLWRCRHLSQGVQWSLLLAVLVFFLFALPSFIKEPQTKPSRHQRTENIKERSLQSLAKPKSQAPTRARRTTIYAEPVPENNALNTQTQPKAHTTGDRGKEANQAPPEEQDKVPHTAQRAAWKSPEKEKTMVNTLSPRGQDAGMASGRTEAQSWKSQDTKTTQGNGGQTRKLTASRTVSEKHQGKAATTAKTLIPKSQHRMLAPTGAVSTRTRQKGVTTAVIPPKEKKPQATPPPAPFQSPTTQRNQRLKAANFKSEPRWDFEEKYSFEIGGLQTTCPDSVKIKASKSLWLQKLFLPNLTLFLDSRHFNQSEWDRLEHFAPPFGFMELNYSLVQKVVTRFPPVPQQQLLLASLPAGSLRCITCAVVGNGGILNNSHMGQEIDSHDYVFRLSGALIKGYEQDVGTRTSFYGFTAFSLTQSLLILGNRGFKNVPLGKDVRYLHFLEGTRDYEWLEALLMNQTVMSKNLFWFRHRPQEAFREALHMDRFLRSKTLDGAHWRIYRPTTGALLLLTALQLCDQVSAYGFITEGHERFSDHYYDTSWKRLIFYINHDFKLEREVWKRLHDEGIIRLYQRPGPGTAKAKN

SEQ ID NO: 738778 - protein, 234 aa, Homo sapiens
PLFPAGTMEGVEEKKKEVPAVPETLKKKRRNFAELKIKRLRKKFAQKMLRKARRKLIYEKAKHYHKEYRQMYRTEIRMARMARKAGNFYVPAEPKLAFVIRIRGINGVSPKVRKVLQLLRLRQIFNGTFVKLNKASINMLRIVEPYIAWGYPNLKSVNELIYKRGYGKINKKRIALTDNALIARSLGKYGIICMEDLIHEIYTVGKRFKEANNFLWPFKLSSPRGGMKKKTTHL

SEQ ID NO: 738779 - protein, 248 aa, Homo sapiens
MEGVEEKKKEVPAVPETLKKKRRNFAELKIKRLRKKFAQKMLRKARRKLIYEKAKHYHKEYRQMYRTEIRMARMARKAGNFYVPAEPKLAFVIRIRGINGVSPKVRKVLQLLRLRQIFNGTFVKLNKASINMLRIVEPYIAWGYPNLKSVNELIYKRGYGKINKKRIALTDNALIARSLGKYGIICMEDLIHEIYTVGKRFKEANNFLWPFKLSSPRGGMKKKTTHFVEGGDAGNREDQINRLIRRMN

SEQ ID NO: 738780 - protein, 81 aa, Homo sapiens
LAFRHPLQAQSCFQLLDHFCACLVAASPSPAFAFLQFLEAELHFSNGLFRPSSCVCIVPSGPELSHVIVTRPLELGRLWSW

SEQ ID NO: 738781 - protein, 138 aa, Homo sapiens [sequence omitted]

SEQ ID NO: 738782 - protein, 119 aa, Homo sapiens
LVKCLKSHQLHRLLPGQPSPQSTPSTALRLLNQAPTRQRKTKRARRTEDMSDMAGGTANRPLGTEQPRPTEAEASREQPRSAAQASRVQLGDWSFTTAAVATPSWLSNTTRLAENADSQ

SEQ ID NO: 738783 - protein, 113 aa, Homo sapiens
LTLRRFPPSPNITKGEHDSHPASSLWRTHLLTPLAPHHLIPSTKMRGRGWNGKISGERIEGKASFAEPAGLGMGAAALKRGHIDCHIGEDTVWREVGKRGVTRPFGFENKNKN

SEQ ID NO: 738784 - protein, 187 aa, Homo sapiens
DSPSPFSDSYSHLSGRPIRKKTEEEEKLLKLLQGIPRPQDGFTQWCEQMLHTLSATGSLDVPMAVAILKEVESPYDVHDYIRSCLGDTLEAKEFAKQFLERRAKQKASQQRQQQQEAWLSSASLQTAFQANHSTKLGPGEGSKAKRRALMLHSDPSILGELGWGRSGTSLAQGRRSPGESSDAASPR

SEQ ID NO: 738785 - protein, 175 aa, Homo sapiens
DSPSPFSDSYSHLSGRPIRKKTEEEEKLLKLLQGIPRPQDGFTQWCEQMLHTLSATGSLDVPMAVAILKEVESPYDVHDYIRSCLGDTLEAKEFAKQFLERRAKQKASQQRQQQQEAWLSSASLQTAFQANHSTKLGPGEGSKAKRRALMLHSDPSILGYSLHGSSGEIESVDDY

SEQ ID NO: 738786 - protein, 175 aa, Homo sapiens; identical to SEQ ID NO: 738785

SEQ ID NO: 738787 - protein, 76 aa, Homo sapiens
LVLRWVRTARIGHGASALVFFLPMEESYINFLAINQKVSCRPGRGSWKSSLGDRVRLHLKNKQTKKQKNKKLSVAY

SEQ ID NO: 738788 - protein, 253 aa, Homo sapiens [sequence omitted]

SEQ ID NO: 738789 - protein, 253 aa, Homo sapiens [sequence omitted]

SEQ ID NO: 738790 - protein, 148 aa, Homo sapiens
GLEAAEGAGARVRDSATREEIDWTTNELRNNLRSIEWDLEDLDETISIVEANPRKFNLDATELSIRKAFITSTRQVVRDMKDQMSTSSVQALAERKNRQALLGDSGSQNWSTGTTDKYGRLDRELQRANSHFIEEQQAQQQIGANGVP

SEQ ID NO: 738791 - protein, 253 aa, Homo sapiens [sequence omitted]

SEQ ID NO: 738792 - protein, 253 aa, Homo sapiens [sequence omitted]

SEQ ID NO: 738793 - protein, 216 aa, Homo sapiens
MSMEDPFFVVKGEVQKAVNTAQGLFQRWTELLQDPSTATREEIDWTTNELRNNLRSIEWDLEDLDETISIVEANPRKFNLDATELSIRKAFITSTRQVVRDMKDQMSTSSVQALAERKNRQALLGDSGSQNWSTGTTDKYGRLDRELQRANSHFIEEQQAQQQLIVEQQDEQLELVSGSIGVLKNMSQRIGGELEEQAVLASPKEAILLRKFYYRL

SEQ ID NO: 738794 - protein, 88 aa, Homo sapiens
GLEAAEGAGARVRDSASGAERVLDQRPSCAPGLCACPLLGFTQTKARAAAGTGGVGGGRPGGTGALCAEEVKAAGAGTPCPWRTPSLW

SEQ ID NO: 738795 - protein, 253 aa, Homo sapiens [sequence omitted]

SEQ ID NO: 738796 - protein, 253 aa, Homo sapiens [sequence omitted]

SEQ ID NO: 738797 - protein, 253 aa, Homo sapiens [sequence omitted]

SEQ ID NO: 738798 - protein, 236 aa, Homo sapiens
MSMEDPFFVVKGEVQKAVNTAQGLFQRWTELLQDPSTATREEIDWTTNELRNNLRSIEWDLEDLDETISIVEANPRKFNLDATELSIRKAFITSTRQVVRDMKDQMSTSSVQALAERKNRQALLGDSGSQNWSTGTTDKYGRLDRELQRANSHFIEEQQAQQQLIVEQQDEQLELVSGSIGVLKNMSQRIGGELEEQAVMLEDFSHELESTQSRLDNVMKKLAKVSHMTSVTSCSF

SEQ ID NO: 738799 - protein, 138 aa, Homo sapiens
MSMEDPFFVVKGEVQKAVNTAQGLFQRWTELLQDPSTATREEIDWTTNELRNNLRSIEWDLEDLDETISIVEANPRKFNLDATELSIRKAFITSTRQVVRDMKDQMSTSSVQALAERKNRQALFGLWALFGLWALFGL

SEQ ID NO: 738800 - protein, 103 aa, Homo sapiens
QTQYPMCSIPAKKLPLEPNCTKRIRKPKLRDTLKLKDRKKRIQCVILDQILHRGEKKKWLQRTLLEQWEKCESLFPMLNFLNLITLLWLCTRMSLCPRETRST

SEQ ID NO: 738801 - protein, 106 aa, Homo sapiens
RLGTRPGGEQAMQRGLGRSEVSPGEAIYDVIGEMPPAGLYEEIMEAEAVLQDEEDGSVVKVDTEAAVSGEVSNLLEGQSIRAEGGHSRPVSQGYDEAAFPLEEMTL

SEQ ID NO: 738802 - protein, 118 aa, Homo sapiens
AHWEASCGLLARDGGQGWEGTGSLAMLPWSLHPSPQHPASLLPGWGSCLELLSSLACGHIHTEGLCVTMLTLPQVWEDPRYLLEKPSMMSLGKCRQQDCTRKSWRPRLCSKMRRTEVW

SEQ ID NO: 738803 - protein, 713 aa, Homo sapiens
MEPGTGGSRKRLGPRAGFRFWPPFFPRRSQAGSSKFPTPLGPENSGNPTLLSSAQPETRVSYWTKLLSQLLAPLPGLLQKVLIWSQLFGGMFPTRWLDFAGVYSALRALKGREKPAAPTAQKSLSSLQLDSSDPSVTSPLDWLEEGIHWQYSPPDLKLELKAKGSALDPAAQAFLLEQQLWGVELLPSSLQSRLYSNRELGSSPSGPLNIQRIDNFSVVSYLLNPSYLDCFPRLEVSYQNSDGNSEVVGFQTLTPESSCLREDHCHPQPLSAELIPASWQGCPPLSTEGLPEIHHLRMKRLEFLQQASKGQDLPTPDQDNGYHSLEEEHSLLRMDPKHCRDNPTQFVPAAGDIPGNTQESTEEKIELLTTEVPLALEEESPSEGCPSSEIPMEKEPGEGRISVVDYSYLEGDLPISARPACSNKLIDYILGGASSDLETSSDPEGEDWDEEAEDDGFDSDSSLSDSDLEQDPEGLHLWNSFCSVDPYNPQNFTATIQTAARIVPEEPSDSEKDLSGKSDLENSSQSGSLPETPEHSSGEEDDWESSADEAESLKLWNSFCNSDDPYNPLNFKAPFQTSGENEKGCRDSKTPSESIVAISECHTLLSCKVQLLGSQESECPDSVQRDVLSGGRHTHVKRKKVTFLEEVTEYYISGDEDRKGPWEEFARDGCRFQKRIQETEDAIGYCLTFEHRERMFNRLQGTCFKGLNVLKQC

SEQ ID NO: 738804 - protein, 713 aa, Homo sapiens; identical to SEQ ID NO: 738803

SEQ ID NO: 738805 - protein, 713 aa, Homo sapiens; identical to SEQ ID NO: 738803

SEQ ID NO: 738806 - protein, 713 aa, Homo sapiens; identical to SEQ ID NO: 738803

SEQ ID NO: 738807 - protein, 713 aa, Homo sapiens; identical to SEQ ID NO: 738803

SEQ ID NO: 738808 - protein, 713 aa, Homo sapiens; identical to SEQ ID NO: 738803

SEQ ID NO: 738809 - protein, 713 aa, Homo sapiens; identical to SEQ ID NO: 738803

SEQ ID NO: 738810 - protein, 695 aa, Homo sapiens
MEPGTGGSRKRLGPRAGFRFWPPFFPRRSQAGSSKFPTPLGPENSGNPTLLSSAQPETRVSYWTKLLSQLLAPLPGLLQKVLIWSQLFGGMFPTRWLDFAGVYSALRALKGREKPAAPTAQKSLSSLQLDSSDPSVTSPLDWLEEGIHWQYSPPDLKLELKAKGSALDPAAQAFLLEQQLWGVELLPSSLQSRLYSNRELGSSPSGPLNIQRIDNFSVVSYLLNPSYLDCFPRLEVSYQNSDGNSEVVGFQTLTPESSCLREDHCHPQPLSAELIPASWQGCPPLSTEGLPEIHHLRMKRLEFLQQASKGQDLPTPDQDNGYHSLEEEHSLLRMDPKHCRDNPTQFVPAAGDIPGNTQESTEEKIELLTTEVPLALEEESPSEGCPSSEIPMGDLPISARPACSNKLIDYILGGASSDLETSSDPEGEDWDEEAEDDGFDSDSSLSDSDLEQDPEGLHLWNSFCSVDPYNPQNFTATIQTAARIVPEEPSDSEKDLSGKSDLENSSQSGSLPETPEHSSGEEDDWESSADEAESLKLWNSFCNSDDPYNPLNFKAPFQTSGENEKGCRDSKTPSESIVAISECHTLLSCKVQLLGSQESECPDSVQRDVLSGGRHTHVKRKKVTFLEEVTEYYISGDEDRKGPWEEFARDGCRFQKRIQETEDAIGYCLTFEHRERMFNRLQGTCFKGLNVLKQC

SEQ ID NO: 738811 - protein, 695 aa, Homo sapiens
MEPGTGGSRKRLGPRAGFRFWPPFFPRRSQAGSSKFPTPLGPENSGNPTLLSSAQPETRVSYWTKLLSQLLAPLPGLLQKVLIWSQLFGGMFPTRWLDFAGVYSALRALKGREKPAAPTAQKSLSSLQLDSSDPSVTSPLDWLEEGIHWQYSPPDFLLEQQLWGVELLPSSLQSRLYSNRELGSSPSGPLNIQRIDNFSVVSYLLNPSYLDCFPRLEVSYQNSDGNSEVVGFQTLTPESSCLREDHCHPQPLSAELIPASWQGCPPLSTEGLPEIHHLRMKRLEFLQQASKGQDLPTPDQDNGYHSLEEEHSLLRMDPKHCRDNPTQFVPAAGDIPGNTQESTEEKIELLTTEVPLALEEESPSEGCPSSEIPMEKEPGEGRISVVDYSYLEGDLPISARPACSNKLIDYILGGASSDLETSSDPEGEDWDEEAEDDGFDSDSSLSDSDLEQDPEGLHLWNSFCSVDPYNPQNFTATIQTAARIVPEEPSDSEKDLSGKSDLENSSQSGSLPETPEHSSGEEDDWESSADEAESLKLWNSFCNSDDPYNPLNFKAPFQTSGENEKGCRDSKTPSESIVAISECHTLLSCKVQLLGSQESECPDSVQRDVLSGGRHTHVKRKKVTFLEEVTEYYISGDEDRKGPWEEFARDGCRFQKRIQETEDAIGYCLTFEHRERMFNRLQGTCFKGLNVLKQC

SEQ ID NO: 738812 - protein, 713 aa, Homo sapiens; identical to SEQ ID NO: 738803

SEQ ID NO: 738813 - protein, 577 aa, Homo sapiens
KQTPRSGEGQSEVIWHPAILEELVLLHGPCSRGHPTDRASTLSLWGVELLPSSLQSRLYSNRELGSSPSGPLNIQRIDNFSVVSYLLNPSYLDCFPRLEVSYQNSDGNSEVVGFQTLTPESSCLREDHCHPQPLSAELIPASWQGCPPLSTEGLPEIHHLRMKRLEFLQQASKGQDLPTPDQDNGYHSLEEEHSLLRMDPKHCRDNPTQFVPAAGDIPGNTQESTEEKIELLTTEVPLALEEESPSEGCPSSEIPMEKEPGEGRISVVDYSYLEGDLPISARPACSNKLIDYILGGASSDLETSSDPEGEDWDEEAEDDGFDSDSSLSDSDLEQDPEGLHLWNSFCSVDPYNPQNFTATIQTAARIVPEEPSDSEKDLSGKSDLENSSQSGSLPETPEHSSGEEDDWESSADEAESLKLWNSFCNSDDPYNPLNFKAPFQTSGENEKGCRDSKTPSESIVAISECHTLLSCKVQLLGSQESECPDSVQRDVLSGGRHTHVKRKKVTFLEEVTEYYISGDEDRKGPWEEFARDGCRFQKRIQETEDAIGYCLTFEHRERMFNRLQGTCFKGLNVLKQC

SEQ ID NO: 738814 - protein, 69 aa, Homo sapiens
LLLRSTLRIPSRDRKGPWEEFARDGCRFQKRIQETEDAIGYCLTFEHRERMFNRLQGTCFKGLNVLKQC

SEQ ID NO: 738815 - protein, 713 aa, Homo sapiens; identical to SEQ ID NO: 738803

SEQ ID NO: 738816 - protein, 444 aa, Homo sapiens
MEPGTGGSRKRLGPRAGFRFWPPFFPRRSQAGSSKFPTPLGPENSGNPTLLSSAQPETRVSYWTKLLSQLLAPLPGLLQKVLIWSQLFGGMFPTRWLDFAGVYSALRALKGREKPAAPTAQKSLSSLQLDSSDPSVTSPLDWLEEGIHWQYSPPDLKLELKAKGSALDPAAQAFLLEQQLWGVELLPSSLQSRLYSNRELGSSPSGPLNIQRIDNFSVVSYLLNPSYLDCFPRLEVSYQNSDGNSEVVGFQTLTPESSCLREDHCHPQPLSAELIPASWQGCPPLSTEGLPEIHHLRMKRLEFLQQASKGQDLPTPDQDNGYHSLEEEHSLLRMDPKHCRDNPTQFVPAAGDIPGNTQESTEEKIELLTTEVPLALEEESPSEGCPSSEIPMEKEPGEGRISVVDYSYLEGDLPISARPACSNKLIDYILGRKITSVPPLATAG

SEQ ID NO: 738817 - protein, 551 aa, Homo sapiens
MEEAELVKGRLQAITDKRKIQEEISQKRLKIEEDKLKHQHLKKKALREKWLLDGISSGKEQEEMKKQNQQDQHQIQVLEQSILRLEKEIQDLEKAELQISTKEEAILKKLKSIERTTEDIIRSVKVEREERAEESIEDIYANIPDLPKSYIPSRLRKEINEEKEDDEQNRKALYAMEIKVEKDLKTGESTVLSSIPLPSDDFKGTGIKVYDDGQKSVYAVSSNHSAAYNGTDGLAPVEVEELLRQASERNSKSPTEYHEPVYANPFYRPTTPQRETVTPGPNFQERIKIKTNGLGIGVNESIHNMGNGLSEERGNNFNHISPIPPVPHPRSVIQQAEEKLHTPQKRLMTPWEESNVMQDKDAPSPKPRLSPRETIFGKSEHQNSSPTCQEDEEDVRYNIVHSLPPDINDTEPVTMIFMGYQQAEDSEEDKKFLTGYDGIIHAELVVIDDEEEEDEGEAEKPSYHPIAPHSQVYQPAKPTPLPRKRSEASPHENTNHKSPHKNSISLKEQEESLGSPVHHSPFDAQTTGDGTEDPSLTALRMRMAKLGKKVI

SEQ ID NO: 738818 - protein, 551 aa, Homo sapiens; identical to SEQ ID NO: 738817

SEQ ID NO: 738819 - protein, 520 aa, Homo sapiens
MEEAELVKGRLQAITDKRKIQEEISQKRLKIEEDKLKHQHLKKKALREKWLLDGISSGKEQEEMKKQNQQKEEAILKKLKSIERTTEDIIRSVKVEREERAEESIEDIYANIPDLPKSYIPSRLRKEINEEKEDDEQNRKALYAMEIKVEKDLKTGESTVLSSIPLPSDDFKGTGIKVYDDGQKSVYAVSSNHSAAYNGTDGLAPVEVEELLRQASERNSKSPTEYHEPVYANPFYRPTTPQRETVTPGPNFQERIKIKTNGLGIGVNESIHNMGNGLSEERGNNFNHISPIPPVPHPRSVIQQAEEKLHTPQKRLMTPWEESNVMQDKDAPSPKPRLSPRETIFGKSEHQNSSPTCQEDEEDVRYNIVHSLPPDINDTEPVTMIFMGYQQAEDSEEDKKFLTGYDGIIHAELVVIDDEEEEDEGEAEKPSYHPIAPHSQVYQPAKPTPLPRKRSEASPHENTNHKSPHKNSISLKEQEESLGSPVHHSPFDAQTTGDGTEDPSLTALRMRMAKLGKKVI

SEQ ID NO: 738820 - protein, 551 aa, Homo sapiens; identical to SEQ ID NO: 738817

SEQ ID NO: 738821 - protein, 376 aa, Homo sapiens
MEIKVEKDLKTGESTVLSSIPLPSDDFKGTGIKVYDDGQKSVYAVSSNHSAAYNGTDGLAPVEVEELLRQASERNSKSPTEYHEPVYANPFYRPTTPQRETVTPGPNFQERIKIKTNGLGIGVNESIHNMGNGLSEERGNNFNHISPIPPVPHPRSVIQQAEEKLHTPQKRLMTPWEESNVMQDKDAPSPKPRLSPRETIFGKSEHQNSSPTCQEDEEDVRYNIVHSLPPDINDTEPVTMIFMGYQQAEDSEEDKKFLTGYDGIIHAELVVIDDEEEEDEGEAEKPSYHPIAPHSQVYQPAKPTPLPRKRSEASPHENTNHKSPHKNSISLKEQEESLGSPVHHSPFDAQTTGDGTEDPSLTALRMRMAKLGKKVI

SEQ ID NO: 738822 - protein, 488 aa, Homo sapiens
MKKQNQQDQHQIQVLEQSILRLEKEIQDLEKAELQISTKEEAILKKLKSIERTTEDIIRSVKVEREERAEESIEDIYANIPDLPKSYIPSRLRKEINEEKEDDEQNRKALYAMEIKVEKDLKTGESTVLSSIPLPSDDFKGTGIKVYDDGQKSVYAVSSNHSAAYNGTDGLAPVEVEELLRQASERNSKSPTEYHEPVYANPFYRPTTPQRETVTPGPNFQERIKIKTNGLGIGVNESIHNMGNGLSEERGNNFNHISPIPPVPHPRSVIQQAEEKLHTPQKRLMTPWEESNVMQDKDAPSPKPRLSPRETIFGKSEHQNSSPTCQEDEEDVRYNIVHSLPPDINDTEPVTMIFMGYQQAEDSEEDKKFLTGYDGIIHAELVVIDDEEEEDEGEAEKPSYHPIAPHSQVYQPAKPTPLPRKRSEASPHENTNHKSPHKNSISLKEQEESLGSPVHHSPFDAQTTGDGTEDPSLTALRMRMAKLGKKVI

SEQ ID NO: 738823 - protein, 281 aa, Homo sapiens
PFDAQTTGDGTEDPSLTALRMRMAKLGKKVIKSCTTYINIFERGNNFNHISPIPPVPHPRSVIQQAEEKLHTPQKRLMTPWEESNVMQDKDAPSPKPRLSPRETIFGKSEHQNSSPTCQEDEEDVRYNIVHSLPPDINDTEPVTMIFMGYQQAEDSEEDKKFLTGYDGIIHAELVVIDDEEEEDEGEAEKPSYHPIAPHSQVYQPAKPTPLPRKRSEASPHENTNHKSPHKNSISLKEQEESLGSPVHHSPFDAQTTGDGTEDPSLTALRMRMAKLGKKVI

SEQ ID NO: 738824 - protein, 263 aa, Homo sapiens
IKTNGLGIGVNESIHNMGNGLSEERGNNFNHISPIPPVPHPRSVIQQAEEKLHTPQKRLMTPWEESNVMQDKDAPSPKPRLSPRETIFGKSEHQNSSPTCQEDEEDVRYNIVHSLPPDINDTEPVTMIFMGYQQAEDSEEDKKFLTGYDGIIHAELVVIDDEEEEDEGEAEKPSYHPIAPHSQVYQPAKPTPLPRKRSEASPHENTNHKSPHKNSISLKEQEESLGSPVHHSPFDAQTTGDGTEDPSLTGNKNDKACHCCSVM

SEQ ID NO: 738825 - protein, 476 aa, Homo sapiens
WEPMGTLGGAGLAAAVAAGWARTLGMEGERRASQAPSSGLPAGGANGESPGGGAPFPGSSGSSALLQAEVLDLDEDEDDLEVFSKDASLMDMNSFSPMMPTSPLSMINQIKFEDEPDLKDLFITVDEPESHVTTIETFITYRIITKTSRGEFDSSEFEVRRRYQDFLWLKGKLEEAHPTLIIPPLPEKFIVKGMVERFNDDFIETRRKALHKFLNRIADHPTLTFNEDFKIFLTAQAWELSSHKKQGPGLLSRMGQTVRAVASSMRGVKNRPEEFMEMNNFIELFSQKINLIDKISQRIYKEEREYFDEMKEYGPIHILWSASEEDLVDTLKDVASCIDRCCKATEKRMSGLSEALLPVVHEYVLYSEMLMGVMKRRDQIQAELDSKVEVLTYKKADTDLLPEEIGKLEDKVECANNALKADWERWKQNMQNDIKLAFTDMAEENIHYYEQCLATWESFLTSQTNLHLEEASEDKP

SEQ ID NO: 738826 - protein, 476 aa, Homo sapiens; identical to SEQ ID NO: 738825

SEQ ID NO: 738827 - protein, 476 aa, Homo sapiens; identical to SEQ ID NO: 738825

SEQ ID NO: 738828 - protein, 476 aa, Homo sapiens; identical to SEQ ID NO: 738825

SEQ ID NO: 738829 - protein, 125 aa, Homo sapiens
SQKRYEEIVKDVASCIDRCCKATEKRMSGLSEALLPVVHEYVLYSEMLMLPEEIGKLEDKVECANNALKADWERWKQNMQNDIKLAFTDMAEENIHYYEQCLATWESFLTSQTNLHLEEASEDKP

SEQ ID NO: 738830 - protein, 70 aa, Homo sapiens
  misc_feature (13)..(15): Xaa can be any naturally occurring amino acid
VSVSSRSFFGKTXXXLIALLRGNHSLHHRPTFTWKKPLKINLNPIEDFCLIFGRQHLLTKVILSGSAVSL

SEQ ID NO: 738831 - protein, 476 aa, Homo sapiens; identical to SEQ ID NO: 738825

SEQ ID NO: 738832 - protein, 476 aa, Homo sapiens; identical to SEQ ID NO: 738825

SEQ ID NO: 738833 - protein, 425 aa, Homo sapiens
WEPMGTLGGAGLAAAVAAGWARTLGMEGERRASQAPSSGLPAGGANGESPGGGAPFPGSSGSSALLQAEVLDLDEDEDDLEVFSKDASLMDMNSFSPMMPTSPLSMINQIKFEDEPDLKDLFITVDEPESHVTTIETFITYRIITKTSRGEFDSSEFEVRRRYQDFLWLKGKLEEAHPTLIIPPLPEKFIVKGMVERFNDDFIETRRKALHKFLNRIADHPTLTFNEDFKIFLTAQAWELSSHKKQGPGLLSRMGQTVRAVASSMRGVKNRPEEFMEMNNFIELFSQKINLIDKISQRIYKEEREYFDEMKEYGPIHILWSASEEDLVDTLKDVASCIDRCCKATEKRMSGLSEALLPVVHEYVLYSEMLMGVMKRRDQIQAELDSKVEVLTYKKADTDLCLATWESFLTSQTNLHLEEASEDKP

SEQ ID NO: 738834 - protein, 471 aa, Homo sapiens
WEPMGTLGGAGLAAAVAAGWARTLGMEGERRASQAPSSGLPAGGANGESPGGGAPFPGSSGSSALLQAEVLDLDEDEDDLEVFSKDASLMDMNSFSPMMPTSPLSMINQIKFEDEPDLKDLFITVDEPESHVTTIETFITYRIITKTSRGEFDSSEFEVRRRYQDFLWLKGKLEEAHPTLIIPPLPEKFIVKGMVERFNDDFIETRRKALHKFLNRIADHPTLTFNEDFKIFLTAQAWELSSHKKQGPGLLSRMGQTVRAVASSMRGVKNRPEEFMEMNNFIELFSQKINLIDKISQRIYKEEREYFDEMKEYGPIHILWSASEEDLVDTLKDVASCIDRCCKATEKRMSGLSEALLPVVHEYVLYSEMLMGVMKRRDQIQAELDSKVEVLTYKKADTDLLPEEIGKLEDKVECANNALKADWERWKQNMQNDIKLAFTDMAEENIHYYEQCLATWESFLTSQYLQTGYRL

SEQ ID NO: 738835 - protein, 100 aa, Homo sapiens
RRPMEGALAPMACVLSRGPRWGREGWRAWATSIHTSHLSPPLQLPALPFHSLPRDLVVTALGSAQIQDCSGQGAGATAELGGTEAHSWERSRGGKVTTIY

SEQ ID NO: 738836 - protein, 142 aa, Homo sapiens
VVKQFRDGGYNTLVSTCVGEEGLDIGEVDLIICFDSQKSPIRLVQRMGRTGRKRQGRIVIILSEGREERIYNQSQSNKRSIYKAISSNRQVLHFYQRSPRMVPDGINPKLHKMFITHGVYEPEKPSRNLQRKSSIFSYRDGK

SEQ ID NO: 738837 - protein, 104 aa, Homo sapiens
RLLRGCSAGSVHCCGLCTSRVGVFVQGPAERGFLSLIGLPSAIRVKQEFQPSQSYRYGNWYARQHGSYLLSGYSYGCAVDGNGKDCFSAHETPEHTAGTLVMPK

SEQ ID NO: 738838 - protein, 166 aa, Homo sapiens
RLLRGCSAGSVHCCGLCTSRVGVFVQGPAERGFLSLIGLPSAIRVKQEFQPSQSYRYGNWYARQHGSYLLSGYSYGCAVDGNGKDCFSAHETPEHTAGTLVMPKETTPLAENQDEDPLEDPHLHLNIEESNQEFMVKSEELYDSLMNCHWQPLDTVHSEIPDETPK

SEQ ID NO: 738839 - protein, 160 aa, Homo sapiens
RLLRGCSAGSVHCCGLCTSRVGVFVQGPAERGFLSLIGVKQEFQPSQSYRYGNWYARQHGSYLLSGYSYGCAVDGNGKDCFSAHETPEHTAGTLVMPKETTPLAENQDEDPLEDPHLHLNIEESNQEFMVKSEELYDSLMNCHWQPLDTVHSEIPDETPK

SEQ ID NO: 738840 - protein, 130 aa, Homo sapiens
RLLRGCSAGSVHCCGLCTSRVGVFVQGPAERGFLSLIGYGCAVDGNGKDCFSAHETPEHTAGTLVMPKETTPLAENQDEDPLEDPHLHLNIEESNQEFMVKSEELYDSLMNCHWQPLDTVHSEIPDETPK

SEQ ID NO: 738841 - protein, 78 aa, Homo sapiens
AAGSLSCAARANNLSFSHQPLAVTTHETHYEDPHLHLNIEESNQEFMVKSEELYDSLMNCHWQPLDTVHSEIPDETPK

SEQ ID NO: 738842 - protein, 104 aa, Homo sapiens; identical to SEQ ID NO: 738837

SEQ ID NO: 738843 - protein, 152 aa, Homo sapiens
MAQPESSADFGIAQQNNYYCYWQSLPSAIRVKQEFQPSQSYRYGNWYARQHGSYLLSGYSYGCAVDGNGKDCFSAHETPEHTAGTLVMPKETTPLAENQDEDPLEDPHLHLNIEESNQEFMVKSEELYDSLMNCHWQPLDTVHSEIPDETPK

SEQ ID NO: 738844 - protein, 196 aa, Homo sapiens
RLLRGCSAGSVHCCGLCTSRVGVFVQGPAERGFLSLIGLPSAIRVKQEFQPSQSYRYGNWYARQHGSYLLSGYSYGCAVDGNGKDCFSAHETPEHTAGTLVMPKETTPLAENQDEDPLEVTSQYVAQADLKLPDLSNSLVSASQSVGVTDPHLHLNIEESNQEFMVKSEELYDSLMNCHWQPLDTVHSEIPDETPK

SEQ ID NO: 738845 - protein, 111 aa, Homo sapiens
MAKIILRKTRAAQSPPVDSAAETPPREGKSHFQILLDVVQFLPEDIIIQTFEGWLLIKAQHGTRMDEHGFISRSFTRQYKLPDGVEIKDLSAVLCHDGILVVEVKDPVGTK

SEQ ID NO: 738846 - protein, 150 aa, Homo sapiens
MAKIILRHLIEIPVRYQEEFEARGLEDCRLDHALYALPGPTIVDLRKTRAAQSPPVDSAAETPPREGKSHFQILLDVVQFLPEDIIIQTFEGWLLIKAQHGTRMDEHGFISRSFTRQYKLPDGVEIKDLSAVLCHDGILVVEVKDPVGTK

SEQ ID NO: 738847 - protein, 101 aa, Homo sapiens
TSRYLHIGNSGFNILILGSNRGKKPFPIHSYTSLLTPDIGICLKPANSPSFQTPPGGPTIKLWHYLTQSHKTAPHFRCQLQGVGPNLATNWGFPQPSPLVC

SEQ ID NO: 738848 - protein, 121 aa, Homo sapiens
MQGSGKFAHPTNREEWWPPLMNGVGGGPCHNRGPDGNKGDKSVRLVECLLCLCLGSKRGSFKFGPYFQDIVILPSSKTWPNKCLLFMSQITSFFFIGGVSRRVRLAGCDVSNLGERARLHL

SEQ ID NO: 738849 - protein, 340 aa, Homo sapiens
MAASSSEISEMKGVEESPKVPGEGPGHSEAETGPPQVLAGVPDQPEAPQPGPNTTAAPVDSGPKAGLAPETTETPAGASETAQATDLSLSPGGESKANCSPEDPCQETVSKPEVSKEATADQGSRLESAAPPEPAPEPAPQPDPRPDSQPTPKPALQPELPTQEDPTPEILSESVGEKQENGAVVPLQAGDGEEGPAPEPHSPPSKKSPPANGAPPRVLQQLVEEDRMRRAHSGHPGSPRGSLSRHPSSQLAGPGVEGGEGTQKPRDYIILAILSCFCPMWPVNIVAFAYAVMSRNSLQQGDVDGAQRLGRVAKLLSIVALVGGVLIIIASCVINLGVYK

SEQ ID NO: 738850 - protein, 340 aa, Homo sapiens; identical to SEQ ID NO: 738849

SEQ ID NO: 738851 - protein, 346 aa, Homo sapiens
MAASSSEISEMKGVEESPKVPGEGPGHSEAETGPPQVLAGVPDQPEAPQPGPNTTAAPVDSGPKAGLAPETTETPAGASETAQATDLSLSPGGESKANCSPEDPCQETVSKPEVSKEATADQGSRLESAAPPEPAPEPAPQPDPRPDSQPTPKPALQPELPTQEDPTPEILSESVGEKQENGAVVPLQAGDGEEGPAPEPHSPPSKKSPPANGAPPRVLQQLVEEDRMRRAHSGHPGSPRGSLSRHPSSQLAGPGVEGGEGTQKPRDYIILAILSCFCPMWPVNIVAFAYAVMSRNSLQQGDVDGAQRLGRVAKLLSIVALVGGVLIIIASCVINLGGCCMSLKHQ

SEQ ID NO: 738852 - protein, 173 aa, Homo sapiens
MALAPTPKDQGSLSGLVYSFCPAPASCQAPLPTVGLPHPCTGSNLPALMPASPPASWPPIPALLETSLHSGNLPEHLPNSALSASLHLSWPPCTSSSPPNSLDLHPGRLLPTFIVLASLNPQSSLPSLLYHLPFPLHVPPPSSSCLLISLKHPLLQPPVTVYSAKLTALRRGL

SEQ ID NO: 738853 - protein, 244 aa, Homo sapiens
MASFPPRVNEKEIVRLRTIGELLAPAAPFDKKCGRENWTVAFAPDGSYFAWSQGHRTVKLVPWSQCLQNFLLHGTKNVTNSSSLRLPRQNSDGGQKNKPREHIIDCGDIVWSLAFGSSVPEKQSRCVNIEWHRFRFGQDQLLLATGLNNGRIKIWDVYTGKLLLNLVDHTEVVRDLTFAPDGSLILVSASRDKTLRVWDLKDDGNMMKVLRGHQNWVYSCAFSPDSSMLCSVGASKAVVAAILV

SEQ ID NO: 738854 - protein, 174 aa, Homo sapiens
MASFPPRVNEKEIVRLRTIGELLAPAAPFDKKCGRENWTVAFAPDGSYFAWSQGHRTVKLVPWSQCLQNFLLHGTKNVTNSSSLRLPRQNSDGGQKNKPREHIIDCGDIVWSLAFGSSVPEKQSRCVNIEWHRFRFGQDQLLLATGLNNGRIKIWDVYTGFPENTLLTGRTTCM

SEQ ID NO: 738855 - protein, 151 aa, Homo sapiens
MASFPPRVNEKEIVRLRTIGELLAPAAPFDKKCGRENWTVAFAPDGSYFAWSQGHRTVKLVPWSQCLQNFLLHGTKNVTNSSSLRLPRQNSDGGQSFWVISSRKTESLCKYRMASLQIWTRSATSCYRVEQWAYQNMGCIYRNLLLTWESY

SEQ ID NO: 738856 - protein, 107 aa, Homo sapiens [sequence omitted]

SEQ ID NO: 738857 - protein, 244 aa, Homo sapiens; identical to SEQ ID NO: 738853

SEQ ID NO: 738858 - protein, 244 aa, Homo sapiens; identical to SEQ ID NO: 738853

SEQ ID NO: 738859 - protein, 244 aa, Homo sapiens; identical to SEQ ID NO: 738853

SEQ ID NO: 738860 - protein, 244 aa, Homo sapiens; identical to SEQ ID NO: 738853

SEQ ID NO: 738861 - protein, 251 aa, Homo sapiens
MASFPPRVNEKEIVFLFFLLVRLRTIGELLAPAAPFDKKCGRENWTVAFAPDGSYFAWSQGHRTVKLVPWSQCLQNFLLHGTKNVTNSSSLRLPRQNSDGGQKNKPREHIIDCGDIVWSLAFGSSVPEKQSRCVNIEWHRFRFGQDQLLLATGLNNGRIKIWDVYTGKLLLNLVDHTEVVRDLTFAPDGSLILVSASRDKTLRVWDLKDDGNMMKVLRGHQNWVYSCAFSPDSSMLCSVGASKAVVAAILV

SEQ ID NO: 738862 - protein, 107 aa, Homo sapiens
GRLLLLNSRPHRRRIKIWDVYTGKLLLNLVDHTEVVRDLTFAPDGSLILVSASRDKTLRVWDLKDDGNMMKVLRGHQNWVYSCAFSPDSSMLCSVGASKAVVAAILV

SEQ ID NO: 738863 - protein, 244 aa, Homo sapiens; identical to SEQ ID NO: 738853

SEQ ID NO: 738864 - protein, 163 aa, Homo sapiens
LNDRARYPSITLLATASYDTRVYIWDPHNGDILMEFGHLFPPPTPIFAGGANDRWVRSVSFSHDGLHVASLADDKMVRFWRIDEDYPVQVAPLSNGLCCAFSTDGSVLAAGTHDGSVYFWATPRQVPSLQHLCRMSIRRVMPTQEVQELPIPSKLLEFLSYRI

SEQ ID NO: 738865 - protein, 173 aa, Homo sapiens
MASFPPRVNEKEIVFLFFLLVRLRTIGELLAPAAPFDKKCGRENWTVAFAPDGSYFAWSQGHRTVKLVPWSQCLQNFLLHGTKNVTNSSSLRLPRQNSDGGQKNKPREHIIDCGDIVWSLAFGSSVPEKQSRCVNIEWHRFRFGQDQLLLATGLNNGRIKIWDVYTEVWIHSF

SEQ ID NO: 738866 - protein, 110 aa, Homo sapiens
MASFPPRVNEKEIVRLRTIGELLAPAAPFDKKCGRENWTVAFAPDGSYFAWSQGHRTVKLVPWSQCLQNFLLHGTKNVTWSQCLQNFLLHGTITILFGNLKLLELVTFLV

SEQ ID NO: 738867 - protein, 421 aa, Homo sapiens
MASFPPRVNEKEIVRLRTIGELLAPAAPFDKKCGRENWTVAFAPDGSYFAWSQGHRTVKLVPWSQCLQNFLLHGTKNVTNSSSLRLPRQNSDGGQKNKPREHIIDCGDIVWSLAFGSSVPEKQSRCVNIEWHRFRFGQDQLLLATGLNNGRIKIWDVYTGKLLLNLVDHTEVVRDLTFAPDGSLILVSASRDKTLRVWDLKDDGNMMKVLRGHQNWVYSCAFSPDSSMLCSVGASKAVFLWNMDKYTMIRKLEGHHHDVVACDFSPDGALLATASYDTRVYIWDPHNGDILMEFGHLFPPPTPIFAGGANDRWVRSVSFSHDGLHVASLADDKMVRFWRIDEDYPVQVAPLSNGLCCAFSTDGSVLAAGTHDGSVYFWATPRQVPSLQHLCRMSIRRVMPTQEVQELPIPSKLLEFLSYRI

SEQ ID NO: 738868 - protein, 244 aa, Homo sapiens; identical to SEQ ID NO: 738853

SEQ ID NO: 738869 - protein, 244 aa, Homo sapiens; identical to SEQ ID NO: 738853

SEQ ID NO: 738870 - protein, 244 aa, Homo sapiens; identical to SEQ ID NO: 738853

SEQ ID NO: 738871 - protein, 421 aa, Homo sapiens; identical to SEQ ID NO: 738867

SEQ ID NO: 738872 - protein, 244 aa, Homo sapiens; identical to SEQ ID NO: 738853

SEQ ID NO: 738873 - protein, 275 aa, Homo sapiens
MASFPPRVNEKEIGKLLLNLVDHTEVVRDLTFAPDGSLILVSASRDKTLRVWDLKDDGNMMKVLRGHQNWVYSCAFSPDSSMLCSVGASKAVFLWNMDKYTMIRKLEGHHHDVVACDFSPDGALLATASYDTRVYIWDPHNGDILMEFGHLFPPPTPIFAGGANDRWVRSVSFSHDGLHVASLADDKMVRFWRIDEDYPVQVAPLSNGLCCAFSTDGSVLAAGTHDGSVYFWATPRQVPSLQHLCRMSIRRVMPTQEVQELPIPSKLLEFLSYRI

SEQ ID NO: 738874 - protein, 166 aa, Homo sapiens
MASFPPRVNEKEIVRLRTIGELLAPAAPFDKKCGRENWTVAFAPDGSYFAWSQGHRTVKLVPWSQCLQNFLLHGTKNVTNSSSLRLPRQNSDGGQKNKPREHIIDCGDIVWSLAFGSSVPEKQSRCVNIEWHRFRFGQDQLLLATGLNNGRIKIWDVYTEVWIHSF

SEQ ID NO: 738875 - protein, 365 aa, Homo sapiens
SRVSWCWRQALGGLARTWQGLFTMADDLEQQSQGWLSSWLPTWRPTSMSQLKNVEARILQCLQNKFLARYVSLPNQNKIWTVTVSPEQNDRTPLVMVHGFGGGVGLWILNMDSLSARRTLHTFDLLGFGRSSRPAFPRDPEGAEDEFVTSIETWRETMGIPSMILLGHSLGGFLATSYSIKYPDRVKHLILVDPWGFPLRPTNPSEIRAPPAWVKAVASVLGRSNPLAVLRVAGPWGPGLVQRFRPDFKRKFADFFEDDTISEYIYHCNAQNPSGETAFKAMMESFGWARRPMLERIHLIRKDVPITMIYGSDTWIDTSTGKKVKMQRPDSYVRDMEIKGASHHVYADQPHIFNAVVEEICDSVD

SEQ ID NO: 738876 - protein, 330 aa, Homo sapiens
QAGTAPAYWISSTTPSLEQQSQGWLSSWLPTWRPTSMSQLKNVEARILQCLQNKFLARYVSLPNQNKIWTVTVSPEQNDRTPLVMVHGFGGGVGLWILNMDSLSARRTLHTFDLLGFGRSSRPAFPRDPEGAEDEFVTSIETWRETMGIPSMILLGHSLGGFLATSYSIKYPDRVKHLILVDPWGFPLRPTNPSEIRAPPAWVKAVASVLGRSNPLAVLRVAGPWGPGLVQRFRPDFKRKFADFFEDDTISEYIYHCNAQNPSGETASKHDGSLVAGPMWRNSWIGRWAYTDYGATLLNLGNREGAHTSQGTGAPASAPTNGAPPPPQTT

SEQ ID NO: 738877 - protein, 365 aa, Homo sapiens; identical to SEQ ID NO: 738875

SEQ ID NO: 738878 - protein, 365 aa, Homo sapiens; identical to SEQ ID NO: 738875

SEQ ID NO: 738879 - protein, 238 aa, Homo sapiens
SRVSWCWRQALGGLARTWQGLFTMADDLEQQSQGWLSSWLPTWRPTSMSQLKNVEARILQCLQNKFLARYVSLPNQNKIWTVTVSPEQNDRTPLVMVHGFGGGVGLWILNMDSLSARRTLHTFDLLGFGRSSRPAFPRDPEGAEDEFVTSIETWRETMGIPSMILLGHSLGGFLATSYSIKYPDRVKHLILVDPWGFPLRPTNPSEIRAPPAWVKAVASVLGRSNPLAVLRVAGPWGE

SEQ ID NO: 738880 - protein, 103 aa, Homo sapiens
LAHAAPPTHSPSHLLNCPGAVRATSLIPFCCCSFLETESHSVTQAGVQWHHLGSLQPLPARFKRFSCLSFLCSWDYRRTPPGPANFCIFSRDGVSPCRPGCSR

SEQ ID NO: 738881 - protein, 109 aa, Homo sapiens [sequence omitted]

SEQ ID NO: 738882 - protein, 2564 aa, Homo sapiens
ACLCCACLLELIPYAPTLSWTACPPAMAGPRGLLPLCLLAFCLAGFSFVRGQVLFKGCDVKTTFVTHVPCTSCAAIKKQTCPSGWLRELPDQITQDCRYEVQLGGSMVSMSGCRRKCRKQVVQKACCPGYWGSRCHECPGGAETPCNGHGTCLDGMDRNGTCVCQENFRGSACQECQDPNRFGPDCQSVCSCVHGVCNHGPRGDGSCLCFAGYTGPHCDQELPVCQELRCPQNTQCSAEAPSCRCLPGYTQQGSECRAPNPCWPSPCSLLAQCSVSPKGQAQCHCPENYHGDGMVCLPKDPCTDNLGGCPSNSTLCVYQKPGQAFCTCRPGLVSINSNASAGCFAFCSPFSCDRSATCQVTADGKTSCVCRESEVGDGRACYGHLLHEVQKATQTGRVFLQLRVAVAMMDQGCREILTTAGPFTVLVPSVSSFSSRTMNASLAQQLCRQHIIAGQHILEDTRTQQTRRWWTLAGQEITVTFNQFTKYSYKYKDQPQQTFNIYKANNIAANGVFHVVTGLRWQAPSGTPGDPKRTIGQILASTEAFSRFETILENCGLPSILDGPGPFTVFAPSNEAVDSLRDGRLIYLFTAGLSKLQELVRYHIYNHGQLTVEKLISKGRILTMANQVLAVNISEEGRILLGPEGVPLQRVDVMAANGVIHMLDGILLPPTILPILPKHCSEEQHKIVAGSCVDCQALNTSTCPPNSVKLDIFPKECVYIHDPTGLNVLKKGCASYCNQTIMEQGCCKGFFGPDCTQCPGGFSNPCYGKGNCSDGIQGNGACLCFPDYKGIACHICSNPNKHGEQCQEDCGCVHGLCDNRPGSGGVCQQGTCAPGFSGRFCNESMGDCGPTGLAQHCHLHARCVSQEGVARCRCLDGFEGDGFSCTPSNPCSHPDRGGCSENAECVPGSLGTHHCTCHKGWSGDGRVCVAIDECELDVRGGCHTDALCSYVGPGQSRCTCKLGFAGDGYQCSPIDPCRAGNGGCHGLELEANAHFSIFYQWLKSAGITLPADRRVTALVPSEAAVRQLSPEDRAFWLQPRTLPNLVRAHFLQGALFEEELARLGGQEVATLNPTTRWEIRNISGRVWVQNASVDVADLLATNGVLHILSQVLLPPRGDVPGGQGLLQQLDLVPAFSLFRELLQHHGLVPQIEAATAYTIFVPTNRSLEAQGNSSHLDADTVRHHVVLGEALSMETLRKGGHRNSLLGPAHWIVFYNHSGQPEVNHVPLEGPMLEAPGRSLIGLSGVLTVGSSRCLHSHAEALREKCVNCTRRFRCTQGFQLQDTPRKSCVYRSGFSFSRGCSYTCAKKIQVPDCCPGFFGTLCEPCPGGLGGVCSGHGQCQDRFLGSGECHCHEGFHGTACEVCELGRYGPNCTGVCDCAHGLCQEGLQGDGSCVCNVGWQGLRCDQKITSPQCPRKCDPNANCVQDSAGASTCACAAGYSGNGIFCSEVDPCAHGHGGCSPHANCTKVAPGQRTCTCQDGYMGDGELCQEINSCLIHHGGCHIHAECIPTGPQQVSCSCREGYSGDGIRTCELLDPCSKNNGGCSPYATCKSTGDGQRTCTCDTAHTVGDGLTCRARVGLELLRDKHASFFSLRLLEYKELKGDGPFTIFVPHADLMSNLSQDELARIRAHRQLVFRYHVVGCRRLRSEDLLEQGYATALSGHPLRFSEREGSIYLNDFARVVSSDHEAVNGILHFIDRVLLPPEALHWEPDDAPIPRRNVTAAAQGFGYKIFSGLLKVAGLLPLLREASHRPFTMLWPTDAAFRALPPDRQAWLYHEDHRDKLAAILRGHMIRNVEALASDLPNLGPLRTMHGTPISFSCSRTRPGELMVGEDDARIVQRHLPFEGGLAYGIDQLLEPPGLGARCDHFETRPLRLNTCSICGLEPPCPEGSQEQGSPEACWRFYPKFWTSPPLHSLGLRSVWVHPSLWGRPQGLGRGCHRNCVTTTWKPSCCPGHYGSECQACPGGPSSPCSDRGVCMDGMSGSGQCLCRSGFAGTACELCAPGAFGPHCQACRCTVHGRCDEGLGGSGSCFCDEGWTGPRCEVQLELQPVCTPPCAPEAVCRAGNSCECSLGYEGDGRVCTVADLCQDGHGGCSEHANCSQVGTMVTCTCLPDYEGDGWSCRARNPCTDGHRGGCSEHANCLSTGLNTRRCECHAGYVGDGLQCLEESEPPVDRCLGQPPPCHSDAMCTDQHFQEKRAGVFHLQATSGPYGLNFSEAEAACEAQGAVLASFPQLSAAQQLGFHLCLMGWLANGSTAHPVVFPVADCGNGRVGVVSLGARKNLSERWDAYCFRVQDVACRCRNGFVGDGISTCNGKLLDVLAATANFSTFYGMLLGYANATQRGLDFLDFLDDELTYKTLFVPVNEGFVDNMTLSGPDLELHASNATLLSANASQGKLLPAHSGLSLIISDAGPDNSSWAPVAPGTVVVSRIIVWDIMAFNGIIHALASPLLAPPQPQAVLAPEAPPVAAGVGAVLAAGALLGLVAGALYLRARGKPTGFGFSAFQAEDDADDDFSPWQEGTNPTLVSVPNPVFGSDTFCEPFDDSLLEEDFPDTQRILTVK

SEQ ID NO: 738883 - protein, 863 aa, Homo sapiens
ACLCCACLLELIPYAPTLSWTACPPAMAGPRGLLPLCLLAFCLAGFSFVRGQVLFKGCDVKTTFVTHVPCTSCAAIKKQTCPSGWLRELPDQITQDCRYEVQLGGSMVSMSGCRRKCRKQVVQKACCPGYWGSRCHECPGGAETPCNGHGTCLDGMDRNGTCVCQENFRGSACQECQDPNRFGPDCQSVCSCVHGVCNHGPRGDGSCLCFAGYTGPHCDQELPVCQELRCPQNTQCSAEAPSCRCLPGYTQQGSECRAPNPCWPSPCSLLAQCSVSPKGQAQCHCPENYHGDGMVCLPKDPCTDNLGGCPSNSTLCVYQKPGQAFCTCRPGLVSINSNASAGCFAFCSPFSCDRSATCQVTADGKTSCVCRESEVGDGRACYGHLLHEVQKATQTGRVFLQLRVAVAMMDQGCREILTTAGPFTVLVPSVSSFSSRTMNASLAQQLCRQHIIAGQHILEDTRTQQTRRWWTLAGQEITVTFNQFTKYSYKYKDQPQQTFNIYKANNIAANGVFHVVTGLRWQAPSGTPGDPKRTIGQILASTEAFSRFETILENCGLPSILDGPGPFTVFAPSNEAVDSLRDGRLIYLFTAGLSKLQELVRYHIYNHGQLTVEKLISKGRILTMANQVLAVNISEEGRILLGPEGVPLQRVDVMAANGVIHMLDGILLPPTILPILPKHCSEEQHKIVAGSCVDCQALNTSTCPPNSVKLDIFPKECVYIHDPTGLNVLKKGCASYCNQTIMEQGCCKGFFGPDCTQCPGGFSNPCYGKGNCSDGIQGNGACLCFPDYKGIACHICKEPTLEIPHFGSMRGKERELIVLRSENGETWKEHQFDSKNEDLTTLLNGMDEELDSPEELGSVSART

SEQ ID NO: 738884 - protein, 2596 aa, Homo sapiens
ACLCCACLLELIPYAPTLSWTACPPAMAGPRGLLPLCLLAFCLAGFSFVRGQVLFKGCDVKTTFVTHVPCTSCAAIKKQTCPSGWLRELPDQITQDCRYEVQLGGSMVSMSGCRRKCRKQVVQKACCPGYWGSRCHECPGGAETPCNGHGTCLDGMDRNGTCVCQENFRGSACQECQDPNRFGPDCQSVCSCVHGVCNHGPRGDGSCLCFAGYTGPHCDQELPVCQELRCPQNTQCSAEAPSCRCLPGYTQQGSECRAPNPCWPSPCSLLAQCSVSPKGQAQCHCPENYHGDGMVCLPKDPCTDNLGGCPSNSTLCVYQKPGQAFCTCRPGLVSINSNASAGCFAFCSPFSCDRSATCQVTADGKTSCVCRESEVGDGRACYGHLLHEVQKATQTGRVFLQLRVAVAMMDQGCREILTTAGPFTVLVPSVSSFSSRTMNASLAQQLCRQHIIAGQHILEDTRTQQTRRWWTLAGQEITVTFNQFTKYSYKYKDQPQQTFNIYKANNIAANGVFHVVTGLRWQAPSGTPGDPKRTIGQILASTEAFSRFETILENCGLPSILDGPGPFTVFAPSNEAVDSLRDGRLIYLFTAGLSKLQELVRYHIYNHGQLTVEKLISKGRILTMANQVLAVNISEEGRILLGPEGVPLQRVDVMAANGVIHMLDGILLPPTILPILPKHCSEEQHKIVAGSCVDCQALNTSTCPPNSVKLDIFPKECVYIHDPTGLNVLKKGCASYCNQTIMEQGCCKGFFGPDCTQCPGGFSNPCYGKGNCSDGIQGNGACLCFPDYKGIACHICSNPNKHGEQCQEDCGCVHGLCDNRPGSGGVCQQGTCAPGFSGRFCNESMGDCGPTGLAQHCHLHARCVSQEGVARCRCLDGFEGDGFSCTPSNPCSHPDRGGCSENAECVPGSLGTHHCTCHKGWSGDGRVCVAIDECELDVRGGCHTDALCSYVGPGQSRCTCKLGFAGDGYQCSPIDPCRAGNGGCHGLATCRAVGGGQRVCTCPPGFGGDGFSCYGDIFRELEANAHFSIFYQWLKSAGITLPADRRVTALVPSEAAVRQLSPEDRAFWLQPRTLPNLVRAHFLQGALFEEELARLGGQEVATLNPTTRWEIRNISGRVWVQNASVDVADLLATNGVLHILSQVLLPPRGDVPGGQGLLQQLDLVPAFSLFRELLQHHGLVPQIEAATAYTIFVPTNRSLEAQGNSSHLDADTVRHHVVLGEALSMETLRKGGHRNSLLGPAHWIVFYNHSGQPEVNHVPLEGPMLEAPGRSLIGLSGVLTVGSSRCLHSHAEALREKCVNCTRRFRCTQGFQLQDTPRKSCVYRSGFSFSRGCSYTCAKKIQVPDCCPGFFGTLCEPCPGGLGGVCSGHGQCQDRFLGSGECHCHEGFHGTACEVCELGRYGPNCTGVCDCAHGLCQEGLQGDGSCVCNVGWQGLRCDQKITSPQCPRKCDPNANCVQDSAGASTCACAAGYSGNGIFCSEVDPCAHGHGGCSPHANCTKVAPGQRTCTCQDGYMGDGELCQEINSCLIHHGGCHIHAECIPTGPQQVSCSCREGYSGDGIRTCELLDPCSKNNGGCSPYATCKSTGDGQRTCTCDTAHTVGDGLTCRARVGLELLRDKHASFFSLRLLEYKELKGDGPFTIFVPHADLMSNLSQDELARIRAHRQLVFRYHVVGCRRLRSEDLLEQGYATALSGHPLRFSEREGSIYLNDFARVVSSDHEAVNGILHFIDRVLLPPEALHWEPDDAPIPRRNVTAAAQGFGYKIFSGLLKVAGLLPLLREASHRPFTMLWPTDAAFRALPPDRQAWLYHEDHRDKLAAILRGHMIRNVEALASDLPNLGPLRTMHGTPISFSCSRTRPGELMVGEDDARIVQRHLPFEGGLAYGIDQLLEPPGLGARCDHFETRPLRLNTCSICGLEPPCPEGSQEQGSPEACWRFYPKFWTSPPLHSLGLRSVWVHPSLWGRPQGLGRGCHRNCVTTTWKPSCCPGHYGSECQACPGGPSSPCSDRGVCMDGMSGSGQCLCRSGFAGTACELCAPGAFGPHCQACRCTVHGRCDEGLGGSGSCFCDEGWTGPRCEVQLELQPVCTPPCAPEAVCRAGNSCECSLGYEGDGRVCTVADLCQDGHGGCSEHANCSQVGTMVTCTCLPDYEGDGWSCRARNPCTDGHRGGCSEHANCLSTGLNTRRCECHAGYVGDGLQCLEESEPPVDRCLGQPPPCHSDAMCTDQHFQEKRAGVFHLQATSGPYGLNFSEAEAACEAQGAVLASFPQLSAAQQLGFHLCLMGWLANGSTAHPVVFPVADCGNGRVGVVSLGARKNLSERWDAYCFRVQDVACRCRNGFVGDGISTCNGKLLDVLAATANFSTFYGMLLGYANATQRGLDFLDFLDDELTYKTLFVPVNEGFVDNMTLSGPDLELHASNATLLSANASQGKLLPAHSGLSLIISDAGPDNSSWAPVAPGTVVVSRIIVWDIMAFNGIIHALASPLLAPPQPQAVLAPEAPPVAAGVGAVLAAGALLGLVAGALYLRARGKPTGFGFSAFQAEDDADDDFSPWQEGTNPTLVSVPNPVFGSDTFCEPFDDSLLEEDFPDTQRILTVK

SEQ ID NO: 738885 - protein, 860 aa, Homo sapiens
ACLCCACLLELIPYAPTLSWTACPPAMAGPRGLLPLCLLAFCLAGFSFVRGQVLFKGCDVKTTFVTHVPCTSCAAIKKQTCPSGWLRELPDQITQDCRYEVQLGGSMVSMSGCRRKCRKQVVQKACCPGYWGSRCHECPGGAETPCNGHGTCLDGMDRNGTCVCQENFRGSACQECQDPNRFGPDCQSVCSCVHGVCNHGPRGDGSCLCFAGYTGPHCDQELPVCQELRCPQNTQCSAEAPSCRCLPGYTQQGSECRAPNPCWPSPCSLLAQCSVSPKGQAQCHCPENYHGDGMVCLPKDPCTDNLGGCPSNSTLCVYQKPGQAFCTCRPGLVSINSNASAGCFAFCSPFSCDRSATCQVTADGKTSCVCRESEVGDGRACYGHLLHEVQKATQTGRVFLQLRVAVAMMDQGCREILTTAGPFTVLVPSVSSFSSRTMNASLAQQLCRQHIIAGQHILEDTRTQQTRRWWTLAGQEITVTFNQFTKYSYKYKDQPQQTFNIYKANNIAANGVFHVVTGLRWQAPSGTPGDPKRTIGQILASTEAFSRFETILENCGLPSILDGPGPFTVFAPSNEAVDSLRDGRLIYLFTAGLSKLQELVRYHIYNHGQLTVEKLISKGRILTMANQVLAVNISEEGRILLGPEGVPLQRVDVMAANGVIHMLDGILLPPTILPILPKHCSEEQHKIVAGSCVDCQALNTSTCPPNSVKLDIFPKECVYIHDPTGLNVLKKGCASYCNQTIMEQGCCKGFFGPDCTQCPGGFSNPCYGKGNCSDGIQGNGACLCFPDYKGIACHICSNPNKHGEQCQEGGWSWLRPPPREKKRLPKDGSGGSQEGKRSPRRRDEGQGEWRKICLKMGLGA

SEQ ID NO: 738886 - protein, 465 aa, Homo sapiens
PTYADAWALSRRRLGGDPGCQAPSCAQMDGTETRQRRLDSCGKPGELGLPHPLSTGGLPVASEDGALRAPESQSVTPKPLETEPSRETAWSIGLQVTVPFMFAGLGLSWAGMLLDYFQHWPVFVEVKDLLTLVPPLVGLKGNLEMTLASRLSTAANTGQIDDPQEQHRVISSNLALIQVQATVVGLLAAVAALLLGVVSREEVDVAKVELLCASSVLTAFLAAFALGVLMVCIVIGARKLGVNPVWVLIAKQSPPIVKILKFGWFPIILAMVISSFGGLILSKTVSKQQYKGMAIFTPVICGVGGNLVAIQTSRISTYLHMWSAPGVLPLQMKKFWPNPCSTFCTSEINSMSARVLLLLVVPGHLIFFYIIYLVEGQSVINSQTFVVLYLLAGLIQVTILLYLAEVMVRLTWHQALDPDNHCIPYLTGLGDLLGTGLLALCFFTDWLLKSKAELGGISELASGPP

SEQ ID NO: 738887 - protein, 534 aa, Homo sapiens
PTYADAWALSRRRLGGDPGCQAPSCAQMDGTETRQRRLDSCGKPGELGLPHPLSTGGLPVASEDGALRAPESQSVTPKPLETEPSRETAWSIGLQVTVPFMFAGLGLSWAGMLLDYFQHWPVFVEVKDLLTLVPPLVGLKGNLEMTLASRLSTAANTGQIDDPQEQHRVISSNLALIQVQATVVGLLAAVAALLLGVVSREEVDVAKVELLCASSVLTAFLAAFALGVLMVCIVIGARKLGVNPDNIATPIAASLGDLITLSILALVSSFFYRHKDSRYLTPLVCLSFAALTPVWVLIAKQSPPIVKILKFGWFPIILAMVISSFGGLILSKTVSKQQYKGMAIFTPVICGVGGNLVAIQTSRISTYLHMWSAPGVLPLQMKKFWPNPCSTFCTSEINSMSARVLLLLVVPGHLIFFYIIYLVEGQSVINSQTFVVLYLLAGLIQVTILLYLAEVMVRLTWHQALDPDNHCIPYLTGLGDLLGSSSVGHTAAVPRRCTASPGWGLIQPFICTQHLIVSLLSFYFPFCLLAKTSI

SEQ ID NO: 738888 - protein, 547 aa, Homo sapiens
PPGPPAGLCAAGAWASAAVPERQVVRGPAARPGAGPGRPGLPASCLSRSRPCVLRPPLSRRRLGGDPGCQAPSCAQMDGTETRQRRLDSCGKPGELGLPHPLSTGGLPVASEDGALRAPESQSVTPKPLETEPSRETAWSIGLQVTVPFMFAGLGLSWAGMLLDYFQANTGQIDDPQEQHRVISSNLALIQVQATVVGLLAAVAALLLGVVSREEVDVAKVELLCASSVLTAFLAAFALGVLMVCIVIGARKLGVNPDNIATPIAASLGDLITLSILALVSSFFYRHKDSRYLTPLVCLSFAALTPVWVLIAKQSPPIVKILKFGWFPIILAMVISSFGGLILSKTVSKQQYKGMAIFTPVICGVGGNLVAIQTSRISTYLHMWSAPGVLPLQMKKFWPNPCSTFCTSEINSMSARVLLLLVVPGHLIFFYIIYLVEGQSVINSQTFVVLYLLAGLIQVTILLYLAEVMVRLTWHQALDPDNHCIPYLTGLGDLLGSSSVGHTAAVPRRCTASPGWGLIQPFICTQHLIVSLLSFYFPFCLLAKTSI

SEQ ID NO: 738889 - protein, 194 aa, Homo sapiens
KGKQIPFLLVGVGGNLVAIQTSRISTYLHMWSAPGVLPLQMKKFWPNPCSTFCTSEINSMSARVLLLLVVPGHLIFFYIIYLVEGQSVINSQTFVVLYLLAGLIQVTILLYLAEVMVRLTWHQALDPDNHCIPYLTGLGDLLGSSSVGHTAAVPRRCTASPGWGLIQPFICTQHLIVSLLSFYFPFCLLAKTSI

SEQ ID NO: 738890 - protein, 514 aa, Homo sapiens
PTYADAWALSRRRLGGDPGCQAPSCAQMDGTETRQRRLDSCGKPGELGLPHPLSTGGLPVASEDGALRAPESQSVTPKPLETEPSRETAWSIGLQVTVPFMFAGLGLSWAGMLLDYFQHWPVFVEVKDLLTLVPPLVGLKGNLEMTLASRLSTAANTGQIDDPQEQHRVISSNLALIQVQATVVGLLAAVAALLLGVVSREEVDVAKVELLCASSVLTAFLAAFALGVLMVCIVIGARKLGVNPDNIATPIAASLGDLITLSILALVSSFFYRHKDSRYLTPLVCLSFAALTPVWVLIAKQSPPIVKILKFGWFPIILAMVISSFGGLILSKTVSKQQYKGMAIFTPVICGVGGNLVAIQTSRISTYLHMWSAPGVLPLQMKKFWPNPCSTFCTSEINSMSARVLLLLVVPGHLIFFYIIYLVEGQSVINSQTFVVLYLLAGLIQVTILLYLAEVMVRLTWHQALDPDNHCIPYLTGLGDLLGTGLLALCFFTDWLLKSKAELGGISELASGPP

SEQ ID NO: 738891 - protein, 487 aa, Homo sapiens
MDGTETRQRRLDSCGKPGELGLPHPLSTGGLPVASEDGALRAPESQSVTPKPLETEPSRETAWSIGLQVTVPFMFAGLGLSWAGMLLDYFQHWPVFVEVKDLLTLVPPLVGLKGNLEMTLASRLSTAANTGQIDDPQEQHRVISSNLALIQVQATVVGLLAAVAALLLGVVSREEVDVAKVELLCASSVLTAFLAAFALGVLMVCIVIGARKLGVNPDNIATPIAASLGDLITLSILALVSSFFYRHKDSRYLTPLVCLSFAALTPVWVLIAKQSPPIVKILKFGWFPIILAMVISSFGGLILSKTVSKQQYKGMAIFTPVICGVGGNLVAIQTSRISTYLHMWSAPGVLPLQMKKFWPNPCSTFCTSEINSMSARVLLLLVVPGHLIFFYIIYLVEGQSVINSQTFVVLYLLAGLIQVTILLYLAEVMVRLTWHQALDPDNHCIPYLTGLGDLLGTGLLALCFFTDWLLKSKAELGGISELASGPP

SEQ ID NO: 738892 - protein, 527 aa, Homo sapiens
PPGPPAGLCAAGAWASAAVPERQVVRGPAARPGAGPGRPGLPASCLSRSRPCVLRPPLSRRRLGGDPGCQAPSCAQMDGTETRQRRLDSCGKPGELGLPHPLSTGGLPVASEDGALRAPESQSVTPKPLETEPSRETAWSIGLQVTVPFMFAGLGLSWAGMLLDYFQANTGQIDDPQEQHRVISSNLALIQVQATVVGLLAAVAALLLGVVSREEVDVAKVELLCASSVLTAFLAAFALGVLMVCIVIGARKLGVNPDNIATPIAASLGDLITLSILALVSSFFYRHKDSRYLTPLVCLSFAALTPVWVLIAKQSPPIVKILKFGWFPIILAMVISSFGGLILSKTVSKQQYKGMAIFTPVICGVGGNLVAIQTSRISTYLHMWSAPGVLPLQMKKFWPNPCSTFCTSEINSMSARVLLLLVVPGHLIFFYIIYLVEGQSVINSQTFVVLYLLAGLIQVTILLYLAEVMVRLTWHQALDPDNHCIPYLTGLGDLLGTGLLALCFFTDWLLKSKAELGGISELASGPP

SEQ ID NO: 738893 - protein, 405 aa, Homo sapiens
GGLVMNSMQHWPVFVEVKDLLTLVPPLVGLKGNLEMTLASRLSTAANTGQIDDPQEQHRVISSNLALIQVQATVVGLLAAVAALLLGVVSREEVDVAKVELLCASSVLTAFLAAFALGVLMVCIVIGARKLGVNPDNIATPIAASLGDLITLSILALVSSFFYRHKDSRYLTPLVCLSFAALTPVWVLIAKQSPPIVKILKFGWFPIILAMVISSFGGLILSKTVSKQQYKGMAIFTPVICGVGGNLVAIQTSRISTYLHMWSAPGVLPLQMKKFWPNPCSTFCTSEINSMSARVLLLLVVPGHLIFFYIIYLVEGQSVINSQTFVVLYLLAGLIQVTILLYLAEVMVRLTWHQALDPDNHCIPYLTGLGDLLGTGLLALCFFTDWLLKSKAELGGISELASGPP

SEQ ID NO: 738894 - protein, 325 aa, Homo sapiens
LTRGSPLSEWVKEVDVAKVELLCASSVLTAFLAAFALGVLMVCIVIGARKLGVNPDNIATPIAASLGDLITLSILALVSSFFYRHKDSRYLTPLVCLSFAALTPVWVLIAKQSPPIVKILKFGWFPIILAMVISSFGGLILSKTVSKQQYKGMAIFTPVICGVGGNLVAIQTSRISTYLHMWSAPGVLPLQMKKFWPNPCSTFCTSEINSMSARVLLLLVVPGHLIFFYIIYLVEGQSVINSQTFVVLYLLAGLIQVTILLYLAEVMVRLTWHQALDPDNHCIPYLTGLGDLLGTGLLALCFFTDWLLKSKAELGGISELASGPP

SEQ ID NO: 738895 - protein, 285 aa, Homo sapiens
MVCIVIGARKLGVNPDNIATPIAASLGDLITLSILALVSSFFYRHKDSRYLTPLVCLSFAALTPVWVLIAKQSPPIVKILKFGWFPIILAMVISSFGGLILSKTVSKQQYKGMAIFTPVICGVGGNLVAIQTSRISTYLHMWSAPGVLPLQMKKFWPNPCSTFCTSEINSMSARVLLLLVVPGHLIFFYIIYLVEGQSVINSQTFVVLYLLAGLIQVTILLYLAEVMVRLTWHQALDPDNHCIPYLTGLGDLLGTGLLALCFFTDWLLKSKAELGGISELASGPP

SEQ ID NO: 738896 - protein, 514 aa, Homo sapiens; identical to SEQ ID NO: 738890

SEQ ID NO: 738897 - protein, 514 aa, Homo sapiens; identical to SEQ ID NO: 738890

SEQ ID NO: 738898 - protein, 514 aa, Homo sapiens; identical to SEQ ID NO: 738890

SEQ ID NO: 738899 - protein, 514 aa, Homo sapiens; identical to SEQ ID NO: 738890

SEQ ID NO: 738900 - protein, 514 aa, Homo sapiens; identical to SEQ ID NO: 738890

SEQ ID NO: 738901 - protein, 514 aa, Homo sapiens; identical to SEQ ID NO: 738890

SEQ ID NO: 738902 - protein, 1177 aa, Homo sapiens
GRPRTAHPAVAMEDAFGAAVVTVWDSDAHTTEKPTDAYGELDFTGAGRKHSNFLRLSDRTDPAAVYSLVTRTWGFRAPNLVVSVLGGSGGPVLQTWLQDLLRRGLVRAAQSTGAWIVTGGLHTGIGRHVGVAVRDHQMASTGGTKVVAMGVAPWGVVRNRDTLINPKGSFPARYRWRGDPEDGVQFPLDYNYSAFFLVDDGTHGCLGGENRFRLRLESYISQQKTGVGGTGIDIPVLLLLIDGDEKMLTRIENATQAQLPCLLVAGSGGAADCLAETLEDTLAPGSGGARQGEARDRIRRFFPKGDLEVLQAQVERIMTRKELLTVYSSEDGSEEFETIVLKALVKACGSSEASAYLDELRLAVAWNRVDIAQSELFRGDIQWRSFHLEASLMDALLNDRPEFVRLLISHGLSLGHFLTPMRLAQLYSAAPSNSLIRNLLDQASHSAGTKAPALKGGAAELRPPDVGHVLRMLLGKMCAPRYPSGGAWDPHPGQGFGESMYLLSDKATSPLSLDAGLGQAPWSDLLLWALLLNRAQMAMYFWEMGSNAVSSALGACLLLRVMARLEPDAEEAARRKDLAFKFEGMGVDLFGECYRSSEVRAARLLLRRCPLWGDATCLQLAMQADARAFFAQDGVQSLLTQKWWGDMASTTPIWALVLAFFCPPLIYTRLITFRKSEEEPTREELEFDMDSVINGEGPVGTADPAEKTPLGVPRQSGRPGCCGGRCGGRRCLRRWFHFWGAPVTIFMGNVVSYLLFLLLFSRVLLVDFQPAPPGSLELLLYFWAFTLLCEELRQGLSGGGGSLASGGPGPGHASLSQRLRLYLADSWNQCDLVALTCFLLGVGCRLTPGLYHLGRTVLCIDFMVFTVRLLHIFTVNKQLGPKIVIVSKMMKDVFFFLFFLGVWLVAYGVATEGLLRPRDSDFPSILRRVFYRPYLQIFGQIPQEDMDVALMEHSNCSSEPGFWAHPPGAQAGTCVSQYANWLVVLLLVIFLLVANILLVNLLIAMFSYTFGKVQGNSDLYWKAQRYRLIREFHSRPALAPPFIVISHLRLLLRQLCRRPRSPQPSSPALEHFRVYLSKEAERKLLTWESVHKENFLLARARDKRESDSERLKRTSQKVDLALKQLGHIREYEQRLKVLEREVQQCSRVLGWVAEALSRSALLPPGGPPPPDLPGSKD

SEQ ID NO: 738903 - protein, 1113 aa, Homo sapiens
AEGAPGPWAAGGCGGRGSMVVPEKEQSWIPKIFKKKTCTTFIVDSKIRGAWIVTGGLHTGIGRHVGVAVRDHQMASTGGTKVVAMGVAPWGVVRNRDTLINPKGSFPARYRWRGDPEDGVQFPLDYNYSAFFLVDDGTHGCLGGENRFRLRLESYISQQKTGVGGTGIDIPVLLLLIDGDEKMLTRIENATQAQLPCLLVAGSGGAADCLAETLEDTLAPGSGGARQGEARDRIRRFFPKGDLEVLQAQVERIMTRKELLTVYSSEDGSEEFETIVLKALVKACGSSEASAYLDELRLAVAWNRVDIAQSELFRGDIQWRSFHLEASLMDALLNDRPEFVRLLISHGLSLGHFLTPMRLAQLYSAAPSNSLIRNLLDQASHSAGTKAPALKGGAAELRPPDVGHVLRMLLGKMCAPRYPSGGAWDPHPGQGFGESMYLLSDKATSPLSLDAGLGQAPWSDLLLWALLLNRAQMAMYFWEMGSNAVSSALGACLLLRVMARLEPDAEEAARRKDLAFKFEGMGVDLFGECYRSSEVRAARLLLRRCPLWGDATCLQLAMQADARAFFAQDGVQSLLTQKWWGDMASTTPIWALVLAFFCPPLIYTRLITFRKSEEEPTREELEFDMDSVINGEGPVGTADPAEKTPLGVPRQSGRPGCCGGRCGGRRCLRRWFHFWGAPVTIFMGNVVSYLLFLLLFSRVLLVDFQPAPPGSLELLLYFWAFTLLCEELRQGLSGGGGSLASGGPGPGHASLSQRLRLYLADSWNQCDLVALTCFLLGVGCRLTPGLYHLGRTVLCIDFMVFTVRLLHIFTVNKQLGPKIVIVSKMMKDVFFFLFFLGVWLVAYGVATEGLLRPRDSDFPSILRRVFYRPYLQIFGQIPQEDMDVALMEHSNCSSEPGFWAHPPGAQAGTCVSQYANWLVVLLLVIFLLVANILLVNLLIAMFSYTFGKVQGNSDLYWKAQRYRLIREFHSRPALAPPFIVISHLRLLLRQLCRRPRSPQPSSPALEHFRVYLSKEAERKLLTWESVHKENFLLARARDKRESDSERLKRTSQKVDLALKQLGHIREYEQRLKVLEREVQQCSRVLGWVAEALSRSALLPPGGPPPPDLPGSKD

SEQ ID NO: 738904 - protein, 843 aa, Homo sapiens
MDALLNDRPEFVRLLISHGLSLGHFLTPMRLAQLYSAAPSNSLIRNLLDQASHSAGTKAPALKGGAAELRPPDVGHVLRMLLGKMCAPRYPSGGAWDPHPGQGFGESMYLLSDKATSPLSLDAGLGQAPWSDLLLWALLLNRAQMAMYFWEMGSNAVSSALGACLLLRVMARLEPDAEEAARRKDLAFKFEGMGVGAWGTVPGSRDGGCRQRGMCNSALLTYPCAIPLNSLTSPFTPSPYSFPSLSHNNSSAPDLFGECYRSSEVRAARLLLRRCPLWGDATCLQLAMQADARAFFAQDGVQSLLTQKWWGDMASTTPIWALVLAFFCPPLIYTRLITFRKSEEEPTREELEFDMDSVINGEGPVGTADPAEKTPLGVPRQSGRPGCCGGRCGGRRCLRRWFHFWGAPVTIFMGNVVSYLLFLLLFSRVLLVDFQPAPPGSLELLLYFWAFTLLCEELRQGLSGGGGSLASGGPGPGHASLSQRLRLYLADSWNQCDLVALTCFLLGVGCRLTPGLYHLGRTVLCIDFMVFTVRLLHIFTVNKQLGPKIVIVSKMMKDVFFFLFFLGVWLVAYGVATEGLLRPRDSDFPSILRRVFYRPYLQIFGQIPQEDMDVALMEHSNCSSEPGFWAHPPGAQAGTCVSQYANWLVVLLLVIFLLVANILLVNLLIAMFSYTFGKVQGNSDLYWKAQRYRLIREFHSRPALAPPFIVISHLRLLLRQLCRRPRSPQPSSPALEHFRVYLSKEAERKLLTWESVHKENFLLARARDKRESDSERLKRTSQKVDLALKQLGHIREYEQRLKVLEREVQQCSRVLGWVAEALSRSALLPPGGPPPPDLPGSKD

SEQ ID NO: 738905 - protein, 171 aa, Homo sapiens
SSSVPGGSTEFETIVLKALVKGKSCTLQSSPSLSSTLDTFPGLGTSSTLSNPRPMPPLPLLIFFPFGALHGAIWAVFPDAFIMFQHLLSSVGSIHPFFHLSIHPHVQIDLSISLPTILPVIPHSEVGVLGTGCVTGSDRDNTEPPSETISMSVAFKAMQLEGPLRLSSEYN

SEQ ID NO: 738906 - protein, 1067 aa, Homo sapiens
AEGAPGPWAAGGCGGRGSMVVPEKEQSWIPKIFKKKTCTTFIVDSKIRGAWIVTGGLHTGIGRHVGVAVRDHQMASTGGTKVVAMGVAPWGVVRNRDTLINPKGSFPARYRWRGDPEDGVQFPLDYNYSAFFLVDDGTHGCLGGENRFRLRLESYISQQKTGVGGTGIDIPVLLLLIDGDEKMLTRIENATQAQLPCLLVAGSGGAADCLAETLEDTLAPGSGGARQGEARDRIRRFFPKGDLEVLQAQVERIMTRKELLTVYSSEDGSEEFETIVLKALVKACGSSEASAYLDELRLAVAWNRVDIAQSELFRGDIQWRSFHLEASLMDALLNDRPEFVRLLISHGLSLGHFLTPMRLAQLYSAAPSNSLIRNLLDQASHSAGTKAPALKGGAAELRPPDVGHVLRMLLGKMCAPRYPSGGAWDPHPGQGFGESMYLLSDKATSPLSLDAGLGQAPWSDLLLWALLLNRAQMAMYFWEMGSNAVSSALGACLLLRVMARLEPDAEEAARRKDLAFKFEGMGVDLFGECYRSSEVRAARLLLRRCPLWGDATCLQLAMQADARAFFAQDGVQSLLTQKWWGDMASTTPIWALVLAFFCPPLIYTRLITFRKSEEEPTREELEFDMDSVINGEGPVGTADPAEKTPLGVPRQSGRPGCCGGRCGGRRCLRRWFHFWGAPVTIFMGNVVSYLLFLLLFSRVLLVDFQPAPPGSLELLLYFWAFTLLCEELRQGLSGGGGSLASGGPGPGHASLSQRLRLYLADSWNQCDLVALTCFLLGVGCRLTPGLYHLGRTVLCIDFMVFTVRLLHIFTVNKQLGPKIVIVSKMMKDVFFFLFFLGVWLVAYGVATEGLLRPRDSDFPSILRRVFYRPYLQIFGQIPQEDMDVALMEHSNCSSEPGFWAHPPGAQAGTCVSQYANWLVVLLLVIFLLVANILLVNLLIAMFSYTFGKVQGNSDLYWKAQRYRLIREFHSRPALAPPFIVISHLRLLLRQLCRRPRSPQPSSPALEHFRVYLSKEAERKLLTWESVHKENFLLARARDKRESDSERLKRTSQKSSSVAASWGGWPRP

SEQ ID NO: 738907 - protein, 641 aa, Homo sapiens [sequence omitted]

SEQ ID NO: 738908 - protein, 298 aa, Homo sapiens
  misc_feature (11)..(11): Xaa can be any naturally occurring amino acid
MINGSCLSYLXCFPRADECLVKTLIESDEATAEGLLRPRDSDFPSILRRVFYRPYLQIFGQIPQEDMDVALMEHSNCSSEPGFWAHPPGAQAGTCVSQYANWLVVLLLVIFLLVANILLVNLLIAMFSYTFGKVQGNSDLYWKAQRYRLIREFHSRPALAPPFIVISHLRLLLRQLCRRPRSPQPSSPALEHFRVYLSKEAERKLLTWESVHKENFLLARARDKRESDSERLKRTSQKVDLALKQLGHIREYEQRLKVLEREVQQCSRVLGWVAEALSRSALLPPGGPPPPDLPGSKD

SEQ ID NO: 738909 - protein, 233 aa, Homo sapiens
TRGWVWDSVRVLRVSEGAAGIGKGRGLSPLTPPAPAGVYLSKEAERKLLTWESVHKENFLLARARDKRESDSERLKRTSQKVDLALKQLGHIREYEQRLKVLEREVQQCSRVLGWVAEALSRSALLPPGGPPPPDLPGSKGQCVASACASPASVPVFLRVFLSRHLSSVPGSLSWSPLSLLYSRLRLSSFLPVSQFFCLSPSLPITCSLFSLFPQTEPCWRTSRRSPHRGFCS

SEQ ID NO: 738910 - protein, 432 aa, Homo sapiens
AEGAPGPWAAGGCGGRGSMVVPEKEQSWIPKIFKKKTCTTFIVDSKIRGAWIVTGGLHTGIGRHVGVAVRDHQMASTGGTKVVAMGVAPWGVVRNRDTLINPKGSFPARYRWRGDPEDGVQFPLDYNYSAFFLVDDGTHGCLGGENRFRLRLESYISQQKTGVGGTGIDIPVLLLLIDGDEKMLTRIENATQAQLPCLLVAGSGGAADCLAETLEDTLAPGSGGARQGEARDRIRRFFPKGDLEVLQAQVERIMTRKELLTVYSSEDGSEEFETIVLKALVKGKSCTLQSSPSLSSTLDTFPGLGTSSTLSNPRPMPPLPLLIFFPFGALHGAIWAVFPDAFIMFQHLLSSVGSIHPFFHLSIHPHVQIDLSISLPTILPVIPHSEVGVLGTGCVTGSDRDNTEPPSETISMSVAFKAMQLEGPLRLSSEYN

SEQ ID NO: 738911 - protein, 143 aa, Homo sapiens
LTVYSSEDGSEEFETIVLKALVKGKSCTLQSSPSLSSTLDTFPGLGTSSTLSNPRPMPPLPLLIFFPFGALHGAIWAVFPDAFIMFQHLLSSVGSIHPFFHLSIHPHVQIDLSISLPTILPVIPHSFIHPSFHLSIHTSTDNS

SEQ ID NO: 738912 - protein, 140 aa, Homo sapiens
CWAYRLLGPGGEWPPPSLWTGPNRSWGWRRARDAELAIPQVERIMTRKELLTVYSSEDGSEEFETIVLKALVKGKSCTLQSSPSLSSTLDTFPGLGTSSTLSNPRPMPPLPLLIFFPFGALHGAIWAVFPDAFIMFQHLL

SEQ ID NO: 738913 - protein, 123 aa, Homo sapiens [sequence omitted]

SEQ ID NO: 738914 - protein, 84 aa, Homo sapiens
RGRERARRGVRGWRLSVCRLPGRQTLGGSPAGSDWAAGREGAPGHDGARKPSAAGTCTMDPKAGGGGEEDDCVDSGAETGGFSK

SEQ ID NO: 738915 - protein, 426 aa, Homo sapiens
MDPKAGGGGEEDDCVDSGAETGGSDYSHLSSTSSELSVEEAQDPFLVSIHIIADPGESQPLQEAIDNVLAWIHPDLPLFRVSERRASRRRRKPPKGAQPALAVVLFLQEEYGEEQILQLHRTLQQPPWRHHHTEQVHGRFLPYLPCSQDFFTLAPGTPLWAIRPVHYGKEIVRFTVYCRYDNYADSLRFYQLILRRSPSQKKADFCIFPIFSNLDVDIQFSLKRLPCDQCPVPTDSSVLEFRVRDIGELVPLLPNPCSPISEGRWQTEDHDGNKILLQDGPLSCLHLLATVNNSRYERGHKGCIRSFLNLAEYIMPPRRNVIPLLCRALLYQAIHLAAASSPRSTVLTRGPSGQACLLGTSRNLPDEPTAPPTLPGLSREASPCFVCPREAPPWPPQLNHSGFQTQVPQGTGHQSGGMATSSPSMT

SEQ ID NO: 738916 - protein, 90 aa, Homo sapiens
VSAHLEPFWCSSRLSASPAATSHLVVTSDTTPPPLKLSLACAPYLGHGISSYISRALRVVPVLHRELETLHPLHVAGCPDLDFMLAFPSK

SEQ ID NO: 738917 - protein, 156 aa, Homo sapiens
SWSKQMFQVFKPHAGEDYKYPRETETIWSHPYVVEGSHKSPLESLSLHGCLAAMAPSITSSEDSSPSQRDKKDLSLDLLLTRKKRSQGLHWSHWQGLNHMSIRIHTPEQGSPSLGQNWSWGNRKEKGVAQRQVPTTGTHSFFHCTSEGNKEKPHHF

SEQ ID NO: 738918 - protein, 103 aa, Homo sapiens
MAPSITSSEDSSPSQRDKKDLSLDLLLTRKKRSQGLHWSHWQGLNHMSIRIHTPEQGSPSLGQNWSWGNRKEKGVAQRQVPTTGTHSFFHCTSEGNKEKPHHF

SEQ ID NO: 738919 - protein, 139 aa, Homo sapiens
AAAAAAAFSSYVGSPYDHTPGMAGSLGYHPYAAPLGSYPYGDPAYRKNATRDATATLKAWLNEHRKNPYPTKGEKIMLAIITKMTLTQVSTWFANARRRLKKENKMTWTPRNRSEDEEEGGRTLTLEKNERGRAPEARG

SEQ ID NO: 738920 - protein, 361 aa, Homo sapiens
RLGEAGLNRQRLYQAPGSLALYSCPAYGASALAAPRSEELARSASGSAFSPYPGSAAFTAQAATGFGSPLQYSADAAAAAAGFPSYMGAPYDAHTTGMTGAISYHPYGSAAYPYQLNDPAYRKNATRDATATLKAWLNEHRKNPYPTKGEKIMLAIITKMTLTQVSTWFANARRRLKKENKMTWAPRNKSEDEDEDEGDATRSKDESPDKAQEGTETSAEDEGISLHVDSLTDHSCSAESDGEKLPCRAGDPLCESGSECKDKYDDLEDDEDDDEEGERGLAPPKPVTSSPLTGLEAPLLSPPPEAAPRGGRKTPQGSRTSPGAPPPASKPKLWSLAEIATSDLKQPSLGPGCGPPGLPAA

SEQ ID NO: 738921 - protein, 286 aa, Homo sapiens
RLGEAGLNRQRLYQAPGSLALYSCPAYGASALAAPRSEELARSASGSAFSPYPGSAAFTAQAATGFGSPLQYSADAAAAAAGFPSYMGAPYDAHTTGMTGAISYHPYGSAAYPYQLNDPAYRKNATRDATATLKAWLNEHRKNPYPTKGEKIMLAIITKMTLTQVSTWFANARRRLKKENKMTWAPRNKSEDEDEDEGDATRSKDECIRERVHVQAFAAEPESVSAWRTSAANVRKPHKCSRDCFIQTQQLSSMADKFLEHMCRWTLIPSHQSRNTGIICPWASFR

SEQ ID NO: 738922 - protein, 70 aa, Homo sapiens
TGSCWFQGAPYDAHTTGMTGAISYHPYGSAAYPYQLNDPAYRKNATRDATATLKAWLNEHRKNPYPTKGE

SEQ ID NO: 738923 - protein, 499 aa, Homo sapiens
MCELYSKRDTLGLRKKHIGPSCKVFFASDPIKIVRAQRQYMFDENGEQYLDCINNVAHVGHCHPGVVKAALKQMELLNTNSRFLHDNIVEYAKRLSATLPEKLSVCYFTNSGSEANDLALRLARQFRGHQDVITLDHAYHGHLSSLIEISPYKFQKGKDVKKEFVHVAPTPDTYRGKYREDHADSASAYADEVKKIIEDAHNSGRKIAAFIAESMQSCGGQIIPPAGYFQKVAEYVHGAGGVFIADEVQVGFGRVGKHFWSFQMYGEDFVPDIVTMGKPMGNGHPVACVVTTKEIAEAFSSSGMEYFNTYGGNPVSCAVGLAVLDIIENEDLQGNAKRVGNYLTELLKKQKAKHTLIGDIRGIGLFIGIDLVKDHLKRTPATAEAQHIIYKMKEKRVLLSADGPHRNVLKIKPPMCFTEEDAKFMVDQLDRILTVLEEAMGTKTESVTSENTPCKTKMLKEAHIELLRDSTTDSKENPSRKRNGMCTDTHSLLSKRLKT

SEQ ID NO: 738924 - protein, 499 aa, Homo sapiens; identical to SEQ ID NO: 738923

SEQ ID NO: 738925 - protein, 285 aa, Homo sapiens
MQSCGGQIIPPAGYFQKVAEYVHGAGGVFIADEVQVGFGRVGKHFWSFQMYGEDFVPDIVTMGKPMGNGHPVACVVTTKEIAEAFSSSGMEYFNTYGGNPVSCAVGLAVLDIIENEDLQGNAKRVGNYLTELLKKQKAKHTLIGDIRGIGLFIGIDLVKDHLKRTPATAEAQHIIYKMKEKRVLLSADGPHRNVLKIKPPMCFTEEDAKFMVDQLDRILTVLEEAMGTKTESVTSENTPCKTKMLKEAHIELLRDSTTDSKENPSRKRNGMCTDTHSLLSKRLKT

SEQ ID NO: 738926 - protein, 493 aa, Homo sapiens
MCELYSKRDTLGLRKKHIGPSCKVFFASDPIKIVRAQRQYMFDENGEQYLDCINNVAHGVVKAALKQMELLNTNSRFLHDNIVEYAKRLSATLPEKLSVCYFTNSGSEANDLALRLARQFRGHQDVITLDHAYHGHLSSLIEISPYKFQKGKDVKKEFVHVAPTPDTYRGKYREDHADSASAYADEVKKIIEDAHNSGRKIAAFIAESMQSCGGQIIPPAGYFQKVAEYVHGAGGVFIADEVQVGFGRVGKHFWSFQMYGEDFVPDIVTMGKPMGNGHPVACVVTTKEIAEAFSSSGMEYFNTYGGNPVSCAVGLAVLDIIENEDLQGNAKRVGNYLTELLKKQKAKHTLIGDIRGIGLFIGIDLVKDHLKRTPATAEAQHIIYKMKEKRVLLSADGPHRNVLKIKPPMCFTEEDAKFMVDQLDRILTVLEEAMGTKTESVTSENTPCKTKMLKEAHIELLRDSTTDSKENPSRKRNGMCTDTHSLLSKRLKT

SEQ ID NO: 738927 - protein, 481 aa, Homo sapiens
MCELYSKRDTLGLRKKHIGPSCKVFFASDPIKIVRAQRQYMFDENGEQYLDCINNVAHVGHCHPGVVKAALKQMELLNTNSRFLHDNIVEYAKRLSATLPEKLSVCYFTNSGSEANDLALRLARQFRGHQDVITLDHAYHGHLSSLIEISPYKFQKGKDVKKEFVHVAPTPDTYRGKYREDHADSASAYADEVKKIIEDAHNSGRKIAAFIAESMQSCGGQIIPPAGYFQKVAEYVHGAGGVFIADEVQVGFGRVGKHFWSFQMYGEDFVPDIVTMGAEAFSSSGMEYFNTYGGNPVSCAVGLAVLDIIENEDLQGNAKRVGNYLTELLKKQKAKHTLIGDIRGIGLFIGIDLVKDHLKRTPATAEAQHIIYKMKEKRVLLSADGPHRNVLKIKPPMCFTEEDAKFMVDQLDRILTVLEEAMGTKTESVTSENTPCKTKMLKEAHIELLRDSTTDSKENPSRKRNGMCTDTHSLLSKRLKT

SEQ ID NO: 738928 - protein, 426 aa, Homo sapiens
MELLNTNSRFLHDNIVEYAKRLSATLPEKLSVCYFTNSGSEANDLALRLARQFRGHQDVITLDHAYHGHLSSLIEISPYKFQKGKDVKKEFVHVAPTPDTYRGKYREDHADSASAYADEVKKIIEDAHNSGRKIAAFIAESMQSCGGQIIPPAGYFQKVAEYVHGAGGVFIADEVQVGFGRVGKHFWSFQMYGEDFVPDIVTMGKPMGNGHPVACVVTTKEIAEAFSSSGMEYFNTYGGNPVSCAVGLAVLDIIENEDLQGNAKRVGNYLTELLKKQKAKHTLIGDIRGIGLFIGIDLVKDHLKRTPATAEAQHIIYKMKEKRVLLSADGPHRNVLKIKPPMCFTEEDAKFMVDQLDRILTVLEEAMGTKTESVTSENTPCKTKMLKEAHIELLRDSTTDSKENPSRKRNGMCTDTHSLLSKRLKT

SEQ ID NO: 738929 - protein, 96 aa, Homo sapiens
LPAGPQTRCPEHTVVAAGGLLGAGEEGRLFLGMEAVAQDPSPVETWVGGRRSGQQGSAEAHCSPARPAPRDDCEASIQSPRCSILKFKKKKKIVSW

SEQ ID NO: 738930 - protein, 73 aa, Homo sapiens
ASQLNNQSSNQLINQLANHQTSIHPFIYPQQLPKYLWSIHHGPRPVRATTKVENHSPWFKEQKTQPVKQDEHK

SEQ ID NO: 738931 - protein, 73 aa, Homo sapiens; identical to SEQ ID NO: 738930

SEQ ID NO: 738932 - protein, 145 aa, Homo sapiens [sequence omitted]

SEQ ID NO: 738933 - protein, 213 aa, Homo sapiens
YPQEGYPQGPYPQGGYPQGHIPRAPSPPTPMDSHRSSQDKTLTHPSWCREVLAAGFSRAARADLSWDPMAFFTGLWGPFTCVSRVLSHHCFSTTGSLSAIQKMTRVRVVDNSALGNSPYHRAPRCIHVYKKNGVGKVGDQILLAIKGQKKKALIVGHCMPGPRMTPRFDSNNVVLIEDNGNPVGTRIKTPIPTSLRKREGEYSKVLAIAQNFV

SEQ ID NO: 738934 - protein, 145 aa, Homo sapiens [sequence omitted]

SEQ ID NO: 738935 - protein, 89 aa, Homo sapiens
WAVPQGTVVHHWYPRHLLNRTQTPSGAETVMAQHSAYTGEGPQSPVKKAMGSQDRSALAARENPAAGPTSLRKREGEYSKVLAIAQNFV

SEQ ID NO: 738936 - protein, 198 aa, Homo sapiens
MQLACQEYTVKNKVDLLHGGYCVRRKTVHCSSLEILYVLLKNKDFIEDLSWDPMAFFTGLWGPFTCVSRVLSHHCFSTTGSLSAIQKMTRVRVVDNSALGNSPYHRAPRCIHVYKKNGVGKVGDQILLAIKGQKKKALIVGHCMPGPRMTPRFDSNNVVLIEDNGNPVGTRIKTPIPTSLRKREGEYSKVLAIAQNFV

SEQ ID NO: 738937 - protein, 145 aa, Homo sapiens [sequence omitted]

SEQ ID NO: 738938 - protein, 164 aa, Homo sapiens
SSFLCSRGGPLPGDLSWDPMAFFTGLWGPFTCVSRVLSHHCFSTTGSLSAIQKMTRVRVVDNSALGNSPYHRAPRCIHVYKKNGVGKVGDQILLAIKGQKKKALIVGHCMPGPRMTPRFDSNNVVLIEDNGNPVGTRIKTPIPTSLRKREGEYSKVLAIAQNFV

SEQ ID NO: 738939 - protein, 213 aa, Homo sapiens; identical to SEQ ID NO: 738933

SEQ ID NO: 738940 - protein, 204 aa, Homo sapiens
GSQNCSIHESCNQRPGLNSHKVLSNGQHLGILAFSRGAWLVGPAAGFSRAARADLSWDPMAFFTGLWGPFTCVSRVLSHHCFSTTGSLSAIQKMTRVRVVDNSALGNSPYHRAPRCIHVYKKNGVGKVGDQILLAIKGQKKKALIVGHCMPGPRMTPRFDSNNVVLIEDNGNPVGTRIKTPIPTSLRKREGEYSKVLAIAQNFV

SEQ ID NO: 738941 - protein, 145 aa, Homo sapiens [sequence omitted]

SEQ ID NO: 738942 - protein, 70 aa, Homo sapiens
VIQVRGDRFASWSSSLHGQETVWRGSLPSELEEGRAGTKEWNRQGIHWNHPEGECAPLAGQVWRVVTSPL

SEQ ID NO: 738943 - protein, 342 aa, Homo sapiens
MVQASGHRRSTRGSKMVSWSVIAKIQEILQRKMVREFLAEFMSTYVMMVFGLGSVAHMVLNKKYGSYLGVNLGFGFGVTMGVHVAGRISGAHMNAAVTFANCALGRVPWRKFPVYVLGQFLGSFLAAATIYSLFYTAILHFSGGQLMVTGPVATAGIFATYLPDHMTLWRGFLNEAWLTGMLQLCLFAITDQENNPALPGTEALVIGILVVIIGVSLGMNTGYAINPSRDLPPRIFTFIAGWGKQVFSNGENWWWVPVVAPLLGAYLGGIIYLVFIGSTIPREPLKLEDSVAYEDHGITVLPKMGSHEPTISPLTPVSVSPANRSSVHPAPPLHESMALEHF

SEQ ID NO: 738944 - protein, 341 aa, Homo sapiens
MGSGHCLRSTRGSKMVSWSVIAKIQEILQRKMVREFLAEFMSTYVMMVFGLGSVAHMVLNKKYGSYLGVNLGFGFGVTMGVHVAGRISGAHMNAAVTFANCALGRVPWRKFPVYVLGQFLGSFLAAATIYSLFYTAILHFSGGQLMVTGPVATAGIFATYLPDHMTLWRGFLNEAWLTGMLQLCLFAITDQENNPALPGTEALVIGILVVIIGVSLGMNTGYAINPSRDLPPRIFTFIAGWGKQVFSNGENWWWVPVVAPLLGAYLGGIIYLVFIGSTIPREPLKLEDSVAYEDHGITVLPKMGSHEPTISPLTPVSVSPANRSSVHPAPPLHESMALEHF

SEQ ID NO: 738945 - protein, 305 aa, Homo sapiens
SLLSVHGLGPLSQVHPWLQNGLLVRDSKDPGNTAEEDGARVPGRVHEHICHDGAHMNAAVTFANCALGRVPWRKFPVYVLGQFLGSFLAAATIYSLFYTAILHFSGGQLMVTGPVATAGIFATYLPDHMTLWRGFLNEAWLTGMLQLCLFAITDQENNPALPGTEALVIGILVVIIGVSLGMNTGYAINPSRDLPPRIFTFIAGWGKQVFSNGENWWWVPVVAPLLGAYLGGIIYLVFIGSTIPREPLKLEDSVAYEDHGITVLPKMGSHEPTISPLTPVSVSPANRSSVHPAPPLHESMALEHF

SEQ ID NO: 738946 - protein, 256 aa, Homo sapiens
MGSGHCLRSTRGSKMVSWSVIAKIQEILQRKMVREFLAEFMSTYVMMVFGLGSVAHMVLNKKYGSYLGVNLGFGFGVTMGVHVAGRISGAHMNAAVTFANCALGRVPWRKFPVYVLGQFLGSFLAAATIYSLFYTAILHFSGGQLMVTGPVATAGIFATYLPDHMTLWRGFLNEAWLTGMLQLCLFAITDQENNPALPGTEALVIGILVVIIGVSLGMNTGYAINPSRDLPPRIFTFIAGWGKQVFRYCPCPGPFL

SEQ ID NO: 738947 - protein, 207 aa, Homo sapiens
VALGAGLLAVGESWMGWATFTDQGEEGLEPSGPWKTSHTRAHMNAAVTFANCALGRVPWRKFPVYVLGQFLGSFLAAATIYSLFYTAILHFSGGQLMVTGPVATAGIFATYLPDHMTLWRGFLNEAWLTGMLQLCLFAITDQENNPALPGTEALVIGILVVIIGVSLGMNTGYAINPSRDLPPRIFTFIAGWGKQVFRYCPCPGPFL

SEQ ID NO: 738948 - protein, 272 aa, Homo sapiens [sequence omitted]

SEQ ID NO: 738949 - protein, 507 aa, Homo sapiens
MPWLLSAPKLVPAVANVRGLSGCMLCSQRRYSLQPVPERRIPNRYLGQPSPFTHPHLLRPGEVTPGLSQVEYALRRHKLMSLIQKEAQGQSGTDQTVVVLSNPTYYMSNDIPYTFHQDNNFLYLCGFQEPDSILVLQSLPGKQLPSHKAILFVPRRDPSRELWDGPRSGTDGAIALTGVDEAYTLEEFQHLLPKMKAETNMVWYDWMRPSHAQLHSDYMQPLTEAKAKSKNKVRGVQQLIQRLRLIKSPAEIERMQIAGKLTSQAFIETMFTSKAPVEEAFLYAKFEFECRARGADILAYPPVVAGGNRSNTLHYVKNNQLIKDGEMVLLDGGCESSCYVSDITRTWPVNGRFTAPQAELYEAVLEIQRDCLALCFPGTSLENIYSMMLTLIGQKLKDLGIMKNIKENNAFKAARKYCPHHVGHYLGMDVHDTPDMPRSLPLQPGMVITIEPGIYIPEDDKDAPEKFRGLGVRIEDDVVVTQDSPLILSADCPKEMNDIEQICSQAS

SEQ ID NO: 738950 - protein, 507 aa, Homo sapiens; identical to SEQ ID NO: 738949

SEQ ID NO: 738951 - protein, 278 aa, Homo sapiens
MPWLLSAPKLVPAVANVRGLSGCMLCSQRRYSLQPVPERRIPNRYLGQPSPFTHPHLLRPGEVTPGLSQVEYALRRHKLMSLIQKEAQGQSGTDQTVVVLSNPTYYMSNDIPYTFHQDNNFLYLCGFQEPDSILVLQSLPGKQLPSHKAILFVPRRDPSRELWDGPRSGTDGAIALTGVDEAYTLEEFQHLLPKMKAETNMVWYDWMRPSHAQLHSDYMQPLTEAKAKSKNKVRGVQQLIQRLRLIKSPAEIERMQIAGKLTSQRQGFSVLSRLVSNS

SEQ ID NO: 738952 - protein, 151 aa, Homo sapiens
LARFPGDAALQAVAFPVVTLFLFPTRELGRNALAALSPQAGSRCSKRPRPLRLDSSPTVSSHGVPWRDPSWSQAIPGSADPSPGGASAPQPSVLRGFLLYRLLLERGGPSVFSTVEVFCEAEMTAERKVCHPPEGLSSKLLGLRSCGNYHT

SEQ ID NO: 738953 - protein, 211 aa, Homo sapiens
MPWLLSAPKLVPAVANVRGLSGCMLCSQRRYSLQPVPERRIPNRYLGQPSPFTHPHLLRPGEVTPGLSQVEYALRRHKLMSLIQKEAQGQSGTDQTVVVLSNPTYYMSNDIPYTFHQDNNFLYLCGFQEPDSILVLQSLPGKQLPSHKAILFVPRRDPSRELWDGPRSGTDGAIALTGVDEAYTLEEFQHLLPKMKGNKWEQKSHYKPDWD

SEQ ID NO: 738954 - protein, 425 aa, Homo sapiens
MLCSQRRYSLQPVPERRIPNRYLGQPSPFTHPHLLRPGEVTPGLSQVEYALRRHKLMSLIQKEAQGQSGTDQTVVVLSNPTYYMSNDIPYTFHQDNNFLYLCGFQEPDSILVLQSLPGKQLPSHKAILFVPRRDPSRELWDGPRSGTDGAIALTGVDEAYTLEEFQHLLPKMKAETNMVWYDWMRPSHAQLHSDYMQPLTEAKAKSKNKVRGVQQLIQRLRLIKSPAEIERMQIAGKLTSQDGEMVLLDGGCESSCYVSDITRTWPVNGRFTAPQAELYEAVLEIQRDCLALCFPGTSLENIYSMMLTLIGQKLKDLGIMKNIKENNAFKAARKYCPHHVGHYLGMDVHDTPDMPRSLPLQPGMVITIEPGIYIPEDDKDAPEKFRGLGVRIEDDVVVTQDSPLILSADCPKEMNDIEQICSQAS

SEQ ID NO: 738955 - protein, 425 aa, Homo sapiens; identical to SEQ ID NO: 738954

SEQ ID NO: 738956 - protein, 425 aa, Homo sapiens; identical to SEQ ID NO: 738954

SEQ ID NO: 738957 - protein, 307 aa, Homo sapiens [sequence omitted]

SEQ ID NO: 738958 - protein, 102 aa, Homo sapiens
LARFPGDAALQAVAFPVVTLFLFPTRELGRNALAALSPQAGSRCSKRPRPLRRHYVCMSTCARACMWRRCRRREREITNATAAYSTSGLVLLEGDEKIRKVR

SEQ ID NO: 738959 - protein, 105 aa, Homo sapiens
LLKRAWAGAALQKPFVIPCCCFSQFEFECRARGADILAYPPVVAGGNRSNTLHYVKNNQLIKVREMPSVLLPLGPDSLVENLLTSCPLTFSFHKLADILKVFYCL

SEQ ID NO: 738960 - protein, 223 aa, Homo sapiens
SPRRAPPSHLLPRAGRAPLPRACVPRAQGRASSPRPAGVPGDAPARQWLDEEEPQRARSHTVTTTASSFAENFFTSSSSFAYDREFLRTLPGFLIVAEIVLGLLVWTLIAGTEYFRVPAFGWVMFVAVFYWVLTVFFLIIYITMTYTRIPQVPWTTVGLCFNGSAFVLYLSAAVVDASSVSPERDSHNFNSWAASSFFAFLVTICYAGNTYFSFIAWRSRTIQ

SEQ ID NO: 738961 - protein, 143 aa, Homo sapiens
  misc_feature (5)..(5): Xaa can be any naturally occurring amino acid
GGRGXDELCEEGVFFVFDSVLGLLVWTLIAGTEYFRVPAFGWVMFVAVFYWVLTVFFLIIYITMTYTRIPQVPWTTVGLCFNGSAFVLYLSAAVVDASSVSPERDSHNFNSWAASSFFAFLVTICYAGNTYFSFIAWRSRTIQ

SEQ ID NO: 738962 - protein, 223 aa, Homo sapiens; identical to SEQ ID NO: 738960

SEQ ID NO: 738963 - protein, 120 aa, Homo sapiens
LRWSFALVAQDGVQWRDLGSPQPPPPGFKRFSCLSLPSSRDYRHAPPCLANFVLLVEMGFLHIGQAGLELLTSGDLPASASQSAGIIGMSHRTRLVLNFISEMRGLDFTNRKVHSSCKIG

SEQ ID NO: 738964 - protein, 185 aa, Homo sapiens
LLGSQKWGMQTDGQPRTWPKFPPKLQWSRRDPGARSFQLRAGGWSRPRGTSRKVTADPDPGGKRPARGGGATLGTRPLSTPAQLCAEPGTRGSPVPGSQPAAGTRNLAGAYTLRPRPGNQEEAARPGAEQPAPGNSFILRPRQQQGGSFVLLKPAPHPRLLPTPLRFPATSQTDRQGTQRKKEEE

SEQ ID NO: 738965 - protein, 105 aa, Homo sapiens
SAAVWTFCVEGSVGHGENLVFFPEPVSLLQHSNCHLFFPNPLVLSLFKLFFLSLSPQLLLCFFLPELPTLTSFAPPLDSSLLFLLAFFFCDLQLCPLLQPPFSFP

SEQ ID NO: 738966 - protein, 400 aa, Homo sapiens
  misc_feature (8)..(8): Xaa can be any naturally occurring amino acid
  misc_feature (13)..(13): Xaa can be any naturally occurring amino acid
HRIPLKAXWVLKXLGGAARAGRPGCAPAPRRAAWGTVPGPPGPAMARPQRTPARSPDSIVEVKSKFDAEFRRFALPRASVSGFQEFSRLLRAVHQIPGLDVLLGYTDAHGDLLPLTNDDSLHRALASGPPPLRLLVQKRGEEGYSGQPLWEADSSGLAFASNSLQRRKKGLLLRPVAPLRTRPPLLISLPQDFRQVSSVIDVDLLPETHRRVRLHKHGSDRPLGFYIRDGMSVRVAPQGLERVPGIFISRLVRGGLAESTGLLAVSDEILEVNGIEVAGKTLDQVTDMMVANSHNLIVTVKPANQRNNVVRGASGRLTGPPSAGPGPAEPDSDDDSSDLVIENRQPPSSNGLSQGPPCWDLHPGCRHPGTRSSLPSLDDQEQASSGWGSRIRGDGSGFSL

SEQ ID NO: 738967 - protein, 323 aa, Homo sapiens
RQGCTDLQRPATGLTGESGEEGLVHAQGTQASPSAVPALGLTSEVVGNSYSAPCKQPKSGSRSLISTSPLFCSKADSSGLAFASNSLQRRKKGLLLRPVAPLRTRPPLLISLPQDFRQVSSVIDVDLLPETHRRVRLHKHGSDRPLGFYIRDGMSVRVAPQGLERVPGIFISRLVRGGLAESTGLLAVSDEILEVNGIEVAGKTLDQVTDMMVANSHNLIVTVKPANQRNNVVRGASGRLTGPPSAGPGPAEPDSDDDSSDLVIENRQPPSSNGLSQGPPCWDLHPGCRHPGTRSSLPSLDDQEQASSGWGSRIRGDGSGFSL

SEQ ID NO: 738968 - protein, 157 aa, Homo sapiens
  misc_feature (8)..(8): Xaa can be any naturally occurring amino acid
  misc_feature (13)..(13): Xaa can be any naturally occurring amino acid
HRIPLKAXWVLKXLGGAARAGRPGCAPAPRRAAWGTVPGPPGPAMARPQRTPARSPDSIVEVKSKFDAEFRRFALPRASVSGFQEFSRLLRAVHQIPGLDVLLGYTDAHGDLLPLTNDDSLHRALASGPPPLRLLVQKREADSSGLAGASNANARTG

SEQ ID NO: 738969 - protein, 389 aa, Homo sapiens
  misc_feature (8)..(8): Xaa can be any naturally occurring amino acid
  misc_feature (13)..(13): Xaa can be any naturally occurring amino acid
HRIPLKAXWVLKXLGGAARAGRPGCAPAPRRAAWGTVPGPPGPAMARPQRTPARSPDSIVEVKSKFDAEFRRFALPRASVSGFQEFSRLLRAVHQIPGLDVLLGYTDAHGDLLPLTNDDSLHRALASGPPPLRLLVQKREADSSGLAFASNSLQRRKKGLLLRPVAPLRTRPPLLISLPQDFRQVSSVIDVDLLPETHRRVRLHKHGSDRPLGFYIRDGMSVRVAPQGLERVPGIFISRLVRGGLAESTGLLAVSDEILEVNGIEVAGKTLDQVTDMMVANSHNLIVTVKPANQRNNVVRGASGRLTGPPSAGPGPAEPDSDDDSSDLVIENRQPPSSNGLSQGPPCWDLHPGCRHPGTRSSLPSLDDQEQASSGWGSRIRGDGSGFSL

SEQ ID NO: 738970 - protein, 96 aa, Homo sapiens
FDAEFRRFALPRASVSGFQEFSRLLRAVHQIPGLDVLLGYTDAHGDLLPLTNDDSLHRALASGPPPLRLLVQKRGEEGYSGQPLWGKVSVGQVYKG

SEQ ID NO: 738971 - protein, 115 aa, Homo sapiens
LCELGLGKDSLDTTKAIKAKKSSPLSLSLSPRPTVSLFLSFPRSPSDGTAEAGLYCCHLGSLHSSLGEKAGLHLKKKRKKKKENPMESPQKAIKISEFSQVAGYKINTQKSTSCL

SEQ ID NO: 738972 - protein, 118 aa, Homo sapiens
MEKEEITIPHLFLMCMNASASNSEGFFSNQEKVDICHQVSTLLSFHFISSGLTERQHSGRVLQFYPLCRSAFSSRTLALACWHPQSVWMLPRGFLSPHLHSCSLFLDGWEVQLLETTS

SEQ ID NO: 738973 - protein, 124 aa, Homo sapiens
AIAHLYLFTPRTFQLPLIMPPPSYLPPLCWCTSPNSFLLHSSLYLTIFMSPTSCFHLFWARHRLSNWERPLFIKLGFFLISLPNVVSQYSSYSSLQGVAGPTWSFETGPQAGVFNLDSLACCDP

SEQ ID NO: 738974 - protein, 165 aa, Homo sapiens
MGPISLLIIGIVAVHCMGILVKCAHHFCRRLNKSFVDYGDTVMYGLESSPCSWLRNHAHWGRRVVDFFLIVTQLGFCCVYFVFLADNFKQVIEAANGTTNNCHNNETVILTPTMDSRLYMLSFLPFLVLLVFIRNLRALSIFSLLANITMLVSLVMIYQFIVQIL

SEQ ID NO: 738975 - protein, 384 aa, Homo sapiens
MGPISLLIIGIVAVHCMGILVKCAHHFCRRLNKSFVDYGDTVMYGLESSPCSWLRNHAHWGRRVVDFFLIVTQLGFCCVYFVFLADNFKQVIEAANGTTNNCHNNETVILTPTMDSRLYMLSFLPFLVLLVFIRNLRALSIFSLLANITMLVSLVMIYQFIVQRIPDPSHLPLVAPWKTYPLFFGTAIFSFEGIGMVLPLENKMKDPRKFPLILYLGMVIVTILYISLGCLGYLQFGANIQGSITLNLPNCWLYQSVKLLYSIGIFFTYALQFYVPAEIIIPFFVSRAPEHCELVVDLFVRTVLVCLTCILAILIPRLDLVISLVGSVSSSALALIIPPLLEAYKMGLCACRPMFQPQPTPGERISNALLPSCWDDTSSIATDE

SEQ ID NO: 738976 - protein, 155 aa, Homo sapiens [sequence omitted]

SEQ ID NO: 738977 - protein, 308 aa, Homo sapiens
MGPISLLIIGIVAVHCMGILVKCAHHFCRRLNKSFVDYGDTVMYGLESSPCSWLRNHAHWGRRVVDFFLIVTQLGFCCVYFVFLADNFKQVIEAANGTTNNCHNNETVILTPTMDSRLYMLSFLPFLVLLVFIRNLRALSIFSLLANITMLVSLVMIYQFIVQRIPDPSHLPLVAPWKTYPLFFGTAIFSFEGIGMVLPLENKMKDPRKFPLILYLGMVIVTILYISLGCLGYLQFGANIQGSITLNLPNCWLYQSVKLLYSIGIFFTYALQFYVPAEIIIPFFVSRAPEHCELVVDLFVRTVLVCLT

SEQ ID NO: 738978 - protein, 115 aa, Homo sapiens
WGLAFTETLLLRSWPHTHTQHPNSPPAPLPFCLELAPLQEAPRSSPLRLSLWFLFLHPSAFYKKPTVMTLKQVQVPNLAPHFLAQEQESLPHTTGMEIKGSTHGPRPLPELELRS

SEQ ID NO: 738979 - protein, 757 aa, Homo sapiens
MVIGTRFEKGLGSRIRAMMGQLSAACSHSHFVRLFQKQLLQMCQSPGGAGGTVLGEAPDVLSMLGADKLGRLWRLQERLMAPQSSGGPCPPPTFPGCQGFFRDFILSASSFQFNQHLMDSLSLKIQELNGLALPQHEPNDEDGESDVDWQGERKQFAVVLLSLRLLAKFLGFVAFLPYRGPEPPPTGELQDSILALRSQVPPVLDVRTLLQRGLQARRAVLTVPWLVEFLSFADHVVPLLEYYRDIFTLLLRLHRSLVLSQESEGKMCFLNKLLLLAVLGWLFQIPTVPEDLFFLEEGPSYAFEVDTVAPEHGLDNAPVVDQQLLYTCCPYIGELRKLLASWVSGSSGRSGGFMRKITPTTTTSLGAQPSQTSQGLQAQLAQAFFHNQPPSLRRTVEFVAERIGSNCVKHIKATLVADLVRQAESLLQEQLVTQGEEGGDPAQLLEILCSQLCPHGAQALALGREFCQRKSPGAVWALLPEETPAAVLSSAENIAVGLATEKACAWLSANITALIRREVKAAVSRTLRAQGPEPAARGERRGCSRACEHHAPLPSHLISEIKDVLSLAVGPRDPDEGVSPEHLEQLLGQLGQTLRCRQFLCPPAEQHLAKCSVELASLLVADQIPILGPPAQYRLERGQARRLLHMLLSLWKEDFQGPVPLQLLLSPRNVGLLADTRPREWDLLLFLLRELVEKGLMGRMEIEACLGSLHQAQWPGDFAEELATLSNLFLAEPHLPEPQLRACELVQPNRGTVLAQS

SEQ ID NO: 738980 - protein, 686 aa, Homo sapiens
MMGQLSAACSHSHFVRLFQKQLLQMCQSPGGAGGTVLGEAPDVLSMLGADKLGRLWRLQERLMAPQSSGGPCPPPTFPGCQGFFRDFILSASSFQFNQHLMDSLSLKIQELNGLALPQHEPNDEDGESDVDWQGERKQFAVVLLSLRLLAKFLGFVAFLPYRGPEPPPTGELQDSILALRSQVPPVLDVRTLLQRGLQARRAVLTVPWLVEFLSFADHVVPLLEYYRDIFTLLLRLHRSLVLSQESEGKMCFLNKLLLLAVLGWLFQIPTVPEDLFFLEEGPSYAFEVDTVAPEHGLDNAPVVDQQLLYTCCPYIGELRKLLASWVSGSSGRSGGFMRKITPTTTTSLGAQPSQTSQGLQAQLAQAFFHNQPPSLRRTVEFVAERIGSNCVKHIKATLVADLVRQAESLLQEQLVTQGEEGGDPAQLLEILCSQLCPHGAQALALGREFCQRKSPGAVWALLPEETPAAVLSSAENIAVGLATEKACAWLSANITALIRREVKAAVSRTLRAQGPEPAARGERRGCSRACEHHAPLPSHLISEIKDVLSLAVGPRDPDEGVSPEHLEQLLGQLGQTLRCRQFLCPPAEQHLAKCSVELASLLVADQIPILGPPAQYRLERGQARRLLHMLLSLWKEDFQGPVPLQLLLSPRNVGLLADTRPREVSQTEQEALCSHTLNIHHPCPKL

SEQ ID NO: 738981 - protein, 750 aa, Homo sapiens
MPPSTQAVSFQPETDNRANFSSDRAFHTFKKQRDVFYEVLREWEDHHEEPGWDFEKGLGSRIRAMMGQLSAACSHSHFVRLFQKQLLQMCQSPGGAGGTVLGEAPDVLSMLGADKLGRLWRLQERLMAPQSSGGPCPPPTFPGCQGFFRDFILSASSFQFNQHLMDSLSLKIQELNGLALPQHEPNDEDGESDVDWQGERKQFAVVLLSLRLLAKFLGFVAFLPYRGPEPPPTGELQDSILALRSQVPPVLDVRTLLQRGLQARRAVLTVPWLVEFLSFADHVVPLLEYYRDIFTLLLRLHRSLVLSQESEGKMCFLNKLLLLAVLGWLFQIPTVPEDLFFLEEGPSYAFEVDTVAPEHGLDNAPVVDQQLLYTCCPYIGELRKLLASWVSGSSGRSGGFMRKITPTTTTSLGAQPSQTSQGLQAQLAQAFFHNQPPSLRRTVEFVAERIGSNCVKHIKATLVADLVRQAESLLQEQLVTQGEEGGDPAQLLEILCSQLCPHGAQALALGREFCQRKSPGAVWALLPEETPAAVLSSAENIAVGLATEKACAWLSANITALIRREVKAAVSRTLRAQGPEPAARGERRGCSRACEHHAPLPSHLISEIKDVLSLAVGPRDPDEGVSPEHLEQLLGQLGQTLRCRQFLCPPAEQHLAKCSVELASLLVADQIPILGPPAQYRLERGQARRLLHMLLSLWKEDFQGPVPLQLLLSPRNVGLLADTRPREVSQTEQEALCSHTLNIHHPCPKL

SEQ ID NO: 738982 - protein, 737 aa, Homo sapiens
PRVIGTRFEKGLGSRIRAMMGQLSAACSHSHFVRLFQKQLLQMCQSPGGAGGTVLGEAPDVLSMLGADKLGRLWRLQERLMAPQSSGGPCPPPTFPGCQGFFRDFILSASSFQFNQHLMDSLSLKIQELNGLALPQHEPNDEDGESDVDWQGERKQFAVVLLSLRLLAKFLGFVAFLPYRGPEPPPTGELQDSILALRSQVPPVLDVRTLLQRGLQARRAVLTVPWLVEFLSFADHVVPLLEYYRDIFTLLLRLHRSLVLSQESEGKMCFLNKLLLLAVLGWLFQIPTVPEDLFFLEEGPSYAFEVDTVAPEHGLDNAPVVDQQLLYTCCPYIGELRKLLASWVSGSSGRSGGFMRKITPTTTTSLGAQPSQTSQGLQAQLAQAFFHNQPPSLRRTVEFVAERIGSNCVKHIKATLVADLVRQAESLLQEQLVTQGEEGGDPAQLLEILCSQLCPHGAQALALGREFCQRKSPGAVWALLPEETPAAVLSSAENIAVGLATEKACAWLSANITALIRREVKAAVSRTLRAQGPEPAARGERRGCSRACEHHAPLPSHLISEIKDVLSLAVGPRDPDEGVSPEHLEQLLGQLGQTLRCRQFLCPPAEQHLAKCSVELASLLVADQIPILGPPAQYRLERGQARRLLHMLLSLWKEDFQGPVPLQLLLSPRNVGLLADTRPREWDLLLFLLRELVEKGLMGRMEIEACLGSLHQAQWPGVRSLLSFRWRENRCYISHLS

SEQ ID NO: 738983 - protein, 761 aa, Homo sapiens
MPNFCAAPNCTRKSTQSDLAFFRFPRDPARCQKWVENCRRADLEDKTPDQLNKHYRLCAKHFETSMICRTSPYRTVLRDNAIPTIFDLTSHLNNPHSRHRKRIKELSEDEIRTLKQKKIDETSEQEQKHKETNNSNAQNPSEEEGEGQDEDILPLTLEEKENKEYLKSLFEILILMGKQNIPLDGHEADEIPEGLFTPDNFQALLECRINSGEEVLRKRFETTAVNTLFCSKTQQRQMLEICESCIREETLREVRDSHFFSIITDDVVDIAGEEHLPVLVRFVDESHNLREEFIGFLPYEADAEILAVKFHTMITEKWGLNMEYCRGQAYIVSSGFSSKMKVVASRLLEKYPQAIYTLCSSCALNMWLAKSVPVMGVSVALGTIEEVCSFFHRSPQLLLELDNVISVLFQNSKERGKELKEICHSQWTGRHDAFEILVELLQALVLCLDGINSDTNIRWNNYIAGRAFVLCSAVSDFDFIVTIVVLKNVLSFTRAFGKNLQGQTSDVFFAAGSLTAVLHSLNEVMENIEVYHEFWFEEATNLATKLDIQMKLPGKFRRAHQGNLESQLTSESYYKETLSVPTVEHIIQELKDIFSEQHLKALKCLSLVPSVMGQLKFNTSEEHHADMYRSDLPNPDTLSAELHCWRIKWKHRGKDIELPSTIYEALHLPDIKFFPNVYALLKVLCILPVMKVENERYENGRKRLKAYLRNTLTDQRSSNLALLNINFDIKHDLDLMVDTYIKLYTSKSELPTDNSETVENT

SEQ ID NO: 738984 - protein, 586 aa, Homo sapiens
MGKQNIPLDGHEADEIPEGLFTPDNFQALLECRINSGEEVLRKRFETTAVNTLFCSKTQQRQMLEICESCIREETLREVRDSHFFSIITDDVVDIAGEEHLPVLVRFVDESHNLREEFIGFLPYEADAEILAVKFHTMITEKWGLNMEYCRGQAYIVSSGFSSKMKVVASRLLEKYPQAIYTLCSSCALNMWLAKSVPVMGVSVALGTIEEVCSFFHRSPQLLLELDNVISVLFQNSKERGKELKEICHSQWTGRHDAFEILVELLQALVLCLDGINSDTNIRWNNYIAGRAFVLCSAVSDFDFIVTIVVLKNVLSFTRAFGKNLQGQTSDVFFAAGSLTAVLHSLNEVMENIEVYHEFWFEEATNLATKLDIQMKLPGKFRRAHQGNLESQLTSESYYKETLSVPTVEHIIQELKDIFSEQHLKALKCLSLVPSVMGQLKFNTSEEHHADMYRSDLPNPDTLSAELHCWRIKWKHRGKDIELPSTIYEALHLPDIKFFPNVYALLKVLCILPVMKVENERYENGRKRLKAYLRNTLTDQRSSNLALLNINFDIKHDLDLMVDTYIKLYTSKSELPTDNSETVENT

SEQ ID NO: 738985 - protein, 761 aa, Homo sapiens; identical to SEQ ID NO: 738983

SEQ ID NO: 738986 - protein, 704 aa, Homo sapiens
MPNFCAAPNCTRKSTQSDLAFFRFPRDPARCQKWVENCRRADLEDKTPDQLNKHYRLCAKHFETSMICRTSPYRTVLRDNAIPTIFDLTSHLNNPHSRHRKRIKELSEDEIRTLKQKKIDETSEQEQKHKETNNSNAQNPSEEEGEGQDEDILPLTLEEKENKEYLKSLFEILILMGKQNIPLDGHEADEIPEGLFTPDNFQALLECRINSGEEVLRKRFETTAVNTLFCSKTQQRQMLEICESCIREETLREVRDSHFFSIITDDVVDIAGEEHLPVLVRFVDESHNLREEFIGFLPYEADAEILAVKFHTMITEKWGLNMEYCRGQAYIVSSGFSSKMKVVASRLLEKYPQAIYTLCSSCALNMWLAKSVPVMGVSVALGTIEEVCSFFHRSPQLLLELDNVISVLFQNSKERGKELKEICHSQWTGRHDAFEILVELLQALVLCLDGINSDTNIRWNNYIAGRAFVLCSAVSDFDFIVTIVVLKNVLSFTRAFGKFRRAHQGNLESQLTSESYYKETLSVPTVEHIIQELKDIFSEQHLKALKCLSLVPSVMGQLKFNTSEEHHADMYRSDLPNPDTLSAELHCWRIKWKHRGKDIELPSTIYEALHLPDIKFFPNVYALLKVLCILPVMKVENERYENGRKRLKAYLRNTLTDQRSSNLALLNINFDIKHDLDLMVDTYIKLYTSKSELPTDNSETVENT

SEQ ID NO: 738987 - protein, 165 aa, Homo sapiens
VNPHSVPIGANKTVPKDFQINRFGKEHHADMYRSDLPNPDTLSAELHCWRIKWKHRGKDIELPSTIYEALHLPDIKFFPNVYALLKVLCILPVMKVENERYENGRKRLKAYLRNTLTDQRSSNLALLNINFDIKHDLDLMVDTYIKLYTSKSELPTDNSETVENT

SEQ ID NO: 738988 - protein, 145 aa, Homo sapiens
MSLFVKLILCFPVDETSEQEQKHKETNNSNAQNPSEEEGEGQDEDILPLTLEEKENKEYLKSLFEILILMGKQNIPLDGHEADEIPEGLFTPDNFQALLECRINSGEEVLRKRFETTAVNTLFCSKTQQRQMLEICESCIREETL

SEQ ID NO: 738989 - protein, 88 aa, Homo sapiens
DGPFRKLEFLGGTQGTNRKCSKRKFGVLDCQANEGELSGHIKVRNQRLNLTNKRCWRAALGSVLVVRTHLQVAHGYVVGTDTRLPELS

SEQ ID NO: 738990 - protein, 570 aa, Homo sapiens
MNVVFAVKQYISKMIEDSGPGMKVLLMDKETTGIVSMVYTQSEILQKEVYLFERIDSQNREIMKHLKAICFLRPTKENVDYIIQELRRPKYTIYFIYFSNVISKSDVKSLAEADEQEVVAEVQEFYGDYIAVNPHLFSLNILGCCQGRNWDPAQLSRTTQGLTALLLSLKKCPMIRYQLSSEAAKRLAECVKQVITKEYELFEFRRTEVPPLLLILDRCDDAITPLLNQWTYQAMVHELLGINNNRIDLSRVPGISKDLREVVLSAENDEFYANNMYLNFAEIGSNIKNLMEDFQKKKPKEQQKLESIADMKAFVENYPQFKKMSGTVSKHVTVVGELSRLVSERNLLEVSEVEQELACQNDHSSALQNIKRLLQNPKVTEFDAARLVMLYALHYERHSSNSLPGLMMDLRNKGVSEKYRKLVSAVVEYGGKRVRGSDLFSPKDAVAITKQFLKGLKGVENVYTQHQPFLHETLDHLIKGRLKENLYPYLGPSTLRDRPQDIIVFVIGGATYEEALTVYNLNRTTPGVRIVLGGTTVHNTKSFLEEVLASGLHSRSKESSQVTSRSASRR

SEQ ID NO: 738991 - protein, 552 aa, Homo sapiens
MNVVFAVKQYISKMIEDSGPGMKVLLMDKETTGIVSMVYTQSEILQKEVYLFERIDSQENVDYIIQELRRPKYTIYFIYFSNVISKSDVKSLAEADEQEVVAEVQEFYGDYIAVNPHLFSLNILGCCQGRNWDPAQLSRTTQGLTALLLSLKKCPMIRYQLSSEAAKRLAECVKQVITKEYELFEFRRTEVPPLLLILDRCDDAITPLLNQWTYQAMVHELLGINNNRIDLSRVPGISKDLREVVLSAENDEFYANNMYLNFAEIGSNIKNLMEDFQKKKPKEQQKLESIADMKAFVENYPQFKKMSGTVSKHVTVVGELSRLVSERNLLEVSEVEQELACQNDHSSALQNIKRLLQNPKVTEFDAARLVMLYALHYERHSSNSLPGLMMDLRNKGVSEKYRKLVSAVVEYGGKRVRGSDLFSPKDAVAITKQFLKGLKGVENVYTQHQPFLHETLDHLIKGRLKENLYPYLGPSTLRDRPQDIIVFVIGGATYEEALTVYNLNRTTPGVRIVLGGTTVHNTKSFLEEVLASGLHSRSKESSQVTSRSASRR

SEQ ID NO: 738992 - protein, 534 aa, Homo sapiens
MVYTQSEILQKEVYLFERIDSQNREIMKHLKAICFLRPTKENVDYIIQELRRPKYTIYFIYFSNVISKSDVKSLAEADEQEVVAEVQEFYGDYIAVNPHLFSLNILGCCQGRNWDPAQLSRTTQGLTALLLSLKKCPMIRYQLSSEAAKRLAECVKQVITKEYELFEFRRTEVPPLLLILDRCDDAITPLLNQWTYQAMVHELLGINNNRIDLSRVPGISKDLREVVLSAENDEFYANNMYLNFAEIGSNIKNLMEDFQKKKPKEQQKLESIADMKAFVENYPQFKKMSGTVSKHVTVVGELSRLVSERNLLEVSEVEQELACQNDHSSALQNIKRLLQNPKVTEFDAARLVMLYALHYERHSSNSLPGLMMDLRNKGVSEKYRKLVSAVVEYGGKRVRGSDLFSPKDAVAITKQFLKGLKGVENVYTQHQPFLHETLDHLIKGRLKENLYPYLGPSTLRDRPQDIIVFVIGGATYEEALTVYNLNRTTPGVRIVLGGTTVHNTKSFLEEVLASGLHSRSKESSQVTSRSASRR

SEQ ID NO: 738993 - protein, 570 aa, Homo sapiens; identical to SEQ ID NO: 738990

SEQ ID NO: 738994 - protein, 570 aa, Homo sapiens; identical to SEQ ID NO: 738990

SEQ ID NO: 738995 - protein, 359 aa, Homo sapiens
NGRSRPGLIRPKDPLLNQWTYQAMVHELLGINNNRIDLSRVPGISKDLREVVLSAENDEFYANNMYLNFAEIGSNIKNLMEDFQKKKPKEQQKLESIADMKAFVENYPQFKKMSGTVSKHVTVVGELSRLVSERNLLEVSEVEQELACQNDHSSALQNIKRLLQNPKVTEFDAARLVMLYALHYERHSSNSLPGLMMDLRNKGVSEKYRKLVSAVVEYGGKRVRGSDLFSPKDAVAITKQFLKGLKGVENVYTQHQPFLHETLDHLIKGRLKENLYPYLGPSTLRDRPQDIIVFVIGGATYEEALTVYNLNRTTPGVRIVLGGTTVHNTKSFLEEVLASGLHSRSKESSQVTSRSASRR

SEQ ID NO: 738996 - protein, 200 aa, Homo sapiens
SCLGYFFCDSSIMAHLGKKPVSGGRPPRERRVDGIKGVSHVSLFQVRDSSRLVSAVVEYGGKRVRGSDLFSPKDAVAITKQFLKGLKGVENVYTQHQPFLHETLDHLIKGRLKENLYPYLGPSTLRDRPQDIIVFVIGGATYEEALTVYNLNRTTPGVRIVLGGTTVHNTKSFLEEVLASGLHSRSKESSQVTSRSASRR

SEQ ID NO: 738997 - protein, 95 aa, Homo sapiens
GDLEDLLAVPFNSISEASTLRDRPQDIIVFVIGGATYEEALTVYNLNRTTPGVRIVLGGTTVHNTKSFLEEVLASGLHSRSKESSQVTSRSASRR

SEQ ID NO: 738998 - protein, 552 aa, Homo sapiens
MNVVFAVKQYISKMIEDSGPGMKVLLMDKETTGIVSMVYTQSEILQKEVYLFERIDSQNREIMKHLKAICFLRPTKENVDYIIQELRRPKYTIYFIYFSNVISKSDVKSLAEADEQEVVAEVQEFYGDYIAVNPHLFSLNILGCCQGRNWDPAQLSRTTQGLTALLLSLKKCPMIRYQLSSEAAKRLAECVKQVITKEYELFEFRRTEVPPLLLILDRCDDAITPLLNQWTYQAMVHELLGINNNRIDLSRVPGISKDLREVVLSAENDEFYANNMYLNFAEIGSNIKNLMEDFQKKKPKEQQKLESIADMKAFVENYPQFKKMSGTVSKHVTVVGELSRLVSERNLLEVSEVEQELACQNDHSSALQNIKRLLQNPKVTEFDAARLVMLYALHYERHSSNSLPGLMMDLRNKGVSEKYRKLVSAVVEYGGKRVRGSDLFSPKDAVAITKQFLKGLKGVENVYTQHQPFLHETLDHLIKGRLKENLYPYLGPSTLRDRPQDIIVFVIGGATYEEALTVYNLNRTTPGVRIVLGGTTVHNTKSKRFLREGLAF

SEQ ID NO: 738999 - protein, 372 aa, Homo sapiens
MNVVFAVKQYISKMIEDSGPGMKVLLMDKETTGIVSMVYTQSEILQKEVYLFERIDSQNREIMKHLKAICFLRPTKENVDYIIQELRRPKYTIYFIYFSNVISKSDVKSLAEADEQEVVAEVQEFYGDYIAVNPHLFSLNILGCCQGRNWDPAQLSRTTQGLTALLLSLKKCPMIRYQLSSEAAKRLAECVKQVITKEYELFEFRRTEVPPLLLILDRCDDAITPLLNQWTYQAMVHELLGINNNRIDLSRVPGISKDLREVVLSAENDEFYANNMYLNFAEIGSNIKNLMEDFQKKKPKEQQKLESIADMKAFVENYPQFKKMSGTVSKHVTVVGELSRLVSERNLLEVSEVEQELACQNDHSSALQVSPI

SEQ ID NO: 739000 - protein, 129 aa, Homo sapiens [sequence omitted]

SEQ ID NO: 739001 - protein, 534 aa, Homo sapiens; identical to SEQ ID NO: 738992

SEQ ID NO: 739002 - protein, 612 aa, Homo sapiens
MNVVFAVKQYISKMIEDSGPGMKVLLMDKETTGIVSMVYTQSEILQKEVYLFERIDSQNREIMKHLKAICFLRPTKENVDYIIQELRRPKYTIYFIYFSNVISKSDVKSLAEADEQEVVAEVQEFYGDYIAVNPHLFSLNILGCCQGRNWDPAQLSRTTQGLTALLLSLKKCPMIRYQLSSEAAKRLAECVKQVITKEYELFEFRRTEVPPLLLILDRCDDAITPLLNQWTYQAMVHELLGINNNRIDLSRVPGISKDLREVVLSAENDEFYANNMYLNFAEIGSNIKNLMEDFQKKKPKEQQKLESIADMKAFVENYPQFKKMSGTVSKHVTVVGELSRLVSERNLLEVSEVEQELACQNDHSSALQNIKRLLQNPKVTEFDAARLVMLYALHYERHSSNSLPGLMMDLRNKGVSEKYRKLVSAVVEYGGKRVRGSDLFSPKDAVAITKQFLKGLKGVENVYTQHQPFLHETLDHLIKGRLKENLYPYLGPSTLRDRPQDIIVFVIGGATYEEALTVYNLNRTTPGVRIVLGGTTVHNTKRALKSHQGQRAEDETVVGGRAQLPLLSPLQVFPTKQRCWRAALGSVLVVRTHLQVAHGYVVGTDTRLPELS

SEQ ID NO: 739003 - protein, 570 aa, Homo sapiens; identical to SEQ ID NO: 738990

SEQ ID NO: 739004 - protein, 526 aa, Homo sapiens
MNVVFAVKQYISKMIEDSGPGMKVLLMDKETTGIVSMVYTQSEILQKEVYLFERIDSQNREIMKHLKAICFLRPTKENVDYIIQELRRPKYTIYFIYFSNVISKSDVKSLAEADEQEVVAEVQEFYGDYIAVNPHLFSLNILGCCQGRNWDPAQLSRTTQGLTALLLSLKKCPMIRYQLSSEAAKRLAECVKQVITKEYELFEFRRTEVPPLLLILDRCDDAITPLLNQWTYQAMVHELLGINNNRIDLSRVPGISKDLREVVLSAENDEFYANNMYLNFAEIGSNIKNLMEDFQKKKPKEQQKLESIADMKAFVENYPQFKKMSGTVSKHVTVVGELSRLVSERNLLEVSEVEQELACQNDHSSALQNIKRLLQNPKVTEFDAARLVMLYALHYERHSSNSLPGLMMDLRNKGVSEKYRKLVSAVVEYGGKRVRGSDLFSPKDAVAITKQFLKGLKGVENVYTQHQPFLHETLDHLIKGRLKENLYPYLGPSTLRDRPLGNFSCCALWCLPGQSSLQEWCGSGYK

SEQ ID NO: 739005 - protein, 158 aa, Homo sapiens
MNVVFAVKQYISKMIEDSGPGMKVLLMDKETTGIVSMVYTQSEILQKEVYLFERIDSQNREIMKHLKAICFLRPTKENVDYIIQELRRPKYTIYFIYFSNVISKSDVKSLAEADEQEVVAEVQEFYGDYIAVNPHLFSLNILGCCQVWKERFNLSVES

SEQ ID NO: 739006 - protein, 162 aa, Homo sapiens
MNVVFAVKQYISKMIEDSGPGMKVLLMDKETTGIVSMVYTQSEILQKEVYLFERIDSQNREIMKHLKAICFLRPTKENVDYIIQELRRPKYTIYFIYFSNVISKSDVKSLAEADEQEVVAEVQEFYGDYIAVNPHLFSLNILGCCQARNWDPAQHKNQRQHK

SEQ ID NO: 739007 - protein, 278 aa, Homo sapiens
MLRSLLLHSLRLCAQTASCLVLFPRFLGTAFMLWLLDFLCIRKHFLGRRRRGQPEPEVELNSEGEEVPPDDPPICVSDDNRLCTLASLKAVWHGQKLDFFKQAHEGGPAPNSEVVLPDGFQSQHILDYAQGNRPLVLNFGSCTCPPFMARMSAFQRLVTKYQRDVDFLIIYIEEAHPSDGWVTTDSPYIIPQHRSLEDRVSAARVLQQGAPGCALVLDTMANSSSSAYGAYFERLYVIQSGTIMYQGGRGPDGYQVSELRTWLERYDEQLHGARPRRV

SEQ ID NO: 739008 - protein, 75 aa, Homo sapiens
LSCRAQGVLFRASLVLQGHQHAGCPGRVQVLQAEFNVGLVRPPLALAQCILLWGHLMRGHEVTDLTPSIWSWEPK

SEQ ID NO: 739009 - protein, 668 aa, Homo sapiens
MMPSPSDSSRSLTSRPSTRGLTHLRLHRPWLQALLTLGLVQVLLGILVVTFSMVASSVTTTESIKRSCPSWAGFSLAFSGVVGIVSWKRPFTLVISFFSLLSVLCVMLSMAGSVLSCKNAQLARDFQQCSLEGKVCVCCPSVPLLRPCPESGQELKVAPNSTCDEARGALKNLLFSVCGLTICAAIICTLSAIVCCIQIFSLDLVHTLAPERSVSGPLGPLGCTSPPPAPLLHTMLDLEEFVPPVPPPPYYPPEYTCSSETDAQSITYNGSMDSPVPLYPTDCPPSYEAVMGLRGDSQATLFDPQLHDGSCICERVASIVDVSMDSGSLVLSAIGDLPGGSSPSEDSCLLELQGSVRSVDYVLFRSIQRSRAGYCLSLDCGLRGPFEESPLPRRPPRAARSYSCSAPEAPPPLGAPTAARSCHRLEGWPPWVGPCFPELRRRVPRGGGRPAAAPPTRAPTRRFSDSSGSLTPPGHRPPHPASPPPLLLPRSHSDPGITTSSDTADFRDLYTKVLEEEAASVSSADTGLCSEACLFRLARCPSPKLLRARSAEKRRPVPTFQKVPLPSGPAPAHSLGDLKGSWPGRGLVTRFLQISRKAPDPSGTGAHGHKQVPRSLWGRPGRESLHLRSCGDLSSSSSLRRLLSGRRLERGTRPHSLSLNGGSRETGL

SEQ ID NO: 739010 - protein, 212 aa, Homo sapiens
MMPSPSDSSRSLTSRPSTRGLTHLRLHRPWLQALLTLGLVQVLLGILVVTFSMVASSVTTTESIKRSCPSWAGFSNLLFSVCGLTICAAIICTLSAIVCCIQIFSLDLVHTLAPERSVSGPLGPLGCTSPPPAPLLHTMLDLEEFVPPVPPPPYYPPEYTCSSETDAQSITYNGSMDSPVPLYPTDCPPSYEAVMGLRGDSQEENKFLSPSE

SEQ ID NO: 739011 - protein, 704 aa, Homo sapiens
MMPSPSDSSRSLTSRPSTRGLTHLRLHRPWLQALLTLGLVQVLLGILVVTFSMVASSVTTTESIKRSCPSWAGFSLAFSGVVGIVSWKRPFTLVISFFSLLSVLCVMLSMAGSVLSCKNAQLARDFQQCSLEGKVCVCCPSVPLLRPCPESGQELKVAPNSTCDEARGALKNLLFSVCGLTICAAIICTLSAIVCCIQIFSLDLVHTLAPERSVSGPLGPLGCTSPPPAPLLHTMLDLEEFVPPVPPPPYYPPEYTCSSETDAQSITYNGSMDSPVPLYPTDCPPSYEAVMGLRGDSQATLFDPQLHDGSCICERVASIVDAGGTVAPRGWAWEKRNCLGRARPGQAGATQRPLPPTVSMDSGSLVLSAIGDLPGGSSPSEDSCLLELQGSVRSVDYVLFRSIQRSRAGYCLSLDCGLRGPFEESPLPRRPPRAARSYSCSAPEAPPPLGAPTAARSCHRLEGWPPWVGPCFPELRRRVPRGGGRPAAAPPTRAPTRRFSDSSGSLTPPGHRPPHPASPPPLLLPRSHSDPGITTSSDTADFRDLYTKVLEEEAASVSSADTGLCSEACLFRLARCPSPKLLRARSAEKRRPVPTFQKVPLPSGPAPAHSLGDLKGSWPGRGLVTRFLQISRKAPDPSGTGAHGHKQVPRSLWGRPGRESLHLRSCGDLSSSSSLRRLLSGRRLERGTRPHSLSLNGGSRETGL

SEQ ID NO: 739012 - protein, 685 aa, Homo sapiens
MMPSPSDSSRSLTSRPSTRGLTHLRLHRPWLQALLTLGLVQVLLGILVVTFSMVASSVTTTESIKRSCPSWAGFSISFFSLLSVLCVMLSMAGSVLSCKNAQLARDFQQCSLEGKVCVCCPSVPLLRPCPESGQELKVAPNSTCDEARGALKNLLFSVCGLTICAAIICTLSAIVCCIQIFSLDLVHTLAPERSVSGPLGPLGCTSPPPAPLLHTMLDLEEFVPPVPPPPYYPPEYTCSSETDAQSITYNGSMDSPVPLYPTDCPPSYEAVMGLRGDSQATLFDPQLHDGSCICERVASIVDAGGTVAPRGWAWEKRNCLGRARPGQAGATQRPLPPTVSMDSGSLVLSAIGDLPGGSSPSEDSCLLELQGSVRSVDYVLFRSIQRSRAGYCLSLDCGLRGPFEESPLPRRPPRAARSYSCSAPEAPPPLGAPTAARSCHRLEGWPPWVGPCFPELRRRVPRGGGRPAAAPPTRAPTRRFSDSSGSLTPPGHRPPHPASPPPLLLPRSHSDPGITTSSDTADFRDLYTKVLEEEAASVSSADTGLCSEACLFRLARCPSPKLLRARSAEKRRPVPTFQKVPLPSGPAPAHSLGDLKGSWPGRGLVTRFLQISRKAPDPSGTGAHGHKQVPRSLWGRPGRESLHLRSCGDLSSSSSLRRLLSGRRLERGTRPHSLSLNGGSRETGL

SEQ ID NO: 739013 - protein, 509 aa, Homo sapiens
MMPSPSDSSRSLTSRPSTRGLTHLRLHRPWLQALLTLGLVQVLLGILVVTFSMVASSVTTTESIKRSCPSWAGFSLAFSGVVGIVSWKRPFTLVISFFSLLSVLCVMLSMAGSVLSCKNAQLARDFQQCSLEGKVCVCCPSVPLLRPCPESGQELKVAPNSTCDEARGALKNLLFSVCGLTICAAIICTLSAIVCCIQIFSLDLVHTLAPERSVSGPLGPLGCTSPPPAPLLHTMLDLEEFVPPVPPPPYYPPEYTCSSETDAQSITYNGSMDSPVPLYPTDCPPSYEAVMGLRGDSQATLFDPQLHDGSCICERVASIVDVSMDSGSLVLSAIGDLPGGSSPSEDSCLLELQGSVRSVDYVLFRSIQRSRAGYCLSLDCGLRGPFEESPLPRRPPRAARSYSCSAPEAPPPLGAPTAARSCHRLEGWPPWVGPCSAIAQVPSPHRGTGLLIRHPHHRCCCHGPTATQASRPPVTLLTSGTFIPKCLRKKLLLFPLQIQGSALKPASSA

SEQ ID NO: 739014 - protein, 668 aa, Homo sapiens; identical to SEQ ID NO: 739009

SEQ ID NO: 739015 - protein, 240 aa, Homo sapiens
MMPSPSDSSRSLTSRPSTRGLTHLRLHRPWLQALLTLGLVQVLLGILVVTFSMVASSVTTTESIKRSCPSWAGFSLAFSGVVGIVSWKRPFTLVISFFSLLSVLCVMLSMAGSVLSCKNAQLARDFQQCSLEGKVCVCCPSVPLLRPCPESGQELKVAPNSTCDEARGALKNLLFSVCGLTICAAIICTLSAIVCCIQIFSLDLVHTLTSGTFIPKCLRKKLLLFPLQIQGSALKPASSA

SEQ ID NO: 739016 - protein, 144 aa, Homo sapiens
MMPSPSDSSRSLTSRPSTRGLTHLRLHRPWLQALLTLGLVQVLLGILVVTFSMVASSVTTTESIKRSCPSWAGFSNLLFSVCGLTICAAIICTLSAIVCCIQIFSLDLVHTLTSGTFIPKCLRKKLLLFPLQIQGSALKPASSA

SEQ ID NO: 739017 - protein, 193 aa, Homo sapiens
MLGIREARPAGLGAGPAASPHLSPSPAPSTASSAPGRTWQGNGEMTPPLQGPRARFRKKPKALPYRRENSPGDLPPPPLPPPEEEASWALELRAAGSMSSLERERSGERKAVQAVPLAAQRVLHPDEEAWLPYSRPSFLSRGQGTSTCSTAGSNSSRGSSSSRGSRGPGRSRSRSQSRSQSQRPGQKRREEPR

SEQ ID NO: 739018 - protein, 311 aa, Homo sapiens
MPSLNWPEALPPPPPSCELSCLEGPEEELEGSSEPEEWCPPMPERSHLTEPSSSGGCLVTPSRRETPSPTPSYGQQSTATLTPSPPDPPQPPTDMPHLHQMPRRVPLGPSSPLSVSQPMLGIREARPAGLGAGPAASPHLSPSPAPSTASSAPGRTWQGNGEMTPPLQGPRARFRKKPKALPYRRENSPGDLPPPPLPPPEEEASWALELRAAGSMSSLERERSGERKAVQAVPLAAQRVLHPDEEAWLPYSRPSFLSRGQGTSTCSTAGSNSSRGSSSSRGSRGPGRSRSRSQSRSQSQRPGQKRREEPR

SEQ ID NO: 739019 - protein, 591 aa, Homo sapiens
MTSTDRPLFFRPADAPGGGSMATSHPNTTATVLKLPNIATSLSFAGLFRLSVPNAHLLSLRPPMGLGPAPYSWLADSWPHPSRSPSAQEPRGSCCPSNPDPDDRYYNGEEFSFPHLASAHFSRPTGANRRAPGSPVSLRLVSPWGGCELGKPLQTYLHPGLGCKACVGEEVDPVGFPFVFHSVVLYVSVSASGPPSFFSAEAGISLYLAQTARGTAAPGEGPVYSTIDPAGEELQTFHGGFPQHPSGDLGPWSQYAPPEWSQGDSGAKGGKVKLLGKPVQMPSLNWPEALPPPPPSCELSCLEGPEEELEGSSEPEEWCPPMPERSHLTEPSSSGGCLVTPSRRETPSPTPSYGQQSTATLTPSPPDPPQPPTDMPHLHQMPRRVPLGPSSPLSVSQPMLGIREARPAGLGAGPAASPHLSPSPAPSTASSAPGRTWQGNGEMTPPLQGPRARFRKKPKALPYRRENSPGDLPPPPLPPPEEEASWALELRAAGSMSSLERERSGERKAVQAVPLAAQRVLHPDEEAWLPYSRPSFLSRGQGTSTCSTAGSNSSRGSSSSRGSRGPGRSRSRSQSRSQSQRPGQKRREEPR

SEQ ID NO: 739020 - protein, 193 aa, Homo sapiens; identical to SEQ ID NO: 739017

SEQ ID NO: 739021 - protein, 435 aa, Homo sapiens
MGLGPAPYSWLADSWPHPSRSPSAQEPRGSCCPSNPDPDDRYYNEAGISLYLAQTARGTAAPGEGPVYSTIDPAGEELQTFHGGFPQHPSGDLGPWSQYAPPEWSQGDSGAKGGKVKLLGKPVQMPSLNWPEALPPPPPSCELSCLEGPEEELEGSSEPEEWCPPMPERSHLTEPSSSGGCLVTPSRRETPSPTPSYGQQSTATLTPSPPDPPQPPTDMPHLHQMPRRVPLGPSSPLSVSQPMLGIREARPAGLGAGPAASPHLSPSPAPSTASSAPGRTWQGNGEMTPPLQGPRARFRKKPKALPYRRENSPGDLPPPPLPPPEEEASWALELRAAGSMSSLERERSGERKAVQAVPLAAQRVLHPDEEAWLPYSRPSFLSRGQGTSTCSTAGSNSSRGSSSSRGSRGPGRSRSRSQSRSQSQRPGQKRREEPR

SEQ ID NO: 739022 - protein, 562 aa, Homo sapiens
QRKELSHYTASFAYTPAVSFPHSEGLSGASSRPPMGLGPAPYSWLADSWPHPSRSPSAQEPRGSCCPSNPDPDDRYYNGEEFSFPHLASAHFSRPTGANRRAPGSPVSLRLVSPWGGCELGKPLQTYLHPGLGCKACVGEEVDPVGFPFVFHSVVLYVSVSASGPPSFFSAEAGISLYLAQTARGTAAPGEGPVYSTIDPAGEELQTFHGGFPQHPSGDLGPWSQYAPPEWSQGDSGAKGGKVKLLGKPVQMPSLNWPEALPPPPPSCELSCLEGPEEELEGSSEPEEWCPPMPERSHLTEPSSSGGCLVTPSRRETPSPTPSYGQQSTATLTPSPPDPPQPPTDMPHLHQMPRRVPLGPSSPLSVSQPMLGIREARPAGLGAGPAASPHLSPSPAPSTASSAPGRTWQGNGEMTPPLQGPRARFRKKPKALPYRRENSPGDLPPPPLPPPEEEASWALELRAAGSMSSLERERSGERKAVQAVPLAAQRVLHPDEEAWLPYSRPSFLSRGQGTSTCSTAGSNSSRGSSSSRGSRGPGRSRSRSQSRSQSQRPGQKRREEPR

SEQ ID NO: 739023 - protein, 591 aa, Homo sapiens; identical to SEQ ID NO: 739019

SEQ ID NO: 739024 - protein, 591 aa, Homo sapiens; identical to SEQ ID NO: 739019

SEQ ID NO: 739025 - protein, 417 aa, Homo sapiens
MTSTDRPLFFRPADAPGGGSMATSHPNTTATVLKLPNIATSLSFAGLFRLSVPNAHLLSLRPPMGLGPAPYSWLADSWPHPSRSPSAQEPRGSCCPSNPDPDDRYYNGEEFSFPHLASAHFSRPTGANRRAPGSPVSLRLVSPWGGCELGKPLQTYLHPGLGCKACVGEEVDPVGFPFVFHSVVLYVSVSASGPPSFFSAEAGISLYLAQTARGTAAPGEGPVYSTIDPAGEELQTFHGGFPQHPSGDLGPWSQYAPPEWSQGDSGAKGGKVKLLGKPVQMPSLNWPEALPPPPPSCELSCLEGPEEELEGSSEPEEWCPPMPERSHLTEPSSSGGCLVTPSRRETPSPTPSYGQQSTATLTPSPPDPPQPPTDMPHLHQMPRNQDDPCWGIENIMSATGKGSRDVFSPPAVMSGAS

SEQ ID NO: 739026 - protein, 122 aa, Homo sapiens
GAGVRAGARAKGQDRNAERNQDDPCWGIENIMSATGKGSRDVFSPSAQEPRGSCCPSNPDPDDRYYNGEEFSFPHLASAHFSRPTGANRRAPGSPVSLRSRNLPVSSSDGQGHGRPWRGSCL

SEQ ID NO: 739027 - protein, 452 aa, Homo sapiens
MTSTDRPLFFRPADAPGGGSMATSHPNTTATVLKLPNIATSLSFAGLFRLSVPNAHLLSLRPPMGLGPAPYSWLADSWPHPSRSPSAQEPRGSCCPSNPDPDDRYYNEAGISLYLAQTARGTAAPGEGPVYSTIDPAGEELQTFHGGFPQHPSGDLGPWSQYAPPEWSQGDSAQSQRSGARQCLERSHLTEPSSSGGCLVTPSRRETPSPTPSYGQQSTATLTPSPPDPPQPPTDMPHLHQMPRRVPLGPSSPLSVSQPMLGIREARPAGLGAGPAASPHLSPSPAPSTASSAPGRTWQGNGEMTPPLQGPRARFRKKPKALPYRRENSPGDLPPPPLPPPEEEASWALELRAAGSMSSLERERSGERKAVQAVPLAAQRVLHPDEEAWLPYSRPSFLSRGQGTSTCSTAGSNSSRGSSSSRGSRGPGRSRSRSQSRSQSQRPGQKRREEPR

SEQ ID NO: 739028 - protein, 646 aa, Homo sapiens
MTSTDRPLFFRPADAPGGGSMATSHPNTTATVLKLPNIATSLSFAGLFRLSVPNAHLLSLRPPMGLGPAPYSWLADSWPHPSRSPSAQEPRGSCCPSNPDPDDRYYNGEEFSFPHLASAHFSRPTGANRRAPGSPVSLRLVSPWGGCELGKPLQTYLHPGLGCKACVGEEVDPVGFPFVFHSVVLYVSVSASGPPSFFSAEAGISLYLAQTARGTAAPGEGPVYSTIDPAGEELQTFHGGFPQHPSGDLGPWSQYAPPEWSQGDSGMTPTPETPFSPDQGIPKEDPPPDPLAPSPALPSDLSHLWLFPACSPGVPILFSSGAKGGKVKLLGKPVQMPSLNWPEALPPPPPSCELSCLEGPEEELEGSSEPEEWCPPMPERSHLTEPSSSGGCLVTPSRRETPSPTPSYGQQSTATLTPSPPDPPQPPTDMPHLHQMPRRVPLGPSSPLSVSQPMLGIREARPAGLGAGPAASPHLSPSPAPSTASSAPGRTWQGNGEMTPPLQGPRARFRKKPKALPYRRENSPGDLPPPPLPPPEEEASWALELRAAGSMSSLERERSGERKAVQAVPLAAQRVLHPDEEAWLPYSRPSFLSRGQGTSTCSTAGSNSSRGSSSSRGSRGPGRSRSRSQSRSQSQRPGQKRREEPR

SEQ ID NO: 739029 - protein, 311 aa, Homo sapiens; identical to SEQ ID NO: 739018

SEQ ID NO: 739030 - protein, 555 aa, Homo sapiens
GKPPTGVAVPAGSGMTLSQFQVSGPSSPHFSDPHSVPAGLEPGLEVGAGLAVRLARVLRARLPRGQRRSLRGAASRALRRLYWRRKQRKELSHYTASFAYTPAVSFPHSEGLSGASSRPPMGLGPAPYSWLADSWPHPSRSPSAQEPRGSCCPSNPDPDDRYYNEAGISLYLAQTARGTAAPGEGPVYSTIDPAGEELQTFHGGFPQHPSGDLGPWSQYAPPEWSQGDSGAKGGKVKLLGKPVQMPSLNWPEALPPPPPSCELSCLEGPEEELEGSSEPEEWCPPMPERSHLTEPSSSGGCLVTPSRRETPSPTPSYGQQSTATLTPSPPDPPQPPTDMPHLHQMPRRVPLGPSSPLSVSQPMLGIREARPAGLGAGPAASPHLSPSPAPSTASSAPGRTWQGNGEMTPPLQGPRARFRKKPKALPYRRENSPGDLPPPPLPPPEEEASWALELRAAGSMSSLERERSGERKAVQAVPLAAQRVLHPDEEAWLPYSRPSFLSRGQGTSTCSTAGSNSSRGSSSSRGSRGPGRSRSRSQSRSQSQRPGQKRREEPR

SEQ ID NO: 739031 - protein, 311 aa, Homo sapiens; identical to SEQ ID NO: 739018

SEQ ID NO: 739032 - protein, 160 aa, Homo sapiens [sequence omitted]

SEQ ID NO: 739033 - protein, 162 aa, Homo sapiens
SLPPRLQFSSVCFVSSARRSPASVALRPAGPGRPTAKMPGPPGSFEVGALTFRDVAIEFSLEEWQCLDTEQQNLYRNVMLDNYRNLVFLGIAVSKPDLITCLEQEKEPWNLKTHDMVAKPPGTAFSIFYMFVKFYKYMQCQYTFSEFGYFGTSFFHFSGQIC

SEQ ID NO: 739034 - protein, 174 aa, Homo sapiens
VDVSRSRQSLGLVFTVPRPLPGNHRPPPGDFVTASVALRPAGPGRPTAKMPGPPGSFEVGALTFRDVAIEFSLEEWQCLDTEQQNLYRNVMLDNYRNLVFLGIAVSKPDLITCLEQEKEPWNLKTHDMVAKPPGTAFSIFYMFVKFYKYMQCQYTFSEFGYFGTSFFHFSGQIC

SEQ ID NO: 739035 - protein, 70 aa, Homo sapiens
ASPCFDSRMVRAALTCAHCLALPSEMNPVPQMEMQKSPVFCALTLGAVDRSCSYSAILSPPVNWKFPVSP

SEQ ID NO: 739036 - protein, 70 aa, Homo sapiens; identical to SEQ ID NO: 739035

SEQ ID NO: 739037 - protein, 128 aa, Homo sapiens [sequence omitted]

SEQ ID NO: 739038 - protein, 145 aa, Homo sapiens [sequence omitted]

SEQ ID NO: 739039 - protein, 121 aa, Homo sapiens
QVEAREAHAGHMLHTLAPLWLQLHPPTQHSPHDLSSPSPRHSQGSPGHPQLFSGLLEYQTTHLSLSSSLPPLHPASHQVPQVSKLELTAVGTYGIYWIWLTHTWYSYLHLLYLPGLHKLQS

SEQ ID NO: 739040 - protein, 138 aa, Homo sapiens
PDGSPLCGPGRGVPGPPLEACPCRCVQSVSIAAFASLGAFGAFVGFVYPWQGISQALIGSPGFQSHVLNGASNCNGPPIGRIGYPAPPSKVDLVSVMSSWLLGLVGSPRSREQLRWSSVPSFFLPTRPPGARWIEEPQ

SEQ ID NO: 739041 - protein, 142 aa, Homo sapiens [sequence omitted]

SEQ ID NO: 739042 - protein, 30 aa, Homo sapiens
MEQISITQMTMLQMSGVQGWRVLQAGFLSL

SEQ ID NO: 739043 - protein, 331 aa, Homo sapiens
MVLCRLQGCPCKHLDEKTGILLEVCTFPTSAKMDLLWILPSLWLLLLGGPACLKTQEHPSCPGPRELEASKVVLLPSCPGAPGSPGEKGAPGPQGPPGPPGKMGPKGEPGDPVNLLRCQEGPRNCRELLSQGATLSGWYHLCLPEGRALPVFCDMDTEGGGWLVFQRRQDGSVDFFRSWSSYRAGFGNQESEFWLGNENLHQLTLQGNWELRVELEDFNGNRTFAHYATFRLLGEVDHYQLALGKFSEGTAGDSLSLHSGRPFTTYDADHDSSNSNCAVIVHGAWWYASCYRSNLNGRYAVSEAAAHKYGIDWASGRGVGHPYRRVRMMLR

SEQ ID NO: 739044 - protein, 104 aa, Homo sapiens
MAFISPKVPGMVLGTKVLSIPSLLGDSLSLHSGRPFTTYDADHDSSNSNCAVIVHGAWWYASCYRSNLNGRYAVSEAAAHKYGIDWASGRGVGHPYRRVRMMLR

SEQ ID NO: 739045 - protein, 299 aa, Homo sapiens
MDLLWILPSLWLLLLGGPACLKTQEHPSCPGPRELEASKVVLLPSCPGAPGSPGEKGAPGPQGPPGPPGKMGPKGEPGDPVNLLRCQEGPRNCRELLSQGATLSGWYHLCLPEGRALPVFCDMDTEGGGWLVFQRRQDGSVDFFRSWSSYRAGFGNQESEFWLGNENLHQLTLQGNWELRVELEDFNGNRTFAHYATFRLLGEVDHYQLALGKFSEGTAGDSLSLHSGRPFTTYDADHDSSNSNCAVIVHGAWWYASCYRSNLNGRYAVSEAAAHKYGIDWASGRGVGHPYRRVRMMLR

SEQ ID NO: 739046 - protein, 320 aa, Homo sapiens
MVLCRLQGCPCKHLDEKTGILLEVCTFPTSAKMDLLWILPSLWLLLLGGPACLKTQEHPSCPGPRELEASKVVLLPSCPGAPGSPGEKGAPGPQGPPGPPGKMGPKGEPGPRNCRELLSQGATLSGWYHLCLPEGRALPVFCDMDTEGGGWLVFQRRQDGSVDFFRSWSSYRAGFGNQESEFWLGNENLHQLTLQGNWELRVELEDFNGNRTFAHYATFRLLGEVDHYQLALGKFSEGTAGDSLSLHSGRPFTTYDADHDSSNSNCAVIVHGAWWYASCYRSNLNGRYAVSEAAAHKYGIDWASGRGVGHPYRRVRMMLR

SEQ ID NO: 739047 - protein, 406 aa, Homo sapiens
MVLCRLQGCPCKHLDEKTGILLEVCTFPTSAKMDLLWILPSLWLLLLGGPACLKTQEHPSCPGPRELEASKVVLLPSCPGAPGSPGEKGAPGPQGPPGPPGKMGPKGEPGDPVNLLRCQEGEAALAGARNLGSHGVGCWQTPKCGQDPPHSLLRTLLQGPEGAKRVPEGPTLVPVPGGGGQGITWAPPQSISPFPGPRNCRELLSQGATLSGWYHLCLPEGRALPVFCDMDTEGGGWLVFQRRQDGSVDFFRSWSSYRAGFGNQESEFWLGNENLHQLTLQGNWELRVELEDFNGNRTFAHYATFRLLGEVDHYQLALGKFSEGTAGDSLSLHSGRPFTTYDADHDSSNSNCAVIVHGAWWYASCYRSNLNGRYAVSEAAAHKYGIDWASGRGVGHPYRRVRMMLR

SEQ ID NO: 739048 - protein, 395 aa, Homo sapiens
MVLCRLQGCPCKHLDEKTGILLEVCTFPTSAKMDLLWILPSLWLLLLGGPACLKTQEHPSCPGPRELEASKVVLLPSCPGAPGRPPGPPGKMGPKGEPGDPVNLLRCQEGEAALAGARNLGSHGVGCWQTPKCGQDPPHSLLRTLLQGPEGAKRVPEGPTLVPVPGGGGQGITWAPPQSISPFPGPRNCRELLSQGATLSGWYHLCLPEGRALPVFCDMDTEGGGWLVFQRRQDGSVDFFRSWSSYRAGFGNQESEFWLGNENLHQLTLQGNWELRVELEDFNGNRTFAHYATFRLLGEVDHYQLALGKFSEGTAGDSLSLHSGRPFTTYDADHDSSNSNCAVIVHGAWWYASCYRSNLNGRYAVSEAAAHKYGIDWASGRGVGHPYRRVRMMLR

SEQ ID NO: 739049 - protein, 141 aa, Homo sapiens
MVLCRLQGCPCKHLDEKTGILLEVCTFPTSAKMDLLWILPSLWLLLLGGPACLKTQEHPSCPGPRELEASKVVLLPSCPGAPGSPGEKGAPGPQGERGWGAGWDLGNGEGRKVAIFVCAEGPRQRSKEPTLCQLQAGHPAS

SEQ ID NO: 739050 - protein, 393 aa, Homo sapiens
MEQCACVERELDKVLQKFLTYGQHCERSLEELLHYVGQLRAELASAALQGTPLSATLSLVMSQCCRKIKDTVQKLASDHKDIHSSVSRVGKAIDRNFDSEICGVVSDAVWDAREQQQQILQMAIVEHLYQQGMLSVAEELCQESTLNVDLDFKQPFLELNRILEALHEQDLGPALEWAVSHRQRLLELNSSLEFKLHRLHFIRLLAGGPAKQLEALSYARHFQPFARLHQREIQVMMGSLVYLRLGLEKSPYCHLLDSSHWAEICETFTRDACSLLGLSVESPLSVSFASGCVALPVLMNIKAVIEQRQCTGVWNHKDELPIEIELGMKCWYHSVFACPILRQQTSDSNPPIKLICGHVISRDALNKLINGGKLKCPYCPMEQNPADGKRIIF

SEQ ID NO: 739051 - protein, 205 aa, Homo sapiens
MEQCACVERELDKVLQKFLTYGQHCERSLEELLHYVGQLRAELASAALQGTPLSATLSLVMSQCCRKIKDTVQKLASDHKDIHSSVSRVGKAIDRNFDSEICGVVSDAVWDAREQQQQILQMAIVEHLYQQGMLSVAEELCQGSTLELGAWGFTRGLSQRVQTRPGKRRGENNDWGPLALDVAPHQEDGLCGHYSGPERSACTEK

SEQ ID NO: 739052 - protein, 353 aa, Homo sapiens
MEQCACVERELDKVLQKFLTYGQHCERSLEELLHYVGQLRAELASAALQGTPLSATLSLVMSQCCRKIKDTVQKLASDHKDIHSSVSRVGKAIDRNFDSEICGVVSDAVWDAREQQQQILQMAIVEHLYQQGMLSVAEELCQESTLNVDLDFKQPFLELNRILEALHEQDLGPALEWAVSHRQRLLELNSSLEFKLHRLHFIRLLAGGPAKQLEALSYARHFQPFARLHQREIQVMMRSWWSCGGWKINLMQLVGKAARGRDSGEPFTGKPVPARQLVSPPNGDRPGGRAAVNTQGAERHAGVGQGRAGITGKRDTSGHREREHHRRKEEKKENERKRRYETSNNQEQRHGTG

SEQ ID NO: 739053 - protein, 93 aa, Homo sapiens
PYAGAVESPLSVSFASGCVALPVLMNIKAVIEQRQCTGVWNHKDELPIEIELGMKCWYHSVFAPLPLGPRVSSGGPPLPPTTASTVCTISHCK

SEQ ID NO: 739054 - protein, 393 aa, Homo sapiens; identical to SEQ ID NO: 739050

SEQ ID NO: 739055 - protein, 393 aa, Homo sapiens; identical to SEQ ID NO: 739050

SEQ ID NO: 739056 - protein, 393 aa, Homo sapiens; identical to SEQ ID NO: 739050

SEQ ID NO: 739057 - protein, 393 aa, Homo sapiens; identical to SEQ ID NO: 739050

SEQ ID NO: 739058 - protein, 333 aa, Homo sapiens
MSQCCRKIKDTVQKLASDHKDIHSSVSRVGKAIDRNFDSEICGVVSDAVWDAREQQQQILQMAIVEHLYQQGMLSVAEELCQESTLNVDLDFKQPFLELNRILEALHEQDLGPALEWAVSHRQRLLELNSSLEFKLHRLHFIRLLAGGPAKQLEALSYARHFQPFARLHQREIQVMMGSLVYLRLGLEKSPYCHLLDSSHWAEICETFTRDACSLLGLSVESPLSVSFASGCVALPVLMNIKAVIEQRQCTGVWNHKDELPIEIELGMKCWYHSVFACPILRQQTSDSNPPIKLICGHVISRDALNKLINGGKLKCPYCPMEQNPADGKRIIF

SEQ ID NO: 739059 - protein, 333 aa, Homo sapiens; identical to SEQ ID NO: 739058

SEQ ID NO: 739060 - protein, 393 aa, Homo sapiens; identical to SEQ ID NO: 739050

SEQ ID NO: 739061 - protein, 393 aa, Homo sapiens; identical to SEQ ID NO: 739050

SEQ ID NO: 739062 - protein, 393 aa, Homo sapiens; identical to SEQ ID NO: 739050

SEQ ID NO: 739063 - protein, 393 aa, Homo sapiens; identical to SEQ ID NO: 739050

SEQ ID NO: 739064 - protein, 393 aa, Homo sapiens; identical to SEQ ID NO: 739050

SEQ ID NO: 739065 - protein, 333 aa, Homo sapiens; identical to SEQ ID NO: 739058

SEQ ID NO: 739066 - protein, 393 aa, Homo sapiens; identical to SEQ ID NO: 739050

SEQ ID NO: 739067 - protein, 393 aa, Homo sapiens; identical to SEQ ID NO: 739050

SEQ ID NO: 739068 - protein, 393 aa, Homo sapiens; identical to SEQ ID NO: 739050

SEQ ID NO: 739069 - protein, 464 aa, Homo sapiens
MEQCACVERELDKVLQKFLTYGQHCERSLEELLHYVGQLRAELASAALQGTPLSATLSLVMSQCCRKIKDTVQKLASDHKDIHSSVSRVGKAIDRNFDSEICGVVSDAVWDAREQQQQILQMAIVEHLYQQGMLSVAEELCQESTLNVDLDFKQPFLELNRILEALHEQDLGPALEEGGPWVGQQHSASTSQGTGLDCGLHFTQMYLTCLQPCLKSLTQAFGALLSGAGSQVLAPTSSTLNWPLSSRWAVSHRQRLLELNSSLEFKLHRLHFIRLLAGGPAKQLEALSYARHFQPFARLHQREIQVMMGSLVYLRLGLEKSPYCHLLDSSHWAEICETFTRDACSLLGLSVESPLSVSFASGCVALPVLMNIKAVIEQRQCTGVWNHKDELPIEIELGMKCWYHSVFACPILRQQTSDSNPPIKLICGHVISRDALNKLINGGKLKCPYCPMEQNPADGKRIIF

SEQ ID NO: 739070 - protein, 337 aa, Homo sapiens
TWPAPGVGWEHPEAGMYKDSKESQQECPHHQALSLLLRQNFDSEICGVVSDAVWDAREQQQQILQMAIVEHLYQQGMLSVAEELCQESTLNVDLDFKQPFLELNRILEALHEQDLGPALEWAVSHRQRLLELNSSLEFKLHRLHFIRLLAGGPAKQLEALSYARHFQPFARLHQREIQVMMGSLVYLRLGLEKSPYCHLLDSSHWAEICETFTRDACSLLGLSVESPLSVSFASGCVALPVLMNIKAVIEQRQCTGVWNHKDELPIEIELGMKCWYHSVFACPILRQQTSDSNPPIKLICGHVISRDALNKLINGGKLKCPYCPMEQNPADGKRIIF

SEQ ID NO: 739071 - protein, 393 aa, Homo sapiens; identical to SEQ ID NO: 739050

SEQ ID NO: 739072 - protein, 157 aa, Homo sapiens [sequence omitted]

SEQ ID NO: 739073 - protein, 179 aa, Homo sapiens
  misc_feature (8)..(8): Xaa can be any naturally occurring amino acid
  misc_feature (23)..(23): Xaa can be any naturally occurring amino acid
  misc_feature (28)..(28): Xaa can be any naturally occurring amino acid
  misc_feature (31)..(32): Xaa can be any naturally occurring amino acid
MIIALRAXRVSLVCRFSLVVTAXSVCGXCVXXGLESPYCHLLDSSHWAEICETFTRDACSLLGLSVESPLSVSFASGCVALPVLMNIKAVIEQRQCTGVWNHKDELPIEIELGMKCWYHSVFACPILRQQTSDSNPPIKLICGHVISRDALNKLINGGKLKCPYCPMEQNPADGKRIIF

SEQ ID NO: 739074 - protein, 119 aa, Homo sapiens
PYAGAVESPLSVSFASGCVALPVLMNIKAVIEQRQCTGVWNHKDELPIEIELGMKCWYHSVFACPILRQQTSDSNPPIKLICGHVISRDALNKLINGGKLKCPYCPMEQNPADGKRIIF

SEQ ID NO: 739075 - protein, 354 aa, Homo sapiens
MEQCACVERELDKVLQKFLTYGQHCERSLEELLHYVGQLRAELASAALQGTPLSATLSLVMSQCCRKIKDTVQKLASDHKDIHSSVSRVGKAIDRNFDSEICGVVSDAVWDAREQQQQILQMAIVEHLYQQGMLSVAEELCQESTLNVDLDFKQPFLELNRILEALHEQDLGPALEWAVSHRQRLLELNSSLEFKLHRLHFIRLLAGGPAKQLEALSYARHFQPFARLHQREIQVMMRSWWSCGGWKINLMQLVGKAARGRDSGEPFTGKPVPARQLVSPPNGDRPGGRAAVNTQGAMSGMPGSAKEEQEEQERETRVGTARENTTDVRRSKKENERKRRYETSNNQEQRHGTG

SEQ ID NO: 739076 - protein, 213 aa, Homo sapiens
MEQCACVERELDKVLQKFLTYGQHCERSLEELLHYVGQLRAELASAALQGTPLSATLSLVMSQCCRKIKDTVQKLASDHKDIHSSVSRVGKAIDRNFDSEICGVVSDAVWDAREQQQQILQMAIVEHLYQQGMLSVAEELCQESTLNVDLDFKQPFLELNRILEALHEQDLGPALEWAVSHRQRLLELNSPWHKEREMLASVLLLSFPVSVCV

SEQ ID NO: 739077 - protein, 151 aa, Homo sapiens
KENWKRTVLIPDSVLVMPVLILQKQPGLPPPQWILQSNLPEGIFIPAQSPQGLGSHRAQHIVLCCTVLLPAWGWTQSPAPPELPPLVALYEIQVMMGSLVYLRLGLEKSPYCHLLDSSHWAEICETFTRDACSLLGLSVESPLSVRYNPAL

SEQ ID NO: 739078 - protein, 72 aa, Homo sapiens
DSGLSKAFGPKVRASGLFLTPAPGSGPMTVSLCPSVASHSGLLLGFLLAALLMAVLWLLAAPRGSEEPMPAP

SEQ ID NO: 739079 - protein, 191 aa, Homo sapiens
PETSRIHFQQEHWPSQLLLRESLEDMMLHSALGLCLLLVTVSSNLAIAIKKEKRPPQTLSRGWGDDITWVQTYEEGLFYAQKSKKPLMVIHHLEDCQYSQALKKVFAQNEEIQEMAQNKFIMLNLMHETTDKNLSPDGQYVPRIMFVDPSLTVRADIAGRYSNRLYTYEPRDLPLLIENMKKALRLIQSEL

SEQ ID NO: 739080 - protein, 123 aa, Homo sapiens
PETSRIHFQQEHWPSQLLLRESLEDMMLHSALGLCLLLVTVSSNLAIAIKKEKRPPQTLSRGWGDDITWVQTYEEGLFYAQKSKKPLMVIHHLEDCQYSQALKKVFAQNEEIQEMAQNKWFHA

SEQ ID NO: 739081 - protein, 536 aa, Homo sapiens
RASRAARCLCGRRRRPGRQPRRGARRLAAAPGLNMRCSPGGVWLALAASLLHVSLQGEFQRKLYKELVKNYNPLERPVANDSQPLTVYFSLSLLQIMDVDEKNQVLTTNIWLQMSWTDHYLQWNVSEYPGVKTVRFPDGQIWKPDILLYNSADERFDATFHTNVLVNSSGHCQYLPPGIFKSSCYIDVRWFPFDVQHCKLKFGSWSYGGWSLDLQMQEADISGYIPNGEWDLVGIPGKRSERFYECCKEPYPDVTFTVTMRRRTLYYGLNLLIPCVLISALALLVFLLPADSGEKISLGITVLLSLTVFMLLVAEIMPATSDSVPLIAQYFASTMIIVGLSVVVTVIVLQYHHHDPDGGKMPKWTRVILLNWCAWFLRMKRPGEDKVRPACQHKQRRCSLASVEMSAVAPPPASNGNLLYIGFRGLDGVHCVPTPDSGVVCGRMACSPTHDEHLLHGGQPPEGDPDLAKILEEVRYIANRFRCQDESEAVCSEWKFAACVVDRLCLMAFSVFTIICTIGILMSAPNFVEAVSKDFA

SEQ ID NO: 739082 - protein, 536 aa, Homo sapiens; identical to SEQ ID NO: 739081

SEQ ID NO: 739083 - protein, 321 aa, Homo sapiens
MQEADISGYIPNGEWDLVGIPGKRSERFYECCKEPYPDVTFTVTMRRRTLYYGLNLLIPCVLISALALLVFLLPADSGEKISLGITVLLSLTVFMLLVAEIMPATSDSVPLIAQYFASTMIIVGLSVVVTVIVLQYHHHDPDGGKMPKWTRVILLNWCAWFLRMKRPGEDKVRPACQHKQRRCSLASVEMSAVAPPPASNGNLLYIGFRGLDGVHCVPTPDSGVVCGRMACSPTHDEHLLHGGQPPEGDPDLAKILEEVRYIANRFRCQDESEAVCSEWKFAACVVDRLCLMAFSVFTIICTIGILMSAPNFVEAVSKDFA

SEQ ID NO: 739084 - protein, 536 aa, Homo sapiens; identical to SEQ ID NO: 739081

SEQ ID NO: 739085 - protein, 494 aa, Homo sapiens
EPPARVFSPQVSLQGEFQRKLYKELVKNYNPLERPVANDSQPLTVYFSLSLLQIMDVDEKNQVLTTNIWLQMSWTDHYLQWNVSEYPGVKTVRFPDGQIWKPDILLYNSADERFDATFHTNVLVNSSGHCQYLPPGIFKSSCYIDVRWFPFDVQHCKLKFGSWSYGGWSLDLQMQEADISGYIPNGEWDLVGIPGKRSERFYECCKEPYPDVTFTVTMRRRTLYYGLNLLIPCVLISALALLVFLLPADSGEKISLGITVLLSLTVFMLLVAEIMPATSDSVPLIAQYFASTMIIVGLSVVVTVIVLQYHHHDPDGGKMPKWTRVILLNWCAWFLRMKRPGEDKVRPACQHKQRRCSLASVEMSAVAPPPASNGNLLYIGFRGLDGVHCVPTPDSGVVCGRMACSPTHDEHLLHGGQPPEGDPDLAKILEEVRYIANRFRCQDESEAVCSEWKFAACVVDRLCLMAFSVFTIICTIGILMSAPNFVEAVSKDFA

SEQ ID NO: 739086 - protein, 412 aa, Homo sapiens
MQKYCIYQHFQFQLLIQHLWIAANCDIADERFDATFHTNVLVNSSGHCQYLPPGIFKSSCYIDVRWFPFDVQHCKLKFGSWSYGGWSLDLQMQEADISGYIPNGEWDLVGIPGKRSERFYECCKEPYPDVTFTVTMRRRTLYYGLNLLIPCVLISALALLVFLLPADSGEKISLGITVLLSLTVFMLLVAEIMPATSDSVPLIAQYFASTMIIVGLSVVVTVIVLQYHHHDPDGGKMPKWTRVILLNWCAWFLRMKRPGEDKVRPACQHKQRRCSLASVEMSAVAPPPASNGNLLYIGFRGLDGVHCVPTPDSGVVCGRMACSPTHDEHLLHGGQPPEGDPDLAKILEEVRYIANRFRCQDESEAVCSEWKFAACVVDRLCLMAFSVFTIICTIGILMSAPNFVEAVSKDFA

SEQ ID NO: 739087 - protein, 536 aa, Homo sapiens; identical to SEQ ID NO: 739081

SEQ ID NO: 739088 - protein, 321 aa, Homo sapiens; identical to SEQ ID NO: 739083

SEQ ID NO: 739089 - protein, 321 aa, Homo sapiens; identical to SEQ ID NO: 739083

SEQ ID NO: 739090 - protein, 321 aa, Homo sapiens; identical to SEQ ID NO: 739083

SEQ ID NO: 739091 - protein, 83 aa, Homo sapiens
SPFPGGSGGSGAVALLNCGLTGAAPPVGGVGYKGSSPAGRHIAPAKSSVPLAIFQPRSHEGHGGGERWSRESSAGGPAWWPRP

SEQ ID NO: 739092 - protein, 117 aa, Homo sapiens
CPHSPGFYLISPSEFERFSLSTKWLVEPRCLVDSAETKNHRPGNGAGPKKAPSRARNSGTQSDGEEKQPGLVMERALLSDERVLKEIQSTLEGDRGSGNWRSHRAAVGCSLSNGGAE

SEQ ID NO: 739093 - protein, 112 aa, Homo sapiens
CPHSPGFYLISPSEFERFSLSTKWLVEPRCLVDSAETKNHRPGNGAGPKKAPSRARNSGTQSDGEEKQPGLVMERALLSDERAATGVHIERPWGAASAMAEQSEWLSVQAAR

SEQ ID NO: 739094 - protein, 86 aa, Homo sapiens
IGIIPHRQCQPWDSNLHRLLPLPQCLQGPTAVKCEIQSNPDGGASRRLTFSEFYKRVSPLPVFEDDIFVRLYLPHVSVASEFLELG

SEQ ID NO: 739095 - protein, 88 aa, Homo sapiens
AACLSAALGYLDVRIVDTDYSSFAVLYIYKELEGALSTMVQLYSRTQDVSPQALKSFQDFYPTLGLPKDMMVMLPQSDACNPESKEAP

SEQ ID NO: 739096 - protein, 89 aa, Homo sapiens
ILTLLWAPTAQAEVLLQPDFNAEKGFLGKKDHLSMSTRAIRPTEEGGLHVHMEFPGADGCNQVDAEYLESLHPPPPACGMPCGTSLSIQ

SEQ ID NO: 739097 - protein, 1387 aa, Homo sapiens
MHTLLAATKDSLAMDPPVVNRPKKSKTKKAPIKTITKAAPAAPPVPAANEIATNKPKITWQALNLPVITQISQALPTTEVTNTQASSVTAQPKKANKMKRVTAKAAQGSQSPTGHEGGTIQLKSPLQVLKLPVISQNIHAPIANESASSQALITSIKPKKASKAKKAANKAIASATEVSLAATATHTATTQGQITNETASIHTTAASIRTKKASKARKTIAKVINTDTEHIEALNVTDAATRQIEASVVAIRPKKSKGKKAASRGPNSVSEISEAPLATQIVTNQALAATLRVKRGSRARKAATKARATESQTPNADQGAQAKIASAQTNVSALETQVAAAVQALADDYLAQLSLEPTTRTRGKRNRKSKHLNGDERSGSNYRRIPWGRRPAPPRDVAILQERANKLVKYLLVKDQTKIPIKRSDMLRDVIQEYDEYFPEIIERASYTLEKMFRVNLKEIDKQSSLYILISTQESSAGILGTTKDTPKLGLLMVILSVIFMNGNKASEAVIWEVLRKLGLRPGVRHSLFGEVRKLITDEFVKQKYLEYKRVPNSRPPEYEFFWGLRSYHETSKMKVLKFACRVQKKDPKDWAVQYREAVEMEVQAAAVAVAEAEARAEARAQMGIGEEAVAGPWNWDDMDIDCLTREELGDDAQAWSRFSFEIEARAQENADASTNVNFSRGASTRAGFSDGASISFNGAPSSSGGFSGGPGITFGVAPSTSASFSNTASISFGGTLSTSSSFSSAASISFGCAHSTSTSFSSEASISFGGMPCTSASFSGGVSSSFSGPLSTSATFSGGASSGFGGTLSTTAGFSGVLSTSTSFGSAPTTSTVFSSALSTSTGFGGILSTSVCFGGSPSSSGSFGGTLSTSICFGGSPCTSTGFGGTLSTSVSFGGSSSTSANFGGTLSTSICFDGSPSTGAGFGGALNTSASFGSVLNTSTGFGGAMSTSADFGGTLSTSVCFGGSPGTSVSFGSALNTNAGYGGAVSTNTDFGGTLSTSVCFGGSPSTSAGFGGALNTNASFGCAVSTSASFSGAVSTSACFSGAPITNPGFGGAFSTSAGFGGALSTAADFGGTPSNSIGFGAAPSTSVSFGGAHGTSLCFGGAPSTSLCFGSASNTNLCFGGPPSTSACFSGATSPSFCDGPSTSTGFSFGNGLSTNAGFGGGLNTSAGFGGGLGTSAGFSGGLSTSSGFDGGLGTSAGFGGGPGTSTGFGGGLGTSAGFSGGLGTSAGFGGGLVTSDGFGGGLGTNASFGSTLGTSAGFSGGLSTSDGFGSRPNASFDRGLSTIIGFGSGSNTSTGFTGEPSTSTGFSSGPSSIVGFSGGPSTGVGFCSGPSTSGFSGGPSTGAGFGGGPNTGAGFGGGPSTSAGFGSGAASLGACGFSYG

SEQ ID NO: 739098 - protein, 738 aa, Homo sapiens
GDRLRHKERLGESRRLLDSRRRGSPVTRPPRKMDRRNDYGYRVPLFQGPLPPPGSLGLPFPPDIQTETTEEDSVLLMHTLLAATKDSLAMDPPVVNRPKKSKTKKAPIKTITKAAPAAPPVPAANEIATNKPKITWQALNLPVITQISQALPTTEVTNTQASSVTAQPKKANKMKRVTAKAAQGSQSPTGHEGGTIQLKSPLQVLKLPVISQNIHAPIANESASSQALITSIKPKKASKAKKAANKAIASATEVSLAATATHTATTQGQITNETASIHTTAASIRTKKASKARKTIAKVINTDTEHIEALNVTDAATRQIEASVVAIRPKKSKGKKAASRGPNSVSEISEAPLATQIVTNQALAATLRVKRGSRARKAATKARATESQTPNADQGAQAKIASAQTNVSALETQVAAAVQALADDYLAQLSLEPTTRTRGKRNRKSKHLNGDERSGSNYRRIPWGRRPAPPRDVAILQERANKLVKYLLVKDQTKIPIKRSDMLRDVIQEYDEYFPEIIERASYTLEKMFRVNLKEIDKQSSLYILISTQESSAGILGTTKDTPKLGLLMVILSVIFMNGNKASEAVIWEVLRKLGLRPGVRHSLFGEVRKLITDEFVKQKYLEYKRVPNSRPPEYEFFWGLRSYHETSKMKVLKFACRVQKKDPKDWAVQYREAVEMEVQAAAVAVAEAEARAEIYSPCLQIPLINCSSPSHGAKVHPWNLCPHSSQGSYGQSAEGVM

SEQ ID NO: 739099 - protein, 713 aa, Homo sapiens
GDRLRHKERLGESRRLLDSRRRGSPVTRPPRKMDRRNDYGYRVPLFQGPLPPPGSLGLPFPPDIQTETTEEDSVLLMHTLLAATKDSLAMDPPVVNRPKKSKTKKAPIKTITKAAPAAPPVPAANEIATNKPKITWQALNLPVITQISQALPTTEVTNTQASSVTAQPKKANKMKRVTAKAAQGSQSPTGHEGGTIQLKSPLQVLKLPVISQNIHAPIANESASSQALITSIKPKKASKAKKAANKAIASATEVSLAATATHTATTQGQITNETASIHTTAASIRTKKASKARKTIAKVINTDTEHIEALNVTDAATRQIEASVVAIRPKKSKGKKAASRGPNSVSEISEAPLATQIVTNQALAATLRVKRGSRARKAATKARATESQTPNADQGAQAKIASAQTNVSALETQVAAAVQALADDYLAQLSLEPTTRTRGKRNRKSKHLNGDERSGSNYRRIPWGRRPAPPRDVAILQERANKLVKYLLVKDQTKIPIKRSDMLRDVIQEYDEYFPEIIERASYTLEKMFRVNLKEIDKQSSLYILISTQESSAGILGTTKDTPKLGLLMVILSVIFMNGNKASEAVIWEVLRKLGLRPGVRHSLFGEVRKLITDEFVKQKYLEYKRVPNSRPPEYEFFWGLRSYHETSKMKVLKFACRVQKKDPKDWAVQYREAVEMEVQAAAVAVAEAEARAEWFQHQHWLYWRTQHQHGLQ

SEQ ID NO: 739100 - protein, 316 aa, Homo sapiens
GDRLRHKERLGESRRLLDSRRRGSPVTRPPRKMDRRNDYGYRVPLFQSKHLNGDERSGSNYRRIPWGRRPAPPRDVAILQERANKLVKYLLVKDQTKIPIKRSDMLRDVIQEYDEYFPEIIERASYTLEKMFRVNLKEIDKQSSLYILISTQESSAGILGTTKDTPKLGLLMVILSVIFMNGNKASEAVIWEVLRKLGLRPGVRHSLFGEVRKLITDEFVKQKYLEYKRVPNSRPPEYEFFWGLRSYHETSKMKVLKFACRVQKKDPKDWAVQYREAVEMEVQAAAVAVAEAEARAEWFQHQHWLYWRTQHQHGLQ

SEQ ID NO: 739101 - protein, 341 aa, Homo sapiens
GDRLRHKERLGESRRLLDSRRRGSPVTRPPRKMDRRNDYGYRVPLFQSKHLNGDERSGSNYRRIPWGRRPAPPRDVAILQERANKLVKYLLVKDQTKIPIKRSDMLRDVIQEYDEYFPEIIERASYTLEKMFRVNLKEIDKQSSLYILISTQESSAGILGTTKDTPKLGLLMVILSVIFMNGNKASEAVIWEVLRKLGLRPGVRHSLFGEVRKLITDEFVKQKYLEYKRVPNSRPPEYEFFWGLRSYHETSKMKVLKFACRVQKKDPKDWAVQYREAVEMEVQAAAVAVAEAEARAEIYSPCLQIPLINCSSPSHGAKVHPWNLCPHSSQGSYGQSAEGVM

SEQ ID NO: 739102 - protein, 1602 aa, Homo sapiens
GDRLRHKERLGESRRLLDSRRRGSPVTRPPRKMDRRNDYGYRVPLFQGPLPPPGSLGLPFPPDIQTETTEEDSVLLMHTLLAATKDSLAMDPPVVNRPKKSKTKKAPIKTITKAAPAAPPVPAANEIATNKPKITWQALNLPVITQISQALPTTEVTNTQASSVTAQPKKANKMKRVTAKAAQGSQSPTGHEGGTIQLKSPLQVLKLPVISQNIHAPIANESASSQALITSIKPKKASKAKKAANKAIASATEVSLAATATHTATTQGQITNETASIHTTAASIRTKKASKARKTIAKVINTDTEHIEALNVTDAATRQIEASVVAIRPKKSKGKKAASRGPNSVSEISEAPLATQIVTNQALAATLRVKRGSRARKAATKARATESQTPNADQGAQAKIASAQTNVSALETQVAAAVQALADDYLAQLSLEPTTRTRGKRNRKSKHLNGDERSGSNYRRIPWGRRPAPPRDVAILQERANKLVKYLLVKDQTKIPIKRSDMLRDVIQEYDEYFPEIIERASYTLEKMFRVNLKEIDKQSSLYILISTQESSAGILGTTKDTPKLGLLMVILSVIFMNGNKASEAVIWEVLRKLGLRPGYDWALSALAVRVVLWQERMVLGLHQSGGLVDGWGAGLGRGPRVLTWVDDGQMVLNSLLSLSLMSSVCSKLEMLDRPSGIPDKEASGLNCLLLVAMCSYFLHFIETAPCAREVSSMLGNASALIWAVLICVHVVIFPIVRVRHSLFGEVRKLITDEFVKQKYLEYKRVPNSRPPEYEFFWGLRSYHETSKMKVLKFACRVQKKDPKDWAVQYREAVEMEVQAAAVAVAEAEARAEARAQMGIGEEAVAGPWNWDDMDIDCLTREELGDDAQAWSRFSFEIEARAQENADASTNVNFSRGASTRAGFSDGASISFNGAPSSSGGFSGGPGITFGVAPSTSASFSNTASISFGGTLSTSSSFSSAASISFGCAHSTSTSFSSEASISFGGMPCTSASFSGGVSSSFSGPLSTSATFSGGASSGFGGTLSTTAGFSGVLSTSTSFGSAPTTSTVFSSALSTSTGFGGILSTSVCFGGSPSSSGSFGGTLSTSICFGGSPCTSTGFGGTLSTSVSFGGSSSTSANFGGTLSTSICFDGSPSTGAGFGGALNTSASFGSVLNTSTGFGGAMSTSADFGGTLSTSVCFGGSPGTSVSFGSALNTNAGYGGAVSTNTDFGGTLSTSVCFGGSPSTSAGFGGALNTNASFGCAVSTSASFSGAVSTSACFSGAPITNPGFGGAFSTSAGFGGALSTAADFGGTPSNSIGFGAAPSTSVSFGGAHGTSLCFGGAPSTSLCFGSASNTNLCFGGPPSTSACFSGATSPSFCDGPSTSTGFSFGNGLSTNAGFGGGLNTSAGFGGGLGTSAGFSGGLSTSSGFDGGLGTSAGFGGGPGTSTGFGGGLGTSAGFSGGLGTSAGFGGGLVTSDGFGGGLGTNASFGSTLGTSAGFSGGLSTSDGFGSRPNASFDRGLSTIIGFGSGSNTSTGFTGEPSTSTGFSSGPSSIVGFSGGPSTGVGFCSGPSTSGFSGGPSTGAGFGGGPNTGAGFGGGPSTSAGFGSGAASLGACGFSYG

SEQ ID NO: 739103 - protein, 1577 aa, Homo sapiens
GIGSDTRRGLERADAFWIQEDEGPLPPPGSLGLPFPPDIQTETTEEDSVLLMHTLLAATKDSLAMDPPVVNRPKKSKTKKAPIKTITKAAPAAPPVPAANEIATNKPKITWQALNLPVITQISQALPTTEVTNTQASSVTAQPKKANKMKRVTAKAAQGSQSPTGHEGGTIQLKSPLQVLKLPVISQNIHAPIANESASSQALITSIKPKKASKAKKAANKAIASATEVSLAATATHTATTQGQITNETASIHTTAASIRTKKASKARKTIAKVINTDTEHIEALNVTDAATRQIEASVVAIRPKKSKGKKAASRGPNSVSEISEAPLATQIVTNQALAATLRVKRGSRARKAATKARATESQTPNADQGAQAKIASAQTNVSALETQVAAAVQALADDYLAQLSLEPTTRTRGKRNRKSKHLNGDERSGSNYRRIPWGRRPAPPRDVAILQERANKLVKYLLVKDQTKIPIKRSDMLRDVIQEYDEYFPEIIERASYTLEKMFRVNLKEIDKQSSLYILISTQESSAGILGTTKDTPKLGLLMVILSVIFMNGNKASEAVIWEVLRKLGLRPGYDWALSALAVRVVLWQERMVLGLHQSGGLVDGWGAGLGRGPRVLTWVDDGQMVLNSLLSLSLMSSVCSKLEMLDRPSGIPDKEASGLNCLLLVAMCSYFLHFIETAPCAREVSSMLGNASALIWAVLICVHVVIFPIVRVRHSLFGEVRKLITDEFVKQKYLEYKRVPNSRPPEYEFFWGLRSYHETSKMKVLKFACRVQKKDPKDWAVQYREAVEMEVQAAAVAVAEAEARAEARAQMGIGEEAVAGPWNWDDMDIDCLTREELGDDAQAWSRFSFEIEARAQENADASTNVNFSRGASTRAGFSDGASISFNGAPSSSGGFSGGPGITFGVAPSTSASFSNTASISFGGTLSTSSSFSSAASISFGCAHSTSTSFSSEASISFGGMPCTSASFSGGVSSSFSGPLSTSATFSGGASSGFGGTLSTTAGFSGVLSTSTSFGSAPTTSTVFSSALSTSTGFGGILSTSVCFGGSPSSSGSFGGTLSTSICFGGSPCTSTGFGGTLSTSVSFGGSSSTSANFGGTLSTSICFDGSPSTGAGFGGALNTSASFGSVLNTSTGFGGAMSTSADFGGTLSTSVCFGGSPGTSVSFGSALNTNAGYGGAVSTNTDFGGTLSTSVCFGGSPSTSAGFGGALNTNASFGCAVSTSASFSGAVSTSACFSGAPITNPGFGGAFSTSAGFGGALSTAADFGGTPSNSIGFGAAPSTSVSFGGAHGTSLCFGGAPSTSLCFGSASNTNLCFGGPPSTSACFSGATSPSFCDGPSTSTGFSFGNGLSTNAGFGGGLNTSAGFGGGLGTSAGFSGGLSTSSGFDGGLGTSAGFGGGPGTSTGFGGGLGTSAGFSGGLGTSAGFGGGLVTSDGFGGGLGTNASFGSTLGTSAGFSGGLSTSDGFGSRPNASFDRGLSTIIGFGSGSNTSTGFTGEPSTSTGFSSGPSSIVGFSGGPSTGVGFCSGPSTSGFSGGPSTGAGFGGGPNTGAGFGGGPSTSAGFGSGAASLGACGFSYG

SEQ ID NO: 739104 - protein, 1526 aa, Homo sapiens
MHTLLAATKDSLAMDPPVVNRPKKSKTKKAPIKTITKAAPAAPPVPAANEIATNKPKITWQALNLPVITQISQALPTTEVTNTQASSVTAQPKKANKMKRVTAKAAQGSQSPTGHEGGTIQLKSPLQVLKLPVISQNIHAPIANESASSQALITSIKPKKASKAKKAANKAIASATEVSLAATATHTATTQGQITNETASIHTTAASIRTKKASKARKTIAKVINTDTEHIEALNVTDAATRQIEASVVAIRPKKSKGKKAASRGPNSVSEISEAPLATQIVTNQALAATLRVKRGSRARKAATKARATESQTPNADQGAQAKIASAQTNVSALETQVAAAVQALADDYLAQLSLEPTTRTRGKRNRKSKHLNGDERSGSNYRRIPWGRRPAPPRDVAILQERANKLVKYLLVKDQTKIPIKRSDMLRDVIQEYDEYFPEIIERASYTLEKMFRVNLKEIDKQSSLYILISTQESSAGILGTTKDTPKLGLLMVILSVIFMNGNKASEAVIWEVLRKLGLRPGYDWALSALAVRVVLWQERMVLGLHQSGGLVDGWGAGLGRGPRVLTWVDDGQMVLNSLLSLSLMSSVCSKLEMLDRPSGIPDKEASGLNCLLLVAMCSYFLHFIETAPCAREVSSMLGNASALIWAVLICVHVVIFPIVRVRHSLFGEVRKLITDEFVKQKYLEYKRVPNSRPPEYEFFWGLRSYHETSKMKVLKFACRVQKKDPKDWAVQYREAVEMEVQAAAVAVAEAEARAEARAQMGIGEEAVAGPWNWDDMDIDCLTREELGDDAQAWSRFSFEIEARAQENADASTNVNFSRGASTRAGFSDGASISFNGAPSSSGGFSGGPGITFGVAPSTSASFSNTASISFGGTLSTSSSFSSAASISFGCAHSTSTSFSSEASISFGGMPCTSASFSGGVSSSFSGPLSTSATFSGGASSGFGGTLSTTAGFSGVLSTSTSFGSAPTTSTVFSSALSTSTGFGGILSTSVCFGGSPSSSGSFGGTLSTSICFGGSPCTSTGFGGTLSTSVSFGGSSSTSANFGGTLSTSICFDGSPSTGAGFGGALNTSASFGSVLNTSTGFGGAMSTSADFGGTLSTSVCFGGSPGTSVSFGSALNTNAGYGGAVSTNTDFGGTLSTSVCFGGSPSTSAGFGGALNTNASFGCAVSTSASFSGAVSTSACFSGAPITNPGFGGAFSTSAGFGGALSTAADFGGTPSNSIGFGAAPSTSVSFGGAHGTSLCFGGAPSTSLCFGSASNTNLCFGGPPSTSACFSGATSPSFCDGPSTSTGFSFGNGLSTNAGFGGGLNTSAGFGGGLGTSAGFSGGLSTSSGFDGGLGTSAGFGGGPGTSTGFGGGLGTSAGFSGGLGTSAGFGGGLVTSDGFGGGLGTNASFGSTLGTSAGFSGGLSTSDGFGSRPNASFDRGLSTIIGFGSGSNTSTGFTGEPSTSTGFSSGPSSIVGFSGGPSTGVGFCSGPSTSGFSGGPSTGAGFGGGPNTGAGFGGGPSTSAGFGSGAASLGACGFSYG

SEQ ID NO: 739105 - protein, 814 aa, Homo sapiens [sequence omitted]

SEQ ID NO: 739106 - protein, 1442 aa, Homo sapiens
GDRLRHKERLGESRRLLDSRRRGSPVTRPPRKMDRRNDYGYRVPLFQGPLPPPGSLGLPFPPDIQTETTEEDSVLLMHTLLAATKDSLAMDPPVVNRPKKSKTKKAPIKTITKAAPAAPPVPAANEIATNKPKITWQALNLPVITQISQALPTTEVTNTQASSVTAQPKKANKMKRVTAKAAQGSQSPTGHEGGTIQLKSPLQVLKLPVISQNIHAPIANESASSQALITSIKPKKASKAKKAANKAIASATEVSLAATATHTATTQGQITNETASIHTTAASIRTKKASKARKTIAKVINTDTEHIEALNVTDAATRQIEASVVAIRPKKSKGKKAASRGPNSVSEISEAPLATQIVTNQALAATLRVKRGSRARKAATKARATESQTPNADQGAQAKIASAQTNVSALETQVAAAVQALADDYLAQLSLEPTTRTRGKRNRKSKHLNGDERSGSNYRRIPWGRRPAPPRDVAILQERANKLVKYLLVKDQTKIPIKRSDMLRDVIQEYDEYFPEIIERASYTLEKMFRVNLKEIDKQSSLYILISTQESSAGILGTTKDTPKLGLLMVILSVIFMNGNKASEAVIWEVLRKLGLRPGYLEYKRVPNSRPPEYEFFWGLRSYHETSKMKVLKFACRVQKKDPKDWAVQYREAVEMEVQAAAVAVAEAEARAEARAQMGIGEEAVAGPWNWDDMDIDCLTREELGDDAQAWSRFSFEIEARAQENADASTNVNFSRGASTRAGFSDGASISFNGAPSSSGGFSGGPGITFGVAPSTSASFSNTASISFGGTLSTSSSFSSAASISFGCAHSTSTSFSSEASISFGGMPCTSASFSGGVSSSFSGPLSTSATFSGGASSGFGGTLSTTAGFSGVLSTSTSFGSAPTTSTVFSSALSTSTGFGGILSTSVCFGGSPSSSGSFGGTLSTSICFGGSPCTSTGFGGTLSTSVSFGGSSSTSANFGGTLSTSICFDGSPSTGAGFGGALNTSASFGSVLNTSTGFGGAMSTSADFGGTLSTSVCFGGSPGTSVSFGSALNTNAGYGGAVSTNTDFGGTLSTSVCFGGSPSTSAGFGGALNTNASFGCAVSTSASFSGAVSTSACFSGAPITNPGFGGAFSTSAGFGGALSTAADFGGTPSNSIGFGAAPSTSVSFGGAHGTSLCFGGAPSTSLCFGSASNTNLCFGGPPSTSACFSGATSPSFCDGPSTSTGFSFGNGLSTNAGFGGGLNTSAGFGGGLGTSAGFSGGLSTSSGFDGGLGTSAGFGGGPGTSTGFGGGLGTSAGFSGGLGTSAGFGGGLVTSDGFGGGLGTNASFGSTLGTSAGFSGGLSTSDGFGSRPNASFDRGLSTIIGFGSGSNTSTGFTGEPSTSTGFSSGPSSIVGFSGGPSTGVGFCSGPSTSGFSGGPSTGAGFGGGPNTGAGFGGGPSTSAGFGSGAASLGACGFSYG

SEQ ID NO: 739107 - protein, 1602 aa, Homo sapiens; identical to SEQ ID NO: 739102

SEQ ID NO: 739108 - protein, 787 aa, Homo sapiens
MEVQAAAVAVAEAEARAEARAQMGIGEEAVAGPWNWDDMDIDCLTREELGDDAQAWSRFSFEIEARAQENADASTNVNFSRGASTRAGFSDGASISFNGAPSSSGGFSGGPGITFGVAPSTSASFSNTASISFGGTLSTSSSFSSAASISFGCAHSTSTSFSSEASISFGGMPCTSASFSGGVSSSFSGPLSTSATFSGGASSGFGGTLSTTAGFSGVLSTSTSFGSAPTTSTVFSSALSTSTGFGGILSTSVCFGGSPSSSGSFGGTLSTSICFGGSPCTSTGFGGTLSTSVSFGGSSSTSANFGGTLSTSICFDGSPSTGAGFGGALNTSASFGSVLNTSTGFGGAMSTSADFGGTLSTSVCFGGSPGTSVSFGSALNTNAGYGGAVSTNTDFGGTLSTSVCFGGSPSTSAGFGGALNTNASFGCAVSTSASFSGAVSTSACFSGAPITNPGFGGAFSTSAGFGGALSTAADFGGTPSNSIGFGAAPSTSVSFGGAHGTSLCFGGAPSTSLCFGSASNTNLCFGGPPSTSACFSGATSPSFCDGPSTSTGFSFGNGLSTNAGFGGGLNTSAGFGGGLGTSAGFSGGLSTSSGFDGGLGTSAGFGGGPGTSTGFGGGLGTSAGFSGGLGTSAGFGGGLVTSDGFGGGLGTNASFGSTLGTSAGFSGGLSTSDGFGSRPNASFDRGLSTIIGFGSGSNTSTGFTGEPSTSTGFSSGPSSIVGFSGGPSTGVGFCSGPSTSGFSGGPSTGAGFGGGPNTGAGFGGGPSTSAGFGSGAASLGACGFSYG

SEQ ID NO: 739109 - protein, 637 aa, Homo sapiens
GDRLRHKERLGESRRLLDSRRRGSPVTRPPRKMDRRNDYGYRVPLFQGPLPPPGSLGLPFPPDIQTETTEEDSVLLMHTLLAATKDSLAMDPPVVNRPKKSKTKKAPIKTITKAAPAAPPVPAANEIATNKPKITWQALNLPVITQISQALPTTEVTNTQASSVTAQPKKANKMKRVTAKAAQGSQSPTGHEGGTIQLKSPLQVLKLPVISQNIHAPIANESASSQALITSIKPKKASKAKKAANKAIASATEVSLAATATHTATTQGQITNETASIHTTAASIRTKKASKARKTIAKVINTDTEHIEALNVTDAATRQIEASVVAIRPKKSKGKKAASRGPNSVSEISEAPLATQIVTNQALAATLRVKRGSRARKAATKARATESQTPNADQGAQAKIASAQTNVSALETQVAAAVQALADDYLAQLSLEPTTRTRGKRNRKSKHLNGDERSGSNYRRIPWGRRPAPPRDVAILQERANKLVKYLLVKDQTKIPIKRSDMLRDVIQEYDEYFPEIIERASYTLEKMFRVNLKEIDKQSSLYILISTQESSAGILGTTKDTPKLGLLMVILSVIFMNGNKASEAVIWEVLRKLGLRPGYDWALSALAVRVVLWQERMVLGLHQSGGLVERVGCWTG

SEQ ID NO: 739110 - protein, 496 aa, Homo sapiens
GDRLRHKERLGESRRLLDSRRRGSPVTRPPRKMDRRNDYGYRVPLFQGPLPPPGSLGLPFPPDIQTETTEEDSVLLMHTLLAATKDSLAMDPPVVNRPKKSKTKKAPIKTITKAAPAAPPVPAANEIATNKPKITWQALNLPVITQISQALPTTEVTNTQASSVTAQPKKANKMKRVTAKAAQGSQSPTGHEGGTIQLKSPLQVLKLPVISQNIHAPIANESASSQALITSIKPKKASKAKKAANKAIASATEVSLAATATHTATTQGQITNETASIHTTAASIRTKKASKARKTIAKVINTDTEHIEALNVTDAATRQIEASVVAIRPKKSKGKKAASRGPNSVSEISEAPLATQIVTNQALAATLRVKRGSRARKAATKARATESQTPNADQGAQAKIASAQTNVSALETQVAAAVQALADDYLAQLSLEPTTRTRGKRNRKSKHLNGDERSGSNYRRIPWGRRPAPPRDVASRMASEVSDLFPMFTDTANKLQ

SEQ ID NO: 739111 - protein, 172 aa, Homo sapiens
GDRLRHKERLGESRRLLDSRRRGSPVTRPPRKMDRRNDYGYRVPLFQGPLPPPGSLGLPFPPDIQTETTEEDSVLLMHTLLAATKDSLAMDPPVVNRPKKSKTKKAPIKTITKAAPAAPPVPAANEIATNKPKITWQALNLPVITQITKVHPWNLCPHSSQGSYGQSAEGVM

SEQ ID NO: 739112 - protein, 69 aa, Homo sapiens
NLNLLTTDVGIFTDCPQLPSPNITFILTSQLPQKPRSMKYYKLETNSLLYTNCKSKPRRKRIYAYLYSK

SEQ ID NO: 739113 - protein, 146 aa, Homo sapiens
MCQRLWPWPANQPLPGGLLPRPLSLAPSSSSSCCSPPCSQDGRMAAQGAPRFLLTFDFDETIVDENSDDSIVRAAPGQRLPESLRATYREGFYNEYMQRVFKYLGEQGVRPRDLSAIYEAIPLSPGMSDLLQFVAKQGACFEVILI

SEQ ID NO: 739114 - protein, 121 aa, Homo sapiens
MSGCFPVSGLRCLSRDGRMAAQGAPRFLLTFDFDETIVDENSDDSIVRAAPGQRLPESLRATYREGFYNEYMQRVFKYLGEQGVRPRDLSAIYEAIPLSPGMSDLLQFVAKQGACFEVILI

SEQ ID NO: 739115 - protein, 121 aa, Homo sapiens; identical to SEQ ID NO: 739114

SEQ ID NO: 739116 - protein, 121 aa, Homo sapiens; identical to SEQ ID NO: 739114

SEQ ID NO: 739117 - protein, 293 aa, Homo sapiens
MRRAAGGSTCGSACPSTSTRKKTPTKRPSSSPSPRARRAVAWALALAQAGALGAWGPRAVRAAQAPAQAGPSPQTPAPRRCMMWPRLRSTSRRPRGRAHRSPISTLSHRAGSASRTDDDVPSLHSEPVARSSSSQGSLMEQISSVVTRFTANISELNSMMLSTAAPSPGVGAPLCSSYLIPKEIQLPTTMTTFAEIQPLPAIEVTGGAQPAAGAQAAGDAARESPAAGPEAAAAKPDLEELVALTPPSPFRDSVDSGSTTPNSPVSESALCIPSSPKYDTLIIRDYTQSSSSL

SEQ ID NO: 739118 - protein, 1180 aa, Homo sapiens
MVLLLILSVLLLKEDVRGSAQSSERRVVAHMPGDIIIGALFSVHHQPTVDKVHERKCGAVREQYGIQRVEAMLHTLERINSDPTLLPNITLGCEIRDSCWHSAVALEQSIEFIRDSLISSEEEEGLVRCVDGSSSSFRSKKPIVGVIGPGSSSVAIQVQNLLQLFNIPQIAYSATSMDLSDKTLFKYFMRVVPSDAQQARAMVDIVKRYNWTYVSAVHTEGNYGESGMEAFKDMSAKEGICIAHSYKIYSNAGEQSFDKLLKKLTSHLPKARVVACFCEGMTVRGLLMAMRRLGLAGEFLLLGSDGWADRYDVTDGYQREAVGGITIKLQSPDVKWFDDYYLKLRPETNHRNPWFQEFWQHRFQCRLEGFPQENSKYNKTCNSSLTLKTHHVQDSKMGFVINAIYSMAYGLHNMQMSLCPGYAGLCDAMKPIDGRKLLESLMKTNFTGVSGDTILFDENGDSPGRYEIMNFKEMGKDYFDYINVGSWDNGELKMDDDEVWSKKSNIIRSVCSEPCEKGQIKVIRKGEVSCCWTCTPCKENEYVFDEYTCKACQLGSWPTDDLTGCDLIPVQYLRWGDPEPIAAVVFACLGLLATLFVTVVFIIYRDTPVVKSSSRELCYIILAGICLGYLCTFCLIAKPKQIYCYLQRIGIGLSPAMSYSALVTKTNRIARILAGSKKKICTKKPRFMSACAQLVIAFILICIQLGIIVALFIMEPPDIMHDYPSIREVYLICNTTNLGVVTPLGYNGLLILSCTFYAFKTRNVPANFNEAKYIAFTMYTTCIIWLAFVPIYFGSNYKIITMCFSVSLSATVALGCMFVPKVYIILAKPERNVRSAFTTSTVVRMHVGDGKSSSAASRSSSLVNLWKRRGSSGETLSSNGKSVTWAQNEKSSRGQHLWQRLSIHINKKENPNQTAVIKPFPKSTESRGLGAGAGAGGSAGGVGATGGAGCAGAGPGGPESPDAGPKALYDVAEAEEHFPAPARPRSPSPISTLSHRAGSASRTDDDVPSLHSEPVARSSSSQGSLMEQISSVVTRFTANISELNSMMLSTAAPSPGVGAPLCSSYLIPKEIQLPTTMTTFAEIQPLPAIEVTGGAQPAAGAQAAGDAARESPAAGPEAAAAKPDLEELVALTPPSPFRDSVDSGSTTPNSPVSESALCIPSSPKYDTLIIRDYTQSSSSL

SEQ ID NO: 739119 - protein, 1212 aa, Homo sapiens
MVLLLILSVLLLKEDVRGSAQSSERRVVAHMPGDIIIGALFSVHHQPTVDKVHERKCGAVREQYGIQRVEAMLHTLERINSDPTLLPNITLGCEIRDSCWHSAVALEQSIEFIRDSLISSEEEEGLVRCVDGSSSSFRSKKPIVGVIGPGSSSVAIQVQNLLQLFNIPQIAYSATSMDLSDKTLFKYFMRVVPSDAQQARAMVDIVKRYNWTYVSAVHTEGNYGESGMEAFKDMSAKEGICIAHSYKIYSNAGEQSFDKLLKKLTSHLPKARVVACFCEGMTVRGLLMAMRRLGLAGEFLLLGSDGWADRYDVTDGYQREAVGGITIKLQSPDVKWFDDYYLKLRPETNHRNPWFQEFWQHRFQCRLEGFPQENSKYNKTCNSSLTLKTHHVQDSKMGFVINAIYSMAYGLHNMQMSLCPGYAGLCDAMKPIDGRKLLESLMKTNFTGVSGDTILFDENGDSPGRYEIMNFKEMGKDYFDYINVGSWDNGELKMDDDEVWSKKSNIIRSVCSEPCEKGQIKVIRKGEVSCCWTCTPCKENEYVFDEYTCKACQLGSWPTDDLTGCDLIPVQYLRWGDPEPIAAVVFACLGLLATLFVTVVFIIYRDTPVVKSSSRELCYIILAGICLGYLCTFCLIAKPKQIYCYLQRIGIGLSPAMSYSALVTKTNRIARILAGSKKKICTKKPRFMSACAQLVIAFILICIQLGIIVALFIMEPPDIMHDYPSIREVYLICNTTNLGVVTPLGYNGLLILSCTFYAFKTRNVPANFNEAKYIAFTMYTTCIIWLAFVPIYFGSNYKIITMCFSVSLSATVALGCMFVPKVYIILAKPERNVRSAFTTSTVVRMHVGDGKSSSAASRSSSLVNLWKRRGSSGETLRYKDRRLAQHKSEIECFTPKGSMGNGGRATMSSSNGKSVTWAQNEKSSRGQHLWQRLSIHINKKENPNQTAVIKPFPKSTESRGLGAGAGAGGSAGGVGATGGAGCAGAGPGGPESPDAGPKALYDVAEAEEHFPAPARPRSPSPISTLSHRAGSASRTDDDVPSLHSEPVARSSSSQGSLMEQISSVVTRFTANISELNSMMLSTAAPSPGVGAPLCSSYLIPKEIQLPTTMTTFAEIQPLPAIEVTGGAQPAAGAQAAGDAARESPAAGPEAAAAKPDLEELVALTPPSPFRDSVDSGSTTPNSPVSESALCIPSSPKYDTLIIRDYTQSSSSL

SEQ ID NO: 739120 - protein, 331 aa, Homo sapiens
MVLLLILSVLLLKEDVRGSAQSSERRVVAHMPGDIIIGALFSVHHQPTVDKVHERKCGAVREQYGIQRVEAMLHTLERINSDPTLLPNITLGCEIRDSCWHSAVALEQSIEFIRDSLISSEEEEGLVRCVDGSSSSFRSKKPIVGVIGPGSSSVAIQVQNLLQLFNIPQIAYSATSMDLSDKTLFKYFMRVVPSDAQQARAMVDIVKRYNWTYVSAVHTEGNYGESGMEAFKDMSAKEGICIAHSYKIYSNAGEQSFDKLLKKLTSHLPKARVVACFCEGMTVRGLLMAMRRLGLAGEFLLLGRNQMPSLLRSQRTASYGKTEENAKVASF

SEQ ID NO: 739121 - protein, 444 aa, Homo sapiens
MVLLLILSVLLLKEDVRGSAQSSERRVVAHMPGDIIIGALFSVHHQPTVDKVHERKCGAVREQYGIQRVEAMLHTLERINSDPTLLPNITLGCEIRDSCWHSAVALEQSIEFIRDSLISSEEEEGLVRCVDGSSSSFRSKKPIVGVIGPGSSSVAIQVQNLLQLFNIPQIAYSATSMDLSDKTLFKYFMRVVPSDAQQARAMVDIVKRYNWTYVSAVHTEGNYGESGMEAFKDMSAKEGICIAHSYKIYSNAGEQSFDKLLKKLTSHLPKARVVACFCEGMTVRGLLMAMRRLGLAGEFLLLGSDGWADRYDVTDGYQREAVGGITIKLQSPDVKWFDDYYLKLRPETNHRNPWFQEFWQHRFQCRLEGFPQENSKYNKTCNTLEAGSRRSGCEHSWVLVKAHFPAYRQPPSCYVHTWQKGREIQGMNQIFFVSSLSSHWYLFS

SEQ ID NO: 739122 - protein, 963 aa, Homo sapiens
WQEWASSKKDEFSPFPFSLAHIFARLFVCQHGIKQQESACQIWVLEPWTAQPPELDGWADRYDVTDGYQREAVGGITIKLQSPDVKWFDDYYLKLRPETNHRNPWFQEFWQHRFQCRLEGFPQENSKYNKTCNSSLTLKTHHVQDSKMGFVINAIYSMAYGLHNMQMSLCPGYAGLCDAMKPIDGRKLLESLMKTNFTGVSGDTILFDENGDSPGRYEIMNFKEMGKDYFDYINVGSWDNGELKMDDDEVWSKKSNIIRSVCSEPCEKGQIKVIRKGEVSCCWTCTPCKENEYVFDEYTCKACQLGSWPTDDLTGCDLIPVQYLRWGDPEPIAAVVFACLGLLATLFVTVVFIIYRDTPVVKSSSRELCYIILAGICLGYLCTFCLIAKPKQIYCYLQRIGIGLSPAMSYSALVTKTNRIARILAGSKKKICTKKPRFMSACAQLVIAFILICIQLGIIVALFIMEPPDIMHDYPSIREVYLICNTTNLGVVTPLGYNGLLILSCTFYAFKTRNVPANFNEAKYIAFTMYTTCIIWLAFVPIYFGSNYKIITMCFSVSLSATVALGCMFVPKVYIILAKPERNVRSAFTTSTVVRMHVGDGKSSSAASRSSSLVNLWKRRGSSGETLRYKDRRLAQHKSEIECFTPKGSMGNGGRATMSSSNGKSVTWAQNEKSSRGQHLWQRLSIHINKKENPNQTAVIKPFPKSTESRGLGAGAGAGGSAGGVGATGGAGCAGAGPGGPESPDAGPKALYDVAEAEEHFPAPARPRSPSPISTLSHRAGSASRTDDDVPSLHSEPVARSSSSQGSLMEQISSVVTRFTANISELNSMMLSTAAPSPGVGAPLCSSYLIPKEIQLPTTMTTFAEIQPLPAIEVTGGAQPAAGAQAAGDAARESPAAGPEAAAAKPDLEELVALTPPSPFRDSVDSGSTTPNSPVSESALCIPSSPKYDTLIIRDYTQSSSSL

SEQ ID NO: 739123 - protein, 985 aa, Homo sapiens
MEAFKDMSAKEGICIAHSYKIYSNAGEQSFDKLLKKLTSHLPKARVVACFCEGMTVRGLLMAMRRLGLAGEFLLLGSDGWADRYDVTDGYQREAVGGITIKLQSPDVKWFDDYYLKLRPETNHRNPWFQEFWQHRFQCRLEGFPQENSKYNKTCNSSLTLKTHHVQDSKMGFVINAIYSMAYGLHNMQMSLCPGYAGLCDAMKPIDGRKLLESLMKTNFTGVSGDTILFDENGDSPGRYEIMNFKEMGKDYFDYINVGSWDNGELKMDDDEVWSKKSNIIRSVCSEPCEKGQIKVIRKGEVSCCWTCTPCKENEYVFDEYTCKACQLGSWPTDDLTGCDLIPVQYLRWGDPEPIAAVVFACLGLLATLFVTVVFIIYRDTPVVKSSSRELCYIILAGICLGYLCTFCLIAKPKQIYCYLQRIGIGLSPAMSYSALVTKTNRIARILAGSKKKICTKKPRFMSACAQLVIAFILICIQLGIIVALFIMEPPDIMHDYPSIREVYLICNTTNLGVVTPLGYNGLLILSCTFYAFKTRNVPANFNEAKYIAFTMYTTCIIWLAFVPIYFGSNYKIITMCFSVSLSATVALGCMFVPKVYIILAKPERNVRSAFTTSTVVRMHVGDGKSSSAASRSSSLVNLWKRRGSSGETLRYKDRRLAQHKSEIECFTPKGSMGNGGRATMSSSNGKSVTWAQNEKSSRGQHLWQRLSIHINKKENPNQTAVIKPFPKSTESRGLGAGAGAGGSAGGVGATGGAGCAGAGPGGPESPDAGPKALYDVAEAEEHFPAPARPRSPSPISTLSHRAGSASRTDDDVPSLHSEPVARSSSSQGSLMEQISSVVTRFTANISELNSMMLSTAAPSPGVGAPLCSSYLIPKEIQLPTTMTTFAEIQPLPAIEVTGGAQPAAGAQAAGDAARESPAAGPEAAAAKPDLEELVALTPPSPFRDSVDSGSTTPNSPVSESALCIPSSPKYDTLIIRDYTQSSSSL

SEQ ID NO: 739124 - protein, 254 aa, Homo sapiens
MVLLLILSVLLLKEDVRGSAQSSERRVVAHMPGDIIIGALFSVHHQPTVDKVHERKCGAVREQYGIQRVEAMLHTLERINSDPTLLPNITLGCEIRDSCWHSAVALEQSIEFIRDSLISSEEEEGLVRCVDGSSSSFRSKKPIVGVIGPGSSSVAIQVQNLLQLFNIPQIAYSATSMDLSDKTLFKYFMRVVPSDAQQARAMVDIVKRYNWTYVSAVHTEGRGTKKEEMRKRDQTLMLSFMRFKLFSCLSLQRS

SEQ ID NO: 739125 - protein, 361 aa, Homo sapiens
MWVLTPAAFAGKLLSVFRQPLSSLWRSLVPLFCWLRATFWLLATKRRKQQLVLRGPDETKEEEEDPPLPTTPTSVNYHFTRQCNYKCGFCFHTAKTSFVLPLEEAKRGLLLLKEAGMEKINFSGGEPFLQDRGEYLGKLVRFCKVELRLPSVSIVSNGSLIRERWFQNYGEYLDILAISCDSFDEEVNVLIGRGQGKKNHVENLQKLRRWCRDYRVAFKINSVINRFNVEEDMTEQIKALNPVRWKVFQCLLIEGENCGEDALREAERFVIGDEEFERFLERHKEVSCLVPESNQKMKDSYLILDEYMRFLNCRKGRKDPSKSILDVGVEEAIKFSGFDEKMFLKRGGKYIWSKADLKLDW

SEQ ID NO: 739126 - protein, 378 aa, Homo sapiens
KRVPGIQRLALLQASATMWVLTPAAFAGKLLSVFRQPLSSLWRSLVPLFCWLRATFWLLATKRRKQQLVLRGPDETKEEEEDPPLPTTPTSVNYHFTRQCNYKCGFCFHTAKTSFVLPLEEAKRGLLLLKEAGMEKINFSGGEPFLQDRGEYLGKLVRFCKVELRLPSVSIVSNGSLIRERWFQNYGEYLDILAISCDSFDEEVNVLIGRGQGKKNHVENLQKLRRWCRDYRVAFKINSVINRFNVEEDMTEQIKALNPVRWKVFQCLLIEGENCGEDALREAERFVIGDEEFERFLERHKEVSCLVPESNQKMKDSYLILDEYMRFLNCRKGRKDPSKSILDVGVEEAIKFSGFDEKMFLKRGGKYIWSKADLKLDW

SEQ ID NO: 739127 - protein, 286 aa, Homo sapiens
MRPKRRKRTLLCPPPQPASTITSLASATTNAASVSTQPKHRMEKINFSGGEPFLQDRGEYLGKLVRFCKVELRLPSVSIVSNGSLIRERWFQNYGEYLDILAISCDSFDEEVNVLIGRGQGKKNHVENLQKLRRWCRDYRVAFKINSVINRFNVEEDMTEQIKALNPVRWKVFQCLLIEGENCGEDALREAERFVIGDEEFERFLERHKEVSCLVPESNQKMKDSYLILDEYMRFLNCRKGRKDPSKSILDVGVEEAIKFSGFDEKMFLKRGGKYIWSKADLKLDW

SEQ ID NO: 739128 - protein, 178 aa, Homo sapiens
MWVLTPAAFAGKLLSVFRQPLSSLWRSLVPLFCWLRATFWLLATKRRKQQLVLRGPDETKEEEEDPPLPTTPTSVNYHFTRQCNYKCGFCFHTAKTSYGEDQLFRWRAISSRPGRIPGQVGEVLQSRVAAAQREHRDKTKIRFPFDDGVDMEAVLALLCSPIIWPHEAVKQKNRSVVE

SEQ ID NO: 739129 - protein, 256 aa, Homo sapiens [sequence omitted]

SEQ ID NO: 739130 - protein, 124 aa, Homo sapiens
SFALLPRLACSGVVSAHCSLRLLGSRQSSASVSGVAGTAGTCHHAQLIFVFLVETGFCRVGQASLELLTSSDLSASASRSAGIIGVSHRILPRHTKFDRYCVPFGSLGINFCLCHSALYILKWR

SEQ ID NO: 739131 - protein, 81 aa, Homo sapiens
GTCVRQGCSDNQVSSTGGGMGMVTVVLLMSPMMLSASFSAWCMCSISSCCCACSANSSISVFWFPHEYILASGSEMMNSGV

SEQ ID NO: 739132 - protein, 68 aa, Homo sapiens
DVHTREQGFFWFRKVLRPWAHFHKCEKASSNVTSREKPCLASRPPRHSQHESCCVVTIVLLICACRIP

SEQ ID NO: 739133 - protein, 210 aa, Homo sapiens
MEQMSREDMLAISTPVLTSLDVPPEMMPTVIDEYLGSNSDAQAKCQAFQEFMGDVFINVPTVSFSRYLRDSGSPVFFYEFQHRPSSFAKIKPAWVKADHGAEGAFVFGGPFLMDESSRLAFPEATEEEKQLSLTMMAQWTHFARTGDPNSKALPPWPQFNQAEQYLEINPVPRAGQKFREAWMQFWSETLPSKIQQWHQKQKNRKAQEDL

SEQ ID NO: 739134 - protein, 584 aa, Homo sapiens
PPSEASVEPVVRRMERAVRVESGVLVGVVCLLLACPATATGPEVAQPEVDTTLGRVRGRQVGVKGTDRLVNVFLGIPFAQPPLGPDRFSAPHPAQPWEGVRDASTAPPMCLQDVESMNSSRFVLNGKQQIFSVSEDCLVLNVYSPAEVPAGSGRPVMVWVHGGALITGAATSYDGSALAAYGDVVVVTVQYRLGVLGFFSTGDEHAPGNQGFLDVVAALRWVQENIAPFGGDLNCVTVFGGSAGGSIISGLVLSPVAAGLFHRAITQSGVITTPGIIDSHPWPLAQKIANTLACSSSSPAEMVQCLQQKEGEELVLSKKLKNTIYPLTVDGTVFPKSPKELLKEKPFHSVPFLMGVNNHEFSWLIPRGWGLLDTMEQMSREDMLAISTPVLTSLDVPPEMMPTVIDEYLGSNSDAQAKCQAFQEFMGDVFINVPTVSFSRYLRDSGSPVFFYEFQHRPSSFAKIKPAWVKADHGAEGAFVFGGPFLMDESSRLAFPEATEEEKQLSLTMMAQWTHFARTGDPNSKALPPWPQFNQAEQYLEINPVPRAGQKFREAWMQFWSETLPSKIQQWHQKQKNRKAQEDL

SEQ ID NO: 739135 - protein, 584 aa, Homo sapiens; identical to SEQ ID NO: 739134

SEQ ID NO: 739136 - protein, 48 aa, Homo sapiens
MVPGNGTEGVLSIPCRSRGAVYPQVGLGTAAHEGKGLRAWRQKWRAIS

SEQ ID NO: 739137 - protein, 30 aa, Homo sapiens
MQECPDTPGSCCVFSGWLLNLQEPQEPHWS

SEQ ID NO: 739138 - protein, 143 aa, Homo sapiens
RGWQRRGPGSGAVGREPWGGMEGLVVAAGGDVSLHNFSARLWEQLVHFHVMRLTDSLFLWVGATPHLRNLAVAMCSRYDSIPVSTSLLGDTSDTTSTGLAQRLARKTNKQVFVSYNLQNTDSNFALLVENRIKEEMEAFPEKF

SEQ ID NO: 739139 - protein, 96 aa, Homo sapiens
RGWQRRGPGSGAVGREPWGGMEGLVVAAGGDVSLHNFSARLWEQLVHFHVMRLTDSLFLWVGATPHLRNLAVAMCSRYTGSEPAVGLRYPATASTK

SEQ ID NO: 739140 - protein, 124 aa, Homo sapiens
RGWQRRGPGSGAVGREPWGGMEGLVVAAGGDVSLHNFSARLWEQLVHFHVMRLTDSLFLWVGATPHLRNLAVAMCSRYDSIPVSTSLLGDTSDTTSTGLAQRLGMYPQLALHGQPGGAHSLMEP

SEQ ID NO: 739141 - protein, 85 aa, Homo sapiens
LHRSPTSPAYHVLVILFEEQGHTDGLHVRSGGSRMFGGSRSKINSARKTNKQVFVSYNLQNTDSNFALLVENRIKEEMEAFPEKF

SEQ ID NO: 739142 - protein, 143 aa, Homo sapiens; identical to SEQ ID NO: 739138

SEQ ID NO: 739143 - protein, 128 aa, Homo sapiens
RGWQRRGPGSGAVGREPWGGMEGLVVAAGGDVSLHNFSARLWEQLVHFHVMRLTDSLFLWVGATPHLRNLAVAMCSRYDSIPVSTSLLGDTSDTTSTGLAQRLGRTVLTQCDTVQGSEGRLAWPVSVA

SEQ ID NO: 739144 - protein, 166 aa, Homo sapiens
SCGRVQALRRGILVHPFLLPRLHSSPNENKTMCVGRGVGGVGSFSFSEVTFVGRWLPVLQAVTHGLASGQALSIRTQPAFPLPNPVTAWASSRELEIGFALMCGSSLSLPSVLLLWLQECGSGCLCVVDGKFAAQSGPTRPRGSVTASGENHGEPCRLRTGPVHLR

SEQ ID NO: 739145 - protein, 41 aa, Homo sapiens
MNSWWLHPIPPACMWGLSGLQACLGKPLCKFPYLHKTSHVT

SEQ ID NO: 739146 - protein, 453 aa, Homo sapiens
MLKMVLTENPNQEIATSLEFLLLQNSPGSLRAQQRMSYYGSSYHIINADAKYPGYPPEHIIAEKRRARRRLLHKDGSCNVYFKHIFGEWGSYVVDIFTTLVDTKWRHMFVIFSLSYILSWLIFGSVFWLIAFHHGDLLNDPDITPCVDNVHSFTGAFLFSLETQTTIGYGYRCVTEECSVAVLMVILQSILSCIINTFIIGAALAKMATARKRAQTIRFSYFALIGMRDGKLCLMWRIGDFRPNHVVEGTVRAQLLRYTEDSEGRMTMAFKDLKLVNDQIILVTPVTIVHEIDHESPLYALDRKAVAKDNFEILVTFIYTGDSTGTSHQSRSSYVPREILWGHRFNDVLEVKRKYYKVNCLQFEGSVEVYAPFCSAKQLDWKDQQLHIEKAPPVRESCTSDTKARRRSFSAVAIVSSCENPEETTTSATHEYRETPYQKALLTLNRISVESQM

SEQ ID NO: 739147 - protein, 453 aa, Homo sapiens; identical to SEQ ID NO: 739146

SEQ ID NO: 739148 - protein, 450 aa, Homo sapiens [sequence omitted]

SEQ ID NO: 739149 - protein, 453 aa, Homo sapiens; identical to SEQ ID NO: 739146

SEQ ID NO: 739150 - protein, 453 aa, Homo sapiens; identical to SEQ ID NO: 739146

SEQ ID NO: 739151 - protein, 453 aa, Homo sapiens; identical to SEQ ID NO: 739146

SEQ ID NO: 739152 - protein, 1745 aa, Homo sapiens [sequence omitted]

SEQ ID NO: 739153 - protein, 1745 aa, Homo sapiens [sequence omitted]

SEQ ID NO: 739154 - protein, 1776 aa, Homo sapiens
MGNRRDLGQPRAGLCLLLAALQLLPGTQADPVDVLKALGVQGGQAGVPEGPGFCPQRTPEGDRAFRIGQASTLGIPTWELFPEGHFPENFSLLITLRGQPANQSVLLSIYDERGARQLGLALGPALGLLGDPFRPLPQQVNLTDGRWHRVAVSIDGEMVTLVADCEAQPPVLGHGPRFISIAGLTVLGTQDLGEKTFEGDIQELLISPDPQAAFQACERYLPDCDNLAPAATVAPQGEPETPRPRRKGKGKGRKKGRGRKGKGRKKNKEIWTSSPPPDSAENQTSTDIPKTETPAPNLPPTPTPLVVTSTVTTGLNATILEGSLDPDSGTELGTLETKAAREDEEGDDSTMGPDFRAAEYPSRTQFQIFPGAGEKGAKGEPAVIEKGQQFEGPPGAPGPQGVVGPSGPPGPPGFPGDPGPPGPAGLPGIPGIDGIRGPPGTVIMMPFQFAGGSFKGPPVSFQQAQAQAVLQQTQLSMKGPPGPVGLTGRPGPVGLPGHPGLKGEEGAEGPQGPRGLQGPHGPPGRVGKMGRPGADGARGLPGDTGPKGDRGFDGLPGLPGEKGQRGDFGHVGQPGPPGEDGERGAEGPPGPTGQAGEPGPRGLLGPRGSPGPTGRPGVTGIDGAPGAKGNVGPPGEPGPPGQQGNHGSQGLPGPQGLIGTPGEKGPPGNPGIPGLPGSDGPLGHPGHEGPTGEKGAQGPPGSAGPPGYPGPRGVKGTSGNRGLQGEKGEKGEDGFPGFKGDVGLKGDQGKPGAPGPRGEDGPEGPKGQAGQAGEEGPPGSAGEKGKLGVPGLPGYPGRPGPKGSIGFPGPLGPIGEKGKSGKTGQPGLEGERGPPGSRGERGQPGATGQPGPKGDVGQDGAPGIPGEKGLPGLQGPPGFPGPKGPPGHQGKDGRPGHPGQRGELGFQGQTGPPGPAGVLGPQGKTGEVGPLGERGPPGPPGPPGEQGLPGLEGREGAKGELGPPGPLGKEGPAGLRGFPGPKGGPGDPGPTGLKGDKGPPGPVGANGSPGERGPLGPAGGIGLPGQSGSEGPVGPAGKKGSRGERGPPGPTGKDGIPGPLGPLGPPGAAGPSGEEGDKGDVGAPGHKGSKGDKGDAGPPGQPGIRGPAGHPGPPGADGAQGRRGPPGLFGQKGDDGVRGFVGVIGPPGLQGLPGPPGEKGEVGDVGSMGPHGAPGPRGPQGPTGSEGTPGLPGGVGQPGAVGEKGERGDAGDPGPPGAPGIPGPKGDIGEKGDSGPSGAAGPPGKKGPPGEDGAKGSVGPTGLPGDLGPPGDPGVSGIDGSPGEKGDPGDVGGPGPPGASGEPGAPGPPGKRGPSGHMGREGREGEKGAKGEPGPDGPPGRTGPMGARGPPGRVGPEGLRGIPGPVGEPGLLGAPGQMGPPGPLGPSGLPGLKGDTGPKGEKGHIGLIGLIGPPGEAGEKGDQGLPGVQGPPGPKGDPGPPGPIGSLGHPGPPGVAGPLGQKGSKGSPGSMGPRGDTGPAGPPGPPGAPAELHGLRRRRRFVPVPLPVVEGGLEEVLASLTSLSLELEQLRRPPGTAERPGLVCHELHRNHPHLPDGEYWIDPNQGCARDSFRVFCNFTAGGETCLYPDKKFEIVKLASWSKEKPGGWYSTFRRGKKFSYVDADGSPVNVVQLNFLKLLSATARQNFTYSCQNAAAWLDEATGDYSHSARFLGTNGEELSFNQTTAATVSVPQDGCRVRGWGSGQLERGGKMSATFPVTHRLCLLWGQLRKGQTKTLFEFSSSRAGFLPLWDVAATDFGQTNQKFGFELGPVCFSS

SEQ ID NO: 739155 - protein, 1492 aa, Homo sapiens
MGNRRDLGQPRAGLCLLLAALQLLPGTQADPVDVLKALGVQGGQAGVPEGPGFCPQRTPEGDRAFRIGQASTLGIPTWELFPEGHFPENFSLLITLRGQPANQSVLLSIYDERGARQLGLALGPALGLLGDPFRPLPQQVNLTDGRWHRVAVSIDGEMVTLVADCEAQPPVLGHGPRFISIAGLTVLGTQDLGEKTFEGDIQELLISPDPQAAFQACERYLPDCDNLAPAATVAPQGEPETPRPRRKGKGKGRKKGRGRKGKGRKKNKEIWTSSPPPDSAENQTSTDIPKTETPAPNLPPTPTPLVVTSTVTTGLNATILEGSLDPDSGTELGTLETKAAREDEEGDDSTMGPDFRAAEYPSRTQFQIFPGAGEKGAKGEPAVIEKGQQFEGPPGAPGPQGVVGPSGPPGPPGFPGDPGPPGPAGLPGIPGIDGIRGPPGTVIMMPFQFAGGSFKGPPVSFQQAQAQAVLQQTQLSMKGPPGPVGLTGRPGPVGLPGHPGLKGEEGAEGPQGPRGLQGPHGPPGRVGKMGRPGADGARGLPGDTGPKGDRGFDGLPGLPGEKGQRGDFGHVGQPGPPGEDGERGAEGPPGPTGQAGEPGPRGLLGPRGSPGPTGRPGVTGIDGAPGAKGNVGPPGEPGPPGQQGNHGSQGLPGPQGLIGTPGEKGPPGNPGIPGLPGSDGPLGHPGHEGPTGEKGAQGPPGSAGPPGYPGPRGVKGTSGNRGLQGEKGEKGEDGFPGFKGDVGLKGDQGKPGAPGPRGEDGPEGPKGQAGQAGEEGPPGSAGEKGKLGVPGLPGYPGRPGPKGSIGFPGPLGPIGEKGKSGKTGQPGLEGERGPPGSRGERGQPGATGQPGPKGDVGQDGAPGIPGEKGLPGLQGPPGFPGPKGPPGHQGKDGRPGHPGQRGELGFQGQTGPPGPAGVLGPQGKTGEVGPLGERGPPGPPGPPGEQGLPGLEGREGAKGELGPPGPLGKEGPAGLRGFPGPKGGPGDPGPTGLKGDKGPPGPVGANGSPGERGPLGPAGGIGLPGQSGSEGPVGPAGKKGSRGERGPPGPTGKDGIPGPLGPLGPPGAAGPSGEEGDKGDVGAPGHKGSKGDKGDAGPPGQPGIRGPAGHPGPPGADGAQGRRGPPGLFGQKGDDGVRGFVGVIGPPGLQGLPGPPGEKGEVGDVGSMGPHGAPGPRGPQGPTGSEGTPGLPGGVGQPGAVGEKGERGDAGDPGPPGAPGIPGPKGDIGEKGDSGPSGAAGPPGKKGPPGEDGAKGSVGPTGLPGDLGPPGDPGVSGIDGSPGEKGDPGDVGGPGPPGASGEPGAPGPPGKRGPSGHMGREGREGEKGAKGEPGPDGPPGRTGPMGARGPPGRVGPEGLRGIPGPVGEPGLLGAPGQMGPPGPLGPSGLPGLKGDTGPKGEKGHIGLIGLIGPPGEAGEKGDQGLPGVQGPPGPKGDPGPPGPIGSLGHPGPPGVAGPLGQKGSKGSPVSTPCFRGLTHPSSPPPSLHQNPP

SEQ ID NO: 739156 - protein, 104 aa, Homo sapiens
MPMNIRGPMWSVLLNTEEMKLKNPGRYQIMKEKGKRSSEHIQRIDRDVSGTLRKHIFFRDRYGTKQRELLHILLAYEEYNPRKPLLQRKPLQSPLPFSNDMSPP

SEQ ID NO: 739157 - protein, 135 aa, Homo sapiens
MLHDYIGDKDFKKGMNMYLTKFQQKNAATEDLWESLENASGKPIAAVMNTWTKQMGFPLIYVEAEQVEDDRLLRLSQKKFCAGGSYVGEDCPQWMVPITISTSEDPNQAKLKILMDKPEMNVVSKNVKHRPMGES

SEQ ID NO: 739158 - protein, 97 aa, Homo sapiens
MPMNIRGPMWSVLLNTEEMKLKNPGRYQIMKEKGKRSSEHIQRIDRDVSGTLRKHIFFRDRYGTKHGGTTPHSLHVGIMTEYNPEDNLMAFMRGQPY

SEQ ID NO: 739159 - protein, 96 aa, Homo sapiens
VARVQGEAGGCWEVRTCKGLGAVKWGGPLVQPEYTGQVSGQAPLTLAGGCGHSLRDSCQGPVAHPGRPPSHLRANLSQLQQKAPPRVQDGQPHWAA

SEQ ID NO: 739160 - protein, 660 aa, Homo sapiens
MEWWTHLWLNEGFASWIEYLCVDHCFPEYDIWTQFVSADYTRAQELDALDNSHPIEVSVGHPSEVDEIFDAISYSKGASVIRMLHDYIGDKDFKKGMNMYLTKFQQKNAARMDVVEVAGSWWAQEREDIIMKYEKGHRAGLPEDKGPKPFRSYNNNVDHLGIVHETELPPLTAREAKQIRREISRKSKWVDMLGDWEKYKSSRKLIDRAYKGMPMNIRGPMWSVLLNTEEMKLKNPGRYQIMKEKGKRSSEHIQRIDRDVSGTLRKHIFFRDRYGTKQRELLHILLAYEEYNPEVGYCRDLSHIAALFLLYLPEEDAFWALVQLLASERHSLQGFHSPNGGTVQGLQDQQEHVVATSQPKTMGHQDKKDLCGQCSPLGCLIRILIDGISLGLTLRLWDVYLVEGEQALMPITRIAFKVQQKRLTKTSRCGPWARFCNRFVDTWARDEDTVLKHLRASMKKLTRKQGDLPPPAKPEQGSSASRPVPASRGGKTLCKGDRQAPPGPPARFPRPIWSASPPRAPRSSTPCPGGAVREDTYPVGTQGVPSPALAQGGPQGSWRFLQWNSMPRLPTDLDVEGPWFRHYDFRQSCWVRAISQEDQLAPCWQAEHPAERVRSAFAAPSTDSDQGTPFRARDEQPCAPTSGPCLCGLHLESSQFPPGF

SEQ ID NO: 739161 - protein, 809 aa, Homo sapiens
MNVIDRKPYPDDENLVEVKFARTPVTSTYLVAFVVGEYDFVETRSKDGVCVCVYTPVGKAEQGKFALEVAAKTLPFYKDYFNVPYPLPKIDLIAIADFAAGAMENWDLVTYRETALLIDPKNSCSSSRQWVALVVGHELAHQWFGNLVTMEWWTHLWLNEGFASWIEYLCVDHCFPEYDIWTQFVSADYTRAQELDALDNSHPIEVSVGHPSEVDEIFDAISYSKGASVIRMLHDYIGDKDFKKGMNMYLTKFQQKNAARMDVVEVAGSWWAQEREDIIMKYEKGHRAGLPEDKGPKPFRSYNNNVDHLGIVHETELPPLTAREAKQIRREISRKSKWVDMLGDWEKYKSSRKLIDRAYKGMPMNIRGPMWSVLLNTEEMKLKNPGRYQIMKEKGKRSSEHIQRIDRDVSGTLRKHIFFRDRYGTKQRELLHILLAYEEYNPEVGYCRDLSHIAALFLLYLPEEDAFWALVQLLASERHSLQGFHSPNGGTVQGLQDQQEHVVATSQPKTMGHQDKKDLCGQCSPLGCLIRILIDGISLGLTLRLWDVYLVEGEQALMPITRIAFKVQQKRLTKTSRCGPWARFCNRFVDTWARDEDTVLKHLRASMKKLTRKQGDLPPPAKPEQGSSASRPVPASRGGKTLCKGDRQAPPGPPARFPRPIWSASPPRAPRSSTPCPGGAVREDTYPVGTQGVPSPALAQGGPQGSWRFLQWNSMPRLPTDLDVEGPWFRHYDFRQSCWVRAISQEDQLAPCWQAEHPAERVRSAFAAPSTDSDQGTPFRARDEQPCAPTSGPCLCGLHLESSQFPPGF

SEQ ID NO: 739162 - protein, 707 aa, Homo sapiens
MENWDLVTYRETALLIDPKNSCSSSRQWVALVVGHELAHQWFGNLVTMEWWTHLWLNEGFASWIEYLCVDHCFPEYDIWTQFVSADYTRAQELDALDNSHPIEVSVGHPSEVDEIFDAISYSKGASVIRMLHDYIGDKDFKKGMNMYLTKFQQKNAARMDVVEVAGSWWAQEREDIIMKYEKGHRAGLPEDKGPKPFRSYNNNVDHLGIVHETELPPLTAREAKQIRREISRKSKWVDMLGDWEKYKSSRKLIDRAYKGMPMNIRGPMWSVLLNTEEMKLKNPGRYQIMKEKGKRSSEHIQRIDRDVSGTLRKHIFFRDRYGTKQRELLHILLAYEEYNPEVGYCRDLSHIAALFLLYLPEEDAFWALVQLLASERHSLQGFHSPNGGTVQGLQDQQEHVVATSQPKTMGHQDKKDLCGQCSPLGCLIRILIDGISLGLTLRLWDVYLVEGEQALMPITRIAFKVQQKRLTKTSRCGPWARFCNRFVDTWARDEDTVLKHLRASMKKLTRKQGDLPPPAKPEQGSSASRPVPASRGGKTLCKGDRQAPPGPPARFPRPIWSASPPRAPRSSTPCPGGAVREDTYPVGTQGVPSPALAQGGPQGSWRFLQWNSMPRLPTDLDVEGPWFRHYDFRQSCWVRAISQEDQLAPCWQAEHPAERVRSAFAAPSTDSDQGTPFRARDEQPCAPTSGPCLCGLHLESSQFPPGF

SEQ ID NO: 739163 - protein, 945 aa, Homo sapiens
VEAAAQVRQATNQIVMNVLDIDIITASYAPEGDEEIHATGFNYQNEDEKVTLSFPSTLQTGTGTLKIDFVGELNDKMKGFYRSKYTTPSGEVRYAAVTQFEATDARRAFPCWDEPAIKATFDISLVVPKDRVALSNMNVIDRKPYPDDENLVEVKFARTPVTSTYLVAFVVGEYDFVETRSKDGVCVCVYTPVGKAEQGKFALEVAAKTLPFYKDYFNVPYPLPKIDLIAIADFAAGAMENWDLVTYRETALLIDPKNSCSSSRQWVALVVGHELAHQWFGNLVTMEWWTHLWLNEGFASWIEYLCVDHCFPEYDIWTQFVSADYTRAQELDALDNSHPIEVSVGHPSEVDEIFDAISYSKGASVIRMLHDYIGDKDFKKGMNMYLTKFQQKNAARMDVVEVAGSWWAQEREDIIMKYEKGHRAGLPEDKGPKPFRSYNNNVDHLGIVHETELPPLTAREAKQIRREISRKSKWVDMLGDWEKYKSSRKLIDRAYKGMPMNIRGPMWSVLLNTEEMKLKNPGRYQIMKEKGKRSSEHIQRIDRDVSGTLRKHIFFRDRYGTKQRELLHILLAYEEYNPEVGYCRDLSHIAALFLLYLPEEDAFWALVQLLASERHSLQGFHSPNGGTVQGLQDQQEHVVATSQPKTMGHQDKKDLCGQCSPLGCLIRILIDGISLGLTLRLWDVYLVEGEQALMPITRIAFKVQQKRLTKTSRCGPWARFCNRFVDTWARDEDTVLKHLRASMKKLTRKQGDLPPPAKPEQGSSASRPVPASRGGKTLCKGDRQAPPGPPARFPRPIWSASPPRAPRSSTPCPGGAVREDTYPVGTQGVPSPALAQGGPQGSWRFLQWNSMPRLPTDLDVEGPWFRHYDFRQSCWVRAISQEDQLAPCWQAEHPAERVRSAFAAPSTDSDQGTPFRARDEQPCAPTSGPCLCGLHLESSQFPPGF

SEQ ID NO: 739164 - protein, 926 aa, Homo sapiens
VEAAAQVRQATNQIVMNVLDIDIITASYAPEGDEEIHATGFNYQNEDEKVTLSFPSTLQTGTGTLKIDFVGELNDKMKGFYEATDARRAFPCWDEPAIKATFDISLVVPKDRVALSNMNVIDRKPYPDDENLVEVKFARTPVTSTYLVAFVVGEYDFVETRSKDGVCVCVYTPVGKAEQGKFALEVAAKTLPFYKDYFNVPYPLPKIDLIAIADFAAGAMENWDLVTYRETALLIDPKNSCSSSRQWVALVVGHELAHQWFGNLVTMEWWTHLWLNEGFASWIEYLCVDHCFPEYDIWTQFVSADYTRAQELDALDNSHPIEVSVGHPSEVDEIFDAISYSKGASVIRMLHDYIGDKDFKKGMNMYLTKFQQKNAARMDVVEVAGSWWAQEREDIIMKYEKGHRAGLPEDKGPKPFRSYNNNVDHLGIVHETELPPLTAREAKQIRREISRKSKWVDMLGDWEKYKSSRKLIDRAYKGMPMNIRGPMWSVLLNTEEMKLKNPGRYQIMKEKGKRSSEHIQRIDRDVSGTLRKHIFFRDRYGTKQRELLHILLAYEEYNPEVGYCRDLSHIAALFLLYLPEEDAFWALVQLLASERHSLQGFHSPNGGTVQGLQDQQEHVVATSQPKTMGHQDKKDLCGQCSPLGCLIRILIDGISLGLTLRLWDVYLVEGEQALMPITRIAFKVQQKRLTKTSRCGPWARFCNRFVDTWARDEDTVLKHLRASMKKLTRKQGDLPPPAKPEQGSSASRPVPASRGGKTLCKGDRQAPPGPPARFPRPIWSASPPRAPRSSTPCPGGAVREDTYPVGTQGVPSPALAQGGPQGSWRFLQWNSMPRLPTDLDVEGPWFRHYDFRQSCWVRAISQEDQLAPCWQAEHPAERVRSAFAAPSTDSDQGTPFRARDEQPCAPTSGPCLCGLHLESSQFPPGF

SEQ ID NO: 739165 - protein, 752 aa, Homo sapiens
MNVIDRKPYPDDENLVEVKFARTPVTSTYLVAFVVGEYDFVETRSKDGVCVCVYTPVGKAEQGKFALEVNVLRRGLFQQSITPGAMENWDLVTYRETALLIDPKNSCSSSRQWVALVVGHELAHQWFGNLVTMEWWTHLWLNEGFASWIEYLCVDHCFPEYDIWTQFVSADYTRAQELDALDNSHPIEVSVGHPSEVDEIFDAISYSKGASVIRMLHDYIGDKDFKKGMNMYLTKFQQKNAARMDVVEVAGSWWAQEREDIIMKYEKGHRAGLPEDKGPKPFRSYNNNVESFGDCTLIDRAYKGMPMNIRGPMWSVLLNTEEMKLKNPGRYQIMKEKGKRSSEHIQRIDRDVSGTLRKHIFFRDRYGTKQRELLHILLAYEEYNPEVGYCRDLSHIAALFLLYLPEEDAFWALVQLLASERHSLQGFHSPNGGTVQGLQDQQEHVVATSQPKTMGHQDKKDLCGQCSPLGCLIRILIDGISLGLTLRLWDVYLVEGEQALMPITRIAFKVQQKRLTKTSRCGPWARFCNRFVDTWARDEDTVLKHLRASMKKLTRKQGDLPPPAKPEQGSSASRPVPASRGGKTLCKGDRQAPPGPPARFPRPIWSASPPRAPRSSTPCPGGAVREDTYPVGTQGVPSPALAQGGPQGSWRFLQWNSMPRLPTDLDVEGPWFRHYDFRQSCWVRAISQEDQLAPCWQAEHPAERVRSAFAAPSTDSDQGTPFRARDEQPCAPTSGPCLCGLHLESSQFPPGF

SEQ ID NO: 739166 - protein, 578 aa, Homo sapiens
MLHDYIGDKDFKKGMNMYLTKFQQKNAARMDVVEVAGSWWAQEREDIIMKYEKGHRAGLPEDKGPKPFRSYNNNVDHLGIVHETELPPLTAREAKQIRREISRKSKWVDMLGDWEKYKSSRKLIDRAYKGMPMNIRGPMWSVLLNTEEMKLKNPGRYQIMKEKGKRSSEHIQRIDRDVSGTLRKHIFFRDRYGTKQRELLHILLAYEEYNPEVGYCRDLSHIAALFLLYLPEEDAFWALVQLLASERHSLQGFHSPNGGTVQGLQDQQEHVVATSQPKTMGHQDKKDLCGQCSPLGCLIRILIDGISLGLTLRLWDVYLVEGEQALMPITRIAFKVQQKRLTKTSRCGPWARFCNRFVDTWARDEDTVLKHLRASMKKLTRKQGDLPPPAKPEQGSSASRPVPASRGGKTLCKGDRQAPPGPPARFPRPIWSASPPRAPRSSTPCPGGAVREDTYPVGTQGVPSPALAQGGPQGSWRFLQWNSMPRLPTDLDVEGPWFRHYDFRQSCWVRAISQEDQLAPCWQAEHPAERVRSAFAAPSTDSDQGTPFRARDEQPCAPTSGPCLCGLHLESSQFPPGF

SEQ ID NO: 739167 - protein, 469 aa, Homo sapiens
MLGDWEKYKSSRKLIDRAYKGMPMNIRGPMWSVLLNTEEMKLKNPGRYQIMKEKGKRSSEHIQRIDRDVSGTLRKHIFFRDRYGTKQRELLHILLAYEEYNPEVGYCRDLSHIAALFLLYLPEEDAFWALVQLLASERHSLQGFHSPNGGTVQGLQDQQEHVVATSQPKTMGHQDKKDLCGQCSPLGCLIRILIDGISLGLTLRLWDVYLVEGEQALMPITRIAFKVQQKRLTKTSRCGPWARFCNRFVDTWARDEDTVLKHLRASMKKLTRKQGDLPPPAKPEQGSSASRPVPASRGGKTLCKGDRQAPPGPPARFPRPIWSASPPRAPRSSTPCPGGAVREDTYPVGTQGVPSPALAQGGPQGSWRFLQWNSMPRLPTDLDVEGPWFRHYDFRQSCWVRAISQEDQLAPCWQAEHPAERVRSAFAAPSTDSDQGTPFRARDEQPCAPTSGPCLCGLHLESSQFPPGF

SEQ ID NO: 739168 - protein, 568 aa, Homo sapiens
KGFLPERHDPGQLIHQNQRMDVVEVAGSWWAQEREDIIMKYEKGHRAGLPEDKGPKPFRSYNNNVDHLGIVHETELPPLTAREAKQIRREISRKSKWVDMLGDWEKYKSSRKLIDRAYKGMPMNIRGPMWSVLLNTEEMKLKNPGRYQIMKEKGKRSSEHIQRIDRDVSGTLRKHIFFRDRYGTKQRELLHILLAYEEYNPEVGYCRDLSHIAALFLLYLPEEDAFWALVQLLASERHSLQGFHSPNGGTVQGLQDQQEHVVATSQPKTMGHQDKKDLCGQCSPLGCLIRILIDGISLGLTLRLWDVYLVEGEQALMPITRIAFKVQQKRLTKTSRCGPWARFCNRFVDTWARDEDTVLKHLRASMKKLTRKQGDLPPPAKPEQGSSASRPVPASRGGKTLCKGDRQAPPGPPARFPRPIWSASPPRAPRSSTPCPGGAVREDTYPVGTQGVPSPALAQGGPQGSWRFLQWNSMPRLPTDLDVEGPWFRHYDFRQSCWVRAISQEDQLAPCWQAEHPAERVRSAFAAPSTDSDQGTPFRARDEQPCAPTSGPCLCGLHLESSQFPPGF

SEQ ID NO: 739169 - protein, 448 aa, Homo sapiens
MPMNIRGPMWSVLLNTEEMKLKNPGRYQIMKEKGKRSSEHIQRIDRDVSGTLRKHIFFRDRYGTKQRELLHILLAYEEYNPEVGYCRDLSHIAALFLLYLPEEDAFWALVQLLASERHSLQGFHSPNGGTVQGLQDQQEHVVATSQPKTMGHQDKKDLCGQCSPLGCLIRILIDGISLGLTLRLWDVYLVEGEQALMPITRIAFKVQQKRLTKTSRCGPWARFCNRFVDTWARDEDTVLKHLRASMKKLTRKQGDLPPPAKPEQGSSASRPVPASRGGKTLCKGDRQAPPGPPARFPRPIWSASPPRAPRSSTPCPGGAVREDTYPVGTQGVPSPALAQGGPQGSWRFLQWNSMPRLPTDLDVEGPWFRHYDFRQSCWVRAISQEDQLAPCWQAEHPAERVRSAFAAPSTDSDQGTPFRARDEQPCAPTSGPCLCGLHLESSQFPPGF

SEQ ID NO: 739170 - protein, 509 aa, Homo sapiens
SVPADPLKLGIVHETELPPLTAREAKQIRREISRKSKWVDMLGDWEKYKSSRKLIDRAYKGMPMNIRGPMWSVLLNTEEMKLKNPGRYQIMKEKGKRSSEHIQRIDRDVSGTLRKHIFFRDRYGTKQRELLHILLAYEEYNPEVGYCRDLSHIAALFLLYLPEEDAFWALVQLLASERHSLQGFHSPNGGTVQGLQDQQEHVVATSQPKTMGHQDKKDLCGQCSPLGCLIRILIDGISLGLTLRLWDVYLVEGEQALMPITRIAFKVQQKRLTKTSRCGPWARFCNRFVDTWARDEDTVLKHLRASMKKLTRKQGDLPPPAKPEQGSSASRPVPASRGGKTLCKGDRQAPPGPPARFPRPIWSASPPRAPRSSTPCPGGAVREDTYPVGTQGVPSPALAQGGPQGSWRFLQWNSMPRLPTDLDVEGPWFRHYDFRQSCWVRAISQEDQLAPCWQAEHPAERVRSAFAAPSTDSDQGTPFRARDEQPCAPTSGPCLCGLHLESSQFPPGF

SEQ ID NO: 739171 - protein, 578 aa, Homo sapiens; identical to SEQ ID NO: 739166

SEQ ID NO: 739172 - protein, 448 aa, Homo sapiens; identical to SEQ ID NO: 739169

SEQ ID NO: 739173 - protein, 642 aa, Homo sapiens
MEWWTHLWLNEGFASWIEYLCVDHCFPEYDIWTQFVSADYTRAQELDALDNSHPIEVSVGHPSEVDEIFDAISYSKGASVIRMLHDYIGDKDFKKGMNMYLTKFQQKNAARMDVVEVAGSWWAQEREDIIMKYEKGHRAGLPEDKGPKPFRSYNNNVDHLGIVHETELPPLTAREAKQIRREISRKSKWVDMLGDWEKYKSSRKLIDRAYKGMPMNIRGPMWSVLLNTEEMKLNIQRIDRDVSGTLRKHIFFRDRYGTKQRELLHILLAYEEYNPEVGYCRDLSHIAALFLLYLPEEDAFWALVQLLASERHSLQGFHSPNGGTVQGLQDQQEHVVATSQPKTMGHQDKKDLCGQCSPLGCLIRILIDGISLGLTLRLWDVYLVEGEQALMPITRIAFKVQQKRLTKTSRCGPWARFCNRFVDTWARDEDTVLKHLRASMKKLTRKQGDLQPPAKPEQGSSASRPVPASRGGKTLCKGDRQAPPGPPARFPRPIWSASPPRAPRSSTPCPGGAVREDTYPVGTQGVPSPALAQGGPQGSWRFLQWNSMPRLPTDLDVEGPWFRHYDFRQSCWVRAISQEDQLAPCWQAEHPAERVRSAFAAPSTDSDQGTPFRARDEQPCAPTSGPCLCGLHLESSQFPPGF

SEQ ID NO: 739174 - protein, 638 aa, Homo sapiens
MEWWTHLWLNEGFASWIEYLCVDHCFPEYDIWTQFVSADYTRAQELDALDNSHPIEVSVGHPSEVDEIFDAISYSKGASVIRMLHDYIGDKDFKKGMNMYLTKFQQKNAARMDVVEVAGSWWAQEREDIIMKYEKGHRAGLPEDKGPKPFRSYNNNVDHLGIVHETELPPLTAREAKQIRREISRKSKWVDMLGDWEKYKSSRKLIDRAYKGMPMNIRGPMWSVLLNTEEMKLKNPGRYQIMKEKGKRSSEHIQRIDRDVSGTLRKHIFFRDRYGTKQRELLHILLAYEEYNPEVGYCRDLSHIAALFLLYLPEEDAFWALVQLLASERHSLQGFHSPNGGTVQGLQDQQEHVVATSQPKTMGHQISLGLTLRLWDVYLVEGEQALMPITRIAFKVQQKRLTKTSRCGPWARFCNRFVDTWARDEDTVLKHLRASMKKLTRKQGDLQPPAKPEQGSSASRPVPASRGGKTLCKGDRQAPPGPPARFPRPIWSASPPRAPRSSTPCPGGAVREDTYPVGTQGVPSPALAQGGPQGSWRFLQWNSMPRLPTDLDVEGPWFRHYDFRQSCWVRAISQEDQLAPCWQAEHPAERVRSAFAAPSTDSDQGTPFRARDEQPCAPTSGPCLCGLHLESSQFPPGF

SEQ ID NO: 739175 - protein, 90 aa, Homo sapiens
SMIELGTPWFRHYDFRQSCWVRAISQEDQLAPCWQAEHPAERVRSAFAAPSTDSDQGTPFRARDEQPCAPTSGPCLCGLHLESSQFPPGF

SEQ ID NO: 739176 - protein, 660 aa, Homo sapiens; identical to SEQ ID NO: 739160

SEQ ID NO: 739177 - protein, 660 aa, Homo sapiens; identical to SEQ ID NO: 739160

SEQ ID NO: 739178 - protein, 263 aa, Homo sapiens
MNVIDRKPYPDDENLVEVKFARTPVTSTYLVAFVVGEYDFVETRSKDGVCVCVYTPVGKAEQGKFALEVAAKTLPFYKDYFNVPYPLPKIDLIAIADFAAGAMENWDLVTYRETALLIDPKNSCSSSRQWVALVVGHELAHQWFGNLVTMEWWTHLWLNEGFASWIEYLCVDHCFPEYDIWTQFVSADYTRAQELDALDNSHPIEVSVGHPSEVDEIFDAISYSKGASVIRMLHDYIGDKDFKKGMNMYLTKFQQKNAAAGNL

SEQ ID NO: 739179 - protein, 335 aa, Homo sapiens
MEWWTHLWLNEGFASWIEYLCVDHCFPEYDIWTQFVSADYTRAQELDALDNSHPIEVSVGHPSEVDEIFDAISYSKGASVIRMLHDYIGDKDFKKGMNMYLTKFQQKNAARMDVVEVAGSWWAQEREDIIMKYEKGHRAGLPEDKGPKPFRSYNNNVDHLGIVHETELPPLTAREAKQIRREISRKSKWVDMLGDWEKYKSSRKLIDRAYKGMPMNIRGPMWSVLLNTEEMKLKNPGRYQIMKEKGKRSSEHIQRIDRDVSGTLRKHIFFRDRYGTKQRELLHILLAYEEYNPEVGYCRDLSHIAALFLLYLPEEDAFWALVQLLASERHSLQGK

SEQ ID NO: 739180 - protein, 217 aa, Homo sapiens
MEWWTHLWLNEGFASWIEYLCVDHCFPEYDIWTQFVSADYTRAQELDALDNSHPIEVSVGHPSEVDEIFDAISYSKGASVIRMLHDYIGDKDFKKGMNMYLTKFQQKNAATEDLWESLENASGKPIAAVMNTWTKQMGFPLIYVEAEQVEDDRLLRLSQKKFCAGGSYVGEDCPQWMVPITISTSEDPNQAKLKILMDKPEMNVVSKNVKHRPMGES

SEQ ID NO: 739181 - protein, 283 aa, Homo sapiens
MEWWTHLWLNEGFASWIEYLCVDHCFPEYDIWTQFVSADYTRAQELDALDNSHPIEVSVGHPSEVDEIFDAISYSKGASVIRMLHDYIGDKDFKKGMNMYLTKFQQKNAARMDVVEVAGSWWAQEREDIIMKYEKGHRAGLPEDKGPKPFRSYNNNVDHLGIVHETELPPLTAREAKQIRREISRKSKWVDMLGDWEKYKSSRKLIDRAYKGMPMNIRGPMWSVLLNTEEMKLKNPGRYQIMKEKGKRSSEHIQRIDRDVSGTLRKHIFFRDRYGTKQAYGSH

SEQ ID NO: 739182 - protein, 134 aa, Homo sapiens
PVSRAVKEFTKTVIGKGRFIGESVKICCKVAVSSTAEKGKSAKTQRLEGRFTWSCWRGLLAECSRAPGATCRRSSLRVITHCSPPPGPLPLCCLLTLSGLTYLIRTTHYVLGHFISENLLFKNNTSIILKARRI

SEQ ID NO: 739183 - protein, 514 aa, Homo sapiens
MADSGLDKKSTKCPDCSSASQKDVLCVCSSKTRVPPVLVVEMSQTSSIGSAESLISLERKKEKNINRDITSRKDLPSRTSNVERKASQQQWGRGNFTEGKVPHIRIENGAAIEEIYTFGRILGKGSFGIVIEATDKETETKWAIKKVNKEKAGSSAVKLLEREVNILKSVKHEHIIHLEQVFETPKKMYLVMELCEDGELKEILDRKGHFSENETRWIIQSLASAIAYLHNNDIVHRDLKLENIMVKSSLIDDNNEINLNIKVTDFGLAVKKQSRSEAMLQATCGTPIYMAPEVISAHDYSQQCDIWSIGVVMYMLLRGEPPFLASSEEKLFELIRKGELHFENAVWNSISDCAKSVLKQLMKVDPAHRITAKELLDNQWLTGNKLSSVRPTNVLEMMKEWKNNPESVEENTTEEKNKPSTEEKLKSYQPWGNVPDANYTSDEEEEKQSTAYEKQFPATSKDNFDMCSSSFTSSKLLPAEIKGEMEKTPVTPSQGTATKYPAKSGALSRTKKKL

SEQ ID NO: 739184 - protein, 106 aa, Homo sapiens
FFNSRHSHVLQETSRGNKLSSVRPTNVLEMMKEWKNNPESVEENTTEEKNKPSTEEKLKSYQPWGNVPDANYTSDEEEEKQATAYEKNTPCFYLRLFFFPLLKFFI

SEQ ID NO: 739185 - protein, 489 aa, Homo sapiens
MADSGLDKKSTKCPDCSSASQKDVLCVCSSKTRVPPVLVVEMSQTSSIGSAESLISLERKKEKNINRDITSRKDLPSRTSNVERKASQQQWGRGNFTEGKVPHIRIENGAAIEEIYTFGRILGKGSFGIVIEATDKETETKWAIKKVNKEKAGSSAVKLLEREVNILKSVKHEHIIHLEQVFETPKKMYLVMELCEDGELKEILDRKGHFSENETRWIIQSLASAIAYLHNNDIVHRDLKLENIMVKSSLIDDNNEINLNIKVTDFGLAVKKQSRSEAMLQATCGTPIYDGLRGEPPFLASSEEKLFELIRKGELHFENAVWNSISDCAKSVLKQLMKVDPAHRITAKELLDNQWLTGNKLSSVRPTNVLEMMKEWKNNPESVEENTTEEKNKPSTEEKLKSYQPWGNVPDANYTSDEEEEKQSTAYEKQFPATSKDNFDMCSSSFTSSKLLPAEIKGEMEKTPVTPSQGTATKYPAKSGALSRTKKKL

SEQ ID NO: 739186 - protein, 448 aa, Homo sapiens
MSQTSSIGSAESLISLERKKEKNINRDITSRKDLPSRTSNVERKASQQQWGRGNFTEGKVPHIRIENGAAIEEIYTFGRILGKGSFGIVIEATDKETETKWAIKKVNKEKAGSSAVKLLEREVNILKSVKHEHIIHLEQVFETPKKMYLVMELCEDGELKEILDRKGHFSENETRWIIQSLASAIAYLHNNDIVHRDLKLENIMVKSSLIDDNNEINLNIKVTDFGLAVKKQSRSEAMLQATCGTPTLYGLRGEPPFLASSEEKLFELIRKGELHFENAVWNSISDCAKSVLKQLMKVDPAHRITAKELLDNQWLTGNKLSSVRPTNVLEMMKEWKNNPESVEENTTEEKNKPSTEEKLKSYQPWGNVPDANYTSDEEEEKQSTAYEKQFPATSKDNFDMCSSSFTSSKLLPAEIKGEMEKTPVTPSQGTATKYPAKSGALSRTKKKL

SEQ ID NO: 739187 - protein, 489 aa, Homo sapiens; identical to SEQ ID NO: 739185

SEQ ID NO: 739188 - protein, 489 aa, Homo sapiens; identical to SEQ ID NO: 739185

SEQ ID NO: 739189 - protein, 489 aa, Homo sapiens
MADSGLDKKSTKCPDCSSASQKDVLCVCSSKTRVPPVLVVEMSQTSSIGSAESLISLERKKEKNINRDITSRKDLPSRTSNVERKASQQQWGRGNFTEGKVPHIRIENGAAIEEIYTFGRILGKGSFGIVIEATDKETETKWAIKKVNKEKAGSSAVKLLEREVNILKSVKHEHIIHLEQVFETPKKMYLVMELCEDGELKEILDRKGHFSENETRWIIQSLASAIAYLHNNDIVHRDLKLENIMVKSSLIDDNNEINLNIKVTDFGLAVKKQSRSEAMLQAIMWDSYLYGLRGEPPFLASSEEKLFELIRKGELHFENAVWNSISDCAKSVLKQLMKVDPAHRITAKELLDNQWLTGNKLSSVRPTNVLEMMKEWKNNPESVEENTTEEKNKPSTEEKLKSYQPWGNVPDANYTSDEEEEKQSTAYEKQFPATSKDNFDMCSSSFTSSKLLPAEIKGEMEKTPVTPSQGTATKYPAKSGALSRTKKKL

SEQ ID NO: 739190 - protein, 489 aa, Homo sapiens
MADSGLDKKSTKCPDCSSASQKDVLCVCSSKTRVPPVLVVEMSQTSSIGSAESLISLERKKEKNINRDITSRKDLPSRTSNVERKASQQQWGRGNFTEGKVPHIRIENGAAIEEIYTFGRILGKGSFGIVIEATDKETETKWAIKKVNKEKAGSSAVKLLEREVNILKSVKHEHIIHLEQVFETPKKMYLVMELCEDGELKEILDRKGHFSENETRWIIQSLASAIAYLHNNDIVHRDLKLENIMVKSSLIDDNNEINLNIKVTDFGLAVKKQSRSEAMLQATMWDSYLYGLRGEPPFLASSEEKLFELIRKGELHFENAVWNSISDCAKSVLKQLMKVDPAHRITAKELLDNQWLTGNKLSSVRPTNVLEMMKEWKNNPESVEENTTEEKNKPSTEEKLKSYQPWGNVPDANYTSDEEEEKQSTAYEKQFPATSKDNFDMCSSSFTSSKLLPAEIKGEMEKTPVTPSQGTATKYPAKSGALSRTKKKL

SEQ ID NO: 739191 - protein, 489 aa, Homo sapiens; identical to SEQ ID NO: 739185

SEQ ID NO: 739192 - protein, 512 aa, Homo sapiens
GCRIPGSATACAECAHLSETRQSAGRGGHYFSAHPAFWLISSLHLTTPLPTPGKTRVPPVLVVEMSQTSSIGSAESLISLERKKEKNINRDITSRKDLPSRTSNVERKASQQQWGRGNFTEGKVPHIRIENGAAIEEIYTFGRILGKGSFGIVIEATDKETETKWAIKKVNKEKAGSSAVKLLEREVNILKSVKHEHIIHLEQVFETPKKMYLVMELCEDGELKEILDRKGHFSENETRWIIQSLASAIAYLHNNDIVHRDLKLENIMVKSSLIDDNNEINLNIKVTDFGLAVKKQSRSEAMLQATCGTPIYDGLRGEPPFLASSEEKLFELIRKGELHFENAVWNSISDCAKSVLKQLMKVDPAHRITAKELLDNQWLTGNKLSSVRPTNVLEMMKEWKNNPESVEENTTEEKNKPSTEEKLKSYQPWGNVPDANYTSDEEEEKQSTAYEKQFPATSKDNFDMCSSSFTSSKLLPAEIKGEMEKTPVTPSQGTATKYPAKSGALSRTKKKL

SEQ ID NO: 739193 - protein, 146 aa, Homo sapiens
FTRTCSSYAIEKIERIQNAFLWQSYQVKKRQMDIKNDHKNNERLLFHGTDADSVPYVNQHGFNRSCAGKNAVSYGKGTYFAVDASYSAKDTYSKPDSNGRKHMYVVRVLTGVFTKGRAGLVTPPPKNPHNPTDLFDSVTNNTRSPK

SEQ ID NO: 739194 - protein, 78 aa, Homo sapiens
TDYVGISRNLDFAPGVRMQTFQVTILDDLGQPTLEGPEKFELLLQMPMGAVLGEPNKTTIFIEDTITDCKQSACSSFD

SEQ ID NO: 739195 - protein, 78 aa, Homo sapiens; identical to SEQ ID NO: 739194

SEQ ID NO: 739196 - protein, 973 aa, Homo sapiens
METRERKKSRAEFGTRATAELGWTANPASGWEEVSGYDENLNTIRTYQVCNVFEPNQNNWLLTTFINRRGAHRIYTEMRFTVRDCSSLPNVPGSCKETFNLYYYETDSVIATKKSAFWSEAPYLKVDTIAADESFSQVDFGGRLMKVNTEVRSFGPLTRNGFYLAFQDYGACMILLSVRVFFKKCPSIVQNFAVFPETMTGAESTSLVIARGTCIPNAEEVDVPIKLYCNGDGEWMVPIGRCTCKPGYEPENSVACKACPAGRFKASQEAEGCSHCPSNSRSPAEASPICTCRTGYYRADFDPPEVACTSVPSGPRNVISIVNESSIILEWHPPRETGGRDDVTYNIICKKCRADGRSCSRCDDNVEFVPRQLGLTECRVSISSLWAHTPYTFDIQAINGVSSKSPFPPQHVSVNITTNQAAPSTVPIMHQVSATMRSITLSWPQPEQPNGIILDYEIRYYEKEHNEFNSSMASSQTNTARIDGLRPGMVYVVQVRARTVAGYGKFSGKMCFQTLTDDDYKSELREQLPLIAGSAAAGVVFVVSLVAISIVCSRKRAYSKEAVYSDKLQHYSTGRGSPGMKIYIDPFTYEDPNEAVREFAKEIDVSFVKIEEVIGAGEFGEVYKGRLKLPGKREIYVAIKTLKAGYSEKQRRDFLSEASIMGQFDHPNIIRLEGVVTKSRPVMIITEFMENGALDSFLRQNDGQFTVIQLVGMLRGIAAGMKYLAEMNYVHRDLAARNILVNSNLVCKVSDFGLSRYLQDDTSDPTYTSSLGGKIPVRWTAPEAIAYRKFTSASDVWSYGIVMWEVMSFGERPYWDMSNQDVINAIEQDYRLPPPMDCPAALHQLMLDCWQKDRNSRPRFAEIVNTLDKMIRNPASLKTVATITAVPSQPLLDRSIPDFTAFTTVDDWLSAIKMVQYRDSFLTAGFTSLQLVTQMTSEDLLRIGITLAGHQKKILNSIHSMRVQISQSPTAMA

SEQ ID NO: 739197 - protein, 984 aa, Homo sapiens
MALDYLLLLLLASAVAAMEETLMDTRTATAELGWTANPASGWEEVSGYDENLNTIRTYQVCNVFEPNQNNWLLTTFINRRGAHRIYTEMRFTVRDCSSLPNVPGSCKETFNLYYYETDSVIATKKSAFWSEAPYLKVDTIAADESFSQVDFGGRLMKVNTEVRSFGPLTRNGFYLAFQDYGACMILLSVRVFFKKCPSIVQNFAVFPETMTGAESTSLVIARGTCIPNAEEVDVPIKLYCNGDGEWMVPIGRCTCKPGYEPENSVACKACPAGRFKASQEAEGCSHCPSNSRSPAEASPICTCRTGYYRADFDPPEVACTSVPSGPRNVISIVNESSIILEWHPPRETGGRDDVTYNIICKKCRADGRSCSRCDDNVEFVPRQLGLTECRVSISSLWAHTPYTFDIQAINGVSSKSPFPPQHVSVNITTNQAAPSTVPIMHQVSATMRSITLSWPQPEQPNGIILDYEIRYYEKEHNEFNSSMASSQTNTARIDGLRPGMVYVVQVRARTVAGYGKFSGKMCFQTLTDDDYKSELREQLPLIAGSAAAGVVFVVSLVAISIVCSRKRAYSKEAVYSDKLQHYSTGRGSPGMKIYIDPFTYEDPNEAVREFAKEIDVSFVKIEEVIGAGEFGEVYKGRLKLPGKREIYVAIKTLKAGYSEKQRRDFLSEASIMGQFDHPNIIRLEGVVTKSRPVMIITEFMENGALDSFLRQNDGQFTVIQLVGMLRGIAAGMKYLAEMNYVHRDLAARNILVNSNLVCKVSDFGLSRYLQDDTSDPTYTSSLGGKIPVRWTAPEAIAYRKFTSASDVWSYGIVMWEVMSFGERPYWDMSNQDVINAIEQDYRLPPPMDCPAALHQLMLDCWQKDRNSRPRFAEIVNTLDKMIRNPASLKTVATITAVPSQPLLDRSIPDFTAFTTVDDWLSAIKMVQYRDSFLTAGFTSLQLVTQMTSEDLLRIGITLAGHQKKILNSIHSMRVQISQSPTAMA

SEQ ID NO: 739198 - protein, 315 aa, Homo sapiens
MHTHTHARPHRPTRTHSCPRPRSAPGSPVRARARKDTEKPPAESAAAPWDAALSRRCCLGLVSACGPSAGDGPGLSTTAPPGIRSGCDGRERTLHGARWLLVPAAWDCCAPRFAGFLWLLCGAGIPGPEGKEVWEPRPLPSAGLGRHPPERPRLALSARNWLASPPASSPRHSLVASVSRSPRSESSEPAALRCMLLSSGAEPELGVGEKGVPLAIRLLEYWRPSAPRHGYASEQPRATSFSPARSPRASGLCLACKHCARGPEKLCRGIPQVAAEGEGWSSLAVPLGTSLVVRAPAGLHVSRVSRGEVETLFAS

SEQ ID NO: 739199 - protein, 984 aa, Homo sapiens; identical to SEQ ID NO: 739197

SEQ ID NO: 739200 - protein, 984 aa, Homo sapiens; identical to SEQ ID NO: 739197

SEQ ID NO: 739201 - protein, 943 aa, Homo sapiens
MALDYLLLLLLASAVAAMEETLMDTRTATAELGWTANPASGWEEVSGYDENLNTIRTYQVCNVFEPNQNNWLLTTFINRRGAHRIYTEMRFTVRDCSSLPNVPGSCKETFNLYYYETDSVIATKKSAFWSEAPYLKVDTIAADESFSQVDFGGRLMKVNTEVRSFGPLTRNGFYLAFQDYGACMILLSVRVFFKKCPSIVQNFAVFPETMTGAESTSLVIARGTCIPNAEEVDVPIKLYCNGDGEWMVPIGRCTCKPGYEPENSVACKACPAGRFKASQEAEGCSHCPSNSRSPAEASPICTCRTGYYRADFDPPEVACTSVPSGPRNVISIVNESSIILEWHPPRETGGRDDVTYNIICKKCRADGRSCSRCDDNVEFVPRQLGLTECRVSISSLWAHTPYTFDIQAINGVSSKSPFPPQHVSVNITTNQAAPSTVPIMHQVSATMRSITLSWPQPEQPNGIILDYEIRYYEKEHNEFNSSMASSQTNTARIDGLRPGMVYVVQVRARTVAGYGKFSGKMCFQTLTDDDYKSELREQLPLIAGSAAAGVVFVVSLVAISIVCSRKRAYSKEAVYSDKLQHYSTGRGSPGMKIYIDPFTYEDPNEAVREFAKEIDVSFVKIEEVIGAGEFGEVYKGRLKLPLEGVVTKSRPVMIITEFMENGALDSFLRQNDGQFTVIQLVGMLRGIAAGMKYLAEMNYVHRDLAARNILVNSNLVCKVSDFGLSRYLQDDTSDPTYTSSLGGKIPVRWTAPEAIAYRKFTSASDVWSYGIVMWEVMSFGERPYWDMSNQDVINAIEQDYRLPPPMDCPAALHQLMLDCWQKDRNSRPRFAEIVNTLDKMIRNPASLKTVATITAVPSQPLLDRSIPDFTAFTTVDDWLSAIKMVQYRDSFLTAGFTSLQLVTQMTSEDLLRIGITLAGHQKKILNSIHSMRVQISQSPTAMA

SEQ ID NO: 739202 - protein, 943 aa, Homo sapiens; identical to SEQ ID NO: 739201

SEQ ID NO: 739203 - protein, 616 aa, Homo sapiens
MALDYLLLLLLASAVAAMEETLMDTRTATAELGWTANPASGWEEVSGYDENLNTIRTYQVCNVFEPNQNNWLLTTFINRRGAHRIYTEMRFTVRDCSSLPNVPGSCKETFNLYYYETDSVIATKKSAFWSEAPYLKVDTIAADESFSQVDFGGRLMKVNTEVRSFGPLTRNGFYLAFQDYGACMILLSVRVFFKKCPSIVQNFAVFPETMTGAESTSLVIARGTCIPNAEEVDVPIKLYCNGDGEWMVPIGRCTCKPGYEPENSVACKACPAGRFKASQEAEGCSHCPSNSRSPAEASPICTCRTGYYRADFDPPEVACTSVPSGPRNVISIVNESSIILEWHPPRETGGRDDVTYNIICKKCRADGRSCSRCDDNVEFVPRQLGLTECRVSISSLWAHTPYTFDIQAINGVSSKSPFPPQHVSVNITTNQAAPSTVPIMHQVSATMRSITLSWPQPEQPNGIILDYEIRYYEKEHNEFNSSMASSQTNTARIDGLRPGMVYVVQVRARTVAGYGKFSGKMCFQTLTDDDYKSELREQLPLIAGSAAAGVVFVVSLVAISIVCSRKRAYSKEAVYSDKLQHYSTGRGSPGMKIYIDPFTYEDPNEAVREFAKEIDV

SEQ ID NO: 739204 - protein, 967 aa, Homo sapiens
MALDYLLLLLLASAVAAMEETLMDTRTATAELGWTANPASGWEEVSGYDENLNTIRTYQVCNVFEPNQNNWLLTTFINRRGAHRIYTEMRFTVRDCSSLPNVPGSCKKSAFWSEAPYLKVDTIAADESFSQVDFGGRLMKVNTEVRSFGPLTRNGFYLAFQDYGACMILLSVRVFFKKCPSIVQNFAVFPETMTGAESTSLVIARGTCIPNAEEVDVPIKLYCNGDGEWMVPIGRCTCKPGYEPENSVACKACPAGRFKASQEAEGCSHCPSNSRSPAEASPICTCRTGYYRADFDPPEVACTSVPSGPRNVISIVNESSIILEWHPPRETGGRDDVTYNIICKKCRADGRSCSRCDDNVEFVPRQLGLTECRVSISSLWAHTPYTFDIQAINGVSSKSPFPPQHVSVNITTNQAAPSTVPIMHQVSATMRSITLSWPQPEQPNGIILDYEIRYYEKEHNEFNSSMASSQTNTARIDGLRPGMVYVVQVRARTVAGYGKFSGKMCFQTLTDDDYKSELREQLPLIAGSAAAGVVFVVSLVAISIVCSRKRAYSKEAVYSDKLQHYSTGRGSPGMKIYIDPFTYEDPNEAVREFAKEIDVSFVKIEEVIGAGEFGEVYKGRLKLPGKREIYVAIKTLKAGYSEKQRRDFLSEASIMGQFDHPNIIRLEGVVTKSRPVMIITEFMENGALDSFLRQNDGQFTVIQLVGMLRGIAAGMKYLAEMNYVHRDLAARNILVNSNLVCKVSDFGLSRYLQDDTSDPTYTSSLGGKIPVRWTAPEAIAYRKFTSASDVWSYGIVMWEVMSFGERPYWDMSNQDVINAIEQDYRLPPPMDCPAALHQLMLDCWQKDRNSRPRFAEIVNTLDKMIRNPASLKTVATITAVPSQPLLDRSIPDFTAFTTVDDWLSAIKMVQYRDSFLTAGFTSLQLVTQMTSEDLLRIGITLAGHQKKILNSIHSMRVQISQSPTAMA

SEQ ID NO: 739205 - protein, 962 aa, Homo sapiens
MDTRTATAELGWTANPASGWEEVSGYDENLNTIRTYQVCNVFEPNQNNWLLTTFINRRGAHRIYTEMRFTVRDCSSLPNVPGSCKETFNLYYYETDSVIATKKSAFWSEAPYLKVDTIAADESFSQVDFGGRLMKVNTEVRSFGPLTRNGFYLAFQDYGACMILLSVRVFFKKCPSIVQNFAVFPETMTGAESTSLVIARGTCIPNAEEVDVPIKLYCNGDGEWMVPIGRCTCKPGYEPENSVACKACPAGRFKASQEAEGCSHCPSNSRSPAEASPICTCRTGYYRADFDPPEVACTSVPSGPRNVISIVNESSIILEWHPPRETGGRDDVTYNIICKKCRADGRSCSRCDDNVEFVPRQLGLTECRVSISSLWAHTPYTFDIQAINGVSSKSPFPPQHVSVNITTNQAAPSTVPIMHQVSATMRSITLSWPQPEQPNGIILDYEIRYYEKEHNEFNSSMASSQTNTARIDGLRPGMVYVVQVRARTVAGYGKFSGKMCFQTLTDDDYKSELREQLPLIAGSAAAGVVFVVSLVAISIVCSRKRAYSKEAVYSDKLQHYSTGRGSPGMKIYIDPFTYEDPNEAVREFAKEIDVSFVKIEEVIGAGEFGEVYKGRLKLPGKREIYVAIKTLKAGYSEKQRRDFLSEASIMGQFDHPNIIRLEGVVTKSRPVMIITEFMENGALDSFLRQNDGQFTVIQLVGMLRGIAAGMKYLAEMNYVHRDLAARNILVNSNLVCKVSDFGLSRYLQDDTSDPTYTSSLGGKIPVRWTAPEAIAYRKFTSASDVWSYGIVMWEVMSFGERPYWDMSNQDVINAIEQDYRLPPPMDCPAALHQLMLDCWQKDRNSRPRFAEIVNTLDKMIRNPASLKTVATITAVPSQPLLDRSIPDFTAFTTVDDWLSAIKMVQYRDSFLTAGFTSLQLVTQMTSEDLLRIGITLAGHQKKILNSIHSMRVQISQSPTAMA

SEQ ID NO: 739206 - protein, 110 aa, Homo sapiens
MLSLLMSSSHRLGSLITSTTPTPPGEYNVIRSGVGLTGSRQTMFYTEVTDAQRSGPGGGLVEEGELIEVVHLPLEGAQAFADDPDIPKTLGVIFGVSWFLSQVAPNLDLQ

SEQ ID NO: 739207 - protein, 247 aa, Homo sapiens
SRARPKAPVGTGRRPVSAPACPGAAMERIEGASVGRCAASPYLRPLTLHYRQNGAQKSWDFMKTHDSVTVLLFNSSRRSLVLVKQFRPAVYAGEVERRFPGSLAAVDQDGPRELQPALPGSAGVTVELCAGLVDQPGLSLEEVACKEAWEECGYHLAPSDLRRVATYWSGVGLTGSRQTMFYTEVTDAQRSGPGGGLVEEGELIEVVHLPLEGAQAFADDPDIPKTLGVIFGVSWFLSQVAPNLDLQ

SEQ ID NO: 739208 - protein, 114 aa, Homo sapiens
PVTYIGEPARRPSQHVEGASGASVGDSADPVSTRRSGVGLTGSRQTMFYTEVTDAQRSGPGGGLVEEGELIEVVHLPLEGAQAFADDPDIPKTLGVIFGVSWFLSQVAPNLDLQ

SEQ ID NO: 739209 - protein, 253 aa, Homo sapiens
SRARPKAPVGTGRRPVSAPAELAAPACPGAAMERIEGASVGRCAASPYLRPLTLHYRQNGAQKSWDFMKTHDSVTVLLFNSSRRSLVLVKQFRPAVYAGEVERRFPGSLAAVDQDGPRELQPALPGSAGVTVELCAGLVDQPGLSLEEVACKEAWEECGYHLAPSDLRRVATYWSGVGLTGSRQTMFYTEVTDAQRSGPGGGLVEEGELIEVVHLPLEGAQAFADDPDIPKTLGVIFGVSWFLSQVAPNLDLQ

SEQ ID NO: 739210 - protein, 253 aa, Homo sapiens; identical to SEQ ID NO: 739209

SEQ ID NO: 739211 - protein, 205 aa, Homo sapiens
LEDLPRLARQNGAQKSWDFMKTHDSVTVLLFNSSRRSLVLVKQFRPAVYAGEVERRFPGSLAAVDQDGPRELQPALPGSAGVTVELCAGLVDQPGLSLEEVACKEAWEECGYHLAPSDLRRVATYWSGVGLTGSRQTMFYTEVTDAQRSGPGGGLVEEGELIEVVHLPLEGAQAFADDPDIPKTLGVIFGVSWFLSQVAPNLDLQ

SEQ ID NO: 739212 - protein, 104 aa, Homo sapiens
MGWGLAWASAAGHRLRGSKQHWEQPQGIWLGAADRGGVFCLALTGCRQVVSRICNLMGAWGLPGSRGYGRIQLLVAGDWVPPPCWLLALPSMAVASPSGPAGLA

SEQ ID NO: 739213 - protein, 168 aa, Homo sapiens
SRARPKAPVGTGRRPVSAPAELAAPACPGAAMERIEGASVGRCAASPYLRPLTLHYRQNGAQKSWDFMKTHDSLVLVKQFRPAVYAGEVERRFPGSLAAVDQDGPRELQPALPGSAGVTVELCAGLVDQPGLSLEEVACKEAWEECGYHLAPSDLRRVATYWDATMGS

SEQ ID NO: 739214 - protein, 100 aa, Homo sapiens
SRARPKAPVGTGRRPVSAPAELAAPACPGAAMERIEGASVGRCAASPYLRPLTLHYRQNGAQKSWDFMKTHDSVTVLLFNSSRRSLVLVKQFRPAVYAGD

SEQ ID NO: 739215 - protein, 450 aa, Homo sapiens
MDVKERRPYCSLTKSRREKERRYTNSSADNEECRVPTQKSYSSSETLKAFDHDSSRLLYGNRVKDLVHREADEFTRQGQNFTLRQLGVCEPATRRGLAFCAEMGLPHRGYSISAGSDADTENEAVMSPEHAMRLWGRGVKSGRSSCLSSRSNSALTLTDTEHENKSDSENEQPASNQGQSTLQPLPPSHKQHSAQHHPSITSLNRNSLTNRRNQSPAPPAALPAELQTTPESVQLQDSWVLGSNVPLESRHFLFKTGTGTTPLFSTATPGYTMASGSVYSPPTRPLPRNTLSRSAFKFKKSSKYCSWKCTALCAVGVSVLLAILLSYFIAMHLFGLNWQLQQTENDTFENGKVNSDTMPTNTVSLPSGDNGKLGGFTQENNTIDSGELDIGRRAIQEIPPGIFWRSQLFIDQPQFLKFNISLQKDALIGVYGRKKLTAFPYSGKTRLSYQ

SEQ ID NO: 739216 - protein, 171 aa, Homo sapiens
MDVKERRPYCSLTKSRREKERRYTNSSADNEECRVPTQKSYSSSETLKAFDHDSSRLLYGNRVKDLVHREADEFTRQGQNFTLRQLGVCEPATRRGLAFCAEMGLPHRGYSISAGSDADTENEAVMSPEHAMRLWGRGVKSGRSSCLSSRSNSALTLTDTEHENKSDSENA

SEQ ID NO: 739217 - protein, 66 aa, Homo sapiens
MLALQEKGEELGNPWVSRRVVRLGNVLENLVSCVLLLIDLSGGTFMGNRDEKEKFLPKEYSFCFTS

SEQ ID NO: 739218 - protein, 81 aa, Homo sapiens
FTLEKGHMSVENVESVFVKRETSLNINEFTREKDIMNVENLADLLVKRAPSFNIREITLESTYEYGECAKSSSQKVGLIQQ

SEQ ID NO: 739219 - protein, 109 aa, Homo sapiens
FTLEKGHMSVENVESVFVKRETSLNINEFTREKDIMNVENLADLLVKRAPSFNIREITLESTYEYGECAKSSSAKKRCALTCEPIGRDPHVALKWLLLMLVEELLMTTP

SEQ ID NO: 739220 - protein, 104 aa, Homo sapiens
MPLPRSAFEDCDLHQEVLLTPVGKISPSFCLECPVFDLAAGVEPSPRPPGALPLWLSRNRMWLPWPNVVLLSPTPAPQLLSSSGPCVWLVFAGLSLCSGIALPL

SEQ ID NO: 739221 - protein, 104 aa, Homo sapiens; identical to SEQ ID NO: 739220

SEQ ID NO: 739222 - protein, 104 aa, Homo sapiens; identical to SEQ ID NO: 739220

SEQ ID NO: 739223 - protein, 71 aa, Homo sapiens
SRKKLGTCTGIEIDNPRCLCKSSSPRMLNFISKKKLPDVHRIIRVIMILELLYKSVLFAVDLSGLIQMYLW

SEQ ID NO: 739224 - protein, 164 aa, Homo sapiens
LLPPPQPLPPQRRGHVVWCVGRGEEEEGVKPREETGERHHTHGTRWPERQQHPELSGVPPRPRGPPAGGELRPDGQQARGSGAAAAEARRAARVGVTARGRGAQGGRAHDAESAAAVAASEAPPGPGGWTRRGREARAGGPARDSGLGDQEVPVAALGPGDLRD

SEQ ID NO: 739225 - protein, 164 aa, Homo sapiens; identical to SEQ ID NO: 739224

SEQ ID NO: 739226 - protein, 188 aa, Homo sapiens
LLPPPQPLPPQRRGHVVWCVGRGEEEEGVKPREETGERHHTHGTRWPERQQHPELSGVPPRPRGPPAGGELRPDGQQARGSGAAAAEARRAARVGVTARGRGAQGGRAHDAESAAAVAASEAPPGPGGWTRRGREARAGGPARDSGLGDQEVPVAALGPGSPTEELFNLFPVRWELIFMIEFKRTMEP

SEQ ID NO: 739227 - protein, 178 aa, Homo sapiens
LLPPPQPLPPQRRGHVVWCVGRGEEEEGVKPREETGERHHTHGTRWPERQQHPELSGVPPRPRGPPAGGELRPDGQQARGSGAAAAEARRAARVGVTARGRGAQGGRAHDAESAAAVAASEAPPGPGGWTRRGREARAGGPARDSGLGDQEVPVAALGPGSPTEELFNLFPPILKRLQ

SEQ ID NO: 739228 - protein, 164 aa, Homo sapiens; identical to SEQ ID NO: 739224

SEQ ID NO: 739229 - protein, 92 aa, Homo sapiens
NISAIEKQKLVYILNRDAAARLTISSPLEAHKANTLVYHVVGVDVGFEDPMFACLEMDYEEADNDPTGEAAANTQQTLDCISTNSDGELENL

SEQ ID NO: 739230 - protein, 164 aa, Homo sapiens; identical to SEQ ID NO: 739224

SEQ ID NO: 739231 - protein, 120 aa, Homo sapiens
RPRGPPAGGELRPDGQQARGSGAAAAEARRAARVGVTARGRGAQGGRAHDAESAAAVAASEAPPGPGGWTRRGREARAGGPARDSGLGDQEVPVAALGPGEWLPSSFYCPLSLGGKAKCP

SEQ ID NO: 739232 - protein, 143 aa, Homo sapiens
MRGSPREGGWPVEGLARIPDGRRKGGEPVKEADPKLRPGASSLMRGKPRSATILGSPFRRQRPPGHRGPPSHSAPPGHAAPAGRRGCPRHTVPRTETPPGHRGPPRHAVSRTQRSPQDTQCPQDTEVPQDTALPGHTAPPGHR

SEQ ID NO: 739233 - protein, 226 aa, Homo sapiens
MTEWTPCSRTCGKGMQSRQVACTQQLSNGTLIRARERDCIGPKPASAQRCEGQDCMTVWEAGVWSECSVKCGKGIRHRTVRCTNPRKKCVLSTRPREAEDCEDYSKCYVWRMGDWSKCSITCGKGMQSRVIQCMHKITGRHGNECFSSEKPAAYRPCHLQPCNEKINVNTITSPRLAALTFKCLGDQWPVYCRVIREKNLCQDMRWYQRCCETCRDFYAQKLQQKS

SEQ ID NO: 739234 - protein, 290 aa, Homo sapiens
MWTHTSWEDCDATCGGGERKTTVSCTKIMSKNISIVDNEKCKYLTKPEPQIRKCNEQPCQTRWMMTEWTPCSRTCGKGMQSRQVACTQQLSNGTLIRARERDCIGPKPASAQRCEGQDCMTVWEAGVWSECSVKCGKGIRHRTVRCTNPRKKCVLSTRPREAEDCEDYSKCYVWRMGDWSKCSITCGKGMQSRVIQCMHKITGRHGNECFSSEKPAAYRPCHLQPCNEKINVNTITSPRLAALTFKCLGDQWPVYCRVIREKNLCQDMRWYQRCCETCRDFYAQKLQQKS

SEQ ID NO: 739235 - protein, 115 aa, Homo sapiens
CEKSGVTSETCFSSAAPPARDGPCSFPLRDVPGIHPGLSVRADFPTPVFATMIVTCSKLSFCSFAGHMHSFLPKTTPHHTAETVVTENMVCLPSLPFVGTSVASCCAPNKSKRPC

SEQ ID NO: 739236 - protein, 111 aa, Homo sapiens
MDGTRWDRHSHPLRAPKSNYLTEGRLCPWPHTGSSLSQWSAGLWYNARRPHVVPAPERAMGWGAELKTHRPLINTVASTCAALCQGPWSLPPMLLQPIWSSCPQPQHPIYL

SEQ ID NO: 739237 - protein, 211 aa, Homo sapiens
EGSRDQPGASMSRREGSLEDPQTDSSVSLLPHLEAKIRQTHSLAHLLTKYAEQLLQEYVQLQGDPFGLPSFSPPRLPVAGLSAPAPSHAGLPVHERLRLDAAALAALPPLLDAVCRRQAELNPRAPRLLRRLEDAARQARALGAAVEALLAALGAANRGPRAEPPAATASAASATGVFPAKVLGLRVCGLYREWLSRTEGDLGQLLPGGSA

SEQ ID NO: 739238 - protein, 110 aa, Homo sapiens [sequence omitted]

SEQ ID NO: 739239 - protein, 504 aa, Homo sapiens [sequence omitted]

SEQ ID NO: 739240 - protein, 504 aa, Homo sapiens [sequence omitted]

SEQ ID NO: 739241 - protein, 504 aa, Homo sapiens [sequence omitted]

SEQ ID NO: 739242 - protein, 482 aa, Homo sapiens
MGIKTALPAAELGLYSLVLSGALAYAGRGLLEASQDGAHRKAFRESVRPGWEYIGRKMDVADFEWVMWFTSFRNVIIFALSGHVLFAKLCTMVAPKLRSWMYAVYGALAVMGTMGPWYLLLLLGHCVGLYVASLLGQPWLCLGLGLASLASFKMDPLISWQSGFVTGTFDLQEVLFHGGSSFTVLRCTSFALESCAHPDRHYSLADLLKYNFYLPFFFFGPIMTFDRFHAQVSQVEPVRREGELWHIRAQAGLSVVAIMAVDIFFHFFYILTIPSDLKFANRLPDSALAGLAYSNLVYDWVKAAVLFGVVNTVACLDHLDPPQPPKCITALYVFAETHFDRGINDWLCKYVYNHIGGEHSAVIPELAATVATFAITTLWLGPCDIVYLWSFLNCFGLNFELWVQKLAEWGPLARIEASLSVQMSRRVRALFGAMNFWAIIMYNLVSLNSLKFTELVARRLLLTGEGQGCGDTEGARHQPQGP

SEQ ID NO: 739243 - protein, 427 aa, Homo sapiens
MGIKTALPAAELGLYSLVLSGALAYAGRGLLEASQDGAHRKAFRESVRPGWEYIGRKMDVADFEWVMWFTSFRNVIIFALSGHVLFAKLCTMVAPKLRSWMYAVYGALAVMGTMGPWYLLLLLGHCVGLYVASLLGQPWLCLGLGLASLASFKMDPLISWQSGFVTGTFDLQEVLFHGGSSFTVLRCTSFALESCAHPDRHYSLADLLKYNFYLPFFFFGPIMTFDRFHAQVSQVEPVRREGELWHIRAQAGLSVVAIMAVDIFFHFFYILTIPSDLKFANRLPDSALAGLAYSNLVYDWVKAAVLFGVVNTVACLDHLDPPQPPKCITALYVFAETHFDRGINDWLCKVRALFGAMNFWAIIMYNLVSLNSLKFTELVARRLLLTGFPQTTLSILFVTYCGVQLVKERERTLALEEEQKQDKEKPE

SEQ ID NO: 739244 - protein, 286 aa, Homo sapiens
MGIKTALPAAELGLYSLVLSGALAYAGRGLLEASQDGAHRKAFRESVRPGWEYIGRKMDVADFEWVMWFTSFRNVIIFALSGHVLFAKLCTMVAPKLRSWMYAVYGALAVMGTMGPWYLLLLLGHCVGLYVASLLGQPWLCLGLGLASLASFKMDPLISWQSGFVTGTFDLQEVLFHGGSSFTVLRCTSFALESCAHPDRHYSLADLLKYNFYLPMNFWAIIMYNLVSLNSLKFTELVARRLLLTGFPQTTLSILFVTYCGVQLVKERERTLALEEEQKQDKEKPE

SEQ ID NO: 739245 - protein, 121 aa, Homo sapiens
SLTVTDGTHTDFYVLPDTALATHKPQVMRVQIRSLDNRLPQITTNRGAPALKRLHTGHMGFLITSKSLKAEDQDSPHRLLKYKVTRGPEHGFIIKTGLGNQSTRVFTQADIDEMKISYVFE

SEQ ID NO: 739246 - protein, 121 aa, Homo sapiens
MGTWAMRNILPNHVTAETSLSRPPGQRPNSLTAGTSLPYPAGQQALPPRSLPPSPMITPACEWQLVLALSWFPPPQGFAGNKDVAAVTWLGRMFLMAQVPMERFTVIRVCKMAGGLRNGTG

SEQ ID NO: 739247 - protein, 115 aa, Homo sapiens [sequence omitted]

SEQ ID NO: 739248 - protein, 117 aa, Homo sapiens
LFAASCYIPAHSRPAAPLPARSVPRILPREPQTMGPIRVRTVVSAENAGALGCRKFFRSARPLFPARARERRFQFAWTCERAKAERSGERMCEPTSSSSRYPGLTERSACASLKPRG

SEQ ID NO: 739249 - protein, 126 aa, Homo sapiens
RELLPLISGASLKARWGRCSHAPAREIGHQRHRVSCLGSHSPQQQGLEPETGCSCSPAVPSCTSGASPPDSSDRNPLCIFILLLAQPALNRCDLGQECMKAGPVVLHAASWTGGPSVFVSVVMRRA

SEQ ID NO: 739250 - protein, 127 aa, Homo sapiens
  misc_feature (121)..(121): Xaa can be any naturally occurring amino acid
FLEDPGLTKSPASAGDHVGRLGSSRSVTSLGHTLVESALTRPSLPSPHRTSPRVEESNSKLLESERKLQEERHRTVVLEQHLEKIRLEPGKASASQRAAPRTKTAPFLGCMLCYGALAVDXAQWGLG

SEQ ID NO: 739251 - protein, 259 aa, Homo sapiens
MNLVDLWLTRSLSMCLLLQSFVLMILCFHSASMCPKGCLCSSSGGLNVTCSNANLKEIPRDLPPETVLLYLDSNQITSIPNEIFKDLHQLRVLNLSKNGIEFIDEHAFKGVAETLQTLDLSDNRIQSVHKNAFNNLKARARIANNPWHCDCTLQQVLRSMASNHETAHNVICKTSVLDEHAGRPFLNAANDADLCNLPKKTTDYAMLVTMFGWFTMVISYVVYYVRQNQEDARRHLEYLKSLPSRQKKADEPDDISTVV

SEQ ID NO: 739252 - protein, 259 aa, Homo sapiens; identical to SEQ ID NO: 739251

SEQ ID NO: 739253 - protein, 259 aa, Homo sapiens; identical to SEQ ID NO: 739251

SEQ ID NO: 739254 - protein, 67 aa, Homo sapiens
DVRKESESPGDRISAKNIYTMEYCAAIKRNEFMSFAGTWMKLETIILSKLTQQQKTKHRMFSLISGS

SEQ ID NO: 739255 - protein, 109 aa, Homo sapiens
MPQFSLEQSTLGPYSAPSPAYSSSSLYAPDAVASSGPIISDITVRAPASPMASPGGSIDERPLSSIPCKYLLGAMGRGLGGGRWGNPLPWPCLPFLPRAPSYFFFFNTM

SEQ ID NO: 739256 - protein, 183 aa, Homo sapiens
MIKLFSLKQQKKEEESAGGTKGSSKKASAAQLRIQKDINELNLPKTCDISFSDPDDLLNFKLVICPDEGFYKSGKFVFSFKVGQGYPHDPPKVKCETMVYHPNIDLEGNVCLNILREDWKPVLTINSIIYGLQYLFLEPNPEDPLNKEAAEVLQNNRRLFEQNVQRSMRGGYIGSTYFERCLK

SEQ ID NO: 739257 - protein, 183 aa, Homo sapiens; identical to SEQ ID NO: 739256

SEQ ID NO: 739258 - protein, 183 aa, Homo sapiens; identical to SEQ ID NO: 739256

SEQ ID NO: 739259 - protein, 183 aa, Homo sapiens; identical to SEQ ID NO: 739256

SEQ ID NO: 739260 - protein, 261 aa, Homo sapiens
SGGEPKRAGGGNIRSGGAPEAVADLRAKAAAAAEDDPPVPARRHRSCRVLLPPLAAPPRGGISLAAKRHGRGSPESAAAAGPETRVGQKKEEESAGGTKGSSKKASAAQLRIQKDINELNLPKTCDISFSDPDDLLNFKLVICPDEGFYKSGKFVFSFKVGQGYPHDPPKVKCETMVYHPNIDLEGNVCLNILREDWKPVLTINSIIYGLQYLFLEPNPEDPLNKEAAEVLQNNRRLFEQNVQRSMRGGYIGSTYFERCLK

SEQ ID NO: 739261 - protein, 116 aa, Homo sapiens
MIKLFSLKQQKKEEESAGGTKGSSKKASAAQLRIQKDINELNLPKTCDISFSDPDDLLNFKLVICPDEGFYKSGKFVFSFKVGQGYPHDPPKVKCETMVYHPNIDLEGNVCLNILR

SEQ ID NO: 739262 - protein, 102 aa, Homo sapiens
MLSVHREDWKPVLTINSIIYGLQYLFLVSRNEVVGSGEIGLLSLWPVDPPYLYWPQEPNPEDPLNKEAAEVLQNNRRLFEQNVQRSMRGGYIGSTYFERCLK

SEQ ID NO: 739263 - protein, 183 aa, Homo sapiens; identical to SEQ ID NO: 739256

SEQ ID NO: 739264 - protein, 183 aa, Homo sapiens; identical to SEQ ID NO: 739256

SEQ ID NO: 739265 - protein, 183 aa, Homo sapiens; identical to SEQ ID NO: 739256

SEQ ID NO: 739266 - protein, 182 aa, Homo sapiens
MNGQDGSLAVLLVHPMCAMHAMNGCRRAQLAGSMKDINELNLPKTCDISFSDPDDLLNFKLVICPDEGFYKSGKFVFSFKVGQGYPHDPPKVKCETMVYHPNIDLEGNVCLNILREDWKPVLTINSIIYGLQYLFLEPNPEDPLNKEAAEVLQNNRRLFEQNVQRSMRGGYIGSTYFERCLK

SEQ ID NO: 739267 - protein, 160 aa, Homo sapiens
MIKLFSLKQQKKEEESAGGTKGSSKKASAAQLRIQKDINELNLPKTCDISFSDPDDLLNFKLVICPDEVRVHMAEFPGANQGCPHSEEGDMFCPSGPTGWNPKIFFSPFSSQGFYKSGKFVFSFKVGQGYPHDPPKVKCETMVYHPNIDLEGNVCLNILR

SEQ ID NO: 739268 - protein, 361 aa, Homo sapiens
GVTAPRATQQAEDPRESPSTLWGHVGPSIPACLRVRRQSWWPGKPRSASAEPLRRVAVTGGTHGNEMSGVYLARHWLHAPAELQRASFSAVPVLANPAATSGCRRYVDHDLNRTFTSSFLNSRPTPDDPYEVTRARELNQLLGPKASGQAFDFVLDLHNTTANMGTCLIAKSSHEVFAMHLCRHLQLQYPELSCQVFLYQRSGEESYNLDSVAKNGLGLELGPQPQGVLRADIFSRMRTLVATVLDFIELFNQGTAFPAFEMEAYRPVGVVDFPRTEAGHLAGTVHPQLQDRDFQPLQPGAPIFQMFSGEDLLYEGESTVYPVFINEAAYYEKGVAFVQTEKFTFTVPAMPALTPAPSPAS

SEQ ID NO: 739269 - protein, 319 aa, Homo sapiens
MCSLPVPREPLRRVAVTGGTHGNEMSGVYLARHWLHAPAELQRASFSAVPVLANPAATSGCRRYVDHDLNRTFTSSFLNSRPTPDDPYEVTRARELNQLLGPKASGQAFDFVLDLHNTTANMGTCLIAKSSHEVFAMHLCRHLQLQYPELSCQVFLYQRSGEESYNLDSVAKNGLGLELGPQPQGVLRADIFSRMRTLVATVLDFIELFNQGTAFPAFEMEAYRPVGVVDFPRTEAGHLAGTVHPQLQDRDFQPLQPGAPIFQMFSGEDLLYEGESTVYPVFINEAAYYEKGVAFVQTEKFTFTVPAMPALTPAPSPAS

SEQ ID NO: 739270 - protein, 135 aa, Homo sapiens
MATRCRASTWPGTGCMPPQSCREPASPLCLCWPTRQPHPAAAATWNFPRTEAGHLAGTVHPQLQDRDFQPLQPGAPIFQMFSGEDLLYEGESTVYPVFINEAAYYEKGVAFVQTEKFTFTVPAMPALTPAPSPAS

SEQ ID NO: 739271 - protein, 77 aa, Homo sapiens
ARKYSNWKETCNCPVDISNTLNFAISSHRHQMDTKVIQTVSAMDKDDPKNGHYFLYSLLPEMVNNPNFTIKKNEGMP

SEQ ID NO: 739272 - protein, 83 aa, Homo sapiens
ARKYSNWKETCNCPVDISNTLNFAISSHRHQMDTKVIQTVSAMDKDDPKNGHYFLYSLLPEMVNNPNFTIKKNEDQKSMSFAS

SEQ ID NO: 739273 - protein, 800 aa, Homo sapiens
MPERLAEMLLDLWTPLIILWITLPPCIYMAPMNQSQVLMSGSPLELNSLGEEQRILNRSKRGWVWNQMFVLEEFSGPEPILVGRLHTDLDPGSKKIKYILSGDGAGTIFQINDVTGDIHAIKRLDREEKAEYTLTAQAVDWETSKPLEPPSEFIIKVQDINDNAPEFLNGPYHATVPEMSILGTSVTNVTATDADDPVYGNSAKLVYSILEGQPYFSIEPETAIIKTALPNMDREAKEEYLVVIQAKDMGGHSGGLSGTTTLTVTLTDVNDNPPKFAQSLYHFSVPEDVVLGTAIGRVKANDQDIGENAQSSYDIIDGDGTALFEITSDAQAQDGIIRLRKPLDFETKKSYTLKVEAANVHIDPRFSGRGPFKDTATVKIVVEDADEPPVFSSPTYLLEVHENAALNSVIGQVTARDPDITSSPIRFSIDRHTDLERQFNINADDGKITLATPLDRELSVWHNITIIATEIRNHSQISRVPVAIKVLDVNDNAPEFASEYEAFLCENGKPGQVIQTVSAMDKDDPKNGHYFLYSLLPEMVNNPNFTIKKNEDNSLSILAKHNGFNRQKQEVYLLPIIISDSGNPPLSSTSTLTIRVCGCSNDGVVQSCNVEAYVLPIGLSMGALIAILACIILLLVIVVLFVTLRRHQKNEPLIIKDDEDVRENIIRYDDEGGGEEDTEAFDIATLQNPDGINGFLPRKDIKPDLQFMPRQGLAPVPNGVDVDEFINVRLHEADNDPTAPPYDSIQIYGYEGRGSVAGSLSSLESTTSDSDQNFDYLSDWGPRFKRLGELYSVGESDKET

SEQ ID NO: 739274 - protein, 532 aa, Homo sapiens
MPERLAEMLLDLWTPLIILWITLPPCIYMAPMNQSQVLMSGSPLELNSLGEEQRILNRSKRGWVWNQMFVLEEFSGPEPILVGRLHTDLDPGSKKIKYILSGDGAGTIFQINDVTGDIHAIKRLDREEKAEYTLTAQAVDWETSKPLEPPSEFIIKVQDINDNAPEFLNGPYHATVPEMSILGTSVTNVTATDADDPVYGNSAKLVYSILEGQPYFSIEPETAIIKTALPNMDREAKEEYLVVIQAKDMGGHSGGLSGTTTLTVTLTDVNDNPPKFAQSLYHFSVPEDVVLGTAIGRVKANDQDIGENAQSSYDIIDGDGTALFEITSDAQAQDGIIRLRKPLDFETKKSYTLKVEAANVHIDPRFSGRGPFKDTATVKIVVEDADEPPVFSSPTYLLEVHENAALNSVIGQVTARDPDITSSPIRFSIDRHTDLERQFNINADDGKITLATPLDRELSVWHNITIIATEIRNHSQISRVPVAIKVLDVNDNAPEFASEYEAFLCENGKPGQVNISMLLMLNMFVYNCLIFD

SEQ ID NO: 739275 - protein, 321 aa, Homo sapiens
PKYQTTKRMSLSFYRWQEPLKSSEMLTSSFMFQVIQTVSAMDKDDPKNGHYFLYSLLPEMVNNPNFTIKKNEDNSLSILAKHNGFNRQKQEVYLLPIIISDSGNPPLSSTSTLTIRVCGCSNDGVVQSCNVEAYVLPIGLSMGALIAILACIILLLVIVVLFVTLRRHQKNEPLIIKDDEDVRENIIRYDDEGGGEEDTEAFDIATLQNPDGINGFLPRKDIKPDLQFMPRQGLAPVPNGVDVDEFINVRLHEADNDPTAPPYDSIQIYGYEGRGSVAGSLSSLESTTSDSDQNFDYLSDWGPRFKRLGELYSVGESDKET

SEQ ID NO: 739276 - protein, 286 aa, Homo sapiens
MPERLAEMLLDLWTPLIILWITLPPCIYMAPMNQSQVLMSGSPLELNSLGEEQRILNRSKRGWVWNQMFVLEEFSGPEPILVGRLHTDLDPGSKKIKYILSGDGAGTIFQINDVTGDIHAIKRLDREEKAEYTLTAQAVDWETSKPLEPPSEFIIKVQDINDNAPEFLNGPYHATVPEMSILGTSVTNVTATDADDPVYGNSAKLVYSILEGQPYFSIEPETAIIKTALPNMDREAKEEYLVVIQAKDMGGHSGGLSGTTTLTVTLTDVNDNPPKFAQSKLISCTG

SEQ ID NO: 739277 - protein, 198 aa, Homo sapiens
MPERLAEMLLDLWTPLIILWITLPPCIYMAPMNQSQVLMSGSPLELNSLGEEQRILNRSKRGWVWNQMFVLEEFSGPEPILVGRLHTDLDPGSKKIKYILSGDGAGTIFQINDVTGDIHAIKRLDREEKAEYTLTAQAVDWETSKPLEPPSEFIIKVQDINDNAPEFLNGPYHATVPEMSILGMYASNFTDLLKVIFR

SEQ ID NO: 739278 - protein, 185 aa, Homo sapiens
MAPKGSSKQQSEEDLLLQDFSRNLSAKSSALFFGNAFIVSAIPIWLYWRIWHMDLIQSAVLYSVMTLVSTYLVAFAYKNVKFVLKHKVAQKREDAVSKEVTRKLSEADNRKMSRKEKDERILWKKNEVADYEATTFSIFYNNTLFLVVVIVASFFILKNFNPTVNYILSISASSGLIALLSTGSK

SEQ ID NO: 739279 - protein, 185 aa, Homo sapiens; identical to SEQ ID NO: 739278

SEQ ID NO: 739280 - protein, 214 aa, Homo sapiens
TYVIVRGRVVTLPALAAGSTFPVLACSSAMAPKGSSKQQSEEDLLLQDFSRNLSAKSSALFFGNAFIVSAIPIWLYWRIWHMDLIQSAVLYSVMTLVSTYLVAFAYKNVKFVLKHKVAQKREDAVSKEVTRKLSEADNRKMSRKEKDERILWKKNEVADYEATTFSIFYNNTLFLVVVIVASFFILKNFNPTVNYILSISASSGLIALLSTGSK

SEQ ID NO: 739281 - protein, 185 aa, Homo sapiens; identical to SEQ ID NO: 739278

SEQ ID NO: 739282 - protein, 185 aa, Homo sapiens; identical to SEQ ID NO: 739278

SEQ ID NO: 739283 - protein, 187 aa, Homo sapiens
TSSSDPDFTKQQSEEDLLLQDFSRNLSAKSSALFFGNAFIVSAIPIWLYWRIWHMDLIQSAVLYSVMTLVSTYLVAFAYKNVKFVLKHKVAQKREDAVSKEVTRKLSEADNRKMSRKEKDERILWKKNEVADYEATTFSIFYNNTLFLVVVIVASFFILKNFNPTVNYILSISASSGLIALLSTGSK

SEQ ID NO: 739284 - protein, 189 aa, Homo sapiens
RLGSEAGWCQPKQQSEEDLLLQDFSRNLSAKSSALFFGNAFIVSAIPIWLYWRIWHMDLIQSAVLYSVMTLVSTYLVAFAYKNVKFVLKHKVAQKREDAVSKEVTRKLSEADNRKMSRKEKDERILWKKNEVADYEATTFSIFYNNTLFLVVVIVASFFILKNFNPTVNYILSISASSGLIALLSTGSK

SEQ ID NO: 739285 - protein, 198 aa, Homo sapiens
MAPKGSSKQQSEEDLLLQDFSRNLSAKSSALFFGNAFIVSAIPIWLYWRIWHMDLIQSAVLYSVMTLVSTYLVAFAYKNVKFVLKHKVAQKREDAVSKEVTRKLSEADNRKMSRKEKDERFDSCLKYGHHKRGILWKKNEVADYEATTFSIFYNNTLFLVVVIVASFFILKNFNPTVNYILSISASSGLIALLSTGSK

SEQ ID NO: 739286 - protein, 106 aa, Homo sapiens
AAAYYYYCSEFKLLTMYGELHPLALCLWVACGIWKSSRVVRVGDTRCFYSLEPLKNPAECNSVFVYWLFFDRLLKLNELKGKLRVLGRLLKGKKCLAMCCNHKRRK

SEQ ID NO: 739287 - protein, 185 aa, Homo sapiens; identical to SEQ ID NO: 739278

SEQ ID NO: 739288 - protein, 169 aa, Homo sapiens
MAPKGSSKQQSEEDLLLQDFSRNLSAKSSALFFGNAFIVSAIPIWLYWRIWHMDLIQSAVLYSVMTLVSTYLVAFAYKNVKFVLKHKVAQKREDAVSKEVTRKLSEADNRKMSRKEKDERILWKKNEVADYEATTFSIFYNNTLFLVVVIVASFFILKNFNPTVYPFQG

SEQ ID NO: 739289 - protein, 92 aa, Homo sapiens
ACSSAMAPKGSSKQQSEEDLLLQDFSRNLSAKSSALFFGNAFIVSAIPICECWERGGLGRPPASRAGRGRGRTRRAGKAWVPAGGRQSLQLP

SEQ ID NO: 739290 - protein, 185 aa, Homo sapiens; identical to SEQ ID NO: 739278

SEQ ID NO: 739291 - protein, 185 aa, Homo sapiens; identical to SEQ ID NO: 739278

SEQ ID NO: 739292 - protein, 185 aa, Homo sapiens; identical to SEQ ID NO: 739278

SEQ ID NO: 739293 - protein, 185 aa, Homo sapiens; identical to SEQ ID NO: 739278

SEQ ID NO: 739294 - protein, 185 aa, Homo sapiens; identical to SEQ ID NO: 739278

SEQ ID NO: 739295 - protein, 187 aa, Homo sapiens
  misc_feature (1)..(3): Xaa can be any naturally occurring amino acid
  misc_feature (6)..(6): Xaa can be any naturally occurring amino acid
XXXIGXEGSKQQSEEDLLLQDFSRNLSAKSSALFFGNAFIVSAIPIWLYWRIWHMDLIQSAVLYSVMTLVSTYLVAFAYKNVKFVLKHKVAQKREDAVSKEVTRKLSEADNRKMSRKEKDERILWKKNEVADYEATTFSIFYNNTLFLVVVIVASFFILKNFNPTVNYILSISASSGLIALLSTGSK

SEQ ID NO: 739296 - protein, 230 aa, Homo sapiens
LNSTPPSRPPQVKTATIATERNGKPENHTMNINASIYDEIQQEMKRAKVSQALFAKVAATKSQDFSRNLSAKSSALFFGNAFIVSAIPIWLYWRIWHMDLIQSAVLYSVMTLVSTYLVAFAYKNVKFVLKHKVAQKREDAVSKEVTRKLSEADNRKMSRKEKDERILWKKNEVADYEATTFSIFYNNTLFLVVVIVASFFILKNFNPTVNYILSISASSGLIALLSTGSK

SEQ ID NO: 739297 - protein, 122 aa, Homo sapiens
MAPKGSSKQQSEEDLLLQDFSRNLSAKSSALFFGNAFIVSAIPIWLYWRIWHMDLIQSAVLYSVMTLVSTYLVAFAYKNVKFVLKHKVAQKREDAVSKEVTRKLSEADNRKMSRKEKDERTS

SEQ ID NO: 739298 - protein, 503 aa, Homo sapiens
MALAPERAAPRVLFGEWLLGEISSGCYEGLQWLDEARTCFRVPWKHFARKDLSEADARIFKAWAVARGRWPPSSRGGGPPPEAETAERAGWKTNFRCALRSTRRFVMLRDNSGDPADPHKVYALSRELCWREGPGTDQTEAEAPAAVPPPQGGPPGPFLAHTHAGLQAPGPLPAPAGDKGDLLLQAVQQSCLADHLLTASWGADPVPTKAPGEGQEGLPLTGACAGGPGLPAGELYGWAVETTPSPGPQPAALTTGEAAAPESPHQAEPYLSPSPSACTAVQEPSPGALDVTIMYKGRTVLQKVVGHPSCTFLYGPPDPAVRATDPQQVAFPSPAELPDQKQLRYTEELLRHVAPGLHLELRGPQLWARRMGKCKVYWEVGGPPGSASPSTPACLLPRNCDTPIFDFRVFFQELVEFRARQRRGSPRYTIYLGFGQDLSAGRPKEKSLVLVKLEPWLCRVHLEGTQREGVSSLDSSSLSLCLSSANSLYDDIECFLMELEQPA

SEQ ID NO: 739299 - protein, 474 aa, Homo sapiens
MALAPERAAPRVLFGEWLLGEISSGCYEGLQWLDEARTCFRVPWKHFARKDLSEADARIFKAWAVARGRWPPSSRGGGPPPEAETAERAGWKTNFRCALRSTRRFVMLRDNSGDPADPHKVYALSRELCWREGPGTDQTEAEAPAAVPPPQGGPPGPFLAHTHAGLQAPGPLPAPAGDKGDLLLQAVQQSCLADHLLTASWGADPVPTKAPGEGQEGLPLTGACAGGEAAAPESPHQAEPYLSPSPSACTAVQEPSPGALDVTIMYKGRTVLQKVVGHPSCTFLYGPPDPAVRATDPQQVAFPSPAELPDQKQLRYTEELLRHVAPGLHLELRGPQLWARRMGKCKVYWEVGGPPGSASPSTPACLLPRNCDTPIFDFRVFFQELVEFRARQRRGSPRYTIYLGFGQDLSAGRPKEKSLVLVKLEPWLCRVHLEGTQREGVSSLDSSSLSLCLSSANSLYDDIECFLMELEQPA

SEQ ID NO: 739300 - protein, 531 aa, Homo sapiens
MALAPERAAPRVLFGEWLLGEISSGCYEGLQWLDEARTCFRVPWKHFARKDLSEADARIFKAWAVARGRWPPSSRGGGPPPEAETAERAGWKTNFRCALRSTRRFVMLRDNSGDPADPHKVYALSRELCWREGPGTDQTEAEAPAAVPPPQGGPPGPFLAHTHAGLQAPGPLPAPAGDKGDLLLQAVQQSCLADHLLTASWGADPVPTKAPGEGQEGLPLTGACAGGPGLPAGELYGWAVETTPSPGPQPAALTTGERGRGWEAWGQGEARDEVPAQDSLPDAGEAAAPESPHQAEPYLSPSPSACTAVQEPSPGALDVTIMYKGRTVLQKVVGHPSCTFLYGPPDPAVRATDPQQVAFPSPAELPDQKQLRYTEELLRHVAPGLHLELRGPQLWARRMGKCKVYWEVGGPPGSASPSTPACLLPRNCDTPIFDFRVFFQELVEFRARQRRGSPRYTIYLGFGQDLSAGRPKEKSLVLVKLEPWLCRVHLEGTQREGVSSLDSSSLSLCLSSANSLYDDIECFLMELEQPA

SEQ ID NO: 739301 - protein, 516 aa, Homo sapiens
MPVPERPAAGPDSPRPGTRRAAPRVLFGEWLLGEISSGCYEGLQWLDEARTCFRVPWKHFARKDLSEADARIFKAWAVARGRWPPSSRGGGPPPEAETAERAGWKTNFRCALRSTRRFVMLRDNSGDPADPHKVYALSRELCWREGPGTDQTEAEAPAAVPPPQGGPPGPFLAHTHAGLQAPGPLPAPAGDKGDLLLQAVQQSCLADHLLTASWGADPVPTKAPGEGQEGLPLTGACAGGPGLPAGELYGWAVETTPSPGPQPAALTTGEAAAPESPHQAEPYLSPSPSACTAVQEPSPGALDVTIMYKGRTVLQKVVGHPSCTFLYGPPDPAVRATDPQQVAFPSPAELPDQKQLRYTEELLRHVAPGLHLELRGPQLWARRMGKCKVYWEVGGPPGSASPSTPACLLPRNCDTPIFDFRVFFQELVEFRARQRRGSPRYTIYLGFGQDLSAGRPKEKSLVLVKLEPWLCRVHLEGTQREGVSSLDSSSLSLCLSSANSLYDDIECFLMELEQPA

SEQ ID NO: 739302 - protein, 577 aa, Homo sapiens
MALAPERAAPRVLFGEWLLGEISSGCYEGLQWLDEARTCFRVPWKHFARKDLSEADARIFKAWAVARGRWPPSSRGGGPPPEAETAERAGWKTNFRCALRSTRRFVMLRDNSGDPADPHKVYALSRELCWREGPGTDQTEAEAPAAVPPPQGGPPGPFLAHTHAGLQAPGPLPAPAGDKGDLLLQAVQQSCLADHLLTASWGADPVPTKAPGEGQEGLPLTGACAGGVGVPGEGGSAGGASAPGRTLEKGAGDWGAGELGGDHRSHCPPLLRPRAPCWGAVRVGSRDDPQPRAPARGTNDRLRGVGVGRPGAQGEARDEVPAQDSLPDAGEAAAPESPHQAEPYLSPSPSACTAVQEPSPGALDVTIMYKGRTVLQKVVGHPSCTFLYGPPDPAVRATDPQQVAFPSPAELPDQKQLRYTEELLRHVAPGLHLELRGPQLWARRMGKCKVYWEVGGPPGSASPSTPACLLPRNCDTPIFDFRVFFQELVEFRARQRRGSPRYTIYLGFGQDLSAGRPKEKSLVLVKLEPWLCRVHLEGTQREGVSSLDSSSLSLCLSSANSLYDDIECFLMELEQPA

SEQ ID NO: 739303 - protein, 516 aa, Homo sapiens; identical to SEQ ID NO: 739301

SEQ ID NO: 739304 - protein, 474 aa, Homo sapiens; identical to SEQ ID NO: 739299

SEQ ID NO: 739305 - protein, 210 aa, Homo sapiens
MYKGRTVLQKVVGHPSCTFLYGPPDPAVRATDPQQVAFPSPAELPDQKQLRYTEELLRHVAPGLHLELRGPQLWARRMGKCKVYWEVGGPPGSASPSTPACLLPRNCDTPIFDFRVFFQELVEFRARQRRGSPRYTIYLGFGQDLSAGRPKEKSLVLVKLEPWLCRVHLEGTQREGVSSLDSSSLSLCLSSANSLYDDIECFLMELEQPA

SEQ ID NO: 739306 - protein, 210 aa, Homo sapiens; identical to SEQ ID NO: 739305

SEQ ID NO: 739307 - protein, 210 aa, Homo sapiens; identical to SEQ ID NO: 739305

SEQ ID NO: 739308 - protein, 572 aa, Homo sapiens
MPVPERPAAGPDSPRPGTRRAAPRVLFGEWLLGEISSGCYEGLQWLDEARTCFRVPWKHFARKDLSEADARIFKVGTPAPPRPGWESPPRTPRARQHVFCPPLQAWAVARGRWPPSSRGGGPPPEAETAERAGWKTNFRCALRSTRRFVMLRDNSGDPADPHKVYALSRELCWREGPGTDQTEAEAPAAVPPPQGTLLSACLSSCQAAELLTFTLTFALQGGPPGPFLAHTHAGLQAPGPLPAPAGDKGDLLLQAVQQSCLADHLLTASWGADPVPTKAPGEGQEGLPLTGACAGGPGLPAGELYGWAVETTPSPGPQPAALTTGEAAAPESPHQAEPYLSPSPSACTAVQEPSPGALDVTIMYKGRTVLQKVVGHPSCTFLYGPPDPAVRATDPQQVAFPSPAELPDQKQLRYTEELLRHVAPGLHLELRGPQLWARRMGKCKVYWEVGGPPGSASPSTPACLLPRNCDTPIFDFRVFFQELVEFRARQRRGSPRYTIYLGFGQDLSAGRPKEKSLVLVKLEPWLCRVHLEGTQREGVSSLDSSSLSLCLSSANSLYDDIECFLMELEQPA

SEQ ID NO: 739309 - protein, 559 aa, Homo sapiens
MALAPERAAPRVLFGEWLLGEISSGCYEGLQWLDEARTCFRVPWKHFARKDLSEADARIFKVGTPAPPRPGWESPPRTPRARHTCSVPLFQAWAVARGRWPPSSRGGGPPPEAETAERAGWKTNFRCALRSTRRFVMLRDNSGDPADPHKVYALSRELCWREGPGTDQTEAEAPAAVPPPQGTLLSACLSSCQAAELLTFTLTFALQGGPPGPFLAHTHAGLQAPGPLPAPAGDKGDLLLQAVQQSCLADHLLTASWGADPVPTKAPGEGQEGLPLTGACAGGPGLPAGELYGWAVETTPSPGPQPAALTTGEAAAPESPHQAEPYLSPSPSACTAVQEPSPGALDVTIMYKGRTVLQKVVGHPSCTFLYGPPDPAVRATDPQQVAFPSPAELPDQKQLRYTEELLRHVAPGLHLELRGPQLWARRMGKCKVYWEVGGPPGSASPSTPACLLPRNCDTPIFDFRVFFQELVEFRARQRRGSPRYTIYLGFGQDLSAGRPKEKSLVLVKLEPWLCRVHLEGTQREGVSSLDSSSLSLCLSSANSLYDDIECFLMELEQPA

SEQ ID NO: 739310 - protein, 530 aa, Homo sapiens
WYWPEVSLAAPRVLFGEWLLGEISSGCYEGLQWLDEARTCFRVPWKHFARKDLSEADARIFKAWAVARGRWPPSSRGGGPPPEAETAERAGWKTNFRCALRSTRRFVMLRDNSGDPADPHKVYALSRELCWREGPGTDQTEAEAPAAVPPPQGTLLSACLSSCQAAELLTFTLTFALQGGPPGPFLAHTHAGLQAPGPLPAPAGDKGDLLLQAVQQSCLADHLLTASWGADPVPTKAPGEGQEGLPLTGACAGGPGLPAGELYGWAVETTPSPGPQPAALTTGEAAAPESPHQAEPYLSPSPSACTAVQEPSPGALDVTIMYKGRTVLQKVVGHPSCTFLYGPPDPAVRATDPQQVAFPSPAELPDQKQLRYTEELLRHVAPGLHLELRGPQLWARRMGKCKVYWEVGGPPGSASPSTPACLLPRNCDTPIFDFRVFFQELVEFRARQRRGSPRYTIYLGFGQDLSAGRPKEKSLVLVKLEPWLCRVHLEGTQREGVSSLDSSSLSLCLSSANSLYDDIECFLMELEQPA

SEQ ID NO: 739311 - protein, 431 aa, Homo sapiens
MALAPERAAPRVLFGEWLLGEISSGCYEGLQWLDEARTCFRVPWKHFARKDLSEADARIFKAWAVARGRWPPSSRGGGPPPEAETAERAGWKTNFRCALRSTRRFVMLRDNSGDPADPHKVYALSRELCWREGPGTDQTEAEAPAAVPPPQGGPPGPFLAHTHAGLQAPGPLPAPAGDKGDLLLQAVQQSCLADHLLTASWGADPVPTKAPGEGQEGLPLTGACAGGPGLPAGELYGWAVETTPSPGPQPAALTTGEAAAPESPHQAEPYLSPSPSACTAVQEPSPGALDVTIMYKGRTVLQKVVGHPSCTFLYGPPDPAVRATDPQQVAFPSPAELPDQKQLRYTEELLRHVAPGLHLEWADPQAPPAPPPQPACCLGTVTPPSSTSESSSKSWWNSGHGSAVAPHAIPSTWASGRTCQLGGPRRRAWSW

SEQ ID NO: 739312 - protein, 442 aa, Homo sapiens
MALAPERAAPRVLFGEWLLGEISSGCYEGLQWLDEARTCFRVPWKHFARKDLSEADARIFKAWAVARGRWPPSSRGGGPPPEAETAERAGWKTNFRCALRSTRRFVMLRDNSGDPADPHKVYALSRELCWREGPGTDQTEAEAPAAVPPPQGGPPGPFLAHTHAGLQAPGPLPAPAGDKGDLLLQAVQQSCLADHLLTASWGADPVPTKAPGEGQEGLPLTGACAGGPGLPAGELYGWAVETTPSPGPQPAALTTGERGRGWEAWGQGEARDEVPAQDSLPDAGEAAAPESPHQAEPYLSPSPSACTAVQEPSPGALDVTIMYKGRTVLQKVVGHPSCTFLYGPPDPAVRATDPQQVAFPSPAELPDQKQLRYTEELLRHVAPGLHLELRGPQLWARRMGKCKVYWEVGGPPGSASPSTPACLLPRNCDTPIFDFRVFFQGQ

SEQ ID NO: 739313 - protein, 490 aa, Homo sapiens
MALAPERAAPRVLFGEWLLGEISSGCYEGLQWLDEARTCFRVPWKHFARKDLSEADARIFKAWAVARGRWPPSSRGGGPPPEAETAERAGWKTNFRCALRSTRRFVMLRDNSGDPADPHKVYALSRELCWREGPGTDQTEAEAPAAVPPPQGGPPGPFLAHTHAGLQAPGPLPAPAGDKGDLLLQAVQQSCLADHLLTASWGADPVPTKAPGEGQEGLPLTGACAGGPGLPAGELYGWAVETTPSPGPQPAALTTGERGRGWEAWGQGEARDEVPAQDSLPDAGEAAAPESPHQAEPYLSPSPSACTAVQEPSPGALDVTIMYKGRTVLQKVVGHPSCTFLYGPPDPAVRATDPQQVAFPSPAELPDQKQLRYTEELLRHVAPGLHLELRGPQLWARRMELVEFRARQRRGSPRYTIYLGFGQDLSAGRPKEKSLVLVKLEPWLCRVHLEGTQREGVSSLDSSSLSLCLSSANSLYDDIECFLMELEQPA

SEQ ID NO: 739314 - protein, 461 aa, Homo sapiens
MALAPERAAPRVLFGEWLLGEISSGCYEGLQWLDEARTCFRVPWKHFARKDLSEADARIFKAWAVARGRWPPSSRGGGPPPEAETAERAGWKTNFRCALRSTRRFVMLRDNSGDPADPHKVYALSRELCWREGPGTDQTEAEAPAAVPPPQGGPPGPFLAHTHAGLQAPGPLPAPAGDKGDLLLQAVQQSCLADHLLTASWGADPVPTKAPGEGQEGLPLTGACAGGPGLPAGELYGWAVETTPSPGPQPAALTTGERGRGWEAWGQGEARDEVPAQDSLPDAGEAAAPESPHQAEPYLSPSPSACTAVQEPSPGALDVTIMYKGRTVLQKVVGHPSCTFLYGPPDPAVRATDPQQVAFPSPAELPDQKQLRYTEELLRHVAPGLHLELRGPQLWARRMGKCKVYWEVGGPPGSASPSTPACLSWWNSGHGSAVAPHAIPSTWASGRTCQLGGPRRRAWSW

SEQ ID NO: 739315 - protein, 339 aa, Homo sapiens
MALAPERAAPRVLFGEWLLGEISSGCYEGLQWLDEARTCFRVPWKHFARKDLSEADARIFKAWAVARGRWPPSSRGGGPPPEAETAERAGWKTNFRCALRSTRRFVMLRDNSGDPADPHKVYALSRELCWREGPGTDQTEAEAPAAVPPPQGGPPGPFLAHTHAGLQAPGPLPAPAGDKGDLLLQAVQQSCLADHLLTASWGADPVPTKAPGEGQEGLPLTGACAGGPGLPAGELYGWAVETTPSPGPQPAALTTGQRRGSPRYTIYLGFGQDLSAGRPKEKSLVLVKLEPWLCRVHLEGTQREGVSSLDSSSLSLCLSSANSLYDDIECFLMELEQPA

SEQ ID NO: 739316 - protein, 280 aa, Homo sapiens
MALAPERAAPRVLFGEWLLGEISSGCYEGLQWLDEARTCFRVPWKHFARKDLSEADARIFKAWAVARGRWPPSSRGGGPPPEAETAERAGWKTNFRCALRSTRRFVMLRDNSGDPADPHKVYALSRELCWREGPGTDQTEAEAPAAVPPPQGGPPGPFLAHTHAGLQAPGPLPAPAGDKGDLLLQAVQQSCLADHLLTASWGADPVPTKAPGEGQEGLPLTGACAGGPGLPAGELYGWAVETTPSPGPQPAALTTGEAAAPESPHQAGQLGGPRRRAWSW

SEQ ID NO: 739317 - protein, 264 aa, Homo sapiens
MALAPERAAPRVLFGEWLLGEISSGCYEGLQWLDEARTCFRVPWKHFARKDLSEADARIFKAWAVARGRWPPSSRGGGPPPEAETAERAGWKTNFRCALRSTRRFVMLRDNSGDPADPHKVYALSRELCWREGPGTDQTEAEAPAAVPPPQGGPPGPFLAHTHAGLQAPGPLPAPAGDKGDLLLQAVQQSCLADHLLTASWGADPVPTKAPGEGQEGLPLTGACAGGPGLPAGELYGWAVETTPSPGPQPAALTTASAPRGHAA

SEQ ID NO: 739318 - protein, 222 aa, Homo sapiens
MALAPERAAPRVLFGEWLLGEISSGCYEGLQWLDEARTCFRVPWKHFARKDLSEADARIFKAWAVARGRWPPSSRGGGPPPEAETAERAGWKTNFRCALRSTRRFVMLRDNSGDPADPHKVYALSRELCWREGPGTDQTEAEAPAAVPPPQGTLLSACLSSCQAAELLTFTLTFPCRVGPQGHSWHTHMLDSKPQAPSLPQLVTRGTSCSRQCNRAAWQTIC

SEQ ID NO: 739319 - protein, 180 aa, Homo sapiens
IRHEDEARTCFRVPWKHFARKDLSEADARIFKAWAVARGRWPPSSRGGGPPPEAETAEPPAVTPVAPSAKRSIPRQRRWLQALSPHLWTPVTPGHTTCGRGLASAATGALTSPVITPDRHLTAPAEGAMALAPERAAPRVLFGEWLLGEISSGCYEGLQCWSSPPRTQSNENSRKLEQPT

SEQ ID NO: 739320 - protein, 112 aa, Homo sapiens
MALHLQTQHIHIRSHSSHHPSYPTPHEDNIRTSIDPLAHPSRYFTQQESFAHDRIYKLIIPTFDIKQIDSQSIDNIYIETCATRQPTEKDTSYSLSQHNAPLKNRQIHRQSY

SEQ ID NO: 739321 - protein, 120 aa, Homo sapiens
AGGIPGTAAPWLPTLYHLPGLRAGPVSWEAQGEEPGPGEGETRASRRGGHVLRPTDRRLMPSEPRRGGGEAIHRVTDRRPTPSEPGEGEGRTHAGSLTDARSLLAAGTLAVPSAPRGHAA

SEQ ID NO: 739322 - protein, 116 aa, Homo sapiens
LSVLILTCKSKLVVAFKGQVPAYYGSRHMVVFFFPPNSLIQIGSCTHQMGQIAIVSFQNSTPKVIECFNVESRILCMLYVPVEEKRREPGAPPDPETPAVRASDVPTICVGTEEGR

SEQ ID NO: 739323 - protein, 1335 aa, Homo sapiens
LLAGAPSLNRAERGIWSCSMDQREPLPPAPAENEMKYDTNNNEEEEGEQFDFDSGDEIPEADRQAPSAPETGGAGASEAPAPTGGEDGAGAETTPVAEPTKLVLPMKVNPYSVIDITPFQEDQPPTPVPSAEEENVGLHVPCGYLVPVPCGYAVPSNLPLLLPAYSSPVIICATSLDEEAETPEVTEDRQPNSLSSEEPPTSEDQVGREDSALARWAADPANTAWMENPEEAIYDDVPRENSDSEPDEMIYDDVENGDEGGNSSLEYGWSSSEFESYEEQSDSECKNGIPRSFLRSNHKKQLSHDLTRLKEHYEKKMRDLMASTVGVVEIQQLRQKHELKMQKLVKAAKDGTKDGLERTRAAVKRGRSFIRTKSLIAQDHRSSLEEEQNLFIDVDCKHPEAILTPMPEGLSQQQVVRRYILGSVVDSEKNYVDALKRILEQYEKPLSEMEPKVLSERKLKTVFYRVKEILQCHSLFQIALASRVSEWDSVEMIGDVFVASFSKSMVLDAYSEYVNNFSTAVAVLKKTCATKPAFLEFLKQEQEASPDRTTLYSLMMKPIQRFPQFILLLQDMLKNTSKGHPDRLPLQMALTELETLAEKLNERKRDADQRCEVKQIAKAINERYLNKLLSSGSRYLIRSDDMIETVYNDRGEIVKTKERRVFMLNDVLMCATVSSRPSHDSRVMSSQRYLLKWSVPLGHVDAIEYGSSAGTGEHSRHLAVHPPESLAVVANAKPNKVYMGPGQLYQDLQNLLHDLNVIGQITQLIGNLKGNYQNLNQSVAHDWTSGLQRLILKKEDEIRAADCCRIQLQLPGKQDKSGRPTFFTAVFNTFTPAIKESWVNSLQMAKLALEEENHMGWFCVEDDGNHIKKEKHPLLVGHMPVMVAKQQEFKIGSCTHQMGQIAIVSFQNSTPKVIECFNVESRILCMLYVPVEEKRREPGAPPDPETPAVRASDVPTICVGTEEGSISIYKSSQGSKKVRLQHFFTPEKSTVMSLACTSQSLYAGLVNGAVASYARAPDGSWDSEPQKVIKLGVLPVRSLLMMEDTLWAASGGQVFIISVETHAVEGQLEAHQEEGMVISHMAVSGVGIWIAFTSGSTLRLFHTETLKHLQDINIATPVHNMLPGHQRLSVTSLLVCHGLLMVGTSLGVLVALPVPRLQGIPKVTGRGMVSYHAHNSPVKFIVLATALHEKDKDKSRDSLAPGPEPQDEDQKDALPSGGAGSSLSQGDPDAAIWLGDSLGSMTQKSDLSSSSGSLSLSHGSSSLEHRSEDSTIYDLLKDPVSLRSKARRAKKAKASSALVVCGGQGHRRVHRKARQPHQEELAPTVMVWQIPLLNI

SEQ ID NO: 739324 - protein, 775 aa, Homo sapiens
ICQATFQLDAYITTCLQQYSEFMWAFPYSLKALAHREMLLSSGSRYLIRSDDMIETVYNDRGEIVKTKERRVFMLNDVLMCATVSSRPSHDSRVMSSQRYLLKWSVPLGHVDAIEYGSSAGTGEHSRHLAVHPPESLAVVANAKPNKVYMGPGQLYQDLQNLLHDLNVIGQITQLIGNLKGNYQNLNQSVAHDWTSGLQRLILKKEDEIRAADCCRIQLQLPGKQDKSGRPTFFTAVFNTFTPAIKESWVNSLQMAKLALEEENHMGWFCVEDDGNHIKKEKHPLLVGHMPVMVAKQQEFKIECAAYNPEPYLNNESQPDSFSTAHGFLWIGSCTHQMGQIAIVSFQNSTPKVIECFNVESRILCMLYVPVEEKRREPGAPPDPETPAVRASDVPTICVGTEEGSISIYKSSQGSKKVRLQHFFTPEKSTVMSLACTSQSLYAGLVNGAVASYARAPDGSWDSEPQKVIKLGVLPVRSLLMMEDTLWAASGGQVFIISVETHAVEGQLEAHQEEGMVISHMAVSGVGIWIAFTSGSTLRLFHTETLKHLQDINIATPVHNMLPGHQRLSVTSLLVCHGLLMVGTSLGVLVALPVPRLQGIPKVTGRGMVSYHAHNSPVKFIVLATALHEKDKDKSRDSLAPGPEPQDEDQKDALPSGGAGSSLSQGDPDAAIWLGDSLGSMTQKSDLSSSSGSLSLSHGSSSLEHRSEDSTIYDLLKDPVSLRSKARRAKKAKASSALVVCGGQGHRRVHRKARQPHQEELAPTVMVWQIPLLNI

SEQ ID NO: 739325 - protein, 289 aa, Homo sapiens
WIICLGTKSQVSDADSFAIGQLEAHQEEGMVISHMAVSGVGIWIAFTSGSTLRLFHTETLKHLQDINIATPVHNMLPGHQRLSVTSLLVCHGLLMVGTSLGVLVALPVPRLQGIPKVTGRGMVSYHAHNSPVKFIVLATALHEKDKDKSRDSLAPGPEPQDEDQKDALPSGGAGSSLSQGDPDAAIWLGDSLGSMTQKSDLSSSSGSLSLSHGSSSLEHRSEDSTIYDLLKDPVSLRSKARRAKKAKASSALVVCGGQGHRRVHRKARQPHQEELAPTVMVWQIPLLNI

SEQ ID NO: 739326 - protein, 1066 aa, Homo sapiens
MCIFLSAELLRIFRPSFVTVNDCGCIKNKFNIFKAWRLFVSKKPGKIKKHLSCVTDKRVRETLIFWEFEECHFHSLKVLVSVTALKIYKSVCIFLLVLVLEYLYHPPIHPPTHISIIHRPSTCLSSVHHFSLSNFQNILYSLYKGRFFFSVKFSKADKLPGMTVADAHSQVVLGVQMGQGHLWKHLKCFSPASPALPGGGGAARCLPWSKPGAPQGPQHDSDFLPPPALDDLVKPQTGTKQPTWNSKVFNFILEFMHSDEMIYDDVENGDEGGNSSLEYGWSSSEFESYEEQSDSECKNGIPRSFLRSNHKKQLSHDLTRLKEHYEKKMRDLMASTVGVVEIQQLRQKHELKMQKLVKAAKDGTKDGLERTRAAVKRGRSFIRTKSLIAQDHRSSLEEEQNLFIDVDCKHPEAILTPMPEGLSQQQVVRRYILGSVVDSEKNYVDALKRILEQYEKPLSEMEPKVLSERKLKTVFYRVKEILQCHSLFQIALASRVSEWDSVEMIGDVFVASFSKSMVLDAYSEYVNNFSTAVAVLKKTCATKPAFLEFLKQEQEASPDRTTLYSLMMKPIQRFPQFILLLQDMLKNTSKGHPDRLPLQMALTELETLAEKLNERKRDADQRCEVKQIAKAINERYLNKLLSSGSRYLIRSDDMIETVYNDRGEIVKTKERRVFMLNDVLMCATVSSRPSHDSRVMSSQRYLLKWSVPLGHVDAIEYGSSAGTGEHSRHLAVHPPESLAVVANAKPNKVYMGPGQLYQDLQNLLHDLNVIGQITQLIGNLKGNYQNLNQSVAHDWTSGLQRLILKKEDEIRAADCCRIQLQLPGKQDKSGRPTFFTAVFNTFTPAIKESWVNSLQMAKLALEEENHMGWFCVEDDGNHIKKEKHPLLVGHMPVMVAKQQEFKIECAAYNPEPYLNNESQPDSFSTAHGFLWVRCVYLVLVQVHRESTFMVGVMRELRCELLSRELAVAYPRVYLETENFFERELITFGKDLQFLGMQIFVSFPFHLKHLPDKVESRDNYTNEENNFNMFFHFGVNIAWIFFLVPRLAFSSGNLAVKINLFQMKYCI

SEQ ID NO: 739327 - protein, 1376 aa, Homo sapiens
MCIFLSAELLRIFRPSFVTVNDCGCIKNKFNIFKAWRLFVSKKPGKIKKHLSCVTDKRVRETLIFWEFEECHFHSLKVLVSVTALKIYKSVCIFLLVLVLEYLYHPPIHPPTHISIIHRPSTCLSSVHHFSLSNFQNILYSLYKGRFFFSVKFSKADKLPGMTVADAHSQVVLGVQMGQGHLWKHLKCFSPASPALPGGGGAARCLPWSKPGAPQGPQHDSDFLPPPALDDLVKPQTGTKQPTWNSKVFNFILEFMHSDEMIYDDVENGDEGGNSSLEYGWSSSEFESYEEQSDSECKNGIPRSFLRSNHKKQLSHDLTRLKEHYEKKMRDLMASTVGVVEIQQLRQKHELKMQKLVKAAKDGTKDGLERTRAAVKRGRSFIRTKSLIAQDHRSSLEEEQNLFIDVDCKHPEAILTPMPEGLSQQQVVRRYILGSVVDSEKNYVDALKRILEQYEKPLSEMEPKVLSERKLKTVFYRVKEILQCHSLFQIALASRVSEWDSVEMIGDVFVASFSKSMVLDAYSEYVNNFSTAVAVLKKTCATKPAFLEFLKQEQEASPDRTTLYSLMMKPIQRFPQFILLLQDMLKNTSKGHPDRLPLQMALTELETLAEKLNERKRDADQRCEVKQIAKAINERYLNKLLSSGSRYLIRSDDMIETVYNDRGEIVKTKERRVFMLNDVLMCATVSSRPSHDSRVMSSQRYLLKWSVPLGHVDAIEYGSSAGTGEHSRHLAVHPPESLAVVANAKPNKVYMGPGQLYQDLQNLLHDLNVIGQITQLIGNLKGNYQNLNQSVAHDWTSGLQRLILKKEDEIRAADCCRIQLQLPGKQDKSGRPTFFTAVFNTFTPAIKESWVNSLQMAKLALEEENHMGWFCVEDDGNHIKKEKHPLLVGHMPVMVAKQQEFKIECAAYNPEPYLNNESQPDSFSTAHGFLWIGSCTHQMGQIAIVSFQNSTPKVIECFNVESRILCMLYVPVEEKRREPGAPPDPETPAVRASDVPTICVGTEEGSISIYKSSQGSKKVRLQHFFTPEKSTVMSLACTSQSLYAGLVNGAVASYARAPDGSWDSEPQKVIKLGVLPVRSLLMMEDTLWAASGGQVFIISVETHAVEGQLEAHQEEGMVISHMAVSGVGIWIAFTSGSTLRLFHTETLKHLQDINIATPVHNMLPGHQRLSVTSLLVCHGLLMVGTSLGVLVALPVPRLQGIPKVTGRGMVSYHAHNSPVKFIVLATALHEKDKDKSRDSLAPGPEPQDEDQKDALPSGGAGSSLSQGDPDAAIWLGDSLGSMTQKSDLSSSSGSLSLSHGSSSLEHRSEDSTIYDLLKDPVSLRSKARRAKKAKASSALVVCGGQGHRRVHRKARQPHQEELAPTVMVWQIPLLNI

SEQ ID NO: 739328 - protein, 1347 aa, Homo sapiens
MCIFLSAELLRIFRPSFVTVNDCGCIKNKFNIFKAWRLFVSKKPGKIKKHLSCVTDKRVRETLIFWEFEECHFHSLKVLVSVTALKIYKSVCIFLLVLVLEYLYHPPIHPPTHISIIHRPSTCLSSVHHFSLSNFQNILYSLYKGRFFFSVKFSKADKLPGMTVADAHSQVVLGVQMGQGHLWKHLKCFSPASPALPGGGGAARCLPWSKPGAPQGPQHDSDFLPPPALDDLVKPQTGTKQPTWNSKVFNFILEFMHSDEMIYDDVENGDEGGNSSLEYGWSSSEFESYEEQSDSECKNGIPRSFLRSNHKKQLSHDLTRLKEHYEKKMRDLMASTVGVVEIQQLRQKHELKMQKLVKAAKDGTKDGLERTRAAVKRGRSFIRTKSLIAQDHRSSLEEEQNLFIDVDCKHPEAILTPMPEGLSQQQVVRRYILGSVVDSEKNYVDALKRILEQYEKPLSEMEPKVLSERKLKTVFYRVKEILQCHSLFQIALASRVSEWDSVEMIGDVFVASFSKSMVLDAYSEYVNNFSTAVAVLKKTCATKPAFLEFLKQEQEASPDRTTLYSLMMKPIQRFPQFILLLQDMLKNTSKGHPDRLPLQMALTELETLAEKLNERKRDADQRCEVKQIAKAINERYLNKLLSSGSRYLIRSDDMIETVYNDRGEIVKTKERRVFMLNDVLMCATVSSRPSHDSRVMSSQRYLLKWSVPLGHVDAIEYGSSAGTGEHSRHLAVHPPESLAVVANAKPNKVYMGPGQLYQDLQNLLHDLNVIGQITQLIGNLKGNYQNLNQSVAHDWTSGLQRLILKKEDEIRAADCCRIQLQLPGKQDKSGRPTFFTAVFNTFTPAIKESWVNSLQMAKLALEEENHMGWFCVEDDGNHIKKEKHPLLVGHMPVMVAKQQEFKIGSCTHQMGQIAIVSFQNSTPKVIECFNVESRILCMLYVPVEEKRREPGAPPDPETPAVRASDVPTICVGTEEGSISIYKSSQGSKKVRLQHFFTPEKSTVMSLACTSQSLYAGLVNGAVASYARAPDGSWDSEPQKVIKLGVLPVRSLLMMEDTLWAASGGQVFIISVETHAVEGQLEAHQEEGMVISHMAVSGVGIWIAFTSGSTLRLFHTETLKHLQDINIATPVHNMLPGHQRLSVTSLLVCHGLLMVGTSLGVLVALPVPRLQGIPKVTGRGMVSYHAHNSPVKFIVLATALHEKDKDKSRDSLAPGPEPQDEDQKDALPSGGAGSSLSQGDPDAAIWLGDSLGSMTQKSDLSSSSGSLSLSHGSSSLEHRSEDSTIYDLLKDPVSLRSKARRAKKAKASSALVVCGGQGHRRVHRKARQPHQEELAPTVMVWQIPLLNI

SEQ ID NO: 739329 - protein, 1272 aa, Homo sapiens
GVVPASQFGSVPLGSHGVSSGGEDGAGAETTPVAEPTKLVLPMKVNPYSVIDITPFQEDQPPTPVPSAEEENVGLHVPCGYLVPVPCGYAVPSNLPLLLPAYSSPVIICATSLDEEAETPEVTEDRQPNSLSSEEPPTSEDQVGREDSALARWAADPANTAWMENPEEAIYDDVPRENSDSEPDEMIYDDVENGDEGGNSSLEYGWSSSEFESYEEQSDSECKNGIPRSFLRSNHKKQLSHDLTRLKEHYEKKMRDLMASTVGVVEIQQLRQKHELKMQKLVKAAKDGTKDGLERTRAAVKRGRSFIRTKSLIAQDHRSSLEEEQNLFIDVDCKHPEAILTPMPEGLSQQQVVRRYILGSVVDSEKNYVDALKRILEQYEKPLSEMEPKVLSERKLKTVFYRVKEILQCHSLFQIALASRVSEWDSVEMIGDVFVASFSKSMVLDAYSEYVNNFSTAVAVLKKTCATKPAFLEFLKQEQEASPDRTTLYSLMMKPIQRFPQFILLLQDMLKNTSKGHPDRLPLQMALTELETLAEKLNERKRDADQRCEVKQIAKAINERYLNKLLSSGSRYLIRSDDMIETVYNDRGEIVKTKERRVFMLNDVLMCATVSSRPSHDSRVMSSQRYLLKWSVPLGHVDAIEYGSSAGTGEHSRHLAVHPPESLAVVANAKPNKVYMGPGQLYQDLQNLLHDLNVIGQITQLIGNLKGNYQNLNQSVAHDWTSGLQRLILKKEDEIRAADCCRIQLQLPGKQDKSGRPTFFTAVFNTFTPAIKESWVNSLQMAKLALEEENHMGWFCVEDDGNHIKKEKHPLLVGHMPVMVAKQQEFKIGSCTHQMGQIAIVSFQNSTPKVIECFNVESRILCMLYVPVEEKRREPGAPPDPETPAVRASDVPTICVGTEEGSISIYKSSQGSKKVRLQHFFTPEKSTVMSLACTSQSLYAGLVNGAVASYARAPDGSWDSEPQKVIKLGVLPVRSLLMMEDTLWAASGGQVFIISVETHAVEGQLEAHQEEGMVISHMAVSGVGIWIAFTSGSTLRLFHTETLKHLQDINIATPVHNMLPGHQRLSVTSLLVCHGLLMVGTSLGVLVALPVPRLQGIPKVTGRGMVSYHAHNSPVKFIVLATALHEKDKDKSRDSLAPGPEPQDEDQKDALPSGGAGSSLSQGDPDAAIWLGDSLGSMTQKSDLSSSSGSLSLSHGSSSLEHRSEDSTIYDLLKDPVSLRSKARRAKKAKASSALVVCGGQGHRRVHRKARQPHQEELAPTVMVWQIPLLNI

SEQ ID NO: 739330 - protein, 1335 aa, Homo sapiens
MCIFLSAELLRIFRPSFVTVNDCGCIKNKFNIFKAWRLFVSKKPGKIKKHLSCVTDKRVRETLIFWEFEECHFHSLKVLVSVTALKIYKSVCIFLLVLVLEYLYHPPIHPPTHISIIHRPSTCLSSVHHFSLSNFQNILYSLYKGRFFFSVKFSKADKLPGMTVADAHSQVVLGVQMGQGHLWKHLKCFSPASPALPGGGGAARCLPWSKPGAPQGPQHDSDFLPPPALDDLVKPQTGTKQPTWNSKVFNFILEFMHSDEMIYDDVENGDEGGNSSLEYGWSSSEFESYEEQSDSECKNGIPRSFLRSNHKKQLSHDLTRLKEHYEKKMRDLMASTVGVVEIQQLRQKHELKMQKLVKAAKDGTKDGLERTRAAVKRGRSFIRTKSLIAQDHRSSLEEEQNLFIDVDCKHPEAILTPMPEGLSQQQVVRRYILGSVVDSEKNYVDALKRILEQYEKPLSEMEPKVLSERKLKTVFYRVKEILQCHSLFQIALASRVSEWDSVEMIGDVFVASFSKSMVLDAYSEYVNNFSTAVAVLKKTCATKPAFLEFLKQEQEASPDRTTLYSLMMKPIQRFPQFILLLQDMLKNTSKGHPDRLPLQMALTELETLAEKLNERKRDADQRCEVKQIAKAINERYLNKLLSSGSRYLIRSDDMIETVYNDRGEIVKTKERRVFMLNDVLMCATVSSRPSHDSRVMSSQRYLLKWSVPLGHVDAIEYGSSAGTGEHSRHLAVHPPESLAVVANAKPNKVYMGPGQLYQDLQNLLHDLNVIGQITQLIGNLKGNYQNLNQSVAHDWTSGLQRLILKKEDEIRAADCCRIQLQLPGKQDKSGRPTFFTAVFNTFTPAIKESWVNSLQMAKLALEEENHMGWFCVEDDGNHIKKEKHPLLVGHMPVMVAKQQEFKIECAAYNPEPYLNNESQPDSFSTAHGFLWIGSCTHQMGQIAIVSFQNSTPKVIECFNVESRILCMLYVPVEEKRREPGAPPDPETPAVRASDVPTICVGTEEGSISIYKSSQGSKKVRLQHFFTPEKSTVMSLACTSQSLYAGLVNGAVASYARAPDGSWDSEPQKVIKLGVLPVRSLLMMEDTLWAASGGQVFIISVETHAVEGQLEAHQEEGMVISHMAVSGVGIWIAFTSGSTLRLFHTETLKHLQDINIATPVHNMLPGRGMVSYHAHNSPVKFIVLATALHEKDKDKSRDSLAPGPEPQDEDQKDALPSGGAGSSLSQGDPDAAIWLGDSLGSMTQKSDLSSSSGSLSLSHGSSSLEHRSEDSTIYDLLKDPVSLRSKARRAKKAKASSALVVCGGQGHRRVHRKARQPHQEELAPTVMVWQIPLLNI

SEQ ID NO: 739331 - protein, 458 aa, Homo sapiens
MVVFFFPPNSLIQIGSCTHQMGQIAIVSFQNSTPKVIECFNVESRILCMLYVPVEEKRREPGAPPDPETPAVRASDVPTICVGTEEGSISIYKSSQGSKKVRLQHFFTPEKSTVMSLACTSQSLYAGLVNGAVASYARAPDGSWDSEPQKVIKLGVLPVRSLLMMEDTLWAASGGQVFIISVETHAVEGQLEAHQEEGMVISHMAVSGVGIWIAFTSGSTLRLFHTETLKHLQDINIATPVHNMLPGHQRLSVTSLLVCHGLLMVGTSLGVLVALPVPRLQGIPKVTGRGMVSYHAHNSPVKFIVLATALHEKDKDKSRDSLAPGPEPQDEDQKDALPSGGAGSSLSQGDPDAAIWLGDSLGSMTQKSDLSSSSGSLSLSHGSSSLEHRSEDSTIYDLLKDPVSLRSKARRAKKAKASSALVVCGGQGHRRVHRKARQPHQEELAPTVMVWQIPLLNI

SEQ ID NO: 739332 - protein, 292 aa, Homo sapiens
LLAGAPSLNRAERGIWSCSMDQREPLPPAPAENEMKYDTNNNEEEEGEQFDFDSGDEIPEADRQAPSAPETGGAGASEAPAPTGGEDGAGAETTPVAEPTKLVLPMKVNPYSVIDITPFQEDQPPTPVPSAEEENVGLHVPCGYLVPVPCGYAVPSNLPLLLPAYSSPVIICATSLDEEAETPEVTEDRQPNSLSSEEPPTSEDQVGREDSALARWAADPANTAWMENPEEAIYDDVPRENSDSEPGLILSGIDLRRFSSAAFPSGCQSDYLVDGPDVFCIHVLYVASRMAY

SEQ ID NO: 739333 - protein, 135 aa, Homo sapiens [sequence omitted]

SEQ ID NO: 739334 - protein, 114 aa, Homo sapiens
MGPQEAVPFTGPPRTPIQEEDFWSTPFSHAHPLPFFFSKPLRILNILLLLEGAVIVYQLYSLMSSEKWHQTISLALILFSNYYAFFKLLRDRLVLGKAYSYSASPQRDLDHRFS

SEQ ID NO: 739335 - protein, 492 aa, Homo sapiens
MGGRRGPNRTSYCRNPLCEPGSSGGSSGSHTSSASVTSVRSRTRSSSGTGLSSPPLATQTVVPLQHCKIPELPVQASILFELQLFFCQLIALFVHYINIYKTVWWYPPSHPPSHTSLNFHLIDFNLLMVTTIVLGRRFIGSIVKEASQRGKVSLFRSILLFLTRFTVLTATGWSLCRSLIHLFRTYSFLNLLFLCYPFGMYIPFLQLNCDLRKTSLFNHMASMGPREAVSGLAKSRDYLLTLRETWKQHTRQLYGPDAMPTHACCLSPSLIRSEVEFLKMDFNWRMKEVLVSSMLSAYYVAFVPVWFVKNTHYYDKRWSCELFLLVSISTSVILMQHLLPASYCDLLHKAAAHLGCWQKVDPALCSNVLQHPWTEECMWPQGVLVKHSKNVYKAVGHYNVAIPSDVSHFRFHFFFSKPLRILNILLLLEGAVIVYQLYSLMSSEKWHQTISLALILFSNYYAFFKLLRDRLVLGKAYSYSASPQRDLDHRFS

SEQ ID NO: 739336 - protein, 293 aa, Homo sapiens
MYIPFLQLNCDLRKTSLFNHMASMGPREAVSGLAKSRDYLLTLRETWKQHTRQLYGPDAMPTHACCLSPSLIRSEVEFLKMDFNWRMKEVLVSSMLSAYYVAFVPVWFVKNTHYYDKRWSCELFLLVSISTSVILMQHLLPASYCDLLHKAAAHLGCWQKVDPALCSNVLQHPWTEECMWPQGVLVKHSKNVYKAVGHYNVAIPSDVSHFRFHFFFSKPLRILNILLLLEGAVIVYQLYSLMSSEKWHQTISLALILFSNYYAFFKLLRDRLVLGKAYSYSASPQRDLDHRFS

SEQ ID NO: 739337 - protein, 508 aa, Homo sapiens
MGEQSGSGSAWQQSGRTGGRRGPNRTSYCRNPLCEPGSSGGSSGSHTSSASVTSVRSRTRSSSGTGLSSPPLATQTVVPLQHCKIPELPVQASILFELQLFFCQLIALFVHYINIYKTVWWYPPSHPPSHTSLNFHLIDFNLLMVTTIVLGRRFIGSIVKEASQRGKVSLFRSILLFLTRFTVLTATGWSLCRSLIHLFRTYSFLNLLFLCYPFGMYIPFLQLNCDLRKTSLFNHMASMGPREAVSGLAKSRDYLLTLRETWKQHTRQLYGPDAMPTHACCLSPSLIRSEVEFLKMDFNWRMKEVLVSSMLSAYYVAFVPVWFVKNTHYYDKRWSCELFLLVSISTSVILMQHLLPASYCDLLHKAAAHLGCWQKVDPALCSNVLQHPWTEECMWPQGVLVKHSKNVYKAVGHYNVAIPSDVSHFRFHFFFSKPLRILNILLLLEGAVIVYQLYSLMSSEKWHQTISLALILFSNYYAFFKLLRDRLVLGKAYSYSASPQRDLDHRFS

SEQ ID NO: 739338 - protein, 430 aa, Homo sapiens
MGGRRGPNRTSYCRNPLCEPGSSGGSSGSHTSSASVTSVRSRTRSSSGTGLSSPPLATQTVVPLQHCKIPELPVQASILFELQLFFCQLIALFVHYINIYKTVWWYPPSHPPSHTSLNFHLIDFNLLMVTTIVLGRRFIGSIVKEASQRGKVSLFRSILLFLTRFTVLTATGWSLCRSLIHLFRTYSFLNLLFLCYPFGMYIPFLQLNCDLRKTSLFNHMASMGPREAVSGLAKSRDYLLTLRETWKQHTRQLYGPDAMPTHACCLSPSLIRSEVEFLKMDFNWRMKEVLVSSMLSAYYVAFVPVWFVKNTHYYDKRWSCELFLLVSISTSVILMQHLLPASYCDLLHKAAAHLGCWQKVDPALCSNVLQHPWTEECMWPQGVLVKHSKNVYKAVGHYNVAIPSDVSHFRFHVSLLPGEGGLGPERVGGS

SEQ ID NO: 739339 - protein, 77 aa, Homo sapiens
EAHILLQFLWVKSVEVAKQNESSSESHESANQAIFWGCNHLKAQLGLKNALCSSLFAWLRRSISRLTYTGRPQFLAM

SEQ ID NO: 739340 - protein, 88 aa, Homo sapiens
MHRCREGCDLLRVLCGMLVLCGSWPPPLPAQKAQLPSEFRRMICRERRTTWRVWSSTSAQYDVENCLANKVDLSFSPSQSLPADPMQS

SEQ ID NO: 739341 - protein, 82 aa, Homo sapiens
MALTHTPLGLIDLSWSILKPIPGEKGTGLLWLALVGFGQSCIICQDWVLSCPNKSGFCWQAKKRVAAGRQPTVSATDGKTQR

SEQ ID NO: 739342 - protein, 111 aa, Homo sapiens [sequence omitted]

SEQ ID NO: 739343 - protein, 61 aa, Homo sapiens
MGYSLGEEKRVGDGFLGLGPHRPPPSTHGDRWVITVRGPGAANLHVRHPRKAVGPLLLSPK

SEQ ID NO: 739344 - protein, 106 aa, Homo sapiens
TAGNVWRHFWRWRVVRGTTSINGWRPGMRLNTQPSWISLPGLPSQDTADGEAYTTEMCILRILEAGSPRSVGFLLRPLSLASTHGVLAWSFLCVHMTVQDWCPDFL

SEQ ID NO: 739345 - protein, 386 aa, Homo sapiens
VREFGGGRLCRDAMYRLLSAVTARAAAPGGLASSCGRRGVHQRAGLPPLGHGWVGGLGLGLGLALGVKLAGGLRGAAPAQSPAAPDPEASPLAEPPQEQSLAPWSPQTPAPPCSRCFARAIESSRDLLHRIKDEVGAPGIVVGVSVDGKEVWSEGLGYADVENRVPCKPETVMRIASISKSLTMVALAKLWEAGKLDLDIPVQHYVPEFPEKEYEGEKVSVTTRLLISHLSGIRHYEKDIKKVKEEKAYKALKMMKENVAFEQEKEGKSNEKNDFTKFKTEQENEAKCRNSKPGKKKNDFEQGELYLREKFENSIESLRLFKNDPLFFKPGSQFLYSTFGYTLLAAIVERASGCKYLDYMQKIFHDLDMLTTVQEENEPVIYNRAR

SEQ ID NO: 739346 - protein, 560 aa, Homo sapiens
VREFGGGRLCRDAMYRLLSAVTARAAAPGGLASSCGRRGVHQRAGLPPLGHGWVGGLGLGLGLALGVKLAGGLRGAAPAQSPAAPDPEASPLAEPPQEQSLAPWSPQTPAPPCSRCFARAIESSRDLLHRIKDEVGAPGIVVGVSVDGKEVWSEGLGYADVENRVPCKPETVMRIASISKSLTMVALAKLWEAGKLDLDIPVQHYVPEFPEKEYEGEKVSVTTRLLISHLSGIRHYEKDIKKVKEEKAYKALKMMKENVAFEQEKEGKSNEKNDFTKFKTEQENEAKCRNSKPGKKKNDFEQGELYLREKFENSIESLRLFKNDPLFFKPGSQFLYSTFGYTLLAAIVERASGCKYLDYMQKIFHDLDMLTTVQEENEPVIYNRARFYVYNKKKRLVNTPYVDNSYKWAGGGFLSTVGDLLKFGNAMLYGYQVGLFKNSNENLLPGYLKPETMVMMWTPVPNTEMSWDKEGKYAMAWGVVEKKQTYGSCRKQRHYASHTGGAVGASSVLLVLPEELDTETINNKVPPRGIIVSIICNMQSVGLNSTALKIALEFDKDRSD

SEQ ID NO: 739347 - protein, 388 aa, Homo sapiens [sequence omitted]

SEQ ID NO: 739348 - protein, 233 aa, Homo sapiens
MSQGSQFLYSTFGYTLLAAIVERASGCKYLDYMQKIFHDLDMLTTVQEENEPVIYNRARFYVYNKKKRLVNTPYVDNSYKWAGGGFLSTVGDLLKFGNAMLYGYQVGLFKNSNENLLPGYLKPETMVMMWTPVPNTEMSWDKEGKYAMAWGVVEKKQTYGSCRKQRHYASHTGGAVGASSVLLVLPEELDTETINNKVPPRGIIVSIICNMQSVGLNSTALKIALEFDKDRSD

SEQ ID NO: 739349 - protein, 193 aa, Homo sapiens [sequence omitted]

SEQ ID NO: 739350 - protein, 141 aa, Homo sapiens
AVVYYYKIRGRVDVGLFKNSNENLLPGYLKPETMVMMWTPVPNTEMSWDKEGKYAMAWGVVEKKQTYGSCRKQRHYASHTGGAVGASSVLLVLPEELDTETINNKVPPRGIIVSIICNMQSVGLNSTALKIALEFDKDRSD

SEQ ID NO: 739351 - protein, 386 aa, Homo sapiens; identical to SEQ ID NO: 739345

SEQ ID NO: 739352 - protein, 346 aa, Homo sapiens
VREFGGGRLCRDAMYRLLSAVTARAAAPGGLASSCGRRGVHQRAGLPPLGHGWVGGLGLGLGLALGVKLAGGLRGAAPAQSPAAPDPEASPLAEPPQEQSLAPWSPQTPAPPCSRCFARAIESSRDLLHRIKDEVGAPGIVVGVSVDGKEVWSEGLGYADVENRVPCKPETVMRIASISKSLTMVALAKLWEAGKLDLDIPVQHYVPEFPEKEYEGEKVSVTTRLLISHLSGIRHYEKDIKKVKEEKAYKALKMMKENVAFEQEKEGKSNEKNDFTKFKTEQENEAKCRNSKPGKKKNDFEQGELYLREKFENSIESLRLFKNDPLFFKPGSHFCIHYTHELTDSH

SEQ ID NO: 739353 - protein, 109 aa, Homo sapiens [sequence omitted]

SEQ ID NO: 739354 - protein, 109 aa, Homo sapiens [sequence omitted]

SEQ ID NO: 739355 - protein, 466 aa, Homo sapiens
CACVRHGERKRKVECVGWAPQQPVAMRGLEEPGPRPTATPCGCVKPALETGNLLTEPVGYLESCFSAKNGTPRQPSICSYSRACLRIRKRIFNNPEHSLMGLEQFSHVWILFVFHKNGHLSCKAKVQPPRLNGAKTGVFSTRSPHRPNAIGLTLAKLEKVEGGAIYLSGIDMIHGTPVLDIKPYIAEYDSPQNVMEPLADFNLQNNQHTPNTVSQSDSKTDSCDQRQLSGCDEPQPHHSTKRKPKCPEDRTSEENYLTHSDTARIQQAFPMHREIAVDFGLESRRDQSSSVAEEQIGPYCPEKSFSEKGTDKKLERVEGAAVLQGSRAETQPMAPHCPAGRADGAPRSVVPAWVTEAPVATLEVRFTPHAEMDLGQLSSQDVGQASFKYFQSAEEAKRAIEAVLSADPRSVYRRKLCQDRLFYFTVDIAHVTCWFGDGFAEVLRIKPASEPVHMTGPVGSLVSLGS

SEQ ID NO: 739356 - protein, 466 aa, Homo sapiens; identical to SEQ ID NO: 739355

SEQ ID NO: 739357 - protein, 295 aa, Homo sapiens [sequence omitted]

SEQ ID NO: 739358 - protein, 295 aa, Homo sapiens [sequence omitted]

SEQ ID NO: 739359 - protein, 391 aa, Homo sapiens
CACVRHGERKRKVECVGWAPQQPVAMRGLEEPGPRPTATPCGCVKPALETGNLLTEPVGYLESCFSAKNGTPRQPSICSYSRACLRIRKRIFNNPEHSLMGLEQFSHVWILFVFHKNGHLSCKAKVQPPRLNGAKTGVFSTRSPHRPNAIGLTLAKLEKVEGGAIYLSGIDMIHGTPVLDIKPYIAEYDSPQNVMEPLADFNLQNNQHTPNTVSQSDSKTDSCDQRQLSGCDEPQPHHSTKRKPKCPEDRTSEENYLTHSDTARIQQAFPMHREIAVDFGLESRRDQSSSVAEEQIGPYCPEKSFSEKGTDKKLERVEGAAVLQGSRAETQPMAPHCPAGRADGAPRSVVPAWVTEAPVATLEVRFTPHAEMDLGQLSSQGIFSFFILNER

SEQ ID NO: 739360 - protein, 500 aa, Homo sapiens
CACVRHGERKRKVECVGWAPQQPVAMRGLEEPGPRPTATPCGCVKPALETGNLLTEPVGYLESCFSAKNGTPRQPSICSYSRACLRIRKRIFNNPEHSLMGLEQFSHVWILFVFHKNGHLSCKAKVQPPRLNGAKTGVFSTRSPHRPNAIGLTLAKLEKVEALGKWTDIMAAVLMSTVLCGGVWDESHYKDKHWSGGAIYLSGIDMIHGTPVLDIKPYIAEYDSPQNVMEPLADFNLQNNQHTPNTVSQSDSKTDSCDQRQLSGCDEPQPHHSTKRKPKCPEDRTSEENYLTHSDTARIQQAFPMHREIAVDFGLESRRDQSSSVAEEQIGPYCPEKSFSEKGTDKKLERVEGAAVLQGSRAETQPMAPHCPAGRADGAPRSVVPAWVTEAPVATLEVRFTPHAEMDLGQLSSQDVGQASFKYFQSAEEAKRAIEAVLSADPRSVYRRKLCQDRLFYFTVDIAHVTCWFGDGFAEVLRIKPASEPVHMTGPVGSLVSLGS

SEQ ID NO: 739361 - protein, 394 aa, Homo sapiens [sequence omitted]

SEQ ID NO: 739362 - protein, 428 aa, Homo sapiens
MRRVGTSATSSHARLGGAGASAYSDPVRLREAGSGDRILFVFHKNGHLSCKAKVQPPRLNGAKTGVFSTRSPHRPNAIGLTLAKLEKVEALGKWTDIMAAVLMSTVLCGGVWDESHYKDKHWSGGAIYLSGIDMIHGTPVLDIKPYIAEYDSPQNVMEPLADFNLQNNQHTPNTVSQSDSKTDSCDQRQLSGCDEPQPHHSTKRKPKCPEDRTSEENYLTHSDTARIQQAFPMHREIAVDFGLESRRDQSSSVAEEQIGPYCPEKSFSEKGTDKKLERVEGAAVLQGSRAETQPMAPHCPAGRADGAPRSVVPAWVTEAPVATLEVRFTPHAEMDLGQLSSQDVGQASFKYFQSAEEAKRAIEAVLSADPRSVYRRKLCQDRLFYFTVDIAHVTCWFGDGFAEVLRIKPASEPVHMTGPVGSLVSLGS

SEQ ID NO: 739363 - protein, 267 aa, Homo sapiens
ESSSCTFQATPNTVSQSDSKTDSCDQRQLSGCDEPQPHHSTKRKPKCPEDRTSEENYLTHSDTARIQQAFPMHREIAVDFGLESRRDQSSSVAEEQIGPYCPEKSFSEKGTDKKLERVEGAAVLQGSRAETQPMAPHCPAGRADGAPRSVVPAWVTEAPVATLEVRFTPHAEMDLGQLSSQDVGQASFKYFQSAEEAKRAIEAVLSADPRSVYRRKLCQDRLFYFTVDIAHVTCWFGDGFAEVLRIKPASEPVHMTGPVGSLVSLGS

SEQ ID NO: 739364 - protein, 158 aa, Homo sapiens
YPFSEKLFSGLVWANMFFCHAGNSDHVLIPNQNPLLSPRSVVPAWVTEAPVATLEVRFTPHAEMDLGQLSSQDVGQASFKYFQSAEEAKRAIEAVLSADPRSVYRRKLCQDRLFYFTVDIAHVTCWFGDGFAEVLRIKPASEPVHMTGPVGSLVSLGS

SEQ ID NO: 739365 - protein, 122 aa, Homo sapiens
WVRGGRKLGKGVCPPPPHRAARVLGGPGDGNPGACRGRAPSPVSRADRPAIGGAEPGRGGPPVVRFRNRTRSRSVSPRRRGGASAAVGFRRGLGPALGDKESAWGRGGDAAVLAPHVPPPRT

SEQ ID NO: 739366 - protein, 97 aa, Homo sapiens
TFSSKEIITKHLGPDFCKAVLAGGSGIRAHSPGDRAVHFQKGRKGSAQKHAQTVSSPAARLLRPSRLLSPQVPPQSMSLGYECHLVSVRSPPHCSCQ

SEQ ID NO: 739367 - protein, 97 aa, Homo sapiens; identical to SEQ ID NO: 739366

SEQ ID NO: 739368 - protein, 98 aa, Homo sapiens
SSVAAQPGHASFSAGAGILVARILASLSRLLLSLPPPPATESLCPDPAPAGVCGWGSTPFWFLVAMDLTLWQDSCCPLLQGGWQNGTSTAPDTMNPGL

SEQ ID NO: 739369 - protein, 359 aa, Homo sapiens
ASAGWCGGGTAPEPERTRAELEKLIQQRAVLRVSYKGSISYRNAARVQPPRRGATPPAPPRAPGGAARPVSLREVVRYLGGSGGAGGRLTRGRVQGLLEEEAAARGRLERTRLGALALPRGDRPGRAPPAASARPSRSKRGGEERVLEKEEEEDDDEDEDEEDDVSEGSEVPESDRPAGAQHHQLNGERGPQSAKERVKEWTPCGPHQGQDEGRGPAPGSGTRQVFSMAAMNKEGGTASVATGPDSPSPVPLPPGKPALPGADGTPFGCPPGRKEKPSDPVEWTVMDVVEYFTEAGFPEQATAFQEQEIDGKSLLLMQRTDVLTGLSIRLGPALKIYEHHIKVLQQGHFEDDDPDGFLG

SEQ ID NO: 739370 - protein, 359 aa, Homo sapiens; identical to SEQ ID NO: 739369

SEQ ID NO: 739371 - protein, 132 aa, Homo sapiens
MAAMNKEGGTASVATGPDSPSPVPLPPGKPALPGADGTPFGCPPGRKEKPSDPVEWTVMDVVEYFTEAGFPEQATAFQEQEIDGKSLLLMQRTDVLTGLSIRLGPALKIYEHHIKVLQQGHFEDDDPDGFLG

SEQ ID NO: 739372 - protein, 297 aa, Homo sapiens
SGGSRGGGRRAGREAARTVQPGRAGGMAGPPALSPPETAAAATTAADRRSSSAASPHYQEWILDTIDSPAPARLSSKRGGEERVLEKEEEEDDDEDEDEEDDVSEGSEVPESDRPAGAQHHQLNGERGPQSAKERVKEWTPCGPHQGQDEGRGPAPGSGTRQVFSMAAMNKEGGTASVATGPDSPSPVPLPPGKPALPGADGTPFGCPPGRKEKPSDPVEWTVMDVVEYFTEAGFPEQATAFQEQEIDGKSLLLMQRTDVLTGLSIRLGPALKIYEHHIKVLQQGHFEDDDPDGFLG

SEQ ID NO: 739373 - protein, 267 aa, Homo sapiens
DGVGRPTRRAAARGRLERTRLGALALPRGDRPGRAPPAASARPSRSKRGGEERVLEKEEEEDDDEDEDEEDDVSEGSEVPESDRPAGAQHHQLNGERGPQSAKERVKEWTPCGPHQGQDEGRGPAPGSGTRQVFSMAAMNKEGGTASVATGPDSPSPVPLPPGKPALPGADGTPFGCPPGRKEKPSDPVEWTVMDVVEYFTEAGFPEQATAFQEQEIDGKSLLLMQRTDVLTGLSIRLGPALKIYEHHIKVLQQGHFEDDDPDGFLG

SEQ ID NO: 739374 - protein, 359 aa, Homo sapiens; identical to SEQ ID NO: 739369

SEQ ID NO: 739375 - protein, 232 aa, Homo sapiens
ASAGWCGGGTAPEPERTRAELEKLIQQRAVLRVSYKGSISYRNAARVQPPRRGATPPAPPRAPGGAARPVSLREVVRYLGGSGGAGGRLTRGRVQGLLEEEAAARGRLERTRLGALALPRGDRPGRAPPAASARPSRSKRGGEERVLEKEEEEDDDEDEDEEDDVSEGSEVPESDRPAGAQHHQLNGERGPQSAKERVKEWTPCGPHQGQDEGRGPAPGSGTRQVFSQMFPV

SEQ ID NO: 739376 - protein, 301 aa, Homo sapiens
AALPPARPPGALLLRLLVALVSLSPPSATGSLSVSFPIVAWLSRSPGLAVLLCLPLSSAAVLCAVPHLACRMKNPMLEVVSLLLEKLLLISNFTLFSSGAAGKDKGRNSFYETSSFHRGDVLEVPRTHLTHYGIYLGDNRVAHMMPDILLALTDDMGRTQKVVSNKRLILGVIVKVASIRVDTVEDFAYGANILVNHLDESLQKKALLNEEVARRAEKLLGFTPYSLLWNNCEHFVTYCRYGTPISPQSDKFCETVKIIIRDQRSVLASAVLGLASIVCTGLVSYTTLPAIFIPFFLWMAG

SEQ ID NO: 739377 - protein, 230 aa, Homo sapiens
MKNPMLEVVSLLLEKLLLISNFTLFSSGAAGKDKGRNSFYETSSFHRGDVLEVPRTHLTHYGIYLGDNRVAHMMPDILLALTDDMGRTQKVVSNKRLILGVIVKVASIRVDTVEDFAYGANILVNHLDESLQKKALLNEEVARRAEKLLGFTPYSLLWNNCEHFVTYCRYGTPISPQSDKFCETVKIIIRDQRSVLASAVLGLASIVCTGLVSYTTLPAIFIPFFLWMAG

SEQ ID NO: 739378 - protein, 110 aa, Homo sapiens
MRFETFRSCLPFCPPNRPLPSLLTRASRAEGWARSTRLLSHLLELQASFRCREALWANSFGIPGGRCAVRGEEEDLTAVLHPRRPTSTPVRALFQAPAGPTCQELGLRSA

SEQ ID NO: 739379 - protein, 110 aa, Homo sapiens; identical to SEQ ID NO: 739378

SEQ ID NO: 739380 - protein, 479 aa, Homo sapiens
MATALVSAHSLAPLNLKKEGLRVVREDHYSTWEQGFKLQGNSKGLGQEPLCKQFRQLRYEETTGPREALSRLRELCQQWLQPETHTKEQILELLVLEQFLIILPKELQARVQEHHPESREDVVVVLEDLQLDLGETGQQVDPDQPKKQKILVEEMAPLKGVQEQQVRHECEVTKPEKEKGEETRIENGKLIVVTDSCGRVESSGKISEPMEAHNEGSNLERHQAKPKEKIEYKCSEREQRFIQHLDLIEHASTHTGKKLCESDVCQSSSLTGHKKVLSREKGHQCHECGKAFQRSSHLVRHQKIHLGEKPYQCNECGKVFSQNAGLLEHLRIHTGEKPYLCIHCGKNFRRSSHLNRHQRIHSQEEPCECKECGKTFSQALLLTHHQRIHSHSKSHQCNECGKAFSLTSDLIRHHRIHTGEKPFKCNICQKAFRLNSHLAQHVRIHNEEKPYQCSECGEAFRQRSGLFQHQRYHHKDKLA

SEQ ID NO: 739381 - protein, 344 aa, Homo sapiens
MATALDPDQPKKQKILVEEMAPLKGVQEQQVRHECEVTKPEKEKGEETRIENGKLIVVTDSCGRVESSGKISEPMEAHNEGSNLERHQAKPKEKIEYKCSEREQRFIQHLDLIEHASTHTGKKLCESDVCQSSSLTGHKKVLSREKGHQCHECGKAFQRSSHLVRHQKIHLGEKPYQCNECGKVFSQNAGLLEHLRIHTGEKPYLCIHCGKNFRRSSHLNRHQRIHSQEEPCECKECGKTFSQALLLTHHQRIHSHSKSHQCNECGKAFSLTSDLIRHHRIHTGEKPFKCNICQKAFRLNSHLAQHVRIHNEEKPYQCSECGEAFRQRSGLFQHQRYHHKDKLA

SEQ ID NO: 739382 - protein, 479 aa, Homo sapiens; identical to SEQ ID NO: 739380

SEQ ID NO: 739383 - protein, 344 aa, Homo sapiens; identical to SEQ ID NO: 739381

SEQ ID NO: 739384 - protein, 325 aa, Homo sapiens [sequence omitted]

SEQ ID NO: 739385 - protein, 270 aa, Homo sapiens
MEAHNEGSNLERHQAKPKEKIEYKCSEREQRFIQHLDLIEHASTHTGKKLCESDVCQSSSLTGHKKVLSREKGHQCHECGKAFQRSSHLVRHQKIHLGEKPYQCNECGKVFSQNAGLLEHLRIHTGEKPYLCIHCGKNFRRSSHLNRHQRIHSQEEPCECKECGKTFSQALLLTHHQRIHSHSKSHQCNECGKAFSLTSDLIRHHRIHTGEKPFKCNICQKAFRLNSHLAQHVRIHNEEKPYQCSECGEAFRQRSGLFQHQRYHHKDKLA

SEQ ID NO: 739386 - protein, 1709 aa, Homo sapiens
MGFLPKLLLLASFFPAGQASWGVSSPQDVQGVKGSCLLIPCIFSFPADVEVPDGITAIWYYDYSGQRQVVSHSADPKLVEARFRGRTEFMGNPEHRVCNLLLKDLQPEDSGSYNFRFEISEVNRWSDVKGTLVTVTEEPRVPTIASPVELLEGTEVDFNCSTPYVCLQEQVRLQWQGQDPARSVTFNSQKFEPTGVGHLETLHMAMSWQDHGRILRCQLSVANHRAQSEIHLQVKYAPKGVKILLSPSGRNILPGELVTLTCQVNSSYPAVSSIKWLKDGVRLQTKTGVLHLPQAAWSDAGVYTCQAENGVGSLVSPPISLHIFMAEVQVSPAGPILENQTVTLVCNTPNEAPSDLRYSWYKNHVLLEDAHSHTLRLHLATRADTGFYFCEVQNVHGSERSGPVSVVVNHPPLTPVLTAFLETQAGLVGILHCSVVSEPLATLVLSHGGHILASTSGDSDHSPRFSGTSGPNSLRLEIRDLEETDSGEYKCSATNSLGNATSTLDFHANAARLLISPAAEVVEGQAVTLSCRSGLSPTPDARFSWYLNGALLHEGPGSSLLLPAASSTDAGSYHCRARDGHSASGPSSPAVLTVLYPPRQPTFTTRLDLDAAGAGAGRRGLLLCRVDSDPPARLQLLHKDRVVATSLPSGGGCSTCGGCSPRMKVTKAPNLLRVEIHNPLLEEEGLYLCEASNALGNASTSATFNGQATVLAIAPSHTLQEGTEANLTCNVSREAAGSPANFSWFRNGVLWAQGPLETVTLLPVARTDAALYACRILTEAGAQLSTPVLLSVLYPPDRPKLSALLDMGQGHMALFICTVDSRPLALLALFHGEHLLATSLGPQVPSHGRFQAKAEANSLKLEVRELGLGDSGSYRCEATNVLGSSNTSLFFQVRGAWVQVSPSPELQEGQAVVLSCQVHTGVPEGTSYRWYRDGQPLQESTSATLRFAAITLTQAGAYHCQAQAPGSATTSLAAPISLHVSYAPRHVTLTTLMDTGPGRLGLLLCRVDSDPPAQLRLLHGDRLVASTLQGVGGPEGSSPRLHVAVAPNTLRLEIHGAMLEDEGVYICEASNTLGQASASADFDAQAVNVQVWPGATVREGQLVNLTCLVWTTHPAQLTYTWYQDGQQRLDAHSIPLPNVTVRDATSYRCGVGPPGRAPRLSRPITLDVLYAPRNLRLTYLLESHGGQLALVLCTVDSRPPAQLALSHAGRLLASSTAASVPNTLRLELRGPQPRDEGFYSCSARSPLGQANTSLELRLEGVRVILAPEAAVPEGAPITVTCADPAAHAPTLYTWYHNGRWLQEGPAASLSFLVATRAHAGAYSCQAQDAQGTRSSRPAALQVLYAPQDAVLSSFRDSRARSMAVIQCTVDSEPPAELALSHDGKVLATSSGVHSLASGTGHVQVARNALRLQVQDVPAGDDTYVCTAQNLLGSISTIGRLQVEGARVVAEPGLDVPEGAALNLSCRLLGGPGPVGNSTFAWFWNDRRLHAEPVPTLAFTHVARAQAGMYHCLAELPTGAAASAPVMLRVLYPPKTPTMMVFVEPEGGLRGILDCRVDSEPLASLTLHLGSRLVASSQPQGAPAEPHIHVLASPNALRVDIEALRPSDQGEYICSASNVLGSASTSTYFGVRALHRLHQFQQLLWVLGLLVGLLLLLLGLGACYTWRRRRVCKQSMGENSVEMAFQKETTQLIDPDAATCETSTCAPPLG

SEQ ID NO: 739387 - protein, 130 aa, Homo sapiens
ASGSGLTPGALRRAALSVHFSGQGRIWEPSWGTFSGAGRRALWHPEACITLPSVPPAVLPPGQASWGVSSPQDVQGVKGSCLLIPCIFSFPADVEVPDGITAIWYYDYSGQRQVVSHSADPKLVEARFRG

SEQ ID NO: 739388 - protein, 1649 aa, Homo sapiens
MGFLPKLLLLASFFPAGQASWGVSSPQDVQGVKGSCLLIPCIFSFPADVEVPDGITAIWYYDYSGQRQVVSHSADPKLVEARFRGRTEFMGNPEHRVCNLLLKDLQPEDSGSYNFRFEISEVNRWSDVKGTLVTVTEEPRVPTIASPVELLEGTEVDFNCSTPYVCLQEQVRLQWQGQDPARSVTFNSQKFEPTGVGHLETLHMAMSWQDHGRILRCQLSVANHRAQSEIHLQVKYAPKGVKILLSPSGRNILPGELVTLTCQVNSSYPAVSSIKWLKDGVRLQTKTGVLHLPQAAWSDAGVYTCQAENGVGSLVSPPISLHIFMAEVQVSPAGPILENQTVTLVCNTPNEAPSDLRYSWYKNHVLLEDAHSHTLRLHLATRADTGFYFCEVQNVHGSERSGPVSVVVNHPPLTPVLTAFLETQAGLVGILHCSVVSEPLATLVLSHGGHILASTSGDSDHSPRFSGTSGPNSLRLEIRDLEETDSGEYKCSATNSLGNATSTLDFHANAARLLISPAAEVVEGQAVTLSCRSGLSPTPDARFSWYLNGALLHEGPGSSLLLPAASSTDAGSYHCRARDGHSASGPSSPAVLTVLYPPRQPTFTTRLDLDAAGAGAGRRGLLLCRVDSDPPARLQLLHKDRVVATSLPSGGGCSTCGGCSPRMKVTKAPNLLRVEIHNPLLEEEGLYLCEASNALGNASTSATFNGQATVLAIAPSHTLQEGTEANLTCNVSREAAGSPANFSWFRNGVLWAQGPLETVTLLPVARTDAALYACRILTEAGAQLSTPVLLSVLYPPDRPKLSALLDMGQGHMALFICTVDSRPLALLALFHGEHLLATSLGPQVPSHGRFQAKAEANSLKLEVRELGLGDSGSYRCEATNVLGSSNTSLFFQVRGAWVQVSPSPELQEGQAVVLSCQVHTGVPEGTSYRWYRDGQPLQESTSATLRFAAITLTQAGAYHCQAQAPGSATTSLAAPISLHVSYAPRHVTLTTLMDTGPGRLGLLLCRVDSDPPAQLRLLHGDRLVASTLQGVGGPEGSSPRLHVAVAPNTLRLEIHGAMLEDEGVYICEASNTLGQASASADFDAQAVNVQVWPGATVREGQLVNLTCLVWTTHPAQLTYTWYQDGQQRLDAHSIPLPNVTVRDATSYRCGVGPPGRAPRLSRPITLDVLYAPRNLRLTYLLESHGGQLALVLCTVDSRPPAQLALSHAGRLLASSTAASVPNTLRLELRGPQPRDEGFYSCSARSPLGQANTSLELRLEGVRVILAPEAAVPEGAPITVTCADPAAHAPTLYTWYHNGRWLQEGPAASLSFLVATRAHAGAYSCQAQDAQGTRSSRPAALQVLYAPQDAVLSSFRDSRARSMAVIQCTVDSEPPAELALSHDGKVLATSSGVHSLASGTGHVQVARNALRLQVQDVPAGDDTYVCTAQNLLGSISTIGRLQVEGARVVAEPGLDVPEGAALNLSCRLLGGPGPVGNSTFAWFWNDRRLHAEPVPTLAFTHVARAQAGMYHCLAELPTGAAASAPVMLRVLYPPKTPTMMVFVEPEGGLRGILDCRVDSEPLASLTLHLGSRLVASSQPQGAPAEPHIHVLASPNALRVDIEALRPSDQGEYICSASNVLGSASTSTYFGVRGEGRGLHLPGHSAQKPSS

SEQ ID NO: 739389 - protein, 942 aa, Homo sapiens
MASVASCDSRPSSDELPGDPSSQEEDEDYDFEDRVSDSGSYSSASSDYDDLEPEWLDSVQKNGELFYLELSEDEEESLLPETPTVNHVRFSENEIIIEDDYKERKKYEPKLKQFTKILRRKRLLPKRCNKKNSNDNGPVSILKHQSNQKTGVIVQQRYKDVNVYVNPKKLTVIKAKEQLKLLEVLVGIIHQTKWSWRRTGKQGDGERLVVHGLLPGGSAMKSGQVLIGDVLVAVNDVDVTTENIERVLSCIPGPMQVKLTFENAYDVKRETSHPRQKKTQSNTSDLVKLLWGEEVEGIQQSGLNTPHIIMYLTLQLDSETSKEEQEILYHYPMSEASQKLKSVRGIFLTLCDMLENVTGTQVTSSSLLLNGKQIHVAYWKESDKLLLIGLPAEEVPLPRLRNMIENVIQTLKFMYGSLDSAFCQIENVPRLDHFFNLFFQRALQPAKLHSSASPSAQQYDASSAVLLDNLPGVRWLTLPLEIKMELDMALSDLEAADFAELSEDYYDMRRLYTILGSSLFYKGYLICSHLPKDDLIDIAVYCRHYCLLPLAAKQRIGQLIIWREVFPQHHLRPLADSSTEVFPEPEGRYFLLVVGLKHYMLCVLLEAGGCASKAIGSPGPDCVYVDQVKTTLHQLDGVDSRIDERLASSPVPCLSCADWFLTGSREKTDSLTTSPILSRLQGTSKVATSPTCRRTLFGDYSLKTRKPSPSCSSGGSDNGCEGGEDDGFSPHTTPDAVRKQRESQGSDGLEESGTLLKVTKKKSTLPNPFHLGNLKKDLPEKELEIYNTVKLTSGPENTLFHYVALETVQGIFITPTLEEVAQLSGSIHPQLIKNFHQCCLSIRAVFQQTLVEEKKKGLNSGDHSDSAKSVSSLNPVKEHGVLFECSPGNWTDQKKAPPVMAYWVVGRLFLHPKPQELYVCFHDSVTEIAIEIAFKLFFGLTL

SEQ ID NO: 739390 - protein, 921 aa, Homo sapiens
MASVASCDSRPSSDELPGDPSSQEEDEDYDFEDRVSDSGSYSSASSDYDDLEPEWLDSVQKNGELFYLELSEDEEESLLPETPTVNHVRFSENEIIIEDDYKERKKYEPKLKQFTKILRRKRLLPKRCNKKNSNDNGPVSILKHQSNQKTGVIVQQRYKDVNVYVNPKKLTVIKAKEQLKLLEVLVGIIHQTKWSWRRTGKQGDGERLVVHGLLPGGSAMKSGQVLIGDVLVAVNDVDVTTENIERVLSCIPGPMQVKLTFENAYDVKRETSHPRQKKTQSNTSDLVKLLWGEEVEGIQQSGLNTPHIIMYLTLQLDSETSKEEQEILYHYPMSEASQKLKSVRGIFLTLCDMLENVTGTQVTSSSLLLNGKQIHVAYWKESDKLLLIGLPAEEVPLPRLRNMIENVIQTLKFMYGSLDSAFCQIENVPRLDHFFNLFFQRALQPAKLHSSASPSAQQYDASSAVLLDNLPGVRWLTLPLEIKMELDMALSDLEAADFAELGYLICSHLPKDDLIDIAVYCRHYCLLPLAAKQRIGQLIIWREVFPQHHLRPLADSSTEVFPEPEGRYFLLVVGLKHYMLCVLLEAGGCASKAIGSPGPDCVYVDQVKTTLHQLDGVDSRIDERLASSPVPCLSCADWFLTGSREKTDSLTTSPILSRLQGTSKVATSPTCRRTLFGDYSLKTRKPSPSCSSGGSDNGCEGGEDDGFSPHTTPDAVRKQRESQGSDGLEESGTLLKVTKKKSTLPNPFHLGNLKKDLPEKELEIYNTVKLTSGPENTLFHYVALETVQGIFITPTLEEVAQLSGSIHPQLIKNFHQCCLSIRAVFQQTLVEEKKKGLNSGDHSDSAKSVSSLNPVKEHGVLFECSPGNWTDQKKAPPVMAYWVVGRLFLHPKPQELYVCFHDSVTEIAIEIAFKLFFGLTL

SEQ ID NO: 739391 - protein, 170 aa, Homo sapiens
MECLDPPLQEVPVDEWFCPECAAPGVVLAADAGPVSEEEVSLLLADVVPTTSRLRPRAGRTRAIARTRQSERVRATVNRNRISTARRVQHTPGRLGSSLLDEAIEAVATGLSTAVYQRPLTPRTPARRKRKTSKPEGKDSPASHRLGPTPEVHSLLPSRLWAFPFLLSAS

SEQ ID NO: 739392 - protein, 341 aa, Homo sapiens
  misc_feature (5)..(5): Xaa can be any naturally occurring amino acid
  misc_feature (24)..(25): Xaa can be any naturally occurring amino acid
  misc_feature (37)..(37): Xaa can be any naturally occurring amino acid
LYRPXSGSGGDFRAAGASVVTLGXXGCLISIRTHEAXSGPSGTASVAAMAYHSGYGAHGSKHRARAAPDPPPLFDDTSGGYSSQPGGYPATGADVAFSVNHLLGDPMANVAMAYGSSIASHGKDMVHKELHRFVSVSKLKYFFAVDTAYVAKKLGLLVFPYTHQNWEVQYSRDAPLPPRQDLNAPDLYIPTMAFITYVLLAGMALGIQKRFSPEVLGLCASTALVWVVMEVLALLLGLYLATVRSDLSTFHLLAYSGYKYVGMILSVLTGLLFGSDGYYVALAWTSSALMYFIVRSLRTAALGPDSMGGPVPRQRLQLYLTLGAAAFQPLIIYWLTFHLVR

SEQ ID NO: 739393 - protein, 293 aa, Homo sapiens
MAYHSGYGAHGSKHRARAAPDPPPLFDDTSGGYSSQPGGYPATGADVAFSVNHLLGDPMANVAMAYGSSIASHGKDMVHKELHRFVSVSKLKYFFAVDTAYVAKKLGLLVFPYTHQNWEVQYSRDAPLPPRQDLNAPDLYIPTMAFITYVLLAGMALGIQKRFSPEVLGLCASTALVWVVMEVLALLLGLYLATVRSDLSTFHLLAYSGYKYVGMILSVLTGLLFGSDGYYVALAWTSSALMYFIVRSLRTAALGPDSMGGPVPRQRLQLYLTLGAAAFQPLIIYWLTFHLVR

SEQ ID NO: 739394 - protein, 278 aa, Homo sapiens
MAYHSGYGAHGSKHRARAAPDPPPLFDDTSGGYSSQPGGYPATGADVAFSVNHLLGDPMANVAMAYGSSIASHGKDMVHKELHRFVSVSKLKYFFAVDTAYVAKKLGLLVFPYTHQNWEVQYSRDAPLPPRQDLNAPDLYIPTMAFITYVLLAGMALGIQKRFSPEVLGLCASTALVWVVMEVLALLLGLYLATVRSDLSTFHLLAYSGYKYVGMILSVLTGLLFGSDGYYVALAWTSSALMYFIVRSLRTAALGPDSMGGPVPRQRLRFGKGSSKSP

SEQ ID NO: 739395 - protein, 301 aa, Homo sapiens
MAYHSGYGAHGSKHRARAAPDPPPLFDDTSGGYSSQPGGYPATGADVAFSVNHLLGDPMANVAMAYGSSIASHGKDMVHKELHRFVSVSKLKYFFAVDTAYVAKKLGLLVFPYTHQNWEVQYSRDAPLPPRQDLNAPDLYIPTMAFITYVLLAGMALGIQKRFSPEVLGLCASTALVWVVMEVLALLLGLYLATVRSDLSTFHLLAYSGYKYVGMILSVLTGLLFGSDGYYVALAWTSSALMYFIVSLVHPPIPLPSLEGKPPPPGQASVLLSSRCALCGQQPWAPTAWGAPSPGSVSSST

SEQ ID NO: 739396 - protein, 305 aa, Homo sapiens
MAYHSGYGAHGSKHRARAAPDPPPLFDDTSGGYSSQPGGYPATGADVAFSVNHLLGDPMANVAMAYGSSIASHGKDMVHKELHRFVSVSKLKYFFAVDTAYVAKKLGLLVFPYTHQNWEVQYSRDAPLPPRQDLNAPDLYIPTMAFITYVLLAGMALGIQKRMPGSEPPLLWRRFSPEVLGLCASTALVWVVMEVLALLLGLYLATVRSDLSTFHLLAYSGYKYVGMILSVLTGLLFGSDGYYVALAWTSSALMYFIVRSLRTAALGPDSMGGPVPRQRLQLYLTLGAAAFQPLIIYWLTFHLVR

SEQ ID NO: 739397 - protein, 241 aa, Homo sapiens
MAYHSGYGAHGSKHRARAAPDPPPLFDDTSGGYSSQPGGYPATGADVAFSVNHLLGDPMANVAMAYGSSIASHGKDMVHKELHRFVSVSKLKYFFAVDTAYVAKKLGLLVFPYTHQNWEVQYSRDAPLPPRQDLNAPDLYIPTMAFITYVLLAGMALGIQKRMILSVLTGLLFGSDGYYVALAWTSSALMYFIVRSLRTAALGPDSMGGPVPRQRLQLYLTLGAAAFQPLIIYWLTFHLVR

SEQ ID NO: 739398 - protein, 284 aa, Homo sapiens
MAYHSGYGAHGSKHRARAAPDPPPLFDDTSGGYSSQPGGYPATGADVAFSVNHLLGDPMANVAMAYGSSIASHGKDMVHKELHRFVSVSKLKYFFAVDTAYVAKKLGLLVFPYTHQNWEVQYSRDAPLPPRQDLNAPDLYIPTMAFITYVLLAGMALGIQKRFSPEVLGLCASTAAGLQWLQIRGNDPQCAHGAAVRQRWLLRGAGLDLIGAHVLHCALFADSSPGPRQHGGPRPPAASPALPDSGSCSLPAPHHILADFPPGPVTPWPQMALSFSFIEDLISL

SEQ ID NO: 739399 - protein, 160 aa, Homo sapiens
PSSPSVAPVSLPHPCLRMPGSEPPLLWRRFSPEVLGLCASTALVWVVMEVLALLLGLYLATVRSDLSTFHLLAYSGYKYVGMILSVLTGLLFGSDGYYVALAWTSSALMYFIVRSLRTAALGPDSMGGPVPRQRLQLYLTLGAAAFQPLIIYWLTFHLVR

SEQ ID NO: 739400 - protein, 148 aa, Homo sapiens
  misc_feature (144)..(144): Xaa can be any naturally occurring amino acid
MAYHSGYGAHGSKHRARAAPDPPPLFDDTSGGYSSQPGGYPATGADVAFSVNHLLGDPMANVAMAYGSSIASHGKDMVHKELHRFVSVSKLKYFFAVDTAYVAKKLGLLVFPYTHQNWEVQYSRDAPLPPRQDLNAPDLYIPKXPFPL

SEQ ID NO: 739401 - protein, 259 aa, Homo sapiens
DGRKLRLGRGLVLEPRTWWPRPAGWGTCRAAGWPRSVPWARSSCLISIRTHEAAQRALGDSERRGHGLSLGLRSLHRFVSVSKLKYFFAVDTAYVAKKLGLLVFPYTHQNWEVQYSRDAPLPPRQDLNAPDLYIPKLPTHTADSSLSCWLHRARPIVDTQAMAFITYVLLAGMALGIQKRMILSVLTGLLFGSDGYYVALAWTSSALMYFIVRSLRTAALGPDSMGGPVPRQRLQLYLTLGAAAFQPLIIYWLTFHLVR

SEQ ID NO: 739402 - protein, 83 aa, Homo sapiens
RWFGLMLGISVIYSDTSKTHGSKHRARAAPDPPPLFDDTSGGYSSQPGGYPATGADVAFSVNHLLGDPMANVAMAYGSSIASH

SEQ ID NO: 739403 - protein, 133 aa, Homo sapiens
ISLALGSDGLHYLRAPGWDGTGHSEKVSAKPLPYPPLPVSSSPNLPRAYVVVPSSPSVAPVSLPHPCLRMPGSEPPLLWRRFSPEVLGLCASTALVWVVMEVLALLLGLYLATVRSDLSTFHLLAYSGYKYVG

SEQ ID NO: 739404 - protein, 127 aa, Homo sapiens
MSLLRNRLQALPALCLCVLVLACIGACQPEAQEGTLSPPPKLKMSRWSLVRGRMKELLETVVNRTRDGWQWFWSPSTFRGFMQTYYDDHLRDLGPLTKAWFLESKDSLLKKTHSLCPRLVCGDKDQG

SEQ ID NO: 739405 - protein, 127 aa, Homo sapiens; identical to SEQ ID NO: 739404

SEQ ID NO: 739406 - protein, 127 aa, Homo sapiens; identical to SEQ ID NO: 739404

SEQ ID NO: 739407 - protein, 149 aa, Homo sapiens
ERVPVQNHHLLVEESSVSGCAPTLRLVSPLYNGNDEDAHLIGFLWQITCQPEAQEGTLSPPPKLKMSRWSLVRGRMKELLETVVNRTRDGWQWFWSPSTFRGFMQTYYDDHLRDLGPLTKAWFLESKDSLLKKTHSLCPRLVCGDKDQG

SEQ ID NO: 739408 - protein, 457 aa, Homo sapiens
MRADICVHLNRKVFNEHPAFRLASDGCLRALAVEFQTIHCAPGDLIYHAGESVDALCFVVSGSLEVIQDDEVVAILGKGDVFGDIFWKETTLAHACANVRALTYCDLHIIKREALLKVLDFYTAFANSFSRNLTLTCNLRKRIIFRKISDVKKEEEERLRQKNEVTLSIPVDHPVRKLFQKFKQQKELRNQGSTQGDPERNQLQVESRSLQNGASITGTSVVTVSQITPIQTSLAYVKTSESLKQNNRDAMELKPNGGADQKCLKVNSPIRMKNGNGKGWLRLKNNMGAHEEKKEDWNNVTKAESMGLLSEDPKSSDSENSVTKNPLRKTDSCDSGITKSDLRLDKAGEARSPLEHSPIQADAKHPFYPIPEQALQTTLQEVKHELKEDIQLLSCRMTALEKQVAEILKILSEKSVPQASSPKSQMPLQVPPQIPCQDIFSVSRPESPESDKDEIHF

SEQ ID NO: 739409 - protein, 67 aa, Homo sapiens
APGPTPDLIKIGIFARGQEVKTSLGNMADLGLEQCTVKMAAGSRGFHRGQERHPCIPGSAEDAIHLE

SEQ ID NO: 739410 - protein, 545 aa, Homo sapiens
ASRDPGCGSSWWEACGAAAMAALTIATGTGNWFSALALGVTLLKCLLIPTYHSTDFEVHRNWLAITHSLPISQWYYEATSEWTLDYPPFFAWFEYILSHVAKYFDQEMLNVHNLNYSSSRTLLFQRFSVIFMDVLFVYAVRECCKCIDGKKVGKELTEKPKFILSVLLLWNFGLLIVDHIHFQYNGFLFGLMLLSIARLFQKRHMEGAFLFAVLLHFKHIYLYVAPAYGVYLLRSYCFTANKPDGSIRWKSFSFVRVISLGLVVFLVSALSLGPFLALNQLPQVFSRLFPFKRGLCHAYWAPNFWALYNALDKVLSVIGLKLKFLDPNNIPKASMTSGLVQQFQHTVLPSVTPLATLICTLIAILPSIFCLWFKPQGPRGFLRCLTLCALSSFMFGWHVHEKAILLAILPMSLLSVGKAGDASIFLILTTTGHYSLFPLLFTAPELPIKILLMLLFTIYSISSLKTLFRKEKPLFNWMETFYLLGLGPLEVCCEFVFPFTSWKVKYPFIPLLLTSVYCAVGITYAWFKLYVSVLIDSAIGKTKKQ

SEQ ID NO: 739411 - protein, 545 aa, Homo sapiens; identical to SEQ ID NO: 739410

SEQ ID NO: 739412 - protein, 559 aa, Homo sapiens
ASRDPGCGSSWWEACGAAAMAALTIATGTGNWFSALALGVTLLKCLLIPTYHSTDFEVHRNWLAITHSLPISQWYYEATSEWTLDYPPFFAWFEYILSHVAKYFDQEMLNVHNLNYSSSRTLLFQRFSVIFMDVLFVYAVRECCKCIDGKKVGKELTEKPKFILSVLLLWNFGLLIVDHIHFQYNGFLFGLMLLSIARLFQKRHMEGAFLFAVLLHFKHIYLYVAPAYGVYLLRSYCFTANKPDGSIRWKSFSFVRVISLGLVVFLVSALSLGPFLALNQLPQVFSRLFPFKRGLCHAYWAPNFWALYNALDKVLSVIGLKLKFLDPNNIPKASMTSGLVQQFQHTVLPSVTPLATLICTLIAILPSIFCLWFKPQGPRGFLRCLTLCALSSFMFGWHVHEKAILLAILPMSLLSVGKAGDASIFLILTTTGHYSLFPLLFTAPELPIKILLMLLFTIYSISSLKTLFRKEKPLFNWMETFYLLGLGPLEVCCEFVFPFTSWKSLALLPRLECSGAISAHCILCLSLLSSWDYKHPPPCPANFCIFSRDRVSPCWPGCS

SEQ ID NO: 739413 - protein, 486 aa, Homo sapiens
ASRDPGCGSSWWEACGAAAMAALTIATGTGNWFSALALGVTLLKCLLIPTYHSTDFEVHRNWLAITHSLPISQWYYEATSEWTLDYPPFFAWFEYILSHVAKYFDQEMLNVHNLNYSSSRTLLFQRFSVIFMDVLFVYAVRECCKCIDGKKVGKELTEKPKFILSVLLLWNFGLLIVDHIHFQYNGFLFGLMLLSIARLFQKRHMEGAFLFAVLLHFKHIYLYVAPAYGVYLLRSYCFTANKPDGSIRWKSFSFVRVISLGLVVFLVSALSLGPFLALNQLPQVFSRLFPFKRGLCHAYWAPNFWALYNALDKVLSVIGLKLKFLDPNNIPKASMTSGLVQQFQHTVLPSVTPLATLICTLIAILPSIFCLWFKPQGPRGFLRCLTLCALSSFMFGWHVHEKAILLAILPMSLLSVGKAGDASIFLILTTTGHYSLFPLLFTAPELPIKILLMLLFTIYSISSLKTLFRRSFTLVAQAGVQWHDLS

SEQ ID NO: 739414 - protein, 326 aa, Homo sapiens
ASRDPGCGSSWWEACGAAAMAALTIATGTGNWFSALALGVTLLKCLLIPTYHSTDFEVHRNWLAITHSLPISQWYYEATSEWTLDYPPFFAWFEYILSHVAKYFDQEMLNVHNLNYSSSRTLLFQRFSVIFMDVLFVYAVRECCKCIDGKKVGKELTEKPKFILSVLLLWNFGLLIVDHIHFQYNGFLFGLMLLSIARLFQKRHMEGAFLFAVLLHFKHIYLYVAPAYGVYLLRSYCFTANKPDGSIRWKSFSFVRVISLGLVVFLVSALSLGPFLALNQLPQVFSRLFPFKRGLCHAYWAPNFWALYNALDKVLSVIALYFLSLV

SEQ ID NO: 739415 - protein, 431 aa, Homo sapiens
ASRDPGCGSSWWEACGAAAMAALTIATGTGNWFSALALGVTLLKCLLIPTYHSTDFEVHRNWLAITHSLPISQWYYEATSEWTLDYPPFFAWFEYILSHVAKYFDQEMLNVHNLNYSSSRTLLFQRFSVIFMDVLFVYAVRECCKCIDGKKVGKELTEKPKFILSVLLLWNFGLLIVDHIHFQYNGFLFGLMLLSIARLFQKRHMEGAFLFAVLLHFKHIYLYVAPAYGVYLLRSYCFTANKPDGSIRWKSFSFVRVISLGLVVFLVSALSLGPFLALNQLPQVFSRLFPFKRGLCHAYWAPNFWALYNALDKVLSVIGLKLKFLDPNNIPKASMTSGLVQQFQHTVLPSVTPLATLICTLIAILPSIFCLWFKPQGPRGFLRCLTLCALSSFMFGWHVHEKAILLAILPMSLLSVGKAGDASKSESSRVT

SEQ ID NO: 739416 - protein, 371 aa, Homo sapiens
ASRDPGCGSSWWEACGAAAMAALTIATGTGNWFSALALGVTLLKCLLIPTYHSTDFEVHRNWLAITHSLPISQWYYEATSEWTLDYPPFFAWFEYILSHVAKYFDQEMLNVHNLNYSSSRTLLFQRFSVIFMDVLFVYAVRECCKCIDGKKVGKELTEKPKFILSVLLLWNFGLLIVDHIHFQYNGFLFGLMLLSIARLFQKRHMEGAFLFAVLLHFKHIYLYVAPAYGVYLLRSYCFTANKPDGSIRWKSFSFVRVISLGLVVFLVSALSLGPFLALNQLPQVFSRLFPFKRGLCHAYWAPNFWALYNALDKVLSVIGLKLKFLDPNNIPKASMTSGLVQQFQHTVLPSVTPLATLICTLIAILKRKTSF

SEQ ID NO: 739417 - protein, 104 aa, Homo sapiens
GIEGSRMWIKLVGSVRCRSNGGAHNCHGYWQLVFGFGARGDSSQMPSHPHIVRDSHGQVLGGEAPRSVRAGEKGVDIPGYEEKTLGRVCRYPAFAKLSVSPVVT

SEQ ID NO: 739418 - protein, 97 aa, Homo sapiens
GIEGSRMWIKLVGSVRCRSNGGAHNCHGYWQLVFGFGARAIPQILKYTETGLLSLTVCQYHSGIMRQLQSGRWITPLSLHGLSISCHMLPNILIKKC

SEQ ID NO: 739419 - protein, 326 aa, Homo sapiens
ASRDPGCGSSWWEACGAAAMAALTIATGTGNWFSALALGVTLLKCLLIPTYHSTDFEVHRNWLAITHSLPISQWYYEATSEWTLDYPPFFAWFEYILSHVAKYFDQEMLNVHNLNYSSSRTLLFQRFSVIFMDVLFVYAVRECCKCIDGKKVGKELTEKPKFILSVLLLWNFGLLIVDHIHFQYNGFLFGLMLLSIARLFQKRHMEGAFLFAVLLHFKHIYLYVAPAYGVYLLRSYCFTANKPDGSIRWKSFSFVRVISLGLVVFLVSALSLGPFLALNQLPQVFSRLFPFKRGLCHAYWAPNFWALYNALDKVLSVIGMVAKFNY

SEQ ID NO: 739420 - protein, 152 aa, Homo sapiens
ASRDPGCGSSWWEACGAAAMAALTIATGTGNWFSALALGVTLLKCLLIPTYHSTDFEVHRNWLAITHSLPISQWYYEATSEWTLDYPPFFAWFEYILSHVAKYFDQEMLNVHNLNYSSSRTLLFQRFSVIFMDVLFVYAVRDCFCFFPNVSM

SEQ ID NO: 739421 - protein, 298 aa, Homo sapiens
ASRDPGCGSSWWEACGAAAMAALTIATGTGNWFSALALGVTLLKCLLIPTYHSTDFEVHRNWLAITHSLPISQWYYEATSEWTLDYPPFFAWFEYILSHVAKYFDQEMLNVHNLNYSSSRTLLFQRFSVIFMDVLFVYAVRECCKCIDGKKVGKELTEKPKFILSVLLLWNFGLLIVDHIHFQYNGFLFGLMLLSIARLFQKRHMEGAFLFAVLLHFKHIYLYVAPAYGVYLLRSYCFTANKPDGSIRWKSFSFVRVISLGLVVFLVSALSLGPFLALNQLLLFSPAQRIKAAVHQPL

SEQ ID NO: 739422 - protein, 104 aa, Homo sapiens; identical to SEQ ID NO: 739417

SEQ ID NO: 739423 - protein, 526 aa, Homo sapiens
MAALTIATGTGNWFSALALGVTLLKCLLIPTYHSTDFEVHRNWLAITHSLPISQWYYEATSEWTLDYPPFFAWFEYILSHVAKYFDQEMLNVHNLNYSSSRTLLFQRFSVIFMDVLFVYAVRECCKCIDGKKVGKELTEKPKFILSVLLLWNFGLLIVDHIHFQYNGFLFGLMLLSIARLFQKRHMEGAFLFAVLLHFKHIYLYVAPAYGVYLLRSYCFTANKPDGSIRWKSFSFVRVISLGLVVFLVSALSLGPFLALNQLPQVFSRLFPFKRGLCHAYWAPNFWALYNALDKVLSVIGLKLKFLDPNNIPKASMTSGLVQQFQHTVLPSVTPLATLICTLIAILPSIFCLWFKPQGPRGFLRCLTLCALSSFMFGWHVHEKAILLAILPMSLLSVGKAGDASIFLILTTTGHYSLFPLLFTAPELPIKILLMLLFTIYSISSLKTLFRKEKPLFNWMETFYLLGLGPLEVCCEFVFPFTSWKVKYPFIPLLLTSVYCAVGVTYAWFKLYVSVLIDSAIGKTKKQ

SEQ ID NO: 739424 - protein, 546 aa, Homo sapiens
IPLSLAEEKLPTGINPLTLHIMRRTKEYVSNDAAQSDDEEKLQSQPTDTDGGRLKQKTTQLKKFLGKSVKRAKHLAEEYGERAINKVKSVRDEVFHTDQDDPSSSDDEGMPYTRPVKFKAAHGFKGPYDFDQIKVVQDLSGEHMGAVWTMKFSHCGRLLASAGQDNVVRIWALKNAFDYFNNMRMKYNTEGRVSPSPSQESLSSSKSDTDTGVCSGTDEDPDDKNAPFRQRPFCKYKGHTADLLDLSWSKNYFLLSSSMDKTVRLWHISRRECLCCFQHIDFVTAIAFHPRDDRYFLSGSLDGKLRLWNIPDKKVALWNEVDGQTKLITAANFCQNGKYAVIGTYDGRCIFYDTEHLKYHTQIHVRSTRGRNKVGRKITGIEPLPGENKILVTSNDSRIRLYDLRDLSLSMKYKGYVNSSSQIKASFSHDFTYLVSGSEDKYVYIWSTYHDLSKFTSVRRDRNDFWEGIKAHNAVVTSAIFAPNPSLMLSLDVQSEKSEGNEKSEDAEVLDATPSGIMKTDNTEVLLSADFTGAIKVFVNKRKNVS

SEQ ID NO: 739425 - protein, 704 aa, Homo sapiens
MGRLKWTSFSTVAAPTEEHSYTLRWSLPNPEYYTLRYADGPQLYITEQTRSDIKNGTILQLAISPSRAARQLMERTQSSNMETRLDAMKELAKLSADVTFATEFINMDGIIVLTRLVESGTKLLSHYSEMLAFTLTAFLELMDHGIVSWDMVSITFIKQIAGYVSQPMVDVSILQRSLAILESMVLNSQSLYQKIAEEITVGQLISHLQVSNQEIQTYAIALINALFLKAPEDKRQDMANAFAQKHLRSIILNHVIRGNRPIKTEMAHQLYVLQVLTFNLLEERMMTKMDPNDQAQRDIIFELRRIAFDAESDPSNAPGSGTEKRKAMYTKDYKMLGFTNHINPAMDFTQTPPGMLALDNMLYLAKVHQDTYIRIVLENSSREDKHECPFGRSAIELTKMLCEILQVGELPNEGRNDYHPMFFTHDRAFEELFGICIQLLNKTWKEMRATAEDFNKVMQVVREQITRALPSKPNSLDQFKSKLRSLSYSEILRLRQSERMSQDDFQSPPIVELREKIQPEILELIKQQRLNRLCEGSSFRKIGNRRRQERFWYCRLALNHKVLHYGDLDDNPQGEVTFESLQEKIPVADIKAIVTGKDCPHMKEKSALKQNKEVLELAFSILYDPDETLNFIAPNKYEYCIWIDGLSALLGKDMSSELTKSDLDTLLSMEMKLRLLDLENIQIPEAPPPIPKEPSSYDFVYHYG

SEQ ID NO: 739426 - protein, 704 aa, Homo sapiens; identical to SEQ ID NO: 739425

SEQ ID NO: 739427 - protein, 208 aa, Homo sapiens
SGTEWVSVFQSPPIVELREKIQPEILELIKQQRLNRLCEGSSFRKIGNRRRQERFWYCRLALNHKVLHYGDLDDNPQGEVTFESLQEKIPVADIKAIVTGKDCPHMKEKSALKQNKEVLELAFSILYDPDETLNFIAPNKYEYCIWIDGLSALLGKDMSSELTKSDLDTLLSMEMKLRLLDLENIQIPEAPPPIPKEPSSYDFVYHYG

SEQ ID NO: 739428 - protein, 289 aa, Homo sapiens [sequence omitted]

SEQ ID NO: 739429 - protein, 720 aa, Homo sapiens
MPPPSDIVKVAIEWPGANAQLLEIDQKRPLASIIKEVCDGWSLPNPEYYTLRYADGPQLYITEQTRSDIKNGTILQLAISPSRAARQLMERTQSSNMETRLDAMKELAKLSADVTFATEFINMDGIIVLTRLVESGTKLLSHYSEMLAFTLTAFLELMDHGIVSWDMVSITFIKQIAGYVSQPMVDVSILQRSLAILESMVLNSQSLYQKIAEEITVGQLISHLQVSNQEIQTYAIALINALFLKAPEDKRQDMANAFAQKHLRSIILNHVIRGNRPIKTEMAHQLYVLQVLTFNLLEERMMTKMDPNDQAQRDIIFELRRIAFDAESDPSNAPGSGTEKRKAMYTKDYKMLGFTNHINPAMDFTQTPPGMLALDNMLYLAKVHQDTYIRIVLENSSREDKHECPFGRSAIELTKMLCEILQVGELPNEGRNDYHPMFFTHDRAFEELFGICIQLLNKTWKEMRATAEDFNKVMQVVREQITRALPSKPNSLDQFKSKLRSLSYSEILRLRQSERMSQDDFQSPPIVELREKIQPEILELIKQQRLNRLCEGSSFRKIGNRRRQERFWYCRLALNHKVLHYGDLDDNPQGEVTFESLQEKIPVADIKAIVTGKDCPHMKEKSALKQNKEVLELAFSILYDPDETLNFIAPNKYEYCIWIDGLSALLGKDMSSELTKSDLDTLLSMEMKLRLLDLENIQIPEAPPPIPKEPSSYDFVYHYG

SEQ ID NO: 739430 - protein, 704 aa, Homo sapiens; identical to SEQ ID NO: 739425

SEQ ID NO: 739431 - protein, 479 aa, Homo sapiens
MPPPSDIVKVAIEWPGANAQLLEIDQKRPLASIIKEVCDGWSLPNPEYYTLRYADGPQLYITEQTRSDIKNGTILQLAISPSRAARQLMERTQSSNMETRLDAMKELAKLSADVTFATEFINMDGIIVLTRLVESGTKLLSHYSEMLAFTLTAFLELMDHGIVSWDMVSITFIKQIAGYVSQPMVDVSILQRSLAILESMVLNSQSLYQKIAEEITVGQLISHLQVSNQEIQTYAIALINALFLKAPEDKRQDMANAFAQKHLRSIILNHVIRGNRPIKTEMAHQLYVLQVLTFNLLEERMMTKMDPNDQAQRDIIFELRRIAFDAESDPSNAPGSGTEKRKAMYTKDYKMLGFTNHINPAMDFTQTPPGMLALDNMLYLAKVHQDTYIRIVLENSSREDKHECPFGRSAIELTKMLCEILQVGELPNEGRNDYHPMFFTHDRAFEELFGICIQLLNKTWKEMRATAEDFNKVSVSGLL

SEQ ID NO: 739432 - protein, 555 aa, Homo sapiens
MNKLYIGNLSPAVTADDLRQLFGDRKLPLAGQVLLKSGYAFVDYPDQNWAIRAIETLSGKVELHGKIMEVDYSVSKKLRSRKIQIRNIPPHLQWEVLDGLLAQYGTVENVEQVNTDTETAVVNVTYATREEAKIAMEKLSGHQFENYSFKISYIPDEEVSSPSPPQRAQRGDHSSREQGHAPGGTSQARQIDFPLRILVPTQFVGAIIGKEGLTIKNITKQTQSRVDIHRKENSGAAEKPVTIHATPEGTSEACRMILEIMQKEADETKLAEEIPLKILAHNGLVGRLIGKEGRNLKKIEHETGTKITISSLQDLSIYNPERTITVKGTVEACASAEIEIMKKLREAFENDMLAVNTHSGYFSSLYPHHQFGPFPHHHSYPEQEIVNLFIPTQAVGAIIGKKGAHIKQLARFAGASIKIAPAEGPDVSERMVIITGPPEAQFKAQGRIFGKLKEENFFNPKEEVKLEAHIRVPSSTAGRVIGKGGKTVNELQNLTSAEVIVPRDQTPDENEEVIVRIIGHFFASQTAQRKIREIVQQVKQQEQKYPQGVASQRSK

SEQ ID NO: 739433 - protein, 604 aa, Homo sapiens
MNKLYIGNLSPAVTADDLRQLFGDRKLPLAGQVLLKSGYAFVDYPDQNWAIRAIETLSGKVELHGKIMEVDYSVSKKLRSRKIQIRNIPPHLQWEVLDGLLAQYGTVENVEQVFAFSLVNTDTETAVVNVTYATREEAKIAMEKLSGHQFENYSFKISYIPDEEVSSPSPPQRAQRGDHSSREQGHAPGGTSQARQIDFPLRILVPTQFVGAIIGKEGLTIKNITKQTQSRVDIHRKENSGAAEKPVTIHATPEGTSEACRMILEIMQKEADETKLAEEIPLKILAHNGLVGRLIGKEGRNLKKIEHETGTKITISSLQDLSIYNPERTITVKGTVEACASAEIEIMKKLREAFENDMLAVNQQANLIPGLNLSALGIFSTGLSVLSPPAGPRGAPPAAPYHPFTTHSGYFSSLYPHHQFGPFPHHHSYPEQEIVNLFIPTQAVGAIIGKKGAHIKQLARFAGASIKIAPAEGPDVSERMVIITGPPEAQFKAQGRIFGKLKEENFFNPKEEVKLEAHIRVPSSTAGRVIGKGGKTVNELQNLTSAEVIVPRDQTPDENEEVIVRIIGHFFASQTAQRKIREIVQQVKQQEQKYPQGVASQRSK

SEQ ID NO: 739434 - protein, 446 aa, Homo sapiens
MKASRAVLSDEAPQRAQRGDHSSREQGHAPGGTSQARQIDFPLRILVPTQFVGAIIGKEGLTIKNITKQTQSRVDIHRKENSGAAEKPVTIHATPEGTSEACRMILEIMQKEADETKLAEEIPLKILAHNGLVGRLIGKEGRNLKKIEHETGTKITISSLQDLSIYNPERTITVKGTVEACASAEIEIMKKLREAFENDMLAVNQQANLIPGVEPQRTWHLFNRTVRAISTSRAPRSSPRCPLPPFTTHSGYFSSLYPHHQFGPFPHHHSYPEQEIVNLFIPTQAVGAIIGKKGAHIKQLARFAGASIKIAPAEGPDVSERMVIITGPPEAQFKAQGRIFGKLKEENFFNPKEEVKLEAHIRVPSSTAGRVIGKGGKTVNELQNLTSAEVIVPRDQTPDENEEVIVRIIGHFFASQTAQRKIREIVQQVKQQEQKYPQGVASQRSK

SEQ ID NO: 739435 - protein, 270 aa, Homo sapiens
MNKLYIGNLSPAVTADDLRQLFGDRKLPLAGQVLLKSGYAFVDYPDQNWAIRAIETLSGKVELHGKIMEVDYSVSKKLRSRKIQIRNIPPHLQWEVLDGLLAQYGTVENVEQVFAFSLVNTDTETAVVNVTYATREEAKIAMEKLSGHQFENYSFKISYIPDEEVSSPSPPQRAQRGDHSSREQGHAPGGTSQARQIDFPLRILVPTQFVGAIIGKEGLTIKNITKQTQSRVDIHRKENSGAAEKPVTIHATPEGTSEACDNGKHEKRMN

SEQ ID NO: 739436 - protein, 113 aa, Homo sapiens
MTSYVSLVKQLNGGGEERRVPGRGSRGLSGKRRMMNKLYIGNLSPAVTADDLRQLFGDRKLPLAGQVLLKSGYAFVDYPDQNWAIRAIETLSGKVELHGKIMEVDYSVSKKLR

SEQ ID NO: 739437 - protein, 598 aa, Homo sapiens
MNKLYIGNLSPAVTADDLRQLFGDRKLPLAGQVLLKSGYAFVDYPDQNWAIRAIETLSGKVELHGKIMEVDYSVSKKLRSRKIQIRNIPPHLQWEVLDGLLAQYGTVENVEQVNTDTETAVVNVTYATREEAKIAMEKLSGHQFENYSFKISYIPDEEVSSPSPPQRAQRGDHSSREQGHAPGGTSQARQIDFPLRILVPTQFVGAIIGKEGLTIKNITKQTQSRVDIHRKENSGAAEKPVTIHATPEGTSEACRMILEIMQKEADETKLAEEIPLKILAHNGLVGRLIGKEGRNLKKIEHETGTKITISSLQDLSIYNPERTITVKGTVEACASAEIEIMKKLREAFENDMLAVNQQANLIPGLNLSALGIFSTGLSVLSPPAGPRGAPPAAPYHPFTTHSGYFSSLYPHHQFGPFPHHHSYPEQEIVNLFIPTQAVGAIIGKKGAHIKQLARFAGASIKIAPAEGPDVSERMVIITGPPEAQFKAQGRIFGKLKEENFFNPKEEVKLEAHIRVPSSTAGRVIGKGGKTVNELQNLTSAEVIVPRDQTPDENEEVIVRIIGHFFASQTAQRKIREIVQQVKQQEQKYPQGVASQRSK

SEQ ID NO: 739438 - protein, 359 aa, Homo sapiens
MNKLYIGNLSPAVTADDLRQLFGDRKLPLAGQVLLKSGYAFVDYPDQNWAIRAIETLSGKVELHGKIMEVDYSVSKKLRSRKIQIRNIPPHLQWEVLDGLLAQYGTVENVEQVNTDTETAVVNVTYATREEAKIAMEKLSGHQFENYSFKISYIPDEEVSSPSPPQRAQRGDHSSREQGHAPGGTSQARQIDFPLRILVPTQFVGAIIGKEGLTIKNITKQTQSRVDIHRKENSGAAEKPVTIHATPEGTSEACRMILEIMQKEADETKLAEEIPLKILAHNGLVGRLIGKEGRNLKKIEHETGTKITISSLQDLSIYNPERTITVKGTVEACASAEIEIMKKLREAFENDMLAVNVSP

SEQ ID NO: 739439 - protein, 115 aa, Homo sapiens
MNKLYIGNLSPAVTADDLRQLFGDRKLPLAGQVLLKSGYAFVDYPDQNWAIRAIETLSGKVELHGKIMEVDYSVSKKLRSRKIQIRNIPPHLQWEVLDGLLAQYGTVENVEQGNK

SEQ ID NO: 739440 - protein, 71 aa, Homo sapiens
NLFIPTQAVGAIIGKKGAHIKQLARFAGASIKVRLLLTALWPFYHLLSSHGPCSLSVPGSATPCRDRVPQR

SEQ ID NO: 739441 - protein, 127 aa, Homo sapiens
PQLRFRHLRTLLKGLTLKPHAGVEIPQHCLARLPSSLFPHVGKEKQPFQNYGGCFLQMSGPGVHSVSSNRNKLTGQARWLMPVIPALWEAKAGGSPEVGSSRPAWPTWRNPISTKNTKLARCGVGRL

SEQ ID NO: 739442 - protein, 68 aa, Homo sapiens
RYLNYSSSSSLLTNNPSEAERKIYLAIESANELAVQKAKAEITRLIKEELIRLQNSYQPTNKGRYKVL

SEQ ID NO: 739443 - protein, 496 aa, Homo sapiens
MFSFSQVMRIVDNVRPDRQTVMFSATFPRAMEALARRILSKPIEVQVGGRSVVCSDVEQQVIVIEEEKKFLKLLELLGHYQESGSVIIFVDKQEHADGLLKDLMRASYPCMSLHGGIDQYDRDSIINDFKNGTCKLLVATSVAARGLDVKHLILVVNYSCPNHYEDYVHRAGRTGRAGNKGYAYTFITEDQARYAGDIIKALELSGTAVPPDLEKLWSDFKDQQKAEGKIIKKSSGFSGKGFKFDETEQALANERKKLQKAALGLQDSDDEDAAVDIDEQIESMFNSKKRVKDMAAPGTSSVPAPTAGNAEKLEIAKRLALRINAQKNLGIESQVDVMQQATNAILRGGTILAPTVSAKTIAEQLAEKINAKLNYVPLEKQEEERQDGGQNESFKRYEEELEINDFPQTARWKVTSKEALQRISEYSEAAITIRGTYFPPGKEPKEGERKIYLAIESANELAVQKAKAEITRLIKEELIRLQNSYQPTNKGRYKVL

SEQ ID NO: 739444 - protein, 346 aa, Homo sapiens
RGPWQVEIRTTGTGEDYVHRAGRTGRAGNKGYAYTFITEDQARYAGDIIKALELSGTAVPPDLEKLWSDFKDQQKAEGKIIKKSSGFSGKGFKFDETEQALANERKKLQKAALGLQDSDDEDAAVDIDEQIESMFNSKKRVKDMAAPGTSSVPAPTAGNAEKLEIAKRLALRINAQKNLGIESQVDVMQQATNAILRGGTILAPTVSAKTIAEQLAEKINAKLNYVPLEKQEEERQDGGQNESFKRYEEELEINDFPQTARWKVTSKEALQRISEYSEAAITIRGTYFPPGKEPKEGERKIYLAIESANELAVQKAKAEITRLIKEELIRLQNSYQPTNKGRYKVL

SEQ ID NO: 739445 - protein, 359 aa, Homo sapiens
MFSFSQVMRIVDNVRPDRQTVMFSATFPRAMEALARRILSKPIEVQVGGRSVVCSDVEQQVIVIEEEKKFLKLLELLGHYQESGSVIIFVDKQEHADGLLKDLMRASYPCMSLHGGIDQYDRDSIINDFKNGTCKLLVATSVAARGLDVKHLILVVNYSCPNHYEDYVHRAGRTGRAGNKGYAYTFITEDQARYAGDIIKALELSGTAVPPDLEKLWSDFKDQQKAEGKIIKKSSGFSGKGFKFDETEQALANERKKLQKAALGLQDSDDEDAAVDIDEQIESMFNSKKRVKDMAAPGTSSVPAPTAGNAEKLEIAKRLALRINAQKNLGIESQVLSNLFQVSVNTFKKFFDFTFQELC

SEQ ID NO: 739446 - protein, 496 aa, Homo sapiens; identical to SEQ ID NO: 739443

SEQ ID NO: 739447 - protein, 68 aa, Homo sapiens; identical to SEQ ID NO: 739442

SEQ ID NO: 739448 - protein, 302 aa, Homo sapiens
MFSFSQVMRIVDNVRPDRQTVMFSATFPRAMEALARRILSKPIEVQVGGRSVVCSDVEQQVIVIEEEKKFLKLLELLGHYQESGSVIIFVDKQEHADGLLKDLMRASYPCMSLHGGIDQYDRDSIINDFKNGTCKLLVATSVAARGLDVKHLILVVNYSCPNHYEDYVHRAGRTGRAGNKGYAYTFITEDQARYAGDIIKALELSGTAVPPDLEKLWSDFKDQQKAEGKIIKKSSGFSGKGFKFDETEQALANERKKLQKAALGLQDSDDEDAAVDIDEPIESMFNSKPELRRPEQPETEQP

SEQ ID NO: 739449 - protein, 74 aa, Homo sapiens
EQEADKEVDEEGEESGEEEEEEKEGDGEEEDGDEEEAESATGKRAAEDDEDDDVDTKKQKTDKDDKTAKKEKLN

SEQ ID NO: 739450 - protein, 613 aa, Homo sapiens
HPLFSSGTAQTCAPKMRAQEDLEGRAQHETTRDPSTPLPTEPKFDMLYKIEDVPPWYLCILLGFQHYLTCFSGTIAVPFLLAEALCVGHDQHMVSQLIGTIFTCVGITTLIQTTVGIRLPLFQASAFAFLVPAKAILALERWKCPPEEEIYGNWSLPLNTSHIWHPRIREVQGAIMVSSVVEVVIGLLGLPGALLNYIGPLTVTPTVSLIGLSVFQAAGDRAGSHWGISACSILLIILFSQYLRNLTFLLPVYRWGKGLTLLRIQIFKMFPIMLAIMTVWLLCYVLTLTDVLPTDPKAYGFQARTDARGDIMAIAPWIRIPYPCQWGLPTVTAAAVLGMFSATLAGIIESIGDYYACARLAGAPPPPVHAINRGIFTEGICCIIAGLLGTGNGSTSSSPNIGVLGITKVGSRRVVQYGAAIMLVLGTIGKFTALFASLPDPILGGMFCTLFGMITAVGLSNLQFVDMNSSRNLFVLGFSMFFGLTLPNYLSPNPGAINTGILEVDQILIVLLTTEMFVGGCLAFILDNTVPGSPEERGLIQWKAGAHANSDMSSSLKSYDFPIGMGIVKRITFLKYIPICPVFKGFSSSSKDQIAIPEDTPENTETASVCTKV

SEQ ID NO: 739451 - protein, 613 aa, Homo sapiens; identical to SEQ ID NO: 739450

SEQ ID NO: 739452 - protein, 800 aa, Homo sapiens
ARYPSPLCARVLKLKMPTKKMYHINETRGLLKKINSVLQKITDPIQPKVAEHRPQTMKRLSYPFSREKQHLFDLSDKDSFFDSKTRSTIVYEILKRTTCTKAKYSMGITSLLANGVYAAAYPLHDGDYNGENVEFNDRKLLYEEWARYGVFYKYQPIDLVRKYFGEKIGLYFAWLGVYTQMLIPASIVGIIVFLYGCATMDENIPSMEMCDQRHNITMCPLCDKTCSYWKMSSACATARASHLFDNPATVFFSVFMALWAATFMEHWKRKQMRLNYRWDLTGFEEEEEAVKDHPRAEYEARVLEKSLKKESRNKETDKVKLTWRDRFPAYLTNLVSIIFMIAVTFAIVLGVIIYRISMAAALAMNSSPSVRSNIRVTVTATAVIINLVVIILLDEVYGCIARWLTKIEVPKTEKSFEERLIFKAFLLKFVNSYTPIFYVAFFKGRFVGRPGDYVYIFRSFRMEECAPGGCLMELCIQLSIIMLGKQLIQNNLFEIGIPKMKKLIRYLKLKQQSPPDHEECVKRKQRYEVDYNLEPFAGLTPEYMEMIIQFGFVTLFVASFPLAPLFALLNNIIEIRLDAKKFVTELRRPVAVRAKDIGIWYNILRGIGKLAVIINAFVISFTSDFIPRLVYLYMYSKNGTMHGFVNHTLSSFNVSDFQNGTAPNDPLDLGYEVQICRYKDYREPPWSENKYDISKDFWAVLAARLAFVIVFQNLVMFMSDFVDWVIPDIPKDISQQIHKEKVLMVELFMREEQDKQQLLETWMEKERQKDEPPCNHHNTKACPDSLGSPAPSHAYHGGVL

SEQ ID NO: 739453 - protein, 631 aa, Homo sapiens
PTSSKKTMNPHDIVQDANPNSHPAYQQYTSKSTLEPGPTWRGGCPGLSGSQAFSGARDNEKTLLLSSDDEFWCGLQWRKCWRHSHGQAVPHLQPHHQARRQLAQCSRRLYLLDQKHSHVASRGTGDSQARPWAFRKSLKKESRNKETDKVKLTWRDRFPAYLTNLVSIIFMIAVTFAIVLGVIIYRISMAAALAMNSSPSVRSNIRVTVTATAVIINLVVIILLDEVYGCIARWLTKIEVPKTEKSFEERLIFKAFLLKFVNSYTPIFYVAFFKGRFVGRPGDYVYIFRSFRMEECAPGGCLMELCIQLSIIMLGKQLIQNNLFEIGIPKMKKLIRYLKLKQQSPPDHEECVKRKQRYEVDYNLEPFAGLTPEYMEMIIQFGFVTLFVASFPLAPLFALLNNIIEIRLDAKKFVTELRRPVAVRAKDIGIWYNILRGIGKLAVIINAFVISFTSDFIPRLVYLYMYSKNGTMHGFVNHTLSSFNVSDFQNGTAPNDPLDLGYEVQICRYKDYREPPWSENKYDISKDFWAVLAARLAFVIVFQNLVMFMSDFVDWVIPDIPKDISQQIHKEKVLMVELFMREEQDKQQLLETWMEKERQKDEPPCNHHNTKACPDSLGSPAPSHAYHGGVL

SEQ ID NO: 739454 - protein, 800 aa, Homo sapiens; identical to SEQ ID NO: 739452

SEQ ID NO: 739455 - protein, 138 aa, Homo sapiens
HAPWNVLCREAEFLKLKMPTKKMYHINETRGLLKKINSVLQKITDPIQPKVAEHRPQTMKRLSYPFSREKQHLFDLSDKDSFFDSKTRSTIVYEILKRTTCTKAKYSMGQGEGRKKDSALLSKRRKCGKYGITSLRTY

SEQ ID NO: 739456 - protein, 853 aa, Homo sapiens
ARYPSPLCARVLKLKMPTKKMYHINETRGLLKKINSVLQKITDPIQPKVAEHRPQTMKRLSYPFSREKQHLFDLSDKDSFFDSKTRSTIVYEILKRTTCTKAKYSMGITSLLANGVYAAAYPLHDGDYNGENVEFNDRKLLYEEWARYGVFYKYQPIDLVRKYFGEKIGLYFAWLGVYTQMLIPASIVGIIVFLYGCATMDENIPSMEMCDQRHNITMCPLCDKTCSYWKMSSACATARASHLFDNPATVFFSVFMALWAATFMEHWKRKQMRLNYRWDLTGFEEEEEAVKDHPRAEYEARVLEKSLKKESRNKETDKVKLTWRDRFPAYLTNLVSIIFMIAVTFAIVLGVIIYRISMAAALAMNSSPSVRSNIRVTVTATAVIINLVVIILLDEVYGCIARWLTKIEVPKTEKSFEERLIFKAFLLKFVNSYTPIFYVAFFKGRFVGRPGDYVYIFRSFRMEECAPGGCLMELCIQLSIIMLGKQLIQNNLFEIGIPKMKKLIRYLKLKQQSPPDHEECVKRKQRYEVDYNLEPFAGLTPEYMEMIIQFGFVTLFVASFPLAPLFALLNNIIEIRLDAKKFVTELRRPVAVRAKDIGIWYNILRGIGKLAVIINAFVISFTSDFIPRLVYLYMYSKNGTMHGFVNHTLSSFNVSDFQNGTAPNDPLDLGYEVQICRYKDYREPPWSENKYDISKDFWAVLAARLAFVIVFQNLVMFMSDFVDWVIPDIPKDISQQIHKEKVLMVELFMREEQDKQQLLETWMEKERQKDEPPCNHHNTKACPDSLTDGHPLPGQAASRSHQGPVGPGFSANMEDHFLIGHFPFFFLFSFPCFCTKPLCREYFLICSIQDESK

SEQ ID NO: 739457 - protein, 1162 aa, Homo sapiens
RAGEVVPGWLLAAAAAHPGRPAASLSPGLGAVLGVAGRQVADPRFRRDWFRIPSPPAESAGPARQAGFAAAPPARAGPALSTMKGTRAIGSVPERSPAGVDLSLTGLPPPVSRRPGSAATTKPIVRSVSVVTGSEQKRKVLEATGPGGSQAINNLRRSNSTTQVSQPRSGSPRPTEPTDFLMLFEGSPSGKKRPASLSTAPSEKGATWNVLDDQPRGFTLPSNARSSSALDSPAGPRRKECTVALAPNFTANNRSNKGAVGNCVTTMVHNRYTPSERAPPLKSSNQTAPSLNNIIKAATCEGSESSGFGKLPKNVSSATHSARNNTGGSTGLPRRKEVTEEEAERFIHQVNQAAVTIQRWYRHQVQRRGAGAARLEHLLQAKREEQRQRSGEGTLLDLHQQKEAARRKAREEKARQARRAAIQELQQKRALRAQKASTAERGPPENPRETRVPGMRQPAQELSPTPGGTAHQALKANNAGGGLPAAGPGDRCLPTSDSSPEPQQPPEDRTQDVLAQDAAGDNLEMMAPSRGSAKSRGPLEELLHTLQLLEKEPDALPRPRTHHRGRYAWASEEDDASSLTADNLEKFGKLSAFPEPPEDGTLLSEAKLQSIMSFLDEMEKSGQDQLDSQQEGWVPEAGPGPLELGSEVSTSVMRLKLEVEEKKQAMLLLQRALAQQRDLTARRVKETEKALSRQLQRQREHYEATIQRHLAFIDQLIEDKKVLSEKCEAVVAELKQEDQRCTERVAQAQAQHELEIKKLKELMSATEKARREKWISEKTKKIKEVTVRGLEPEIQKLIARHKQEVRRLKSLHEAELLQSDERASQRCLRQAEELREQLEREKEALGQQERERARQRFQQHLEQEQWALQQQRQRLYSEVAEERERLGQQAARQRAELEELRQQLEESSSALTRALRAEFEKGREEQERRHQMELNTLKQQLELERQAWEAGRTRKEEAWLLNREQELREEIRKGRDKEIELVIHRLEADMALAKEESEKAAESRIKRLRDKYEAELSELEQSERKLQERCSELKGQLGEAEGENLRLQGLVRQKERALEDAQAVNEQLSSERSNLAQVIRQEFEDRLAASEEETRQAKAELATLQARQQLELEEVHRRVKTALARKEEAVSSLRTQHEAAVKRADHLEELLEQHRRPTPSTK

SEQ ID NO: 739458 - protein, 1309 aa, Homo sapiens
RAGEVVPGWLLAAAAAHPGRPAASLSPGLGAVLGVAGRQVADPRFRRDWFRIPSPPAESAGPARQAGFAAAPPARAGPALSTMKGTRAIGSVPERSPAGVDLSLTGLPPPVSRRPGSAATTKPIVRSVSVVTGSEQKRKVLEATGPGGSQAINNLRRSNSTTQVSQPRSGSPRPTEPTDFLMLFEGSPSGKKRPASLSTAPSEKGATWNVLDDQPRGFTLPSNARSSSALDSPAGPRRKECTVALAPNFTANNRSNKGAVGNCVTTMVHNRYTPSERAPPLKSSNQTAPSLNNIIKAATCEGSESSGFGKLPKNVSSATHSARNNTGGSTGLPRRKEVTEEEAERFIHQVNQAAVTIQRWYRHQVQRRGAGAARLEHLLQAKREEQRQRSGEGTLLDLHQQKEAARRKAREEKARQARRAAIQELQQKRALRAQKASTAERGPPENPRETRVPGMRQPAQELSPTPGGTAHQALKANNAGGLPAAGPGDRCLPTSDSSPEPQQPPEDRTQDVLAQDAAGDNLEMMAPSRGSAKSRGPLEELLHTLQLLEKEPDALPRPRTHHRGRYAWASEVTTEDDASSLTADNLEKFGKLSAFPEPPEDGTLLSEAKLQSIMSFLDEMEKSGQELSPTPGGTAHQALKANNAGGGLPAAGPGDRCLPTSDSSPEPQQPPEDRTQDVLAQDAAGDNLEMMAPSRGSAKSRGPLEELLHTLQLLEKEPDALPRPRTHHRGRYAWASEEDDASSLTADNLEKFGKLSAFPEPPEDGTLLSEAKLQSIMSFLDEMEKSGQDHWGPEVSTSVMRLKLEVEEKKQAMLLLQRALAQQRDLTARRVKETEKALSRQLQRQREHYEATIQRHLAFIDQLIEDKKVLSEKCEAVVAELKQEDQRCTERVAQAQAQHELEIKKLKELMSATEKARREKWISEKTKKIKEVTVRGLEPEIQKLIARHKQEVRRLKSLHEAELLQSDERASQRCLRQAEELREQLEREKEALGQQERERARQRFQQHLEQEQWALQQQRQRLYSEVAEERERLGQQAARQRAELEELRQQLEESSSALTRALRAEFEKGREEQERRHQMELNTLKQQLELERQAWEAGRTRKEEAWLLNREQELREEIRKGRDKEIELVIHRLEADMALAKEESEKAAESRIKRLRDKYEAELSELEQSERKLQERCSELKGQLGEAEGENLRLQGLVRQKERALEDAQAVNEQLSSERSNLAQVIRQEFEDRLAASEEETRQAKAELATLQARQQLELEEVHRRVKTALARKEEAVSSLRTQHEAAVKRADHLEELLEQHRRPTPSTK

SEQ ID NO: 739459 - protein, 960 aa, Homo sapiens
HEAGWEVFQPFKMLRVVSWNINGIRRPLQGVANQEPSNCAAVAVGRILDELDADIVCLQETKVTRDALTEPLAIVEGYNSYFSFSRNRSGYSGVATFCKDNATPVAAEEGLSGLFATQNGDVGCYGNMDEFTQEELRALDSEGRALLTQHKIRTWEGKEKTLTLINVYCPHADPGRPERLVFKMRFYRLLQIRAEALLAAGSHVIILGDLNTAHRPIDHWDAVNLECFEEDPGRKWMDSLLSNLGCQSASHVGPFIDSYRCFQPKQEGAFTCWSAVTGARHLNYGSRLDYVLGDRTLVIDTFQASFLLPEVMGSDHCPVGAVLSVSSVPAKQCPPLCTRFLPEFAGTQLKILRFLVPLEQSPVLEQSTLQHNNQTRVQTCQNKAQVRSTRPQPSQVGSSRGQKNLKSYFQPSPSCPQASPDIELPSLPLMSALMTPKTPEEKAVAKVVKGQAKTSEAKDEKELRTSFWKSVLAGPLRTPLCGGHREPCVMRTVKKPGPNLGRRFYMCARPRGPPTDPSSRCNFFLLEQAQLNQWRPGDIWHGHPCTGSEASSPSLSCLLLLPQSLLPFSSSFKPSLPRFPSYLSSLLVSFLCLNPVTQPLTPLSTFLSKYTDTSCPRKLCDFKSLLSLLESVFVHKYKSVYLFKKKKKKTRTEFLSLSQRCLRQAEELREQLEREKEALGQQERERARQRQRAELEELRQQLEESSSALTRALRAEFEKGREEQERRHQMELNTLKQQLELERQAWEAGRTRKEEAWLLNREQELREEIRKGRDKEIELVIHRLEADMALAKEESEKAAESRIKRLRDKYEAELSELEQSERKLQERCSELKGQLGEAEGENLRLQGLVRQKERALEDAQAVNEQLSSERSNLAQVIRQEFEDRLAASEEETRQAKAELATLQARQQLELEEVHRRVKTALARKEEAVSSLRTQHEAAVKRADHLEELLEQHRRPTPSTK

SEQ ID NO: 739460 - protein, 169 aa, Homo sapiens
MAGSRSWWGFTFPAGPEIPRTLGDSRALWGNLWSGSGFRLPDVNATWHRLLWQEQRQRSGEGTLLDLHQQKEAARRKAREEKARQARRAAIQVLTAQGPLSSTVAQALTVRGCCWGSLGPGTLSLRAAWLWSLGSSSPRDSAQRCSHCRPLPRAASTSPYVWIVQPSGA

SEQ ID NO: 739461 - protein, 1128 aa, Homo sapiens
RAGEVVPGWLLAAAAAHPGRPAASLSPGLGAVLGVAGRQVADPRFRRDWFRIPSPPAESAGPARQAGFAAAPPARAGPALSTMKGTRAIGSVPERSPAGVDLSLTGLPPPVSRRPGSAATTKPIVRSVSVVTGSEQKRKVLEATGPGGSQAINNLRRSNSTTQVSQPRSGSPRPTEPTDFLMLFEGSPSGKKRPASLSTAPSEKGATWNVLDDQPRGFTLPSNARSSSALDSPAGPRRKECTVALAPNFTANNRSNKGAVGNCVTTMVHNRYTPSERAPPLKSSNQTAPSLNNIIKAATCEGSESSGFGKLPKNVSSATHSARNNTGGSTGLPRRKEVTEEEAERFIHQVNQAAVTIQRWYRHQVQRRGAGAARLEHLLQAKREEQRQRSGEGTLLDLHQQKEAARRKAREEKARQARRAAIQELQQKRALRAQKASTAERGPPENPRETRVPGMRQPAQELSPTPGGTAHQALKANNAGGGLPAAGPGDRCLPTSDSSPEPQQPPEDRTQDVLAQDAAGDNLEMMAPSRGSAKSRGPLEELLHTLQLLEKEPDALPRPRTHHRGRYAWASEEDDASSLTADNLEKFGKLSAFPEPPEDGTLLSEAKLQSIMSFLDEMEKSGQDQLDSQQEGWVPEAGPGPLELGSEVSTSVMRLKLEVEEKKQAMLLLQRALAQQRDLTARRVKETEKALSRQLQRQREHYEATIQRHLAFIDQLIEDKKVLSEKCEAVVAELKQEDQRCTERVAQAQAQHELEIKKLKELMSATEKARREKWISEKTKKIKEVTVRGLEPEIQKLIARHKQEVRRLKSLHEAELLQSDERASQRCLRQAEELREQLEREKEALGQQERERARQRQRAELEELRQQLEESSSALTRALRAEFEKGREEQERRHQMELNTLKQQLELERQAWEAGRTRKEEAWLLNREQELREEIRKGRDKEIELVIHRLEADMALAKEESEKAAESRIKRLRDKYEAELSELEQSERKLQERCSELKGQLGEAEGENLRLQGLVRQKERALEDAQAVNEQLSSERSNLAQVIRQEFEDRLAASEEETRQAKAELATLQARQQLELEEVHRRVKTALARKEEAVSSLRTQHEVSPCGQPCWTSGLGAGLTLWVCCRLR

SEQ ID NO: 739462 - protein, 1219 aa, Homo sapiens
RAGEVVPGWLLAAAAAHPGRPAASLSPGLGAVLGVAGRQVADPRFRRDWFRIPSPPAESAGPARQAGFAAAPPARAGPALSTMKGTRAIGSVPERSPAGVDLSLTGLPPPVSRRPGSAATTKPIVRSVSVVTGSEQKRKVLEATGPGGSQAINNLRRSNSTTQVSQPRSGSPRPTEPTDFLMLFEGSPSGKKRPASLSTAPSEKGATWNVLDDQPRGFTLPSNARSSSALDSPAGPRRKECTVALAPNFTANNRSNKGAVGNCVTTMVHNRYTPSERAPPLKSSNQTAPSLNNIIKAATCEGSESSGFGKLPKNVSSATHSARNNTGGSTGLPRRKEVTEEEAERFIHQVNQAAVTIQRWYRHQVQRRGAGAARLEHLLQAKREEQRQRSGEGTLLDLHQQKEAARRKAREEKARQARRAAIQVLTAQGPLSSTVAQALTVRGCCWGSLGPGTLSLRAAWLWSLGSSSPRDSAQRCSHCRELQQKRALRAQKASTAERGPPENPRETRVPGMRQPAQELSPTPGGTAHQALKANNAGGGLPAAGPGDRCLPTSDSSPEPQQPPEDRTQDVLAQDAAGDNLEMMAPSRGSAKSRGPLEELLHTLQLLEKEPDALPRPRTHHRGRYAWASEEDDASSLTADNLEKFGKLSAFPEPPEDGTLLSEAKLQSIMSFLDEMEKSGQDQLDSQQEGWVPEAGPGPLELGSEVSTSVMRLKLEVEEKKQAMLLLQRALAQQRDLTARRVKETEKALSRQLQRQREHYEATIQRHLAFIDQLIEDKKVLSEKCEAVVAELKQEDQRCTERVAQAQAQHELEIKKLKELMSATEKARREKWISEKTKKIKEVTVRGLEPEIQKLIARHKQEVRRLKSLHEAELLQSDERASQRCLRQAEELREQLEREKEALGQQERERARQRFQQHLEQEQWALQQQRQRLYSEVAEERERLGQQAARQRAELEELRQQLEESSSALTRALRAEFEKGREEQERRHQMELNTLKQQLELERQAWEAGRTRKEEAWLLNREQELREEIRKGRDKEIELVIHRLEADMALAKEESEKAAESRIKRLRDKYEAELSELEQSERKLQERCSELKGQLGEAEGENLRLQGLVRQKERALEDAQAVNEQLSSERSNLAQVIRQEFEDRLAASEEETRQAKAELATLQARQQLELEEVHRRVKTALARKEEAVSSLRTQHEAAVKRADHLEELLEQHRRPTPSTK

SEQ ID NO: 739463 - protein, 371 aa, Homo sapiens
KRSLVEAVLHKQEVRRLKSLHEAELLQSDERASQRCLRQAEELREQLEREKEALGQQERERARQRFQQHLEQEQWALQQQRQRLYSEVAEERERLGQQAARQRAELEELRQQLEESSSALTRALRAEFEKGREEQERRHQMELNTLKQQLELERQAWEAGRTRKEEAWLLNREQELREEIRKGRDKEIELVIHRLEADMALAKEESEKAAESRIKRLRDKYEAELSELEQSERKLQERCSELKGQLGEAEGENLRLQGLVRQKERALEDAQAVNEQLSSERSNLAQVIRQEFEDRLAASEEETRQAKAELATLQARQQLELEEVHRRVKTALARKEEAVSSLRTQHEAAVKRADHLEELLEQHRRPTPSTK

SEQ ID NO: 739464 - protein, 93 aa, Homo sapiens
AALSYQQPCCICLPALLQDVLAQDAAGDNLEMMAPSRGSAKSRGPLEELLHTLQLLEKEPDALPRPRTHHRGRYAWASEVTTVCARPAQSVHP

SEQ ID NO: 739465 - protein, 52 aa, Homo sapiens
MLNLQTFTFLSMFLRGRQRNSQFMMQNGTSGQLFDLCDLDHTSYKWGSNCSV

SEQ ID NO: 739466 - protein, 138 aa, Homo sapiens
IKQSLALSLTLECNCSIRAHCSLDLLGSSDPSTSASLVAGTIEACHHDHLIFFCTEMESRYVAQTGLELLGSGDPPASASQKCWDYRHEPPCLAGYCCKPLSFEGCFLTQQNQPIQSSILDSPLLFSCMLSSGDSYGF

SEQ ID NO: 739467 - protein, 519 aa, Homo sapiens
MAAEAADLGLGAAVPVELRRERRMVCVEYPGVVRDVAKMLPTLGGEEGVSRIYADPTKRLELYFRPKDPYCHPVCANRFSTSSLLLRIRKRTRRQKGVLGTEAHSEVTFDMEILGIISTIYKFQGMSDFQYLAVHTEAGGKHTSMYDKVLMLRPEKEAFFHQELPLYIPPPIFSRLDAPVDYFYRPETQHREGYNNPPISGENLIGLSRARRPHNAIFVNFEDEEVPKQPLEAAAQTWRRVCTNPVDRKVEEELRKLFDIRPIWSRNAVKANISVHPDKLKVLLPFIAYYMITGPWRSLWIRFGYDPRKNPDAKIYQVLDFRIRCGMKHGYAPSDLPVKAKRSTYNYSLPITVKKTSSQLVTMHDLKQGLGPSGTSGARKPASSKYKLKDSVYIFREGALPPYRQMFYQLCDLNVEELQKIIHRNDGAENSCTERDGWCLPKTSDELRDTMSLMIRQTIRSKRPALFSSSAKADGGKEQLTYESGEDEEDEEEEEEEEEDFKPSDGSENEMETEILDYV

SEQ ID NO: 739468 - protein, 191 aa, Homo sapiens
MAAEAADLGLGAAVPVELRRERRMVCVEYPGVVRDVAKMLPTLGGEEGVSRIYADPTKRLELYFRPKDPYCHPVCANRFSTSSLLLRIRKRTRRQKGVLGTEAHSEVTFDMEILGIISTIYKFQGMSDFQYLAVHTEAGGKHTSMYDKVLMLRPEKEAFFHQELPLYIPPPIFSRLDAPVDYFYRPETQHR

SEQ ID NO: 739469 - protein, 519 aa, Homo sapiens; identical to SEQ ID NO: 739467

SEQ ID NO: 739470 - protein, 519 aa, Homo sapiens; identical to SEQ ID NO: 739467

SEQ ID NO: 739471 - protein, 157 aa, Homo sapiens [sequence omitted]

SEQ ID NO: 739472 - protein, 526 aa, Homo sapiens
MAAEAADLGLGAAVPVELRRERRMVCVEYPGVVRDVAKMLPTLGGEEGVSRIYADPTKRLELYFRPKDPYCHPVCANRFSTSSLLLRIRKRTRRQKGVLGTEAHSEVTFDMEILGIISTIYKFQGMSDFQYLAVHTEAGGKHTSMYDKVLMLRPEKEAFFHQELPLYIPPPIFSRLDAPVDYFYRPETQHREGYNNPPISGENLIGLSRARRPHNAIFVNFEDEEVPKQPLEAAAQTWRRVCTNPVDRKVEEELRKLFDIRPIWSRNAVKANISVHPDKLKVLLPFIAYYMITGPWRSLWIRFGYDPRKNPDAKIYQVLDFRIRCGMKHGYAPSDLPVKAKRSTYNYSLPITVKKTSSQLVTMHDLKQGLGPSGTSGARKPASSKYKLKVSLQTLRDSVYIFREGALPPYRQMFYQLCDLNVEELQKIIHRNDGAENSCTERDGWCLPKTSDELRDTMSLMIRQTIRSKRPALFSSSAKADGGKEQLTYESGEDEEDEEEEEEEEEDFKPSDGSENEMETEILDYV

SEQ ID NO: 739473 - protein, 181 aa, Homo sapiens
PPWPSSLSAQPAPGDQPAPWRDPMGAYMESATLAAPGLWLTFPVSLPLCHQDSVYIFREGALPPYRQMFYQLCDLNVEELQKIIHRNDGAENSCTERDGWCLPKTSDELRDTMSLMIRQTIRSKRPALFSSSAKADGGKEQLTYESGEDEEDEEEEEEEEEDFKPSDGSENEMETEILDYV

SEQ ID NO: 739474 - protein, 537 aa, Homo sapiens
MAAEAADLGLGAAVPVELRRERRMVCVEYPGVVRDVAKMLPTLGGEEGVSRIYADPTKRLELYFRPKDPYCHPVCANRFSTSSLLLRIRKRTRRQKGVLGTEAHSEVTFDMEILGIISTIYKFQGMSDFQYLAVHTEAGGKHTSMYDKVLMLRPEKEAFFHQELPLYIPPPIFSRLDAPVDYFYRPETQHREGYNNPPISGENLIGLSRARRPHNAIFVNFEDEEVPKQPLEAAAQTWRRVCTNPVDRKVEEELRKLFDIRPIWSRNAVKANISVHPDKLKVLLPFIAYYMITGPWRSLWIRFGYDPRKNPDAKIYQVLDFRIRCGMKHGYAPSDLPVKAKRSTYNYSLPITVKKTSSQLVTMHDLKQGLGPSGTSGARKPASSKYKLKVSLQTLRVRTRVQSPRAVCVGDIWRRGGDKSQGSLAPAAACGCPSRALWEPGPPLSHVTTPGMIGIGHTQEDRARAGHVGCSCGRSLTGSRFRQCGCPAGVGGFQSCSHIQAPASRSTALGEAEKGASRTVESPAEGVGGRDECSRDG

SEQ ID NO: 739475 - protein, 109 aa, Homo sapiens
MWQDVFLGGSHASPHPLWCKQGLVINEMLNPPEVSAHVPETHLPPQQPVGKLDFVSAYLFLNTLFCSLTLLTTFQFAHIRISSVLRCIFSFCNPDLLEIRICLAVNKIL

SEQ ID NO: 739476 - protein, 522 aa, Homo sapiens
MAGIIKKQILKHLSRFTKNLSPDKINLSTLKGEGELKNLELDEEVLQNMLDLPTWLAINKVFCNKASIRIPWTKLKTHPICLSLDKVIMEMSTCEEPRSPNGPSPIATASGQSEYGFAEKVVEGISVSVNSIVIRIGAKAFNASFELSQLRIYSVNAHWEHGDLRFTRIQDPQRGEVLTFKEINWQMIRIEADATQSSHLEIMCAPVRLITNQSKIRVTLKRRLKDCNVIATKLVLILDDLLWVLTDSQLKAMVQYAKSLSEAIEKSTEQRKSMAPEPTQSSTVVASAQQVKTTQTSNAPDVNDAIVKLFNDFDVKETSHHLVISHLDLHICDDIHAKEKESNRRITGGAMQLSFTQLTIDYYPYHKAGDSCNHWMYFSDATKTKNGWANELLHEFECNVEMLKQAVKDHNVGSPPKSPTHASPQHTQTEKDYPLKGTCRTPSVLSQQSKAKLMSSSVVVRLADFNIYQVSTAEQCRSSPKSMICCNKKSLYLPQEMSAVYIEFTEYYYPDGKDFPTAFLSR

SEQ ID NO: 739477 - protein, 1464 aa, Homo sapiens
MAGIIKKQILKHLSRFTKNLSPDKINLSTLKGEGELKNLELDEEVLQNMLDLPTWLAINKVFCNKASIRIPWTKLKTHPICLSLDKVIMEMSTCEEPRSPNGPSPIATASGQSEYGFAEKVVEGISVSVNSIVIRIGAKAFNASFELSQLRIYSVNAHWEHGDLRFTRIQDPQRGEVLTFKEINWQMIRIEADATQSSHLEIMCAPVRLITNQSKIRVTLKRRLKDCNVIATKLVLILDDLLWVLTDSQLKAMVQYAKSLSEAIEKSTEQRKSMAPEPTQSSTVVASAQQVKTTQTSNAPDVNDAIVKLFNDFDVKETSHHLVISHLDLHICDDIHAKEKESNRRITGGAMQLSFTQLTIDYYPYHKAGDSCNHWMYFSDATKTKNGWANELLHEFECNVEMLKQAVKDHNVGSPPKSPTHASPQHTQTEKDYPLKGTCRTPSVLSQQSKAKLMSSSVVVRLADFNIYQVSTAEQCRSSPKSMICCNKKSLYLPQEMSAVYIEFTEYYYPDGKDFPIPSPNLYSQLNALQFTVDERSILWLNQFLLDLKQSLNQFMAVYKLNDNSKSDEHVDVRVDGLMLKFVIPSEVKSECHQDQPRAISIQSSEMIATNTRHCPNCRHSDLEALFQDFKDCDFFSKTYTSFPKSCDNFNLLHPIFQRHAHEQDTKMHEIYKGNITPQLNKNTLKTSAATDVWAVYFSQFWIDYEGMKSGKGRPISFVDSFPLSIWICQPTRYAESQKEPQTCNQVSLNTSQSESSDLAGRLKRKKLLKEYYSTESEPLTNGGQKPSSSDTFFRFSPSSSEADIHLLVHVHKHVSMQINHYQYLLLLFLHESLILLSENLRKDVEAVTGSPASQTSICIGILLRSAELALLLHPVDQANTLKSPVSESVSPVVPDYLPTENGDFLSSKRKQISRDINRIRSVTVNHMSDNRSMSVDLSHIPLKDPLLFKSASDTNLQKGISFMDYLSDKHLGKISEDESSGLVYKSGSGEIGSETSDKKDSFYTDSSSILNYREDSNILSFDSDGNQNILSSTLTSKGNETIESIFKAEDLLPEAASLSENLDISKEETPPVRTLKSQSSLSGKPKERCPPNLAPLCVSYKNMKRSSSQMSLDTISLDSMILEEQLLESDGSDSHMFLEKGNKKNSTTNYRGTAESVNAGANLQNYGETSPDAISTNSEGAQENHDDLMSVVVFKITGVNGEIDIRGEDTEICLQVNQVTPDQLGNISLRHYLCNRPVGSDQKAVIHSKSSPEISLRFESGPGAVIHSLLAEKNGFLQCHIENFSTEFLTSSLMNIQHFLEDETVATVMPMKIQVSNTKINLKDDSPRSSTVSLEPAPVTVHIDHLVVERSDDGSFHIRDSHMLNTGNDLKENVKSDSVLLTSGKYDLKKQRSVTQATQTSPGVPWPSQSANFPEFSFDFTREQLMEENESLKQELAKAKMALAEAHLEKDALLHHIKKMTVE

SEQ ID NO: 739478 - protein, 1416 aa, Homo sapiens
MLDLPTWLAINKVFCNKASIRIPWTKLKTHPICLSLDKVIMEMSTCEEPRSPNGPSPIATASGQSEYGFAEKVVEGISVSVNSIVIRIGAKAFNASFELSQLRIYSVNAHWEHGDLRFTRIQDPQRGEVLTFKEINWQMIRIEADATQSSHLEIMCAPVRLITNQSKIRVTLKRRLKDCNVIATKLVLILDDLLWVLTDSQLKAMVQYAKSLSEAIEKSTEQRKSMAPEPTQSSTVVASAQQVKTTQTSNAPDVNDAIVKLFNDFDVKETSHHLVISHLDLHICDDIHAKEKESNRRITGGAMQLSFTQLTIDYYPYHKAGDSCNHWMYFSDATKTKNGWANELLHEFECNVEMLKQAVKDHNVGSPPKSPTHASPQHTQTEKDYPLKGTCRTPSVLSQQSKAKLMSSSVVVRLADFNIYQVSTAEQCRSSPKSMICCNKKSLYLPQEMSAVYIEFTEYYYPDGKDFPIPSPNLYSQLNALQFTVDERSILWLNQFLLDLKQSLNQFMAVYKLNDNSKSDEHVDVRVDGLMLKFVIPSEVKSECHQDQPRAISIQSSEMIATNTRHCPNCRHSDLEALFQDFKDCDFFSKTYTSFPKSCDNFNLLHPIFQRHAHEQDTKMHEIYKGNITPQLNKNTLKTSAATDVWAVYFSQFWIDYEGMKSGKGRPISFVDSFPLSIWICQPTRYAESQKEPQTCNQVSLNTSQSESSDLAGRLKRKKLLKEYYSTESEPLTNGGQKPSSSDTFFRFSPSSSEADIHLLVHVHKHVSMQINHYQYLLLLFLHESLILLSENLRKDVEAVTGSPASQTSICIGILLRSAELALLLHPVDQANTLKSPVSESVSPVVPDYLPTENGDFLSSKRKQISRDINRIRSVTVNHMSDNRSMSVDLSHIPLKDPLLFKSASDTNLQKGISFMDYLSDKHLGKISEDESSGLVYKSGSGEIGSETSDKKDSFYTDSSSILNYREDSNILSFDSDGNQNILSSTLTSKGNETIESIFKAEDLLPEAASLSENLDISKEETPPVRTLKSQSSLSGKPKERCPPNLAPLCVSYKNMKRSSSQMSLDTISLDSMILEEQLLESDGSDSHMFLEKGNKKNSTTNYRGTAESVNAGANLQNYGETSPDAISTNSEGAQENHDDLMSVVVFKITGVNGEIDIRGEDTEICLQVNQVTPDQLGNISLRHYLCNRPVGSDQKAVIHSKSSPEISLRFESGPGAVIHSLLAEKNGFLQCHIENFSTEFLTSSLMNIQHFLEDETVATVMPMKIQVSNTKINLKDDSPRSSTVSLEPAPVTVHIDHLVVERSDDGSFHIRDSHMLNTGNDLKENVKSDSVLLTSGKYDLKKQRSVTQATQTSPGVPWPSQSANFPEFSFDFTREQLMEENESLKQELAKAKMALAEAHLEKDALLHHIKKMTVE

SEQ ID NO: 739479 - protein, 1376 aa, Homo sapiens [sequence omitted]

SEQ ID NO: 739480 - protein, 805 aa, Homo sapiens
GRFACNIFIKSDTYLAHHKWWNKNTLKTSAATDVWAVYFSQFWIDYEGMKSGKGRPISFVDSFPLSIWICQPTRYAESQKEPQTCNQVSLNTSQSESSDLAGRLKRKKLLKEYYSTESEPLTNGGQKPSSSDTFFRFSPSSSEADIHLLVHVHKHVSMQINHYQYLLLLFLHESLILLSENLRKDVEAVTGSPASQTSICIGILLRSAELALLLHPVDQANTLKSPVSESVSPVVPDYLPTENGDFLSSKRKQISRDINRIRSVTVNHMSDNRSMSVDLSHIPLKDPLLFKSASDTNLQKGISFMDYLSDKHLGKISEDESSGLVYKSGSGEIGSETSDKKDSFYTDSSSILNYREDSNILSFDSDGNQNILSSTLTSKGNETIESIFKAEDLLPEAASLSENLDISKEETPPVRTLKSQSSLSGKPKERCPPNLAPLCVSYKNMKRSSSQMSLDTISLDSMILEEQLLESDGSDSHMFLEKGNKKNSTTNYRGTAESVNAGANLQNYGETSPDAISTNSEGAQENHDDLMSVVVFKITGVNGEIDIRGEDTEICLQVNQVTPDQLGNISLRHYLCNRPVGSDQKAVIHSKSSPEISLRFESGPGAVIHSLLAEKNGFLQCHIENFSTEFLTSSLMNIQHFLEDETVATVMPMKIQVSNTKINLKDDSPRSSTVSLEPAPVTVHIDHLVVERSDDGSFHIRDSHMLNTGNDLKENVKSDSVLLTSGKYDLKKQRSVTQATQTSPGVPWPSQSANFPEFSFDFTREQLMEENESLKQELAKAKMALAEAHLEKDALLHHIKKMTVE

SEQ ID NO: 739481 - protein, 1464 aa, Homo sapiens; identical to SEQ ID NO: 739477

SEQ ID NO: 739482 - protein, 1464 aa, Homo sapiens; identical to SEQ ID NO: 739477

SEQ ID NO: 739483 - protein, 1464 aa, Homo sapiens; identical to SEQ ID NO: 739477

SEQ ID NO: 739484 - protein, 1464 aa, Homo sapiens; identical to SEQ ID NO: 739477

SEQ ID NO: 739485 - protein, 339 aa, Homo sapiens [sequence omitted]

SEQ ID NO: 739486 - protein, 1440 aa, Homo sapiens
MAGIIKKQILKHLSRFTKNLSPDKINLSTLKGEGELKNLELDEEVLQNMLDLPTWLAINKVFCNKASIRIPWTKLKTHPICLSLDKVIMEMSTCEEPRSPNGPSPIATASGQSEYGFAEKVVEGISVSVNSIVIRIGAKAFNASFELSQLRIYSVNAHWEHGDLRFTRIQDPQRGEVLTFKEINWQMIRIEADATQSSHLEIMCAPVRLITNQSKIRVTLKRRLKDCNVIATKLVLILDDLLWVLTDSQLKAMVQYAKSLSEAIEKSTEQRKSMAPEPTQSSTVVASAQQVKTTQTSNAPDVNDAIVKLFNDFDVKETSHHLVISHLDLHICDDIHAKEKESNRRITGGAMQLSFTQLTIDYYPYHKAGDSCNHWMYFSDATKTKNGWANELLHEFECNVEMLKQAVKDHNVGSPPKSPTHASPQHTQTEKDYPLKGTCRTPSVLSQQSKAKLMSSSVVVRLADFNIYQVSTAEQCRSSPKSMICCNKKSLYLPQEMSAVYIEFTEYYYPDGKDFPIPSPNLYSQLNALQFTVDERSILWLNQFLLDLKQSLNQFMAVYKLNDNSKSDEHVDVRVDGLMLKFVIPSEVKSECHQDQPRAISIQSSEMIATNTRHCPNCRHSDLEALFQDFKDCDFFSKTYTSFPKSCDNFNLLHPIFQRHAHEQDTKMHEIYKGNITPQLNKNTLKTSAATDVWAVYFSQFWIDYEGMKSGKGRPISFVDSFPLSIWICQPTRYAESQKEPQTCNQVSLNTSQSESSDLAGRLKRKKLLKEYYSTESEPLTNGGQKPSSSDTFFRFSPSSSEADIHLLVHVHKHVSMQINHYQYLLLLFLHESLILLSENLRKDVEAVTGSPASQTSICIGILLRSAELALLLHPVDQANTLKSPVSESVSPVVPDYLPTENGDFLSSKRKQISRDINRIRSVTVNHMSDNRSMSVDLSHIPLKDPLLFKSASDTNLQKGISFMDYLSDKHLGKISEDESSGLVYKSGSGEIGSETSDKKDSFYTDSSSILNYREDSNILSFDSDGNQNILSSTLTSKGNETIESIFKAEDLLPEAASLSENLDISKEETPPVRTLKSQSSLSGKPKERCPPNLAPLCVSYKNMKRSSSQMSLDTISLDSMILEEQLLESDGSDSHMFLEKGNKKNSTTNYRGTAESVNAGANLQNYGETSPDAISTNSEGAQENHDDLMSVVVFKITGVNGEIDIRGEDTEICLQVNQVTPDQLGNISLRHYLCNRPVGSDQKAVIHSKSSPEISLRFESGPGAVIHSLLAEKNGFLQCHIENFSTEFLTSSLMNIQHFLEDETVATVMPMKIQVSNTKINLKDDSPRSSTVSLEPAPVTVHIDHLVVERSDDGSFHIRDSHMLNTGNDLKENVKSDSVLLTSGKYDLKKQRSVTQATQTSPGVPWPSQSANFPEFSFDFTREQVMGNLIQIQLQQLNN

SEQ ID NO: 739487 - protein, 452 aa, Homo sapiens
MAGIIKKQILKHLSRFTKNLSPDKINLSTLKGEGELKNLELDEEVLQNMLDLPTWLAINKVFCNKASIRIPWTKLKTHPICLSLDKVIMEMSTCEEPRSPNGPSPIATASGQSEYGFAEKVVEGISVSVNSIVIRIGAKAFNASFELSQLRIYSVNAHWEHGDLRFTRIQDPQRGEVLTFKEINWQMIRIEADATQSSHLEIMCAPVRLITNQSKIRVTLKRRLKDCNVIATKLVLILDDLLWVLTDSQLKAMVQYAKSLSEAIEKSTEQRKSMAPEPTQSSTVVASAQQVKTTQTSNAPDVNDAIVKLFNDFDVKETSHHLVISHLDLHICDDIHAKEKESNRRITGGAMQLSFTQLTIDYYPYHKAGDSCNHWMYFSDATKTKNGWANELLHEFECNVEMLKQAVKDHNVGSPPKSPTHASPQHTQTDTYVVGRTDIKRGITDTVYILEV

SEQ ID NO: 739488 - protein, 67 aa, Homo sapiens
MHQAQFPMTSGNLCATAKLRHHSSRWLRRSGAFSSGSTLKPPPSPSPAPLCHADNLRTGRTRPSGGR

SEQ ID NO: 739489 - protein, 96 aa, Homo sapiens
MEPPHGSSVKVCTSLRKLKQTKQGWSPQFTAGCTGDAPSTVSYDKWKPVRHSSRWLRRSGAFSSGSTLKPPPSPSPAPLCHADNLRTGRTRPSGGR

SEQ ID NO: 739490 - protein, 839 aa, Homo sapiens
MWLVIVYGFKNSPTIFEEALASDLKAFVPPNDKCVLLQYIGDLLFAAPTEEDCFQGTKDLLCLLWKAGYKMSKEKAQVCAKRVRYLGFLVAQGQRELGSGQKEAICALPTPVTRRQVREFLGAAGFCCTSMPNFHSRQSHCMKPQSGGEKEPLLWGNEQKKAFNEIKKALSQARALGLPDLTKPFFFYVHEKKRNDYRSFSSNSRIMVLTSSLFIKAVRPCGPGVAPLLKSISCHCHAGRKCWKLTPGQKLIIRVPHTVITLMEQRGYITGYANPRMLRYQGLLCGNPYVTLKTANTLNPATLLPVEMSKLQDQFPQRYCVDVVDEVFSSRKDLRDQPFKDPDAEYFTEGSRFVSEGAAEPGMQGDSKFSSQGTGPPYQDLSTKSRIALNRALLVAKGRTVNIYTDSKYAFATLHAHGAIYKERGLLTAGGKEIKEEILQLLEAVWAPDKVAVIHCKGHQTRGGIEAKGNRKADREARQAAMSNSSTKKKTPTLLLLLEPSLPETPSYSPNEKAWFEQESGSYIQGGRWKFSDGRLAIPEAIAPQFMKQFHQGTHMGKTALETLVGWHFYVPCLTAITRAVCEQCLTCAQNNPWQVPTQPPGIQETGATPCENLLVDFTELPRARGYQYMLVFVCTFSGWVEAFPTRIEKAQEVTRLLLKDIIPRFGLPLTLGSDNGPAFMAEVVQQLSQLLKIKWKLHIVYHPQSSGKVQWMNQTLKHLLKFCQEPHLRWDQVLPMAFLQVRCTLTKLTGLSPCEIVFGRPPPIINQVKGDLWELGELTLKRQMQALGLAMQKIHGWVREKLPISLTDPVHPFTPGDLVWVKKWNPTTLGPIWDGPTL

SEQ ID NO: 739491 - protein, 821 aa, Homo sapiens
MWLVIVYGFKNSPTIFEEALASDLKAFVPPNDKCVLLQYIGDLLFAAPTEEDCFQGTKDLLCLLWKAGYKMSKEKAQVCAKRVRYLGFLVAQGQRELGSGQKEAICALPTPVTRRQVREFLGAAGFCCTSMPNFHSRQSHCMKPQSGGEKEPLLWGNEQKKAFNEIKKALSQARALGLPDLTKPFFFYVHEKKRNDYRSFSSNSRIMVLTSSLFIKAVRPCGPGVAPLLKSISCHCHAGRKCWKLTPGQKLIIRVPHTVITLMEQRGYITGYANPRMLRYQGLLCGNPYVTLKTANTLNPATLLPVEMSKLQDQFPQRYCVDVVDEVFSSRKDLRDQPFKDPDAEYFTEGSRFVSEGAAEPGMQGDSKFSSQGTGPPYQDLSTKSRIALNRALLVAKGRTVNIYTDSKYAFATLHAHGAIYKERGLLTAGGKEIKEEILQLLEAVWAPDKVAVIHCKGHQTRGGIEAKGNRKADREARQAAMSNSSTKKKTPTLLLLLEPSLPETPSYSPNEKAWFEQESGSYIQGGRWKFSDGRLAIPEAIAPQFMKQFHQGTHMGKTALETLVGWHFYVPCLTAITRAVCEQCLTCAQNNPWQVPTQPPGIQETGATPCENLLVDFTELPRARGYQYMLVFVCTFSGWVEAFPTRIEKAQEVTRLLLKDIIPRFGLPLTLGSDNGPAFMAEVVQQLSQLLKIKWKLHIVYHPQSSGKVQWMNQTLKHLLKFCQEPHLRWDQVLPMAFLQVRCTLTKLTGLSPCEIVFGRPPPIINQVKGDLWELGELTLKRQMQALGLAMQKIHGWVREVWVKKWNPTTLGPIWDGPTL

SEQ ID NO: 739492 - protein, 61 aa, Homo sapiens
VLCLTRAQQPRAHTWQMHRLEGRTGVWAVPRWCLEGSSSDRRETRPRGAACQSMFWELLIV

SEQ ID NO: 739493 - protein, 454 aa, Homo sapiens
MARPNKFLLWFCCFAWLCFPISLGSQASGGEAQIAASAELESGAMPWSLLQHIDERDRAGLLPALFKVLSVGRGGSPRLQPDSRALHYMKKLYKTYATKEGIPKSNRSHLYNTVRLFTPCTRHKQAPGDQVTGILPSVELLFNLDRITTVEHLLKSVLLYNINNSVSFSSAVKCVCNLMIKEPKSSSRTLGRAPYSFTFNSQFEFGKKHKWIQIDVTSLLQPLVASNKRSIHMSINFTCMKDQLEHPSAQNGLFNMTLVSPSLILYLNDTSAQAYHSWYSLHYKRRPSQGPDQERSLSAYPVGEEAAEDGRSSHHRHRRGQETVSSELKKPLGPASFNLSEYFRQFLLPQNECELHDFRLSFSQLKWDNWIVAPHRYNPRYCKGDCPRAVGHRYGSPVHTMVQNIIYEKLDSSVPRPSCVPAKYSPLSVLTIEPDGSIAYKEYEDMIATKCTCR

SEQ ID NO: 739494 - protein, 138 aa, Homo sapiens
SCYLSALSLSSAMPDPAKSAPAPKKGSKKAVTKAQKKDGKKRKRSRKESYSIYVYKVLKQVHPDTGISSKAMGIMNSFVNDIFERIAGEASRLAHYNKRSTITSREIQTAVRLLLPGELAKHAVSEGTKAVTKYTSSK

SEQ ID NO: 739495 - protein, 55 aa, Homo sapiens
MESPKCLYSRITVNTAFGTKFSHISFIILFKVFLFPRITISKKTKLVTLSNYLNK

SEQ ID NO: 739496 - protein, 129 aa, Homo sapiens
RASTAFFQEEGPCGACPGALRPQAGASFRELRGLPPPRPREREQSPPLGAAPSSALSHQGWKNTRCATRGLVNTLVNTGHFLYLQPPAPLIMPYLDDAEVPGNRRSHPSLSFSWLSKALYHVTFLLRIL

SEQ ID NO: 739497 - protein, 113 aa, Homo sapiens
RASTAFFQEEGPCGACPGALRPQAGASFRELRGLPPPRPREREQSPPLGAAPSSALSHQGWKNTRCATRGLVNTLVNTGHFLYLQPPAFLLPVTSINRAYMEPAGKDKFHCHN

SEQ ID NO: 739498 - protein, 129 aa, Homo sapiens; identical to SEQ ID NO: 739496

SEQ ID NO: 739499 - protein, 635 aa, Homo sapiens
GRARRGSRGGAGSAGRPGCAGRAAARRGPSAGAAAGRRRELAASAAAPGQPARSGSAMELPAVGEHVFAVESIEKKRIRKGRVEYLVKWRGWSPKYNTWEPEENILDPRLLIAFQNRERQEQLMGYRKRGPKPKPLVVQVPTFARRSNVLTGLQDSSTDNRAKLDLGAQGKGQGHQYELNSKKHHQYQPHSKERAGKPPPPGKSGKYYYQLNSKKHHPYQPDPKMYDLQYQGGHKEAPSPTCPDLGAKSHPPDKWAQGAGAKGYLGAVKPLAGAAGAPGKGSEKGPPNGMMPAPKEAVTGNGIGGKMKIVKNKNKNGRIVIVMSKYMENGMQAVKIKSGEVAEGEARSPSHKKRAADERHPPADRTFKKAAGAEEKKVEAPPKRREEEVSGVSDPQPQDAGSRKLSPTKEAFGEQPLQLTTKPDLLAWDPARNTHPPSHHPHPHPHHHHHHHHHHHHAVGLNLSHVRKRCLSETHGEREPCKKRLTARSISTPTCLGGSPAAERPADLPPAAALPQPEVILLDSDLDEPIDLRSVKSAQRGRGAAQLPPGEARDTGVGGGGGGGGSGTHHDGGEASSRGPGRTCRVAERVQALLWEYNYHRRHRELPHRYFQGVRDGVAGGRRKGKRHSRGGAGS

SEQ ID NO: 739500 - protein, 635 aa, Homo sapiens; identical to SEQ ID NO: 739499

SEQ ID NO: 739501 - protein, 347 aa, Homo sapiens
GRARRGSRGGAGSAGRPGCAGRAAARRGPSAGAAAGRRRELAASAAAPGQPARSGSAMELPAVGEHVFAVESIEKKRIRKGRVEYLVKWRGWSPKYNTWEPEENILDPRLLIAFQNRERQEQLMGYRKRGPKPKPLVVQVPTFARRSNVLTGLQDSSTDNRAKLDLGAQGKGQGHQYELNSKKHHHTPSAMNLSHVRKRCLSETHGEREPCKKRLTARSISTPTCLGGSPAAERPADLPPAAALPQPEVILLDSDLDEPIDLRSVKTRSEAGEPPSSLQVKPETPASAAVAVAAAAAPTTTAEKPPAEAQDEPAESLSEFKPFFGNIIITDVTANCLTVTFKEYVTV

SEQ ID NO: 739502 - protein, 512 aa, Homo sapiens
MGYRKRGPKPKPLVVQVPTFARRSNVLTGLQDSSTDNRAKLDLGAQGKGQGHQYELNSKKHHQYQPHSKERAGKPPPPGKSGKYYYQLNSKKHHPYQPDPKMYDLQYQGGHKEAPSPTCPDLGAKSHPPDKWAQGAGAKGYLGAVKPLAGAAGAPGKGSEKGPPNGMMPAPKEAVTGNGIGGKMKIVKNKNKNGRIVIVMSKYMENGMQAVKIKSGEVAEGEARSPSHKKRAADERHPPADRTFKKAAGAEEKKVEAPPKRREEEVSGVSDPQPQDAGSRKLSPTKEAFGEQPLQLTTKPDLLAWDPARNTHPPSHHPHPHPHHHHHHHHHHHHAVGLNLSHVRKRCLSETHGEREPCKKRLTARSISTPTCLGGSPAAERPADLPPAAALPQPEVILLDSDLDEPIDLRSVKSAQRGRGAAQLPPGEARDTGVGGGGGGGGSGTHHDGGEASSRGPGRTCRVAERVQALLWEYNYHRRHRELPHRYFQGVRDGVAGGRRKGKRHSRGGAGS

SEQ ID NO: 739503 - protein, 197 aa, Homo sapiens
MLVLPSPCPQPLAFSSVETMEGPPRRTCRSPEPGPSSSIGSPQASSPPRPNHYLLIDTQGVPYTVLVDEESQREPGASGAPGQKKCYSCPVCSRVFEYMSYLQRHSITHSEVKPFECDICGKAFKRASHLARHHSIHLAGGGRPHGCPLCPRRFRDAGELAQHSRVHSGERPFQCPHCPRRFMEQNTLQKHTRWKHP

SEQ ID NO: 739504 - protein, 197 aa, Homo sapiens; identical to SEQ ID NO: 739503

SEQ ID NO: 739505 - protein, 176 aa, Homo sapiens
MLVLPSPCPQPLAFSSSIGSPQASSPPRPNHYLLIDTQGVPYTVLVDEESQREPGASGAPGQKKCYSCPVCSRVFEYMSYLQRHSITHSEVKPFECDICGKAFKRASHLARHHSIHLAGGGRPHGCPLCPRRFRDAGELAQHSRVHSGERPFQCPHCPRRFMEQNTLQKHTRWKHP

SEQ ID NO: 739506 - protein, 197 aa, Homo sapiens; identical to SEQ ID NO: 739503

SEQ ID NO: 739507 - protein, 197 aa, Homo sapiens; identical to SEQ ID NO: 739503

SEQ ID NO: 739508 - protein, 214 aa, Homo sapiens
RAAGGAGPRGGPQPALRMLVLPSPCPQPLAFSSVETMEGPPRRTCRSPEPGPSSSIGSPQASSPPRPNHYLLIDTQGVPYTVLVDEESQREPGASGAPGQKKCYSCPVCSRVFEYMSYLQRHSITHSEVKPFECDICGKAFKRASHLARHHSIHLAGGGRPHGCPLCPRRFRDAGELAQHSRVHSGERPFQCPHCPRRFMEQNTLQKHTRWKHP

SEQ ID NO: 739509 - protein, 135 aa, Homo sapiens
LGNEAELLESMGDAPPPQDEHTTIIDRGPGACEESNHLLLNGGSHKHVQSQIHRSADSGGRQGREQKQDPLHSPTSKRKKVKFTTFTTIPPDDSCPTVNSIVSSNDEDIKWVCQDVAVGAPKELRNYLEKLKDKA

SEQ ID NO: 739510 - protein, 168 aa, Homo sapiens
EIKGKMDAVVNFTYQYLSAPLCVTVWVPRLPLQIEVSDTELSQIKGWRVPIVTNEEVSVVQMNFEIASFSSLSGTQPITWQVEYPRKGTTDIAVSEIFVSQKDLVGIVPLAMGVKFTTFTTIPPDDSCPTVNSIVSSNDEDIKWVCQDVAVGAPKELRNYLEKLKDKA

SEQ ID NO: 739511 - protein, 202 aa, Homo sapiens
MASQGRRRRPLRRPETVVPGEATETDSERSASSSEEEELYLGPSGPTRGRPTGLRVAGEAAETDSEPEPEPEPTAAPRDLPPLVVQRESAEEAWGTEEAPAPAPARSLLQLRLAESQARLDHDVAAAVSGVYRRAGRDVAALASRLAAAQAAGLAAAHSVRLARGDLCALAERLDIVAGCRLLPDIRGVPGTEPEKDPGPRA

SEQ ID NO: 739512 - protein, 202 aa, Homo sapiens; identical to SEQ ID NO: 739511

SEQ ID NO: 739513 - protein, 202 aa, Homo sapiens; identical to SEQ ID NO: 739511

SEQ ID NO: 739514 - protein, 202 aa, Homo sapiens; identical to SEQ ID NO: 739511

SEQ ID NO: 739515 - protein, 78 aa, Homo sapiens
TTKFAAASTYEWKNLDGISHAPNAVKTAFYLAEFFVNEARKNNHHFKSESEEEKALIYQFSPIYTGNISSFQQCYIFD

SEQ ID NO: 739516 - protein, 318 aa, Homo sapiens
MASPGCLLCVLGLLLCGAASLELSRPHGDTAKKPIIGILMQKCRNKVMKNYGRYYIAASYVKYLESAGARVVPVRLDLTEKDYEILFKSINGILFPGGSVDLRRSDYAKVAKIFYNLSIQSFDDGDYFPVWGTCLGFEELSLLISGECLLTATDTVDVAMPLNFTGGQLHSRMFQNFPTELLLSLAVEPLTANFHKWSLSVKNFTMNEKLKKFFNVLTTNTDGKIEFISTMEGYKYPVYGVQWHPEKAPYEWKNLDGISHAPNAVKTAFYLAEFFVNEARKNNHHFKSESEEEKALIYQFSPIYTGNISSFQQCYIFD

SEQ ID NO: 739517 - protein, 318 aa, Homo sapiens; identical to SEQ ID NO: 739516

SEQ ID NO: 739518 - protein, 318 aa, Homo sapiens; identical to SEQ ID NO: 739516

SEQ ID NO: 739519 - protein, 318 aa, Homo sapiens; identical to SEQ ID NO: 739516

SEQ ID NO: 739520 - protein, 279 aa, Homo sapiens [sequence omitted]

SEQ ID NO: 739521 - protein, 300 aa, Homo sapiens
MASPGCLLCVLGLLLCGAASLELSRPHGDTAKKPIIGILMQKCRNKVMKNYGRYYIAASYVKYLESAGARVVPVRLDLTEKDYEILFKSINGILFPGGSVDLRRSDYAKVAVWGTCLGFEELSLLISGECLLTATDTVDVAMPLNFTGGQLHSRMFQNFPTELLLSLAVEPLTANFHKWSLSVKNFTMNEKLKKFFNVLTTNTDGKIEFISTMEGYKYPVYGVQWHPEKAPYEWKNLDGISHAPNAVKTAFYLAEFFVNEARKNNHHFKSESEEEKALIYQFSPIYTGNISSFQQCYIFD

SEQ ID NO: 739522 - protein, 186 aa, Homo sapiens
SFNCSLRLSLLISGECLLTATDTVDVAMPLNFTGGQLHSRMFQNFPTELLLSLAVEPLTANFHKWSLSVKNFTMNEKLKKFFNVLTTNTDGKIEFISTMEGYKYPVYGVQWHPEKAPYEWKNLDGISHAPNAVKTAFYLAEFFVNEARKNNHHFKSESEEEKALIYQFSPIYTGNISSFQQCYIFD

SEQ ID NO: 739523 - protein, 262 aa, Homo sapiens
MASPGCLLCVLGLLLCGAASLELSRPHGDTAKKPIIGILMQKCRNKVMKNYGRYYIAASYVKYLESAGARVVPVRLDLTEKDYEILFKSINGILFPGGSVDLRRSDYAKVAKIFYNLSIQSFDDGDYFPVWGTCLGFEELSLLISGECLLTATDTVDVAMPLNFTGGQLHSRMFQNFPTELLLSLAVEPLTANFHKWSLSVKNFTMNEKLKKFFNVLTTNTDGKIEFISTMEGYKYPVYGVQWHPEKAPYEWKNFSEKQPSF

SEQ ID NO: 739524 - protein, 205 aa, Homo sapiens
MASPGCLLCVLGLLLCGAASLELSRPHGDTAKKPIIGILMQKCRNKVMKNYGRYYIAASYVKYLESAGARVVPVRLDLTEKDYEILFKSINGILFPGGSVDLRRSDYAKVAKIFYNLSIQSFDDGDYFPVWGTCLGFEELSLLISGECLLTATDTVDVAMPLNFTGGQLHSRMFQNFPTELLLSLAVEPLTANFHKWSLSVKNLQ

SEQ ID NO: 739525 - protein, 256 aa, Homo sapiens
MASPGCLLCVLGLLLCGAASLELSRPHGDTAKKPIIGILMQKCRNKVMKNYGRYYIAASYVKYLESAGARVVPVRLDLTEKDYEILFKSINGILFPGGSVDLRRSDYAKVAKIFYNLSIQSFDDGDYFPVWGTCLGFEELSLLISGECLLTATDTVDVAMPLNFTGGQLHSRMFQNFPTELLLSLAVEPLTANFHKWSLSVKNFTMNEKLKKFFNVLTTNTDGKIEFISTMEVFLGIFLNGVVKKKSKRIKGARMK

SEQ ID NO: 739526 - protein, 205 aa, Homo sapiens
MASPGCLLCVLGLLLCGAASLELSRPHGDTAKKPIIGILMQKCRNKVMKNYGRYYIAASYVKYLESAGARVVPVRLDLTEKDYEILFKSINGILFPGGSVDLRRSDYAKVAKIFYNLSIQSFDDGDYFPVWGTCLGFEELSLLISGECLLTATDTVDVAMPLNFTGGQLHSRMFQNFPTELLLSLAVEPLTANFHKWSLSVKVSH

SEQ ID NO: 739527 - protein, 195 aa, Homo sapiens
MSKKGRSKGEKPEMETDAVQMANEELRAKLTSIQIEFQQEKSKVGKLRERLQEAKLEREQEQRRHTAYISELKAKLHEEKTKELQALREGLIRQHEQEAARTAKIKEGELQRLQATLNVLRDGAADKVKTALLTEAREEARRAFDGERLRLQQEILELKAARKQAEEALSNCMQADKTKAADLRAAYQAHQDEVH

SEQ ID NO: 739528 - protein, 315 aa, Homo sapiens
MSKKGRSKGEKPEMETDAVQMANEELRAKLTSIQIEFQQEKSKMDEIKGKDRVILALEKELGVQAGQTQKLLLQKEALDEQLVQVKEAERHHSSPKRELPPGIGDMVELMGVQDQHMDERDVRRFQLKIAELNSVIRKLEDRNTLLADERNELLKRSRETEVQLKPLVEKNKRMNKKNEDLLQSIQRMEEKIKNLTRENVEMKEKLSAQASLKRHTSLNDLSLTRDEQEIEFLRLQVLEQQHVIDDLSLERERLLRSKRHRGKSLKPPKKNEMQDAKDQNELLEFRVLELEVRDSICCKLSNGADILFEPKLKFM

SEQ ID NO: 739529 - protein, 461 aa, Homo sapiens
MSKKGRSKGEKPEMETDAVQMANEELRAKLTSIQIEFQQEKSKMDEIKGKDRVILALEKELGVQAGQTQKLLLQKEALDEQLVQVKEAERHHSSPKRELPPGIGDMVELMGVQDQHMDERDVRRFQLKIAELNSVIRKLEDRNTLLADERNELLKRSRETEVQLKPLVEKNKRMNKKNEDLLQSIQRMEEKIKNLTRENVEMKEKLSAQASLKRHTSLNDLSLTRDEQEIEFLRLQVLEQQHVIDDLSLERERLLRSKRHRGKSLKPPKKHVVETFFGFDEESVDSETLSETSYNTDRTDRTPATPEEDLDDATAREEADLRFCQLTREYQALQRAYALLQEQVGGTLDAEREARTREQLQADLLRCQAKIEDLEKLLVEKGQDSKWVEEKQLLIRTNQDLLEKIYRLEMEENQLKNEMQDAKDQNELLEFRVLELEVRDSICCKLSNGADILFEPKLKFM

SEQ ID NO: 739530 - protein, 126 aa, Homo sapiens [sequence omitted]

SEQ ID NO: 739531 - protein, 134 aa, Homo sapiens
MPEPAKSAPAPKKGSKKAVTKAQKKDGKKRKRSRKESYSIYVYKVLKQVHPDTGISSKAMGIMNSFVNDIFERIAGLPSEESTCREVQETELTERQEALRAGELLLEQGGVLRAAPCLRPAGGVAETSQQAHLH

SEQ ID NO: 739532 - protein, 126 aa, Homo sapiens [sequence omitted]

SEQ ID NO: 739533 - protein, 126 aa, Homo sapiens [sequence omitted]

SEQ ID NO: 739534 - protein, 126 aa, Homo sapiens [sequence omitted]

SEQ ID NO: 739535 - protein, 79 aa, Homo sapiens
MHRSSPRSPCHPAEYTVAVPKSMFPGLFMLGTFLWSLIEYLIHRFLFHMKPPSDSYYLIMLHFVMHGQHHKSRRLRPRR

SEQ ID NO: 739536 - protein, 393 aa, Homo sapiens
RRSGWQQSRRRAARWELRSPAMAPAPPPAASFSPSEVQRRLAAGACWVRRGARLYDLSSFVRHHPGGEQLLRARAGQDISADLDGPPHRHSANARRWLEQYYVGELRGEQQGSMENEPVALEETQKTDPAMEPRFKVVDWDKDLVDWRKPLLWQVGHLGEKYDEWVHQPVTRPIRLFHSDLIEGLSKTVWYSVPIIWVPLVLYLSWSYYRTFAQGNVRLFTSFTTEYTVAVPKSMFPGLFMLGTFLWSLIEYLIHRFLFHMKPPSDSYYLIMLHFVMHGQHHKAPFDGSRLVFPPVPASLVIGVFYLCMQLILPEAVGGTVFAGGLLGYVLYDMTHYYLHFGSPHKGSYLYSLKAHHVKHHFAHQKSGFGISTKLWDYCFHTLTPEKPHLKTQ

SEQ ID NO: 739537 - protein, 181 aa, Homo sapiens [sequence omitted]

SEQ ID NO: 739538 - protein, 209 aa, Homo sapiens
MGSEPPAHPTHPAHPAHPAHPMFLCNLPGPFLAHKWEVRQSLQIFQTWWPALPKATKGAKPTQWNVWAAVPLSSAGSGQGLASCRGPWLLLMPKPLHLQAPFDGSRLVFPPVPASLVIGVFYLCMQLILPEAVGGTVFAGGLLGYVLYDMTHYYLHFGSPHKGSYLYSLKAHHVKHHFAHQKSGFGISTKLWDYCFHTLTPEKPHLKTQ

SEQ ID NO: 739539 - protein, 372 aa, Homo sapiens
MAPAPPPAASFSPSEVQRRLAAGACWVRRGARLYDLSSFVRHHPGGEQLLRARAGQDISADLDGPPHRHSANARRWLEQYYVGELRGEQQGSMENEPVALEETQKTDPAMEPRFKVVDWDKDLVDWRKPLLWQVGHLGEKYDEWVHQPVTRPIRLFHSDLIEGLSKTVWYSVPIIWVPLVLYLSWSYYRTFAQGNVRLFTSFTTEYTVAVPKSMFPGLFMLGTFLWSLIEYLIHRFLFHMKPPSDSYYLIMLHFVMHGQHHKAPFDGSRLVFPPVPASLVIGVFYLCMQLILPEAVGGTVFAGGLLGYVLYDMTHYYLHFGSPHKGSYLYSLKAHHVKHHFAHQKSGFGISTKLWDYCFHTLTPEKPHLKTQ

SEQ ID NO: 739540 - protein, 372 aa, Homo sapiens; identical to SEQ ID NO: 739539

SEQ ID NO: 739541 - protein, 181 aa, Homo sapiens [sequence omitted]

SEQ ID NO: 739542 - protein, 231 aa, Homo sapiens
MARSRRRAARWELRSPAMAPAPPPAASFSPSEVQRRLAAGACWVRRGARLYDLSSFVRHHPGGEQLLRARAGQDISADLDGPPHRHSANARRWLEQYYVGELRGEQQGSMENEPVALEETQKTDPAMEPRFKVVDWDKDLVDWRKPLLWQVGHLGEKYDEWVHQPVTRPIRLFHSDLIEGLSKTVWYSVPIIWVPLVLYLSWSYYRTFAQGNVRLFTSFTTGNASFFPDLP

SEQ ID NO: 739543 - protein, 317 aa, Homo sapiens
MWLYLAVFVGLYYLLHWYRERQVLSHLRDKYVFITGCDSGFGKLLARQLDARGLRVLAACLTEKGAEQLRGQTSDRLETVTLDVTKTESVAAAAQWVKECVRDKGLWGLVNNAGISLPTAPNELLTKQDFVTILDVNLLGVIDVTLSLLPLVRKARGRVVNVSSVMGRVSLFGGGYCISKYGVEAFSDSLRRELSYFGVKVAMIEPGYFKTAVTSKERFLKSFLEIWDRSSPEVKEAYGEKFVADYKKSAEQMEQKCTQDLSLVTNCMEHALIACHPRTRYSAGWDAKLLYLPMSYMPTFLVDAIMYWVSPSPAKAL

SEQ ID NO: 739544 - protein, 317 aa, Homo sapiens; identical to SEQ ID NO: 739543

SEQ ID NO: 739545 - protein, 317 aa, Homo sapiens; identical to SEQ ID NO: 739543

SEQ ID NO: 739546 - protein, 115 aa, Homo sapiens [sequence omitted]

SEQ ID NO: 739547 - protein, 88 aa, Homo sapiens
MLSPHPCDTVVFVIPSSPSHTCQSALTLLGCDLHPNSVHLHRHNTVMLSHLPTVPGLWGLVNNAGISLPTAPNELLTKQDFVTILDVN

SEQ ID NO: 739548 - protein, 292 aa, Homo sapiens
FQIFFLDATCLLNSGVVHLTCTGFQKETLTFLKKSGPSLNELIPDGYNRCLVAGLLSPRFVDVQPSSLSQEEQLEAILSAAIQTSSLGLLTGYIRRWITEEQPNSATNLRFVLEWTWNKVVLTKEEFDRLCVPLFDGSCHFMDPQTIQSIQQCYLLLSNLNIVLSCFASEAREITERGLIDLSNKFVVSHLICQYAQVVLWFSHSGLLPEGIDDSVQLSRLCYNYPVIQNYYTSRRQKFERLSRGKWNPDCLMIDGLVSQLGERIEKLWIRDEGGTGKYPPASLHRILICTY

SEQ ID NO: 739549 - protein, 117 aa, Homo sapiens
PYDPRLLGSREAAVTNLNVPTNPYLLSSSGGARHGCCLQSSLLIHTAKLKTFAPVSPYKCIYKQNLISVGFKSSQNHLSYILESPRGEEHKESVDYNKDNSRVHISGVWGKKAICFV

SEQ ID NO: 739550 - protein, 107 aa, Homo sapiens [sequence omitted]

SEQ ID NO: 739551 - protein, 107 aa, Homo sapiens [sequence omitted]

SEQ ID NO: 739552 - protein, 179 aa, Homo sapiens
MSGGTSGRTRRGGRGDEQTERAERRHGHRGAANGNGAAPREEDRRSGRSGGEGERGKTGRTQRAAQRREATAAEQRRRAAGSRGHAVPPASGAQAPSANRRGTNRREAEKREERTANGSTRGAKDGTARGAQPRRDRPRTARGTGGRWGARRAAARPRAARPAPAPPRATPPGGTTGDD

SEQ ID NO: 739553 - protein, 459 aa, Homo sapiens
MRAQIEVIPCKICGDKSSGIHYGVITCEGCKGFFRRSQQNNASYSCPRQRNCLIDRTNRNRCQHCRLQKCLALGMSRDAVKFGRMSKKQRDSLYAEVQKHQQRLQEQRQEQSGEAERLARVYSSSISNGLSNLNNETSGTYANGSVIDLPKSEGYYNVDSGQPSPDQSGLDMTGIKQIKQEPIYDLTSVPNLFTYSSFNNGQLAPGITMTEIDRIAQNIIKSHLETCQYTMEELHQLAWQTHTYEEIKAYQSKSREALWQQCAIQITHAIQYVVEFAKRITGFMELCQNDQILLLKSGCLEVVLVRMCRAFNPLNNTVLFEGKYGGMQMFKALGSDDLVNEAFDFAKNLCSLQLTEEEIALFSSAVLISPDRAWLIEPRKVQKLQEKIYFALQHVIQKNHLDDETLAKLIAKIPTITAVCNLHGEKLQVFKQSHPEIVNTLFPPLYKELFNPDCATGCK

SEQ ID NO: 739554 - protein, 848 aa, Homo sapiens
MPPPRTREGRDRRDHHRAPSEEEALEKWDWNCPETRRLLEDAFFREEDYIRQGSEECQKFWTFFERLQRFQNLKTSRKEEKDPGQPKHSIPALADLPRTYDPRYRINLSVLGPATRGSQGLGRHLPAERVAEFRRALLHYLDFGQKQAFGRLAKLQRERAALPIAQYGNRILQTLKEHQVVVVAGDTGCGKSTQVPQYLLAAGFSHVACTQPRRIACISLAKRVGFESLSQYGSQVGYQIRFESTRSAATKIVFLTVGLLLRQIQREPSLPQYEVLIVDEVHERHLHNDFLLGVLQRLLPTRPDLKVILMSATINISLFSSYFSNAPVVQVPGRLFPITVFDVAPPGVRKCILSTNIAETSVTIDGIRFVVDSGKVKEMSYDPQAKLQRLQEFWISQASAEQRKGRAGRTGPGVCFRLYAESDYDAFAPYPVPEIRRVALDSLVLQMKSMSVGDPRTFPFIEPPPPASLETAILYLRDQGALDSSEALTPIGSLLAQLPVDVVIGKMLILGSMFSLVEPVLTIAAALSVQSPFTRSAQSSPECCTPPAVFAGSPEVLHAQELEASNCDGSRDDKDKMSSKHQLLSFVSLLETNKPYLVNCVRIPALQSLLLFSRSLDTNGDCSRLVADGWLELQLADSESAIRLLAASLRLRARWESALDRQLAHQAQQQLEEEEEDTPVSPKEVATLSKELLQFTASKIPYSLRRLTGLEVQNMYVGPQTIPATPHLPGLFGSSTLSPHPTKGGYAVTDFLTYNCLTNDTDLYSDCLRTFWTCPHCGLHAPLTPLERIAHENTCPQAPQDGPPGAEEAALETLQKTSVLQRPYHCEACGKDFLFTPTEVLRHRKQHV

SEQ ID NO: 739555 - protein, 68 aa, Homo sapiens
YGRMETVEIGRTPQKLEIMENDAEGAEEAALETLQKTSVLQRPYHCEACGKDFLFTPTEVLRHRKQHV

SEQ ID NO: 739556 - protein, 1168 aa, Homo sapiens
MPPPRTREGRDRRDHHRAPSEEEALEKWDWNCPETRRLLEDAFFREEDYIRQGSEECQKFWTFFERLQRFQNLKTSRKEEKDPGQPKHSIPALADLPRTYDPRYRINLSVLGPATRGSQGLGRHLPAERVAEFRRALLHYLDFGQKQAFGRLAKLQRERAALPIAQYGNRILQTLKEHQVVVVAGDTGCGKSTQVPQYLLAAGFSHVACTQPRRIACISLAKRVGFESLSQYGSQVGYQIRFESTRSAATKIVFLTVGLLLRQIQREPSLPQYEVLIVDEVHERHLHNDFLLGVLQRLLPTRPDLKVILMSATINISLFSSYFSNAPVVQVPGRLFPITVVYQPQEAEPTTSKSEKLDPRPFLRVLESIDHKYPPEERGDLLVFLSGMAEISAVLEAAQTYASHTQRWVVLPLHSALSVADQDKVFDVAPPGVRKCILSTNIAETSVTIDGIRFVVDSGKVKEMSYDPQAKLQRLQEFWISQASAEQRKGRAGRTGPGVCFRLYAESDYDAFAPYPVPEIRRVALDSLVLQMKSMSVGDPRTFPFIEPPPPASLETAILYLRDQGALDSSEALTPIGSLLAQLPVDVVIGKMLILGSMFSLVEPVLTIAAALSVQSPFTRSAQSSPECAAARRPLESDQGDPFTLFNVFNAWVQVKSERSRNSRKWCRRRGIEEHRLYEMANLRRQFKELLEDHGLLAGAQAAQVGDSYSRLQQRRERRALHQLKRQHEEGAGRRRKVLRLQEEQDGGSSDEDRAGPAPPGASDGVDIQDVKFKLRHDLAQLQAAASSAQDLSREQLALLKLVLGRGLYPQLAVPDAFNSSRKDSDQIFHTQAKQGAVLHPTCVFAGSPEVLHAQELEASNCDGSRGMAACWESHSDLADLLVRARPPKPCHDKDKMSSKHQLLSFVSLLETNKPYLVNCVRIPALQSLLLFSRSLDTNGDCSRLVADGWLELQLADSESAIRLLAASLRLRARWESALDRQLAHQAQQQLEEEEEDTPVSPKEVATLSKELLQFTASKIPYSLRRLTGLEVQNMYVGPQTIPATPHLPGLFGSSTLSPHPTKGGYAVTDFLTYNCLTNDTDLYSDCLRTFWTCPHCGLHAPLTPLERIAHENTCPQAPQDGPPGAEEAALETLQKTSVLQRPYHCEACGKDFLFTPTEVLRHRKQHV

SEQ ID NO: 739557 - protein, 637 aa, Homo sapiens
MKSMSVGDPRTFPFIEPPPPASLETAILYLRDQGALDSSEALTPIGSLLAQLPVDVVIGKMLILGSMFSLVEPVLTIAAALSVQSPFTRSAQSSPECAAARRPLESDQGDPFTLFNVFNAWVQVKSERSRNSRKWCRRRGIEEHRLYEMANLRRQFKELLEDHGLLAGAQAAQVGDSYSRLQQRRERRALHQLKRQHEEGAGRRRKVLRLQEEQDGGSSDEDRAGPAPPGASDGVDIQDVKFKLRHDLAQLQAAASSAQDLSREQLALLKLVLGRGLYPQLAVPDAFNSSRKDSDQIFHTQAKQGAVLHPTCVFAGSPEVLHAQELEASNCDGSRGMAACWESHSDLADLLVCARPPKPCHDKDKMSSKHQLLSFVSLLETNKPYLVNCVRIPALQSLLLFSRSLDTNGDCSRLVADGWLELQLADSESAIRLLAASLRLRARWESALDRQLAHQAQQQLEEEEEDTPVSPKEVATLSKELLQFTASKIPYSLRRLTGLEVQNMYVGPQTIPATPHLPGLFGSSTLSPHPTKGGYAVTDFLTYNCLTNDTDLYSDCLRTFWTCPHCGLHAPLTPLERIAHENTCPQAPQDGPPGAEEAALETLQKTSVLQRPYHCEACGKDFLFTPTEVLRHRKQHV

SEQ ID NO: 739558 - protein, 914 aa, Homo sapiens
MPPPRTREGRDRRDHHRAPSEEEALEKWDWNCPETRRLLEDAFFREEDYIRQGSEECQKFWTFFERLQRFQNLKTSRKEEKDPGQPKHSIPALADLPRTYDPRYRINLSVLGPATRGSQGLGRHLPAERVAEFRRALLHYLDFGQKQAFGRLAKLQRERAALPIAQYGNRILQTLKEHQVVVVAGDTGCGKSTQVPQYLLAAGFSHVACTQPRRIACISLAKRVGFESLSQYGSQVGYQIRFESTRSAATKIVFLTVGLLLRQIQREPSLPQYEVLIVDEVHERHLHNDFLLGVLQRLLPTRPDLKVILMSATINISLFSSYFSNAPVVQVPGRLFPITVVYQPQEAEPTTSKSEKLDPRPFLRVLESIDHKYPPEERGDLLVFLSGMAEISAVLEAAQTYASHTQRWVVLPLHSALSVADQDKVFDVAPPGVRKCILSTNIAETSVTIDGIRFVVDSGKVKEMSYDPQAKLQRLQEFWISQASAEQRKGRAGRTGPGVCFRLYAESDYDAFAPYPVPEIRRVALDSLVLQMKSMSVGDPRTFPFIEPPPPASLETAILYLRDQGALDSSEALTPIGSLLAQLPVDVVIGKMLILGSMFSLVEPVLTIAAALSVQSPFTRSAQSSPECAAARRPLESDQGDPFTLFNVFNAWVQVKSERSRNSRKWCRRRGIEEHRLYEMANLRRQFKELLEDHGLLAGAQAAQVGDSYSRLQQRRERRALHQLKRQHEEGAGRRRKVLRLQEEQDGGSSDEDRAGPAPPGASDGVDIQDVKFKLRHDLAQLQAAASSAQDLSREQLALLKLVLGRGLYPQLAVPDAFNSSRKDSDQISTRRQALRVLTTAFRGARGVAPELGQMGGAGPKELANSSRRFAGTALGGRPPTPVTVATGPPGGGAKEEQEAPKQKDMEKAETEKR

SEQ ID NO: 739559 - protein, 1168 aa, Homo sapiens
MPPPRTREGRDRRDHHRAPSEEEALEKWDWNCPETRRLLEDAFFREEDYIRQGSEECQKFWTFFERLQRFQNLKTSRKEEKDPGQPKHSIPALADLPRTYDPRYRINLSVLGPATRGSQGLGRHLPAERVAEFRRALLHYLDFGQKQAFGRLAKLQRERAALPIAQYGNRILQTLKEHQVVVVAGDTGCGKSTQVPQYLLAAGFSHVACTQPRRIACISLAKRVGFESLSQYGSQVGYQIRFESTRSAATKIVFLTVGLLLRQIQREPSLPQYEVLIVDEVHERHLHNDFLLGVLQRLLPTRPDLKVILMSATINISLFSSYFSNAPVVQVPGRLFPITVVYQPQEAEPTTSKSEKLDPRPFLRVLESIDHKYPPEERGDLLVFLSGMAEISAVLEAAQTYASHTQRWVVLPLHSALSVADQDKVFDVAPPGVRKCILSTNIAETSVTIDGIRFVVDSGKVKEMSYDPQAKLQRLQEFWISQASAEQRKGRAGRTGPGVCFRLYAESDYDAFAPYPVPEIRRVALDSLVLQMKSMSVGDPRTFPFIEPPPPASLETAILYLRDQGALDSSEALTPIGSLLAQLPVDVVIGKMLILGSMFSLVEPVLTIAAALSVQSPFTRSAQSSPECAAARRPLESDQGDPFTLFNVFNAWVQVKSERSRNSRKWCRRRGIEEHRLYEMANLRRQFKELLEDHGLLAGAQAAQVGDSYSRLQQRRERRALHQLKRQHEEGAGRRRKVLRLQEEQDGGSSDEDRAGPAPPGASDGVDIQDVKFKLRHDLAQLQAAASSAQDLSREQLALLKLVLGRGLYPQLAVPDAFNSSRKDSDQIFHTQAKQGAVLHPTCVFAGSPEVLHAQELEASNCDGSRGMAACWESHSDLADLLVCARPPKPCHDKDKMSSKHQLLSFVSLLETNKPYLVNCVRIPALQSLLLFSRSLDTNGDCSRLVADGWLELQLADSESAIRLLAASLRLRARWESALDRQLAHQAQQQLEEEEEDTPVSPKEVATLSKELLQFTASKIPYSLRRLTGLEVQNMYVGPQTIPATPHLPGLFGSSTLSPHPTKGGYAVTDFLTYNCLTNDTDLYSDCLRTFWTCPHCGLHAPLTPLERIAHENTCPQAPQDGPPGAEEAALETLQKTSVLQRPYHCEACGKDFLFTPTEVLRHRKQHV

SEQ ID NO: 739560 - protein, 597 aa, Homo sapiens
RLGVNRTRLAQLPVDVVIGKMLILGSMFSLVEPVLTIAAALSVQSPFTRSAQSSPECAAARRPLESDQGDPFTLFNVFNAWVQVKSERSRNSRKWCRRRGIEEHRLYEMANLRRQFKELLEDHGLLAGAQAAQVGDSYSRLQQRRERRALHQLKRQHEEGAGRRRKVLRLQEEQDGGSSDEDRAGPAPPGASDGVDIQDVKFKLRHDLAQLQAAASSAQDLSREQLALLKLVLGRGLYPQLAVPDAFNSSRKDSDQIFHTQAKQGAVLHPTCVFAGSPEVLHAQELEASNCDGSRGMLRAGSHIQIWLTFLSEPGPPKPCHDKDKMSSKHQLLSFVSLLETNKPYLVNCVRIPALQSLLLFSRSLDTNGDCSRLVADGWLELQLADSESAIRLLAASLRLRARWESALDRQLAHQAQQQLEEEEEDTPVSPKEVATLSKELLQFTASKIPYSLRRLTGLEVQNMYVGPQTIPATPHLPGLFGSSTLSPHPTKGGYAVTDFLTYNCLTNDTDLYSDCLRTFWTCPHCGLHAPLTPLERIAHENTCPQAPQDGPPGAEEAALETLQKTSVLQRPYHCEACGKDFLFTPTEVLRHRKQHV

SEQ ID NO: 739561 - protein, 328 aa, Homo sapiens
GVIQRIPADGRQIFHTQAKQGAVLHPTCVFAGSPEVLHAQELEASNCDGSRDDKDKMSSKHQLLSFVSLLETNKPYLVNCVRIPALQSLLLFSRSLDTNGDCSRLVADGWLELQLADSESAIRLLAASLRLRARWESALDRQLAHQAQQQLEEEEEDTPVSPKEVATLSKELLQFTASKIPYSLRRLTGLEVQNMYVGPQTIPATPHLPGLFGSSTLSPHPTKGGYAVTDFLTYNCLTNDTDLYSDCLRTFWTCPHCGLHAPLTPLERIAHENTCPQAPQDGPPGAEEAALETLQKTSVLQRPYHCEACGKDFLFTPTEVLRHRKQHV

SEQ ID NO: 739562 - protein, 149 aa, Homo sapiens
TIPATPHLPGLFGSSTLSPHPTKGGYAVTDFLTYNCLTVSMNPPSLKVGFQEDPTTPFHLSPGHSSQVGPVALRASGKGPGGALGWWVALGGGPALTAGLPQNDTDLYSDCLRTFWTCPHCGLHAPLTPLERIAHENTCPQAPQDGPPG

SEQ ID NO: 739563 - protein, 114 aa, Homo sapiens
SVLLSLSLFLSLCGYVSCYFSLSCSYLCLGHLHPVVTQGCHTLGFSGGDSTGATCLHPRLAVSASQSPCLSLCLSLCLSHWQGCGVKTDLCIFINLGGLPGGGKTGFSKGQERT

SEQ ID NO: 739564 - protein, 1168 aa, Homo sapiens; identical to SEQ ID NO: 739556

SEQ ID NO: 739565 - protein, 1168 aa, Homo sapiens; identical to SEQ ID NO: 739556

SEQ ID NO: 739566 - protein, 903 aa, Homo sapiens
MPPPRTREGRDRRDHHRAPSEEEALEKWDWNCPETRRLLEDAFFREEDYIRQGSEECQKFWTFFERLQRFQNLKTSRKEEKDPGQPKHSIPALADLPRTYDPRYRINLSVLGPATRGSQGLGRHLPAERVAEFRRALLHYLDFGQKQAFGRLAKLQRERAALPIAQYGNRILQTLKEHQVVVVAGDTGCGKSTQVPQYLLAAGFSHVACTQPRRIACISLAKRVGFESLSQYGSQVGYQIRFESTRSAATKIVFLTVGLLLRQIQREPSLPQYEVLIVDEVHERHLHNDFLLGVLQRLLPTRPDLKVILMSATINISLFSSYFSNAPVVQVPGRLFPITVVYQPQEAEPTTSKSEKLDPRPFLRVLESIDHKYPPEERGDLLVFLSGMAEISAVLEAAQTYASHTQRWVVLPLHSALSVADQDKVFDVAPPGVRKCILSTNIAETSVTIDGIRFVVDSGKVKEMSYDPQAKLQRLQEFWISQASAEQRKGRAGRTGPGVCFRLYAESDYDAFAPYPVPEIRRVALDSLVLQMKSMSVGDPRTFPFIEPPPPASLETAILYLRDQGALDSSEALTPIGSLLAQLPVDVVIGKMLILGSMFSLVEPVLTIAAALSVQSPFTRSAQSSPECAAARRPLESDQGDPFTLFNVFNAWVQVKSERSRNSRKWCRRRGIEEHRLYEMANLRRQFKELLEDHGLLAGAQAAQVGDSYSRLQQRRERRALHQLKRQHEEGAGRRRKVLRLQEEQDGGSSDEDRAGPAPPGASDGVDIQDVKFKLRHDLAQLQAAASSAQDLSREQLALLKLVLGRGLYPQLAVPDAFNSSRKDSDQIFHTQAKQGAVLHPTCVFAGSPEVLHAQELEASNCDGSRGTVSPGGRNPHPGCEGQGYRELPGPSGWGSHTGPGWY

SEQ ID NO: 739567 - protein, 782 aa, Homo sapiens
MPPPRTREGRDRRDHHRAPSEEEALEKWDWNCPETRRLLEDAFFREEDYIRQGSEECQKFWTFFERLQRFQNLKTSRKEEKDPGQPKHSIPALADLPRTYDPRYRINLSVLGPATRGSQGLGRHLPAERVAEFRRALLHYLDFGQKQAFGRLAKLQRERAALPIAQYGNRILQTLKEHQVVVVAGDTGCGKSTQVPQYLLAAGFSHVACTQPRRIACISLAKRVGFESLSQYGSQVGYQIRFESTRSAATKIVFLTVGLLLRQIQREPSLPQYEVLIVDEVHERHLHNDFLLGVLQRLLPTRPDLKVILMSATINISLFSSYFSNAPVVQVPGRLFPITVVYQPQEAEPTTSKSEKLDPRPFLRVLESIDHKYPPEERGDLLVFLSGMAEISAVLEAAQTYASHTQRWVVLPLHSALSVADQDKVFDVAPPGVRKCILSTNIAETSVTIDGIRFVVDSGKVKEMSYDPQAKLQRLQEFWISQASAEQRKGRAGRTGPGVCFRLYAESDYDAFAPYPVPEIRRVALDSLVLQMKSMSVGDPRTFPFIEPPPPASLETAILYLRDQGALDSSEALTPIGSLLAQLPVDVVIGKMLILGSMFSLVEPVLTIAAALSVQSPFTRSAQSSPECAAARRPLESDQGDPFTLFNVFNAWVQVKSERSRNSRKWCRRRGIEEHRLYEMANLRRQFKELLEDHGLLAGAQAAQVGDSYSRLQQRRERRALHQLKRQHEEGAGRRRKVLRLQEEQDGGSSDEDRAGPAPPGASDGVDIQVGAMGCGVWGFTK

SEQ ID NO: 739568 - protein, 623 aa, Homo sapiens
MSHCARPIFVFLVVSRFHHVGRAGLELLTLSDLPTSAFQTAGITGKMLILGSMFSLVEPVLTIAAALSVQSPFTRSAQSSPECAAARRPLESDQGDPFTLFNVFNAWVQVKSERSRNSRKWCRRRGIEEHRLYEMANLRRQFKELLEDHGLLAGAQAAQVGDSYSRLQQRRERRALHQLKRQHEEGAGRRRKVLRLQEEQDGGSSDEDRAGPAPPGASDGVDIQDVKFKLRHDLAQLQAAASSAQDLSREQLALLKLVLGRGLYPQLAVPDAFNSSRKDSDQIFHTQAKQGAVLHPTCVFAGSPEVLHAQELEASNCDGSRGMAACWESHSDLADLLVCARPPKPCHDKDKMSSKHQLLSFVSLLETNKPYLVNCVRIPALQSLLLFSRSLDTNGDCSRLVADGWLELQLADSESAIRLLAASLRLRARWESALDRQLAHQAQQQLEEEEEDTPVSPKEVATLSKELLQFTASKIPYSLRRLTGLEVQNMYVGPQTIPATPHLPGLFGSSTLSPHPTKGGYAVTDFLTYNCLTNDTDLYSDCLRTFWTCPHCGLHAPLTPLERIAHENTCPQAPQDGPPGAEEAALETLQKTSVLQRPYHCEACGKDFLFTPTEVLRHRKQHV

SEQ ID NO: 739569 - protein, 114 aa, Homo sapiens; identical to SEQ ID NO: 739563

SEQ ID NO: 739570 - protein, 289 aa, Homo sapiens
MVVVTGREPDSRRQDGAMSSSDAEDDFLEPATPTATQAGHALPLLPQEFPEVVPLNIGGAHFTTRLSTLRCYEDTMLAAMFSGRHYIPTDSEGRYFIDRDGTHFGDVLNFLRSGDLPPRERVRAVYKEAQYYAIGPLLEQLENMQPLKGEKVRQAFLGLMPYYKDHLERIVEIARLRAVQRKARFAKLKVCVFKEEMPITPYECPLLNSLRFERSESDGQLFEHHCEVDVSFGPWEAVADVYDLLHCLVTDLSAQGLTVDHQCIGVCDKHLVNHYYCKRPIYEFKITWW

SEQ ID NO: 739571 - protein, 104 aa, Homo sapiens
GVAPIRPQGLKMEQPQLSFPVACLRALVISFQFPEVVPLNIGGAHFTTRLSTLRCYEDTMLAAMFSGRHYIPTDSEGRYFIDRDGTHFGYVSPSTINFVVLAGD

SEQ ID NO: 739572 - protein, 289 aa, Homo sapiens; identical to SEQ ID NO: 739570

SEQ ID NO: 739573 - protein, 141 aa, Homo sapiens
SQHQHCPCLNGSFKSAEVLFYCLFIHVCSGYSGYNPTLISRKDLVSQLLGVLTVDSFQMSALQGIVSASESHFPRGYVLPGMAHVQSRQLWMAILTQELPRLTLILGLQVASLPTLPNPAFFPSLPQVLVDAQLCAQLFSN

SEQ ID NO: 739574 - protein, 289 aa, Homo sapiens
MWRSCLRLRDGGRRLLNRPAGGPSASMSPGPTIPSPARAYAPPTERKRFYQNVSITQGEGGFEINLDHRKLKTPQAKLFTVPSEALAIAVATEWDSQQDTIKYYTMHLTTLCNTSLDNPTQRNKDQLIRAAVKFLDTDTICYRVEEPETLVELQRNEWDPIIEWAEKRYGVEISSSTSIMGPSIPAKTREVLVSHLASYNTWALQGIEFVAAQLKSMVLTLGLIDLRLTVEQAVLLSRLEEEYQIQKWGNIEWAHDYELQELRARTAAGTLFIHLCSESTTVKHKLLKE

SEQ ID NO: 739575 - protein, 118 aa, Homo sapiens
MWRSCLRLRDGGRRLLNRPAGGPSASMSPGPTIPSPARAYAPPTERKRFYQNVSITQGEGGFEINLDHRKLKTPQAKLFTVPSEALAIAVATEWDSQQDTIKYYTMHLVTSSQCEPGP

SEQ ID NO: 739576 - protein, 118 aa, Homo sapiens; identical to SEQ ID NO: 739575

SEQ ID NO: 739577 - protein, 225 aa, Homo sapiens
MQTPLVEGCAVVLSAMCQMWCPQESRAFASAPQAVTGWFLPLIQTTLCNTSLDNPTQRNKDQLIRAAVKFLDTDTICYRVEEPETLVELQRNEWDPIIEWAEKRYGVEISSSTSIMGPSIPAKTREVLVSHLASYNTWALQGIEFVAAQLKSMVLTLGLIDLRLTVEQAVLLSRLEEEYQIQKWGNIEWAHDYELQELRARTAAGTLFIHLCSESTTVKHKLLKE

SEQ ID NO: 739578 - protein, 123 aa, Homo sapiens
VNGWEHFSSSAGFMVRLSFLLFVRYISVRDSELALSAPIQVAKYRNGHLIPLNKSLRVFHLIFQGGFEINLDHRKLKTPQAKLFTVPSEALAIAVATEWDSQQDTIKYYTMHLVTSSQCEPGP

SEQ ID NO: 739579 - protein, 247 aa, Homo sapiens
MWRSCLRLRDGGRRLLNRPAGGPSASMSPGPTIPSPARAYAPPTERKRFYQNVSITQGEDHIVQHIIGQPNPEKQGSADPGSREVSGHRHHLLTGWEEPETLVGISKELSGIQFIRMGLRKGIEFVAAQLKSMVLTLGLIDLRLTVEQAVLLSRLEEEYQGGFPCQLEKFIQPARMAWDGLTLSIKRVHQELILVTSSSSRIVNLQEVDVVRCPDSINNRIFIDKKLVSEKNPMRKCVSLYREHKGS

SEQ ID NO: 739580 - protein, 455 aa, Homo sapiens
MWRSCLRLRDGGRRLLNRPAGGPSASMSPGPTIPSPARAYAPPTERKRFYQNVSITQGEGGFEINLDHRKLKTPQAKLFTVPSEALAIAVATEWDSQQDTIKYYTMHLTTLCNTSLDNPTQRNKDQLIRAAVKFLDTDTICYRVEEPETLVELQRNEWDPIIEWAEKRYGVEISSSTSIMGPSIPAKTREVLVSHLASYNTWALQGIEFVAAQLKSMVLTLGLIDLRPEQVEKQVHLNMRTSTDLDTQERNHRIHRQDSGQNTYDDASTYMTINEKTIAINEAMAGSTQQDRHRQGPDPFTNTSPKYIPSDIPGEKTTQTRDQKPTTGHRPWKHGKCRGPREPKKPTKQSNPDKMKGATRDNTTTRECPHGEDRSKRERTHKRDRLSEENRRDTHKEESRRETQTGTPRIEGIRRPRKENVTRTRRENDNREAEQYEKTEMRKEGNKTQKPKTLN

SEQ ID NO: 739581 - protein, 478 aa, Homo sapiens
AQEARGGDGAPFRVSHLPRPSGAMWRSCLRLRDGGRRLLNRPAGGPSASMSPGPTIPSPARAYAPPTERKRFYQNVSITQGEGGFEINLDHRKLKTPQAKLFTVPSEALAIAVATEWDSQQDTIKYYTMHLTTLCNTSLDNPTQRNKDQLIRAAVKFLDTDTICYRVEEPETLVELQRNEWDPIIEWAEKRYGVEISSSTSIMGPSIPAKTREVLVSHLASYNTWALQGIEFVAAQLKSMVLTLGLIDLRPEQVEKQVHLNMRTSTDLDTQERNHRIHRQDSGQNTYDDASTYMTINEDHRHNEAMAGSTQQDRHRQGPDPFTNTSPKYIPSDIPGEKTTQTRDQKPTTGHRPWKHGKCRGPREPKKPTKQSNPDKMKGATRDNTTTRECPHGEDRSKRERTHKRDRLSEENRRDTHKEESRRETQTGTPRIEGIRRPRKENVTRTRRENDNREAEQYEKTEMRKEGNKTQKPKTLNR

SEQ ID NO: 739582 - protein, 106 aa, Homo sapiens [sequence omitted]

SEQ ID NO: 739583 - protein, 362 aa, Homo sapiens
MHGGRIYPVLGTYWDNCNRCTCQENRQWQCDQEPCLVDPDMIKAINQGNYGWQAGNHSAFWGMTLDEGIRYRLGTIRPSSSVMNMHEIYTVLNPGEVLPTAFEASEKWPNLIHEPLDQGNCAGSWAFSTAAVASDRVSIHSLGHMTPVLSPQNLLSCDTHQQQGCRGGRLDGAWWFLRRRGVVSDHCYPFSGRERDEAGPAPPCMMHSRAMGRGKRQATAHCPNSYVNNNDIYQVTPVYRLGSNDKEIMKELMENGPVQALMEVHEDFFLYKGGIYSHTPVSLGRPERYRRHGTHSVKITGWGEETLPDGRTLKYWTAANSWGPAWGERGHFRIVRGVNECDIESFVLGVWGRVGMEDMGHH

SEQ ID NO: 739584 - protein, 467 aa, Homo sapiens
MWRCPLGLLLLLPLAGHLALGAQQGRGRRELAPGLHLRGIRDAGGRYCQEQDLCCRGRADDCALPYLGAICYCDLFCNRTVSDCCPDFWDFCLGVPPPFPPIQGCMHGGRIYPVLGTYWDNCNRCTCQENRQWQCDQEPCLVDPDMIKAINQGNYGWQAGNHSAFWGMTLDEGIRYRLGTIRPSSSVMNMHEIYTVLNPGEVLPTAFEASEKWPNLIHEPLDQGNCAGSWAFSTAAVASDRVSIHSLGHMTPVLSPQNLLSCDTHQQQGCRGGRLDGAWWFLRRRGVVSDHCYPFSGRERDEAGPAPPCMMHSRAMGRGKRQATAHCPNSYVNNNDIYQVTPVYRLGSNDKEIMKELMENGPVQALMEVHEDFFLYKGGIYSHTPVSLGRPERYRRHGTHSVKITGWGEETLPDGRTLKYWTAANSWGPAWGERGHFRIVRGVNECDIESFVLGVWGRVGMEDMGHH

SEQ ID NO: 739585 - protein, 322 aa, Homo sapiens
MIKAINQGNYGWQAGNHSAFWGMTLDEGIRYRLGTIRPSSSVMNMHEIYTVLNPGEVLPTAFEASEKWPNLIHEPLDQGNCAGSWAFSTAAVASDRVSIHSLGHMTPVLSPQNLLSCDTHQQQGCRGGRLDGAWWFLRRRGVVSDHCYPFSGRERDEAGPAPPCMMHSRAMGRGKRQATAHCPNSYVNNNDIYQVTPVYRLGSNDKEIMKELMENGPVQALMEVHEDFFLYKGGIYSHTPVSLGRPERYRRHGTHSVKITGWGEETLPDGRTLKYWTAANSWGPAWGERGHFRIVRGVNECDIESFVLGVWGRVGMEDMGHH

SEQ ID NO: 739586 - protein, 369 aa, Homo sapiens [sequence omitted]

SEQ ID NO: 739587 - protein, 467 aa, Homo sapiens; identical to SEQ ID NO: 739584

SEQ ID NO: 739588 - protein, 467 aa, Homo sapiens; identical to SEQ ID NO: 739584

SEQ ID NO: 739589 - protein, 493 aa, Homo sapiens
GLYARKFGMRGPAWAQPTPSPGPGATMWRCPLGLLLLLPLAGHLALGAQQGRGRRELAPGLHLRGIRDAGGRYCQEQDLCCRGRADDCALPYLGAICYCDLFCNRTVSDCCPDFWDFCLGVPPPFPPIQGCMHGGRIYPVLGTYWDNCNRCTCQENRQWQCDQEPCLVDPDMIKAINQGNYGWQAGNHSAFWGMTLDEGIRYRLGTIRPSSSVMNMHEIYTVLNPGEVLPTAFEASEKWPNLIHEPLDQGNCAGSWAFSTAAVASDRVSIHSLGHMTPVLSPQNLLSCDTHQQQGCRGGRLDGAWWFLRRRGVVSDHCYPFSGRERDEAGPAPPCMMHSRAMGRGKRQATAHCPNSYVNNNDIYQVTPVYRLGSNDKEIMKELMENGPVQALMEVHEDFFLYKGGIYSHTPVSLGRPERYRRHGTHSVKITGWGEETLPDGRTLKYWTAANSWGPAWGERGHFRIVRGVNECDIESFVLGVWGRVGMEDMGHH

SEQ ID NO: 739590 - protein, 362 aa, Homo sapiens; identical to SEQ ID NO: 739583

SEQ ID NO: 739591 - protein, 322 aa, Homo sapiens; identical to SEQ ID NO: 739585

SEQ ID NO: 739592 - protein, 467 aa, Homo sapiens; identical to SEQ ID NO: 739584

SEQ ID NO: 739593 - protein, 290 aa, Homo sapiens
MPGGSRHDQSHQPGQLWTVLNPGEVLPTAFEASEKWPNLIHEPLDQGNCAGSWAFSTAAVASDRVSIHSLGHMTPVLSPQNLLSCDTHQQQGCRGGRLDGAWWFLRRRGVVSDHCYPFSGRERDEAGPAPPCMMHSRAMGRGKRQATAHCPNSYVNNNDIYQVTPVYRLGSNDKEIMKELMENGPVQALMEVHEDFFLYKGGIYSHTPVSLGRPERYRRHGTHSVKITGWGEETLPDGRTLKYWTAANSWGPAWGERGHFRIVRGVNECDIESFVLGVWGRVGMEDMGHH

SEQ ID NO: 739594 - protein, 1036 aa, Homo sapiens
MSAQSLLHSVFSCSSPASSSAASAKGFSKRKLRQTRSLDPALIGGCGSDEAGAEGSARGATAGRLYSPSLPAESLGPRLASSSRGPPPRATRLPPPGPLCSSFSTPSTPQEKSPSGSFHFDYEVPLGRGGLKKSMAWDLPSVLAGPASSRSASSILCSSGGGPNGIFASPRRWLQQRKFQSPPDSRGHPYVVWKSELELYDLQILGTKPPMNSDTHRNFDPTATLRNQGDFTWNSMSGRSVRLRSVPIQSLSELERARLQEVPFYQLQQDCDLSCQITIPKDGQKRKKSLRKKLDSLGKEKNKDKEFIPQAFGMPLSQVIANDRAYKLKQDLQRDEQKDASDFVASLLPFGNKRQNKELSSSNSSLSSTSETPNESTSPNTPEPAPRARRRGAMSVDSITDLDDNQSRLLEALQLSLPAEAQSKKEKARDKKLSLNPIYRQVPRLVDSCCQHLEKHGLQTVGIFRVGSSKKRVRQLREEFDRGIDVSLEEEHSVHDVAALLKEFLRDMPDPLLTRELYTAFINTLLLEPEEQLGTLQLLIYLLPPCNCDTLHRLLQFLSIVARHADDNISKDGQEVTGNKMTSLNLATIFGPNLLHKQKSSDKEFSVQSSARAEESTAIIAVVQKMIENYEALFMVPPDLQNEVLISLLETDPDVVDYLLRRKASQSSTSSVLPAAVQACPQYPASMFTALTWRDQQGSPDMLQSEVSFSVGGRHSSTDSNKASSGDISPYDNNSPVLSERSLLAMQEDAAPGGSEKLYRVPGQFMLVGHLSSSKSRESSPGPRLGKDLSEEPFDIWGTWHSTLKSGSKDPGMTGSSGDIFESSSLRAGPCSLSQGNLSPNWPRWQGSPAELDSDTQGARRTQAAAPATEGRAHPAVSRACSTPHVQVAGKAERPTARSEQYLTLSGAHDLSESELDVAGLQSRATPQCQRPHGSGRDDKRPPPPYPGPGKPAAAAAWIQGPPEGVETPTDQGGQAAEREQQVTQKKLSSANSLPAGEQDSPRLGDAGWLDWQRERWQIWELLSTDNPDALPETLV

SEQ ID NO: 739595 - protein, 974 aa, Homo sapiens
MSAQSLLHSVFSCSSPASSSAASAKGFSKRKLRQTRSLDPALIGGCGSDEAGAEGSARGATAGRLYSPSLPAESLGPRLASSSRGPPPRATRLPPPGPLCSSFSTPSTPQEKSPSGSFHFDYEVPLGRGGLKKSMAWDLPSVLAGPASSRSASSILCSSGGGPNGIFASPRRWLQQRKFQSPPDSRGHPYVVWKSEGDFTWNSMSGRSVRLRSVPIQSLSELERARLQEVPFYQLQQDCDLSCQITIPKDGQKRKKSLRKKLDSLGKEKNKDKEFIPQAFGMPLSQVIANDRAYKLKQDLQRDEQKDASDFVASLLPFGNKRQNKELSSSNSSLSSTSETPNESTSPNTPEPAPRARRRGAMSVDSITDLDDNQSRLLEALQLSLPAEAQSKKEKARDKKLSLNPIYRQVPRLVDSCCQHLEKHGLQTVGIFRVGSSKKRVRQLREEFDRGIDVSLEEEHSVHDVAALLKEFLRDMPDPLLTRELYTAFINTLLLEPEEQLGTLQLLIYLLPPCNCDTLHRLLQFLSIVARHADDNISKDGQEVTGNKMTSLNLATIFGPNLLHKQKSSDKEFSVQSSARAEESTAIIAVVQKMIENYEALFMVPPDLQNEVLISLLETDPDVVDYLLRRKASQSSSPDMLQSEVSFSVGGRHSSTDSNKASSGDISPYDNNSPVLSERSLLAMQEDAAPGGSEKLYRVPGQFMLVGHLSSSKSRESSPGPRLGKDLSEEPFDIWGTWHSTLKSGSKDPGMTGSSGDIFESSSLRAGPCSLSQGNLSPNWPRWQGSPAELDSDTQGARRTQAAAPATEGRAHPAVSRACSTPHVQVAGKAERPTARSEQYLTLSGAHDLSESELDVAGLQSRATPQCQRPHGSGRDDKRPPPPYPGPGKPAAAAAWIQGPPEGVETPTDQGGQAAEREQQVTQKKLSSANSLPAGEQDSPRLGDAGWLDWQRERWQIWELLSTDNPDALPETLV

SEQ ID NO: 739596 - protein, 765 aa, Homo sapiens
MSAQSLLHSVFSCSSPASSSAASAKGFSKRKLRQTRSLDPALIGGCGSDEAGAEGSARGATAGRLYSPSLPAESLGPRLASSSRGPPPRATRLPPPGPLCSSFSTPSTPQEKSPSGSFHFDYEVPLGRGGLKKSMAWDLPSVLAGPASSRSASSILCSSGGGPNGIFASPRRWLQQRKFQSPPDSRGHPYVVWKSEGDFTWNSMSGRSVRLRSVPIQSLSELERARLQEVPFYQLQQDCDLSCQITIPKDGQKRKKSLRKKLDSLGKEKNKDKEFIPQAFGMPLSQVIANDRAYKLKQDLQRDEQKDASDFVASLLPFGNKRQNKELSSSNSSLSSTSETPNESTSPNTPEPAPRARRRGAMSVDSITDLDDNQSRLLEALQLSLPAEAQSKKEKARDKKLSLNPIYRQVPRLVDSCCQHLEKHGLQTVGIFRVGSSKKRVRQLREEFDRGIDVSLEEEHSVHDVAALLKEFLRDMPDPLLTRELYTAFINTLLLEPEEQLGTLQLLIYLLPPCNCDTLHRLLQFLSIVARHADDNISKDGQEVTGNKMTSLNLATIFGPNLLHKQKSSDKEFSVQSSARAEESTAIIAVVQKMIENYEALFMVPPDLQNEVLISLLETDPDVVDYLLRRKASQSSSPDMLQSEVSFSVGGRHSSTDSNKASSGDISPYDNNSPVLSERSLLAMQEDAAPGGSEKLYRVPGQFMLVGHLSSSKSRESSPGPRLGKGNWSLASRRWPKQATLLLLHVAWCGALRTFSSSLPYLMFL

SEQ ID NO: 739597 - protein, 227 aa, Homo sapiens
YASLTLLISTATGLQTVGIFRVGSSKKRVRQLREEFDRGIDVSLEEEHSVHDVAALLKEFLRDMPDPLLTRELYTAFINTLLLEPEEQLGTLQLLIYLLPPCNCDTLHRLLQFLSIVARHADDNISKDGQEVTGNKMTSLNLATIFGPNLLHKQKSSDKEFSVQSSARAEESTAIIAVVQKMIENYEALFMVGGPSVAGHHSKLPIGFLWRQDEILVDHPLGCSAAH

SEQ ID NO: 739598 - protein, 771 aa, Homo sapiens
MSGRSVRLRSVPIQSLSELERARLQEVPFYQLQQDCDLSCQITIPKDGQKRKKSLRKKLDSLGKEKNKDKEFIPQAFGMPLSQVIANDRAYKLKQDLQRDEQKDASDFVASLLPFGNKRQNKELSSSNSSLSSTSETPNESTSPNTPEPAPRARRRGAMSVDSITDLDDNQSRLLEALQLSLPAEAQSKKEKARDKKLSLNPIYRQVPRLVDSCCQHLEKHGLQTVGIFRVGSSKKRVRQLREEFDRGIDVSLEEEHSVHDVAALLKEFLRDMPDPLLTRELYTAFINTLLLEPEEQLGTLQLLIYLLPPCNCDTLHRLLQFLSIVARHADDNISKDGQEVTGNKMTSLNLATIFGPNLLHKQKSSDKEFSVQSSARAEESTAIIAVVQKMIENYEALFMVPPDLQNEVLISLLETDPDVVDYLLRRKASQSSSPDMLQSEVSFSVGGRHSSTDSNKASSGDISPYDNNSPVLSERSLLAMQEDAAPGGSEKLYRVPGQFMLVGHLSSSKSRESSPGPRLGKDLSEEPFDIWGTWHSTLKSGSKDPGMTGSSGDIFESSSLRAGPCSLSQGNLSPNWPRWQGSPAELDSDTQGARRTQAAAPATEGRAHPAVSRACSTPHVQVAGKAERPTARSEQYLTLSGAHDLSESELDVAGLQSRATPQCQRPHGSGRDDKRPPPPYPGPGKPAAAAAWIQGPPEGVETPTDQGGQAAEREQQVTQKKLSSANSLPAGEQDSPRLGDAGWLDWQRERWQIWELLSTDNPDALPETLV

SEQ ID NO: 739599 - protein, 797 aa, Homo sapiens
MSAQSLLHSVFSCSSPASSSAASAKGFSKRKLRQTRSLDPALIGGCGSDEAGAEGSARGATAGRLYSPSLPAESLGPRLASSSRGPPPRATRLPPPGPLCSSFSTPSTPQEKSPSGSFHFDYEVPLGRGGLKKSMAWDLPSVLAGPASSRSASSILCSSGGGPNGIFASPRRWLQQRKFQSPPDSRGHPYVVWKSELELYDLQILGTKPPMNSDTHRNFDPTATLRNQGDFTWNSMSGRSVRLRSVPIQSLSELERARLQEVPFYQLQQDCDLSCQITIPKDGQKRKKSLRKKLDSLGKEKNKDKEFIPQAFGMPLSQVIANDRAYKLKQDLQRDEQKDASDFVASLLPFGNKRQNKELSSSNSSLSSTSETPNESTSPNTPEPAPRARRRGAMSVDSITDLDDNQSRLLEALQLSLPAEAQSKKEKARDKKLSLNPIYRQVPRLVDSCCQHLEKHGLQTVGIFRVGSSKKRVRQLREEFDRGIDVSLEEEHSVHDVAALLKEFLRDMPDPLLTRELYTAFINTLLLEPEEQLGTLQLLIYLLPPCNCDTLHRLLQFLSIVARHADDNISKDGQEVTGNKMTSLNLATIFGPNLLHKQKSSDKEFSVQSSARAEESTAIIAVVQKMIENYEALFMVPPDLQNEVLISLLETDPDVVDYLLRRKASQSSSPDMLQSEVSFSVGGRHSSTDSNKASSGDISPYDNNSPVLSERSLLAMQEDAAPGGSEKLYRVPGQFMLVGHLSSSKSRESSPGPRLGKGNWSLASRRWPKQATLLLLHVAWCGALRTFSSSLPYLMFL

SEQ ID NO: 739600 - protein, 138 aa, Homo sapiens
SLWQKPVGTSQQQPLGLWTREFPLEGHLLTRNETFTEATPLIPEIGMLSQMMSEEHSNGDGSAQKSSMTQWKWFIEDHATQGMQRISFPLGLTLELCEKLLDSTVPNKQLSTDQTRASWFMDGNSKAQNARKNCSVSQ

SEQ ID NO: 739601 - protein, 718 aa, Homo sapiens
DAWVAIVQEKISGLSSFGIELGFFVEEYAGSKGRFPPTKRREKKSLYIATIEKGHSLVNSLIETGRIDSLGLVVVDELHMIGEGSRGATLEMTLAKILYTSKTTQIIGMSATLNNVKTYKSFFKQNIIPVNLDQYVPKVELKEYLKINDTIYEVDSKAENGMTFSRLLNYKYSDTLKKMDPDHLVALVTEVIPNYSCLVFCPSKKNCENVAEMICKFLSKEYLKHKEKEKCEVIKNLKNIGNGNLCPVLKRTIPFGVAYHHSGLTSDERKLLEEAYSTGVLCLFTCTSTLAAGVNLPARRVILRAPYVAKEFLKRNQYKQMIGRAGRAGIDTIGESILILQEKDKQQVLELITKPLENCYSHLVQEFTKGIQTLFLSLIGLKIATNLDDIYHFMNGTFFGVQQKVLLKEKSLWEITVESLRYLTEKGLLQKDTIYKSEEEVQYNFHITKLGRASFKGTIDLAYCDILYRDLKKGLEGLVLESLLHLIYLTTPYDLVSQCNPDWMIYFRQFSQLSPAEQNVAAILGVSESFIGKKASGQAIGKKVDKNVVNRLYLSFVLYTLLKETNIWTVSEKFNMPRGYIQNLLTGTASFSSCVLHFCEELEEFWVYRALLVELTKKLTYCVKAELIPLMEVTGVLEGRAKQLYSAGYKSLMHLANANPEVLVRTIDHLSRRQAKQIVSSAKMLLHEKAEALQEEVEELLRLPSDFPGAVASSTDKA

SEQ ID NO: 739602 - protein, 718 aa, Homo sapiens; identical to SEQ ID NO: 739601

SEQ ID NO: 739603 - protein, 215 aa, Homo sapiens
MIYFRQFSQLSPAEQNVAAILGVSESFIGKKASGQAIGKKVDKNVVNRLYLSFVLYTLLKETNIWTVSEKFNMPRGYIQNLLTGTASFSSCVLHFCEELEEFWVYRALLVELTKKLTYCVKAELIPLMEVTGVLEGRAKQLYSAGYKSLMHLANANPEVLVRTIDHLSRRQAKQIVSSAKMLLHEKAEALQEEVEELLRLPSDFPGAVASSTDKA

SEQ ID NO: 739604 - protein, 512 aa, Homo sapiens
DAWVAIVQEKISGLSSFGIELGFFVEEYAGSKGRFPPTKRREKKSLYIATIEKGHSLVNSLIETGRIDSLGLVVVDELHMIGEGSRGATLEMTLAKILYTSKTTQIIGMSATLNNVKTYKSFFKQNIIPVNLDQYVPKVELKEYLKINDTIYEVDSKAENGMTFSRLLNYKYSDTLKKMDPDHLVALVTEVIPNYSCLVFCPSKKNCENVAEMICKFLSKEYLKHKEKEKCEVIKNLKNIGNGNLCPVLKRTIPFGVAYHHSGLTSDERKLLEEAYSTGVLCLFTCTSTLAAGVNLPARRVILRAPYVAKEFLKRNQYKQMIGRAGRAGIDTIGESILILQEKDKQQVLELITKPLENCYSHLVQEFTKGIQTLFLSLIGLKIATNLDDIYHFMNGTFFGVQQKVLLKEKSLWEITVESLRYLTEKGLLQKDTIYKSEEEVQYNFHITKLGRASFKGTIDLAYCDILYRDLKKGLEGLVLESLLHLIYLTTPYDLVSQCNPDWMIYFRQVRI

SEQ ID NO: 739605 - protein, 181 aa, Homo sapiens
AKKKRKGKRLVSWVRFMSSDAELWSFLCSLKHQFSPHILRSKDVYGYSSCRALVPDPPGPPTARGQARRPVPRAAARRRRRGARAAAARRRKPRPPPPPPPPPEESCPAKPVAPGPCFGGRTLEEIWRAATPTLTTFPTIRVGSDVWGERSLAAARRRARQVLRVNLEPMVRLRRFPVPRA

SEQ ID NO: 739606 - protein, 186 aa, Homo sapiens
MRRSMKRRRRRRPVAPATAARGGDFRAEDGAGLEAREEKVVYSRSQLSLADSTKALGDAFKLFMPRSTEFMSSDAELWSFLCSLKHQFSPHILRSKDVYGYSSCRALVPDPPGPKPVAPGPCFGGRTLEEIWRAATPTLTTFPTIRVGSDVWGERSLAAARRRARQVLRVNLEPMVRLRRFPVPRA

SEQ ID NO: 739607 - protein, 235 aa, Homo sapiens
MRRSMKRRRRRRPVAPATAARGGDFRAEDGAGLEAREEKVVYSRSQLSLADSTKALGDAFKLFMPRSTEFMSSDAELWSFLCSLKHQFSPHILRSKDVYGYSSCRALVPDPPGPPTARGQARRPVPRAAARRRRRGARAAAARRRKPRPPPPPPPPPEESCPAKPVAPGPCFGGRTLEEIWRAATPTLTTFPTIRVGSDVWGERSLAAARRRARQVLRVNLEPMVRLRRFPVPRA

SEQ ID NO: 739608 - protein, 236 aa, Homo sapiens
WALSGYVSRACWVRSNFMKRRRRRRPVAPATAARGGDFRAEDGAGLEAREEKVVYSRSQLSLADSTKALGDAFKLFMPRSTEFMSSDAELWSFLCSLKHQFSPHILRSKDVYGYSPTARGQARRPVPRAAARRRRRGARAAAARRRKPRPPPPPPPPPEESCPAKPVAPGPCFGGRTLEEIWRAATPTLTTFPTIRVGSDVWGERSLAAARRRARQVLRVNLEPMVRLRRFPVPRA

SEQ ID NO: 739609 - protein, 151 aa, Homo sapiens [sequence omitted]

SEQ ID NO: 739610 - protein, 643 aa, Homo sapiens
MLLGASLVGVLLFSKLVLKLPWTQVGFSLLFLYLGSGGWRFIRVFIKTIRRDIFGGLVLLKVKAKVRQCLQERRTVPILFASTVRRHPDKTALIFEGTDTHWTFRQLDEYSSSVANFLQARGLASGDVAAIFMENRNEFVGLWLGMAKLGVEAALINTNLRRDALLHCLTTSRARALVFGSEMASAICEVHASLDPSLSLFCSGSWEPGAVPPSTEHLDPLLKDAPKHLPSCPDKGFTDKLFYIYTSGTTGLPKAAIVVHSRYYRMAALVYYGFRMRPNDIVYDCLPLYHSAGNIVGIGQCLLHGMTVVIRKKFSASRFWDDCIKYNCTIVQYIGELCRYLLNQPPREAENQHQVRMALGNGLRQSIWTNFSSRFHIPQVAEFYGATECNCSLGNFDSQVGACGFNSRILSFVYPIRLVRVNEDTMELIRGPDGVCIPCQPGEPGQLVGRIIQKDPLRRFDGYLNQGANNKKIAKDVFKKGDQAYLTGDVLVMDELGYLYFRDRTGDTFRWKGENVSTTEVEGTLSRLLDMADVAVYGVEVPGTEGRAGMAAVASPTGNCDLERFAQVLEKELPLYARPIFLRLLPELHKTGTYKFQKTELRKEGFDPAIVKDPLFYLDAQKGRYVPLDQEAYSRIQAGEEKL

SEQ ID NO: 739611 - protein, 643 aa, Homo sapiens; identical to SEQ ID NO: 739610

SEQ ID NO: 739612 - protein, 616 aa, Homo sapiens
MLLGASLVGVLLFSKLVLKLPWTQVGFSLLFLYLGSGGWRFIRVFIKTIRRDIFGGLVLLKVKAKVRQCLQERRTVPILFASTVRRHPDKTALIFEGTDTHWTFRQLDEYSSSVANFLQARGLASGDVAAIFMENRNEFVGLWLGMAKLGVEAALINTNLRRDALLHCLTTSRARALVFGSEMASAICEVHASLDPSLSLFCSGSWEPGAVPPSTEHLDPLLKDAPKHLPSCPDKGFTDKLFYIYTSGTTGLPKAAIVVHSRYYRMAALVYYGFRMRPNDIVYDCLPLYHSAGNIVGIGQCLLHGMTVVIRKKFSASRFWDDCIKYNCTIVQYIGELCRYLLNQPPREAENQHQVRMALGNGLRQSIWTNFSSRFHIPQVAEFYGATECNCSLGNFDSQVGACGFNSRILSFVYPIRLVRVNEDTMELIRGPDGVCIPCQPGEPGQLVGRIIQKDPLRRFDGYLNQGANNKKIAKDVFKKGDQAYLTGDVLVMDELGYLYFRDRTGDTFRWKGENVSTTEVEGTLSRLLDMADVAVYGVEVPGTEGRAGMAAVASPTGNCDLERFAQVLEKELPLYARPIFLRLLPELHKTDAQKGRYVPLDQEAYSRIQAGEEKL

SEQ ID NO: 739613 - protein, 107 aa, Homo sapiens
MPRRAATSRWTKRPTAASRQARRSCDSPHPSEGRRMLDPEPQVPPQSGPGQGQTKASRAWHLHPEVLPLHPKLPSDSLPSQPFQRLSVKVSCPSSVFWAGQALWFPG

SEQ ID NO: 739614 - protein, 148 aa, Homo sapiens
GVSHCARPRFGGHHSVAALPHLQQPQPARREPSLWQRQQEKERKRNPGLGSRQSCPQSLCGAAKAPLLSQHPWSPFQMKPGELSTATNTPGKRRGQSPWLPQRAQPDPFIQGPQAMFVRFCFFPFEKKGCWFGFQFYCRHTERPLSGS

SEQ ID NO: 739615 - protein, 76 aa, Homo sapiens
DGAGLLRTRSTVSAFFASTVLTRNRIPTATASRKRLQGGRDLWRDAPFPASRPAELGFSVSIRWYTKCLPPTPSCP

SEQ ID NO: 739616 - protein, 73 aa, Homo sapiens
ATPRTKRLAKKNAGEVQHPRTERELIPEGGFTGLRVLGWGKQYWREKTEGMARQRKPRGQKGRDEEPSYYKRD

SEQ ID NO: 739617 - protein, 105 aa, Homo sapiens
MSVGLCFLIWQMGIMLLPRECWKVKDSKKYKSCRESVLPAQACTGESPVLSGVRVLGIHLSCVLSHLQAWDSWDNQKVSYLGAPCFGKRLSPTTWLTFWVGPLAF

SEQ ID NO: 739618 - protein, 126 aa, Homo sapiens
NEGEWKLRVHPTAQAVPDLSLTASARATYQVLFLDLCPRVSLGHLGCGLGTIHSLIKQEPHPQGSLPRLPHTLAPGEGSVAEGLIGARHCSRPSGIWHLSKFAKRRVQWFTPVIPAFWEAKVGGLL

SEQ ID NO: 739619 - protein, 171 aa, Homo sapiens
WNCIQRRQRRLRRPREGIPLGILPHTEEYVFGSTPNHIMAVFNQKSVSDMIKEFRKNWRALCNSERTTLCGADSMLLALQLSMAENNKQHSGEFTVSLSDVLLTWKYLLHEKLNLPVENMDVTDHYEDVRKIYDDFLKNSNMLDLIDVYQKCRALTSNCENYNTVSPVSIF

SEQ ID NO: 739620 - protein, 617 aa, Homo sapiens
WNCIQRRQRRLRRPREGIPLGILPHTEEYVFGSTPNHIMAVFNQKSVSDMIKEFRKNWRALCNSERTTLCGADSMLLALQLSMAENNKQHSGEFTVSLSDVLLTWKYLLHEKLNLPVENMDVTDHYEDVRKIYDDFLKNSNMLDLIDVYQKCRALTSNCENYNTVSPSQLLDFLSGKQYAVGDETDLSIPTSPTSKYNRDNEKVQLLARKIIFSYLNLLVNSKNDLAVAYILNIPDRGLGREAFTDLKHAAREKQMSIFLVATSFIRTIELGGKGYAPPPSDPLRTHVKGLSNFINFIDKLDEILGEIPNPSIAGGQILSVIKMQLIKGQNSRDPFCKAIEEVAQDLDLRIKNIINSQEGVVALSTTDISPARPKSHAINHGTAYCGRDTVKALLVLLDEEAANAPTKNKAELLYDEENTIHHHGTSILTLFRSPTQVNNSIKPLRERICVSMQEKKIKMKQTLIRSQFACTYKDDYMISKDNWNNVNLASKPLCVLYMENDLSEGVNPSVGRSTIGTSFGNVHLDRSKNEKVSRKSTSQTGNKSSKRKQVDLDGENILCDNRNEPPQHKNAKIPKKSNDSQNRLYGKLAKVAKSNKCTAKDKLISGQAKLTQFFRL

SEQ ID NO: 739621 - protein, 176 aa, Homo sapiens
MELIMAVFNQKSVSDMIKEFRKNWRALCNSERTTLCGADSMLLALQLSMAENNKQHSGEFTVSLSDVLLTWKYLLHEKLNLPVENMDVTDHYEDVRKIYDDFLKNSNMLDLIDVYQKCRALTSNCENYNTVSPSQLLDFLSGKQYAVGDETDLSIPTSPTSKYNRDNEKALPVLKR

SEQ ID NO: 739622 - protein, 224 aa, Homo sapiens
MAKPRLYKKIQKLAGCGGSVPVVSATWETEHSGEFTVSLSDVLLTWKYLLHEKLNLPVENMDVTDHYEDVRKIYDDFLKNSNMLDLIDVYQKCRALTSNCENYNTVSPSQLLDFLSGKQYAVGDETDLSIPTSPTSKYNRDNEKVQLLARKIIFSYLNLLVNSKNDLAVAYILNIPDRGLGREAFTDLKHAAREKQMSIFLVWLCDMFKIKTPCTVDPCILICL

SEQ ID NO: 739623 - protein, 280 aa, Homo sapiens
WNCIQRRQRRLRRPREGIPLGILPHTEEYVFGSTPNHIMAVFNQKSVSDMIKEFRKNWRALCNSERTTLCGADSMLLALQLSMAENNKQHSGEFTVSLSDVLLTWKYLLHEKLNLPVENMDVTDHYEDVRKIYDDFLKNSNMLDLIDVYQKCRALTSNCENYNTVSPGSTIQPPSERGSLLLSRPDLLAPGEDPPVSASLTLERQKGESLLAWSWSLNFRLPGIPITVQKKRRDLKKLAAVMRQVRQWESHPLQNIEEATWHQLTVQAEKKEPGTQGASV

SEQ ID NO: 739624 - protein, 461 aa, Homo sapiens
WNCIQRRQRRLRRPREGIPLGILPHTEEYVFGSTPNHIMAVFNQKSVSDMIKEFRKNWRALCNSERTTLCGADSMLLALQLSMAENNKQHSGEFTVSLSDVLLTWKYLLHEKLNLPVENMDVTDHYEDVRKIYDDFLKNSNMLDLIDVYQKCRALTSNCENYNTVSPSQLLDFLSGKQYAVGDETDLSIPTSPTSKYNRDNEKVQLLARKIIFSYLNLLVNSKNDLAVAYILNIPDRGLGREAFTDLKHAAREKQMSIFLVATSFIRTIELGGKGYAPPPSDPLRTHVKGLSNFINFIDKLDEILGEIPNPSIAGGQILSVIKMQLIKGQNSRDPFCKAIEEVAQDLDLRIKNIINSQEGVVALSTTDISPARPKSHAINHGTAYCGRDTVKALLVLLDEEAANAPTKNKAELLYDEENTIHHHGTSILTLFRSPTQVNNSIKPLRERICVSMQEKKIKRV

SEQ ID NO: 739625 - protein, 456 aa, Homo sapiens
WNCIQRRQRRLRRPREGIPLGILPHTEEYVFGSTPNHIMAVFNQKSVSDMIKEFRKNWRALCNSERTTLCGADSMLLALQLSMAENNKQHSGEFTVSLSDVLLTWKYLLHEKLNLPVENMDVTDHYEDVRKIYDDFLKNSNMLDLIDVYQKCRALTSNCENYNTVSPSQLLDFLSGKQYAVGDETDLSIPTSPTSKYNRDNEKVQLLARKIIFSYLNLLVNSKNDLAVAYILNIPDRGLGREAFTDLKHAAREKQMSIFLVATSFIRTIELGGKGYAPPPSDPLRTHVKGLSNFINFIDKLDEILGEIPNPSIAGGQILSVIKMQLIKGQNSRDPFCKAIEEVAQDLDLRIKNIINSQEGVVALSTTDISPARPKSHAINHGTAYCGRDTVKALLVLLDEEAANAPTKNKAELLYDEENTIHHHGTSILTLFRSPTQVNRRSMMMDCVFRSRSRRP

SEQ ID NO: 739626 - protein, 210 aa, Homo sapiens
WNCIQRRQRRLRRPREGIPLGILPHTEEYVFGSTPNHIMAVFNQKSVSDMIKEFRKNWRALCNSERTTLCGADSMLLALQLSMAENNKQHSGEFTVSLSDVLLTWKYLLHEKLNLPVENMDVTDHYEDVRKIYDDFLKNSNMLDLIDVYQKCRALTSNCENYNTVSPSQLLDFLSGKQYAVGDETDLSIPTSPTSKYNRDNEKALPVLKR

SEQ ID NO: 739627 - protein, 653 aa, Homo sapiens
WNCIQRRQRRLRRPREGIPLGILPHTEEYVFGSTPNHIMAVFNQKSVSDMIKEFRKNWRALCNSERTTLCGADSMLLALQLSMAENNKQRDGVSPCKPGWSRSPDFVIHPPSASQSAKITGVNIHHSGEFTVSLSDVLLTWKYLLHEKLNLPVENMDVTDHYEDVRKIYDDFLKNSNMLDLIDVYQKCRALTSNCENYNTVSPSQLLDFLSGKQYAVGDETDLSIPTSPTSKYNRDNEKVQLLARKIIFSYLNLLVNSKNDLAVAYILNIPDRGLGREAFTDLKHAAREKQMSIFLVATSFIRTIELGGKGYAPPPSDPLRTHVKGLSNFINFIDKLDEILGEIPNPSIAGGQILSVIKMQLIKGQNSRDPFCKAIEEVAQDLDLRIKNIINSQEGVVALSTTDISPARPKSHAINHGTAYCGRDTVKALLVLLDEEAANAPTKNKAELLYDEENTIHHHGTSILTLFRSPTQVNNSIKPLRERICVSMQEKKIKMKQTLIRSQFACTYKDDYMISKDNWNNVNLASKPLCVLYMENDLSEGVNPSVGRSTIGTSFGNVHLDRSKNEKVSRKSTSQTGNKSSKRKQVDLDGENILCDNRNEPPQHKNAKIPKKSNDSQNRLYGKLAKVAKSNKCTAKDKLISGQAKLTQFFRL

SEQ ID NO: 739628 - protein, 552 aa, Homo sapiens
SAQARRGGRGAGLLEAAAVASAAAPAVFSGLRRVKSGLGPRLEGWVGPERRFGGPRRTREGENLRSWVAIRGLLRSYLQAAVTALSLEWKLLEGGPAAMSTFRQEDVEDHYEMGEELGSGQFAIVRKCRQKGTGKEYAAKFIKKRRLSSSRRGVSREEIEREVNILREIRHPNIITLHDIFENKTDVVLILELVSGGELFDFLAEKESLTEDEATQFLKQILDGVHYLHSKRIAHFDLKPENIMLLDKNVPNPRIKLIDFGIAHKIEAGNEFKNIFGTPEFVAPEIVNYEPLGLEADMWSIGVITYILLSGASPFLGETKQETLTNISAVNYDFDEEYFSNTSELAKDFIRRLLVKDPKRRMTIAQSLEHSWIKAIRRRNVRGEDSGRKPERRRLKTTRLKEYTIKSHSSLPPNNSYADFERFSKVLEEAAAAEEGLRELQRSRRLCHEDVEALAAIYEEKEAWYREESDSLGQDLRRLRQELLKTEALKRQAQEEAKGALLGTSGLKRRFSRLENRYEALAKQVASEMRFVQDLVRALEQEKLQGVECGLR

SEQ ID NO: 739629 - protein, 510 aa, Homo sapiens
RLGVESAEGVPAAVWRRPYSPGCGGVAIRGLLRSYLQAAVTALSLEWKLLEGGPAAMSTFRQEDVEDHYEMGEELGSGQFAIVRKCRQKGTGKEYAAKFIKKRRLSSSRRGVSREEIEREVNILREIRHPNIITLHDIFENKTDVVLILELVSGGELFDFLAEKESLTEDEATQFLKQILDGVHYLHSKRIAHFDLKPENIMLLDKNVPNPRIKLIDFGIAHKIEAGNEFKNIFGTPEFVAPEIVNYEPLGLEADMWSIGVITYILLSGASPFLGETKQETLTNISAVNYDFDEEYFSNTSELAKDFIRRLLVKDPKRRMTIAQSLEHSWIKAIRRRNVRGEDSGRKPERRRLKTTRLKEYTIKSHSSLPPNNSYADFERFSKVLEEAAAAEEGLRELQRSRRLCHEDVEALAAIYEEKEAWYREESDSLGQDLRRLRQELLKTEALKRQAQEEAKGALLGTSGLKRRFSRLENRYEALAKQVASEMRFVQDLVRALEQEKLQGVECGLR

SEQ ID NO: 739630 - protein, 519 aa, Homo sapiens
RRRRRVAAAGARGFWRRRRWPARRRRPYSPGCGGVAIRGLLRSYLQAAVTALSLEWKLLEGGPAAMSTFRQEDVEDHYEMGEELGSGQFAIVRKCRQKGTGKEYAAKFIKKRRLSSSRRGVSREEIEREVNILREIRHPNIITLHDIFENKTDVVLILELVSGGELFDFLAEKESLTEDEATQFLKQILDGVHYLHSKRIAHFDLKPENIMLLDKNVPNPRIKLIDFGIAHKIEAGNEFKNIFGTPEFVAPEIVNYEPLGLEADMWSIGVITYILLSGASPFLGETKQETLTNISAVNYDFDEEYFSNTSELAKDFIRRLLVKDPKRRMTIAQSLEHSWIKAIRRRNVRGEDSGRKPERRRLKTTRLKEYTIKSHSSLPPNNSYADFERFSKVLEEAAAAEEGLRELQRSRRLCHEDVEALAAIYEEKEAWYREESDSLGQDLRRLRQELLKTEALKRQAQEEAKGALLGTSGLKRRFSRLENRYEALAKQVASEMRFVQDLVRALEQEKLQGVECGLR

SEQ ID NO: 739631 - protein, 650 aa, Homo sapiens
RLGVESAEGVPAAVWRRPYSPGCGGVAIRGLLRSYLQAAVTALSLEWKLLEGGPAAMSTFRQEDVEDHYEMGEELGSGQFAIVRKCRQKGTGKEYAAKFIKKRRLSSSRRGVSREEIEREVNILREIRHPNIITLHDIFENKTDVVLILELVSGGELFDFLAEKESLTEDEATQFLKQILDGVHYLHSKRIAHFDLKPENIMLLDKNVPNPRIKLIDFGIAHKIEAGNEFKNIFGTPEFVAPEIVNYEPLGLEADMWSIGVITYILLSGASPFLGETKQETLTNISAVNYDFDEEYFSNTSELAKDFIRRLLVKDPKRRMTIAQSLEHSWIKVSGEVGELPGLPALAFSLGSRGPSAFKACGCDNPQWLGRVPRGVSLCGGGWVLGVGCPAPDRPGGILGWCVSNGADSWGQGRSVFLERALSALRRAGQSPSRGVDSAPDEPLNLSSHWQVGAGGAGWHRGDPAQASLLPMAIRRRNVRGEDSGRKPERRRLKTTRLKEYTIKSHSSLPPNNSYADFERFSKVLEEAAAAEEGLRELQRSRRLCHEDVEALAAIYEEKEAWYREESDSLGQDLRRLRQELLKTEALKRQAQEEAKGALLGTSGLKRRFSRLENRYEALAKQVASEMRFVQDLVRALEQEKLQGVECGLR

SEQ ID NO: 739632 - protein, 429 aa, Homo sapiens
CLALRTPVDGTQLRRLQPSQDAQLAGAHGAQEPVPAMAPCLRPKRPLAWRTERPRRSRPQGGWLEETSPRTQPDPKDTASPQDTASPQDTASPQDTGECLDFVETAPQALPWEVNEPENIMLLDKNVPNPRIKLIDFGIAHKIEAGNEFKNIFGTPEFVAPEIVNYEPLGLEADMWSIGVITYILLSGASPFLGETKQETLTNISAVNYDFDEEYFSNTSELAKDFIRRLLVKDPKRRMTIAQSLEHSWIKAIRRRNVRGEDSGRKPERRRLKTTRLKEYTIKSHSSLPPNNSYADFERFSKVLEEAAAAEEGLRELQRSRRLCHEDVEALAAIYEEKEAWYREESDSLGQDLRRLRQELLKTEALKRQAQEEAKGALLGTSGLKRRFSRLENRYEALAKQVASEMRFVQDLVRALEQEKLQGVECGLR

SEQ ID NO: 739633 - protein, 378 aa, Homo sapiens
RQTLLGPLTAGLLTLILWLRCWLGLPTAVTLPSALLSTGGFRALRLHRYFESPRRLLPVHFCCCQWRGGGVDFECLLGGVWDRCRKVLRAQECEWPRHLPSACLLCSACRGQPERRAAVVGAQDPTEPPRLSRSLSGASPFLGETKQETLTNISAVNYDFDEEYFSNTSELAKDFIRRLLVKDPKRRMTIAQSLEHSWIKAIRRRNVRGEDSGRKPERRRLKTTRLKEYTIKSHSSLPPNNSYADFERFSKVLEEAAAAEEGLRELQRSRRLCHEDVEALAAIYEEKEAWYREESDSLGQDLRRLRQELLKTEALKRQAQEEAKGALLGTSGLKRRFSRLENRYEALAKQVASEMRFVQDLVRALEQEKLQGVECGLR

SEQ ID NO: 739634 - protein, 373 aa, Homo sapiens
MTLRRAATISKDILLNACLVPWLFVFAYSMTSQHGTESYEMNAEQMNVARPTELMAALELWCSVASIRSDVPGDTVRVFATILSVHHIESIVESHFADESKSLNRYGAGMGDGGSSQYAFTYMVLLMLRRDWFRTTLCETLTTISDVTDSVRARNVLCRTRSQLMLAKDFIRRLLVKDPKRRMTIAQSLEHSWIKAIRRRNVRGEDSGRKPERRRLKTTRLKEYTIKSHSSLPPNNSYADFERFSKVLEEAAAAEEGLRELQRSRRLCHEDVEALAAIYEEKEAWYREESDSLGQDLRRLRQELLKTEALKRQAQEEAKGALLGTSGLKRRFSRLENRYEALAKQVASEMRFVQDLVRALEQEKLQGVECGLR

SEQ ID NO: 739635 - protein, 191 aa, Homo sapiens
RLGVESAEGVPAAVWRRPYSPGCGGVAIRGLLRSYLQAAVTALSLEWKLLEGGPAAMSTFRQEDVEDHYEMGEELGSGQFAIVRKCRQKGTGKEYAAKFIKKRRLSSSRRGVSREEIEREVNILREIRHPNIITLHDIFENKTDVVLILELVSGGELFDFLAEKESLTEDEATQFLKQTPGDPHRRRPCSA

SEQ ID NO: 739636 - protein, 98 aa, Homo sapiens
VESDSFVVGEGGSVFCQKASDCTDNSAGCCLLLPLAQEEVVGRGGWDGRRTGSPHAAGWRRAWWGLPLCALLAEAGPPGVGCPAADSSASPIVAPVDA

SEQ ID NO: 739637 - protein, 111 aa, Homo sapiens
HRTETRAPRRIPTCAPAPRAELPDRGPPPAPTMYAFVRFLEDNVCYALPVSCVRDFSPRSRLDFDNQKVYAVYRGPEELGAGPESPPRAPRDWGALLLHKAQILALDRRQI

SEQ ID NO: 739638 - protein, 158 aa, Homo sapiens
HRTETRAPRRIPTCAPAPRAELPDRGPPPAPTMYAFVRFLEDNVCYALPVSCVRDFSPRSRLDFDNQKVYAVYRGPEELGAGPESPPRAPRDWGALLLHKAQILALAEDKSDLENSVMQKKIKIPKLSLNHVEEDGEVKDYGEEDLQLRHIKDCLGKY

SEQ ID NO: 739639 - protein, 389 aa, Homo sapiens
DNQKVYAVYRGPEELGAGPESPPRAPRDWGALLLHKAQILALAEDKSDLENSVMQKKIKIPKLSLNHVEEDGEVKDYGEEDLQLRHIKRPEGRKPSEVAHKSIEAVVARLEKQNGLSLGHSTCPEEVFVEASPGTEDMDSLEDAVVPRALYEELLRNYQQQQEEMRHLQQELERTRRQLVQQAKKLKEYGALVSEMKELRDLNRRLQDVLLLRLGSGPAIDLEKVKSECLEPEPELRSTFSEEANTSSYYPAPAPVMDKYILDNGKVHLGSGIWVDEEKWHQLQVTQGDSKYTKNLAVMIWGTDVLKNRSVTGVATKKKKDAVPKPPLSPHKLSIVRECLYDRIAQETVDETEIAQRLSKVNKYICEKIMDINKSCKNEERREAKYNLQ

SEQ ID NO: 739640 - protein, 318 aa, Homo sapiens
DNQKVYAVYRGPEELGAGPESPPRAPRDWGALLLHKAQILALAEDKSDLENSVMQKKIKIPKLSLNHVEEDGEVKDYGEEDLQLRHIKRPEGRKPSEVAHKSIEAVVARLEKQNGLSLGHSTCPEEVFVEASPGTEDMDSLEDAVVPRALYEELLRNYQQQQEEMRHLQQELERTRRQLVQQAKKLKEYGALVSEMKELRDLNRRLQDVLLLRLGSGPAIDLEKVKSECLEPEPELRSTFSEEANTSSYYPAPAPVMDKYILDNGKVHLGSGIWVDEEKWHQLQVTQGDSKYTKNLAVMIWGQKRHRRRHKKKERCSP

SEQ ID NO: 739641 - protein, 225 aa, Homo sapiens
DNQKVYAVYRGPEELGAGPESPPRAPRDWGALLLHKAQILALAEDKSDLENSVMQKKIKIPKLSLNHVEEDGEVKDYGEEDLQLRHIKRPEGRKPSEVAHKSIEAVVARLEKQNGLSLGHSTCPEEVFVEASPGTEDMDSLEDAVVPRALYEELLRNYQQQQEEMRHLQQELERTRRQLVQQAKKLKEYGALVSEMKELRDLNRRLQDVLLLRLGSGPSGKRDLG

SEQ ID NO: 739642 - protein, 261 aa, Homo sapiens
MGMLNLEIGGDAGGRIGCKELVLMEEQDARVPALEPFRVEQAPPVIYYVPDFISKEEEEYLLRQVFNAPKPKWTQLSGRKLQNWGGLPHPRGMVPERLPPWLQRYVDKVSNLSLFGGLPANHVLVNQYLPGEGIMPHEDGPLYYPTVSTISLGSHTVLDFYEPRRPEDDDPTEQPRPPPRPTTSLLLEPRSLLVLRGPAYTRLLHGIAAARVDALDAASSPPNAAACPSARPGACLVRGTRVSLTIRRVPRVLRAGLLLGK

SEQ ID NO: 739643 - protein, 238 aa, Homo sapiens
MEEQDARVPALEPFRVEQAPPVIYYVPDFISKEEEEYLLRQVFNAPKPKWTQLSGRKLQNWGGLPHPRGMVPERLPPWLQRYVDKVSNLSLFGGLPANHVLVNQYLPGEGIMPHEDGPLYYPTVSTISLGSHTVLDFYEPRRPEDDDPTEQPRPPPRPTTSLLLEPRSLLVLRGPAYTRLLHGIAAARVDALDAASSPPNAAACPSARPGACLVRGTRVSLTIRRVPRVLRAGLLLGK

SEQ ID NO: 739644 - protein, 112 aa, Homo sapiens
MEEQDARVPALEPFRVEQAPPVIYYVPDFISKEEEEYLLRQVFNAPKPKWTQLSGRKLQNWGGPSGPHCLPQVGFLIPEGWFLSGCPHGSSATWTKCQTSASLEASQLTMSS

SEQ ID NO: 739645 - protein, 127 aa, Homo sapiens [sequence omitted]

SEQ ID NO: 739646 - protein, 217 aa, Homo sapiens
MGMLNLEIGGDAGGRIGCKELVLMEEQDARVPALEPFRVEQAPPVIYYVPDFISKEEEEYLLRQVTSVPYWFLMPQSQSGPSSLGESYRTGPHEDGPLYYPTVSTISLGSHTVLDFYEPRRPEDDDPTEQPRPPPRPTTSLLLEPRSLLVLRGPAYTRLLHGIAAARVDALDAASSPPNAAACPSARPGACLVRGTRVSLTIRRVPRVLRAGLLLGK

SEQ ID NO: 739647 - protein, 190 aa, Homo sapiens
MEEQDARVPALEPFRVEQAPPVIYYVPDFISKEEEEYLLRQVFNAPKPKWTQLSGRKLQNWGGLPHPRGMVPERLPPWLQRYVDKVSNLSLFGGLPANHVLVNQYLPGEGIMPHEDGPLYYPTVSTISLGSHTVLDFYEPRRPEDDDPTEQPRPPPRPTTSLCAPASCWASDRQGRDPSDSQVPAPLGLL

SEQ ID NO: 739648 - protein, 169 aa, Homo sapiens
MVPERLPPWLQRYVDKVSNLSLFGGLPANHVLVNQYLPGEGIMPHEDGPLYYPTVSTISLGSHTVLDFYEPRRPEDDDPTEQPRPPPRPTTSLLLEPRSLLVLRGPAYTRLLHGIAAARVDALDAASSPPNAAACPSARPGACLVRGTRVSLTIRRVPRVLRAGLLLGK

SEQ ID NO: 739649 - protein, 126 aa, Homo sapiens
MEEQDARVPALEPFRVEQAPPVIYYVPDFISKEEEEYLLRQVFNAPKPKWTQLSGRKLQNWGGLPHPRGMVPERLPPWLQRYVDKVSNLSLFGGLPANHVLVNQYLPGEGIMVTTHPRPVSPHSDF

SEQ ID NO: 739650 - protein, 133 aa, Homo sapiens
MEEQDARVPALEPFRVEQAPPVIYYVPDFISKEEEEYLLRQVFNAPKPKWTQLSGRKLQNWGGLPHPRGMVPERLPPWLQRYVDKVSNLSLFGGLPANHVLVNQYLPGEGIMHHQPGLPHRAGLLRAAAARGR

SEQ ID NO: 739651 - protein, 163 aa, Homo sapiens
MSLTSSPKKRRSICFDRFLMPQSQSGPSSLGESYRTGPHEDGPLYYPTVSTISLGSHTVLDFYEPRRPEDDDPTEQPRPPPRPTTSLLLEPRSLLVLRGPAYTRLLHGIAAARVDALDAASSPPNAAACPSARPGACLVRGTRVSLTIRRVPRVLRAGLLLGK

SEQ ID NO: 739652 - protein, 63 aa, Homo sapiens
SHTVLDFYEPRRPEDDDPTEQVGPQTLPQLLVGTSTSHILQDDLVPHAFGVLLALSQIPSLVP

SEQ ID NO: 739653 - protein, 32 aa, Homo sapiens
MATQPPRLLWAKLREFPLKLELFPQIQDPIGH

SEQ ID NO: 739654 - protein, 340 aa, Homo sapiens
MQGGEPVSTMKVSESEGKLEGQATAVTPNKNSSCGGGISSSSSSRGGSAKGWQYSDHMENVYGYLMKYTNLVTGWQYRFFVLNNEAGLLEYFVNEQSRNQKPRGTLQLAGAVISPSDEDSHTFTVNAASGEQYKLRATDAKERQHWVSRLQICTQHHTEAIGKNNPPLKSRSFSLASSSNSPISQRRPSQNAISFFNVGHSKLQSLSKRTNLPPDHLVEVREMMSHAEGQQRDLIRRIECLPTSGHLSSLDQDLLMLKATSMATMNCLNDCFHILQLQHASHQKGSLPSGTTIEWLEPKISLSNHYKNGADQPFATDQSKPVAVPEEQPVAESGLLARVR

SEQ ID NO: 739655 - protein, 295 aa, Homo sapiens
EQWSEQVVYSDHMENVYGYLMKYTNLVTGWQYRFFVLNNEAGLLEYFVNEQSRNQKPRGTLQLAGAVISPSDEDSHTFTVNAASGEQYKLRATDAKERQHWVSRLQICTQHHTEAIGKNNPPLKSRSFSLASSSNSPISQRRPSQNAISFFNVGHSKLQSLSKRTNLPPDHLVEVREMMSHAEGQQRDLIRRIECLPTSGHLSSLDQDLLMLKATSMATMNCLNDCFHILQLQHASHQKGSLPSGTTIEWLEPKISLSNHYKNGADQPFATDQSKPVAVPEEQPVAESGLLARVR

SEQ ID NO: 739656 - protein, 90 aa, Homo sapiens
REERTLGTGGEGIMSWGWEQSQEESSAWSRQTPTPQLETQEPHSPHSNKKHQLLVPKKGGPQLQGLRPALELRTRGLQGEDRASGTREPL

SEQ ID NO: 739657 - protein, 1016 aa, Homo sapiens
RGLRWAGRRGTEAAAAAAAAGNRGSAPPARDPIPIPVPAERSPGPDMDAAEPGLPPGPEGRKRYSDIFRSLDNLEISLGNVTLEMLAGDPLLSEDPEPDKTPTATVTNEASCWSGPSPEGPVPLTGEELDLRLIRTKGGVDAALEYAKTWSRYAKELLAWTEKRASYELEFAKSTMKIAEAGKVSIQQQSHMPLQYIYTLFLEHDLSLGTLAMETVAQQKRDYYQPLAAKRTEIEKWRKEFKEQWMKEQKRMNEAVQALRRAQLQYVQRSEDLRARSQGSPEDSAPQASPGPSKQQERRRRSREEAQAKAQEAEALYQACVREANARQQDLEIAKQRIVSHVRKLVFQGDEVLRRVTLSLFGLRGAQAERGPRAFAALAECCAPFEPGQRYQEFVRALRPEAPPPPPPAFSFQEFLPSLNSSPLDIRKKLSGPLPPRLDENSAEPGPWEDPGTGWRWQGTPGPTPGSDVDSVGGGSESRSLDSPTSSPGAGTRQLVKASSTGTESSDDFEERDPDLGDGLENGLGSPFGKWTLSSAAQTHQLRRLRGPAKCRECEAFMVSGTECEECFLTCHKRCLETLLILCGHRRLPARTPLFGVDFLQLPRDFPEEVPFVVTKCTAEIEHRALDVQGIYRVSGSRVRVERLCQAFENGRALVELSGNSPHDVSSVLKRFLQELTEPVIPFHLYDAFISLAKTLHADPGDDPGTPSPSPEVIRSLKTLLVQLPDSNYNTLRHLVAHLFRVAARFMENKMSANNLGIVFGPTLLRPPDGPRAASAIPVTCLLDSGHQAQLVEFLIVHYEQIFGMDELPQATEPPPQDSSPAPGPLTTSSQPPPPHLDPDSQPPVLASDPGPDPQHHSTLEQHPTATPTEIPTPQSDQREDVAEDTKDGGGEVSSQGPEDSLLGTQSRGHFSRQPVKYPRGGVRPVTHQLSSLALVASKLCEETPITSVPRGSLRGRGPSPAAASPEGSPLRRTPLPKHFEITQETARLLSKLDSEAVPRATCCPDVQPEEAEDHL

SEQ ID NO: 739658 - protein, 1041 aa, Homo sapiens
RGLRWAGRRGTEAAAAAAAAGNRGSAPPARDPIPIPVPAERSPGPDMDAAEPGLPPGPEGRKRYSDIFRSLDNLEISLGNVTLEMLAGDPLLSEDPEPDKTPTATVTNEASCWSGPSPEGPVPLTGEELDLRLIRTKGGVDAALEYAKTWSRYAKELLAWTEKRASYELEFAKSTMKIAEAGKVSIQQQSHMPLQYIYTLFLEHDLSLGTLAMETVAQQKRDYYQPLAAKRTEIEKWRKEFKEQWMKEQKRMNEAVQALRRAQLQYVQRSEDLRARSQGSPEDSAPQASPGPSKQQERRRRSREEAQAKAQEAEALYQACVREANARQQDLEIAKQRIVSHVRKLVFQGDEVLRRVTLSLFGLRGAQAERGPRAFAALAECCAPFEPGQRYQEFVRALRPEAPPPPPPAFSFQEFLPSLNSSPLDIRKKLSGPLPPRLDENSAEPGPWEDPGTGWRWQGTPGPTPGSDVDSVGGGSESRSLDSPTSSPGAGTRQLVKASSTGTESSDDFEERDPGEAEAGKVRMGQGRAPGTPDPVSLQDLGDGLENGLGSPFGKWTLSSAAQTHQLRRLRGPAKCRECEAFMVSGTECEECFLTCHKRCLETLLILCGHRRLPARTPLFGVDFLQLPRDFPEEVPFVVTKCTAEIEHRALDVQGIYRVSGSRVRVERLCQAFENGRALVELSGNSPHDVSSVLKRFLQELTEPVIPFHLYDAFISLAKTLHADPGDDPGTPSPSPEVIRSLKTLLVQLPDSNYNTLRHLVAHLFRVAARFMENKMSANNLGIVFGPTLLRPPDGPRAASAIPVTCLLDSGHQAQLVEFLIVHYEQIFGMDELPQATEPPPQDSSPAPGPLTTSSQPPPPHLDPDSQPPVLASDPGPDPQHHSTLEQHPTATPTEIPTPQSDQREDVAEDTKDGGGEVSSQGPEDSLLGTQSRGHFSRQPVKYPRGGVRPVTHQLSSLALVASKLCEETPITSVPRGSLRGRGPSPAAASPEGSPLRRTPLPKHFEITQETARLLSKLDSEAVPRATCCPDVQPEEAEDHL

SEQ ID NO: 739659 - protein, 950 aa, Homo sapiens
RGLRWAGRRGTEAAAAAAAAGNRGSAPPARDPIPIPVPAERSPGPDMDAAEPGLPPGPEGRKRYSDIFRSLDNLEISLGNVTLEMLAGDPLLSEDPEPDKTPTATVTNEASCWSGPSPEGPVPLTGEELDLRLIRTKGGVDAALEYAKTWSRYAKELLAWTEKRASYELEFAKSTMKIAEAGKVSIQQQSHMPLQYIYTLFLEHDLSLGTLAMETVAQQKRDYYQPLAAKRTEIEKWRKEFKEQWMKEQKRMNEAVQALRRAQLQYVQRSEDLRARSQGSPEDSAPQASPGPSKQQERRRRSREEAQAKAQEAEALYQACVREANARQQDLEIAKQRIVSHVRKLVFQGDEVLRRVTLSLFGLRGAQAERGPRAFAALAECCAPFEPGQRYQEFVRALRPEAPPPPPPAFSFQEFLPSLNSSPLDIRKKLSGPLPPRLDENSAEPGPWEDPGTGWRWQGTPGPTPGSDVDSVGGGSESRSLDSPTSSPGAGTRQLVKASSTGTESSDDFEERDPDLGDGLENGLGSPFGKWTLSSAAQTHQLRRLRGPAKCRECEAFMVSGTECEECFLTCHKRCLETLLILCGHRRLPARTPLFGVDFLQLPRDFPEEVPFVVTKCTAEIEHRALDVQGIYRVSGSRVRVERLCQAFENGRALVELSGNSPHDVSSVLKRFLQEGGCTIYGKQDVCQQPGHCVWADTAAAAGGPRAASAIPVTCLLDSGHQAQLVEFLIVHYEQIFGMDELPQATEPPPQDSSPAPGPLTTSSQPPPPHLDPDSQPPVLASDPGPDPQHHSTLEQHPTATPTEIPTPQSDQREDVAEDTKDGGGEVSSQGPEDSLLGTQSRGHFSRQPVKYPRGGVRPVTHQLSSLALVASKLCEETPITSVPRGSLRGRGPSPAAASPEGSPLRRTPLPKHFEITQETARLLSKLDSEAVPRATCCPDVQPEEAEDHL

SEQ ID NO: 739660 - protein, 922 aa, Homo sapiens
RGLRWAGRRGTEAAAAAAAAGNRGSAPPARDPIPIPVPAERSPGPDMDAAEPGLPPGPEGRKRYSDIFRSLDNLEISLGNVTLEMLAGDPLLSEDPEPDKTPTATVTNEASCWSGPSPEGPVPLTGEELDLRLIRTKGGVDAALEYAKTWSRYAKELLAWTEKRASYELEFAKSTMKIAEAGKVSIQQQSHMPLQYIYTLFLEHDLSLGTLAMETVAQQKRDYYQPLAAKRTEIEKWRKEFKEQWMKEQKRMNEAVQALRRAQLQYVQRSEDLRARSQGSPEDSAPQASPGPSKQQERRRRSREEAQAKAQEAEALYQACVREANARQQDLEIAKQRIVSHVRKLVFQGDEVLRRVTLSLFGLRGAQAERGPRAFAALAECCAPFEPGQRYQEFVRALRPEAPPPPPPAFSFQEFLPSLNSSPLDIRKKLSGPLPPRLDENSAEPGPWEDPGTGWRWQGTPGPTPGSDVDSVGGGSESRSLDSPTSSPGAGTRQLVKASSTGTESSDDFEERDPDLGDGLENGLGSPFGKWTLSSAAQTHQLRRLRGPAKCRECEAFMVSGTECEECFLTCHKRCLETLLILCGHRRLPARTPLFGVDFLQLPRDFPEEVPFVVTKCTAEIEHRALDVQGIYRVSGSRVRVERLCQAFENGRALVELSGNSPHDVSSVLKRFLQELTEPVIPFHLYDAFISLAKTLHADPGDDPGTPSPSPEVIRSLKTLLVQLPDSNYNTLRHLVAHLFRVAARFMENKMSANNLGIVFGPTLLRPPDGPRAASAIPVTCLLDSGHQAQLVEFLIVHYEQIFGMDELPQATEPPPQDSSPAPGPLTTSSQPPPPHLDPDSQPPVLASDPGPDPQHHSTLEQHPTATPTEVRTHWAHSYGEGLISVQFSYLLFHLPSFLKFPSFSSSLPHLTYVHSGRNSEE

SEQ ID NO: 739661 - protein, 165 aa, Homo sapiens
MLLPQGLCTGYSFCMSRNKPLALQESQRTGILVLGSHSWVSPCRFQLHRVTRERTWLKTPKMGEGKVSMLERGSGVLGVPWPQGGLLKDDSWGDIQRTWRCSALTTHPVHSVQPRPRGLTPGDTVSWPLQPPASEVSPGRCEACNPPAVQSGPGGFQAVRGDPHH

SEQ ID NO: 739662 - protein, 1016 aa, Homo sapiens; identical to SEQ ID NO: 739657

SEQ ID NO: 739663 - protein, 849 aa, Homo sapiens
MPRPGAAMPRNCLPGLKREPAMSHMPLQYIYTLFLEHDLSLGTLAMETVAQQKRDYYQPLAAKRTEIEKWRKEFKEQWMKEQKRMNEAVQALRRAQLQYVQRSEDLRARSQGSPEDSAPQASPGPSKQQERRRRSREEAQAKAQEAEALYQACVREANARQQDLEIAKQRIVSHVRKLVFQGDEVLRRVTLSLFGLRGAQAERGPRAFAALAECCAPFEPGQRYQEFVRALRPEAPPPPPPAFSFQEFLPSLNSSPLDIRKKLSGPLPPRLDENSAEPGPWEDPGTGWRWQGTPGPTPGSDVDSVGGGSESRSLDSPTSSPGAGTRQLVKASSTGTESSDDFEERDPDLGDGLENGLGSPFGKWTLSSAAQTHQLRRLRGPAKCRECEAFMVSGTECEECFLTCHKRCLETLLILCGHRRLPARTPLFGVDFLQLPRDFPEEVPFVVTKCTAEIEHRALDVQGIYRVSGSRVRVERLCQAFENGRALVELSGNSPHDVSSVLKRFLQELTEPVIPFHLYDAFISLAKTLHADPGDDPGTPSPSPEVIRSLKTLLVQLPDSNYNTLRHLVAHLFRVAARFMENKMSANNLGIVFGPTLLRPPDGPRAASAIPVTCLLDSGHQAQLVEFLIVHYEQIFGMDELPQATEPPPQDSSPAPGPLTTSSQPPPPHLDPDSQPPVLASDPGPDPQHHSTLEQHPTATPTEIPTPQSDQREDVAEDTKDGGGEVSSQGPEDSLLGTQSRGHFSRQPVKYPRGGVRPVTHQLSSLALVASKLCEETPITSVPRGSLRGRGPSPAAASPEGSPLRRTPLPKHFEITQETARLLSKLDSEAVPRATCCPDVQPEEAEDHL

SEQ ID NO: 739664 - protein, 925 aa, Homo sapiens
RGLRWAGRRGTEAAAAAAAAGNRGSAPPARDPIPIPVPAERSPGPDMDAAEPGLPPGPEGRKRYSDIFRSLDNLEISLGNVTLEMLAGDPLLSEDPEPDKTPTATVTNEASCWSGPSPEGPVPLTGEELDLRLIRTKGGVDAALEYAKTWSRYAKELLAWTEKRASYELEFAKSTMKIAEAGKVSIQQQSHMPLQYIYTLFLEHDLSLGTLAMETVAQQKRDYYQPLAAKRTEIEKWRKEFKEQWMKEQKRMNEAVQALRRAQLQYVQRSEDLRARSQGSPEDSAPQASPGPSKQQERRRRSREEAQAKAQEAEALYQACVREANARQQDLEIAKQRIVSHVRKLVFQGDEVLRRVTLSLFGLRGAQAERGPRAFAALAECCAPFEPGQRYQEFVRALRPEAPPPPPPAFSFQEFLPSLNSSPLDIRKKLSGPLPPRLDENSAEPGPWEDPGTGWRWQGTPGPTPGSDVDSVGGGSESRSLDSPTSSPGAGTRQLVKASSTGTESSDDFEERDPDLGDGLENGLGSPFGKWTLSSAAQTHQLRRLRGPAKCRECEAFMVSGTECEECFLTCHKRCLETLLILCGHRRLPARTPLFGVDFLQLPRDFPEEVPFVVTKCTAEIEHRALDVQGIYRVSGSRVRVERLCQAFENGRALVELSGNSPHDVSSVLKRFLQELTEPVIPFHLYDAFISLAKTLHADPGDDPGTPSPSPEVIRSLKTLLVQLPDSNYNTLRHLVAHLFRVAARFMENKMSANNLGIVFGPTLLRPPDGPRAASAIPVTCLLDSGHQAQLVEFLIVHYEQIFGMDELPQATEPPPQDSSPAPGPLTTSSQPPPPHLDPDSQPPVLASDPGPDPQHHSTLEQHPTATPTEIPTPQSDQREDVAEDTKDGGGEGSTLVSDTWDRGAFATLVVVTPPHLPASFTDSK

SEQ ID NO: 739665 - protein, 124 aa, Homo sapiens
VSSQGPEDSLLGTQSRGHFSRQPVKYPRGGVRPVTHQLSSLALVASKLCEETPITSVPRGSLRGRGPSPAAASPEGSPLRRTPLPKHFEITQETARLLSKLDSEAVPRATCCPDVQPEEAEDHL

SEQ ID NO: 739666 - protein, 178 aa, Homo sapiens
MGNSLLRENRRQQNTQEMPWNVRMQSPKQRTSRCWDHHIAEGCFCLPWKKILIFEKRQDSQNENERMSSTPIQDNVDQTYSEELCYTLINHRVLCTRPSGNSAEEYYENVPCKAERPRESLGGTETEYSLLHMPSTDPRHARSPEDEYELLMPHRISSHFLQQPRPLMAPSETQFSHL

SEQ ID NO: 739667 - protein, 161 aa, Homo sapiens
MPWNVRMQSPKQRTSRCWDHHIAEGCFCLPWKKILIFEKRQDSQNENERMSSTPIQDNVDQTYSEELCYTLINHRVLCTRPSGNSAEEYYENVPCKAERPRESLGGTETEYSLLHMPSTDPRHARSPEDEYELLMPHRISSHFLQQPRPLMAPSETQFSHL

SEQ ID NO: 739668 - protein, 112 aa, Homo sapiens
MSSTPIQDNVDQTYSEELCYTLINHRVLCTRPSGNSAEEYYENVPCKAERPRESLGGTETEYSLLHMPSTDPRHARSPEDEYELLMPHRISSHFLQQPRPLMAPSETQFSHL

SEQ ID NO: 739669 - protein, 212 aa, Homo sapiens
SGRVRAPSRARGAAGAGARMLEVHIPSVGPEAEGPRQSPEKSHMVFRVEVLCSGRRHTVPRRYSEFHALHKRIKKLYKVPDFPSKRLPNWRTRGLEQRRQGLEAYIQGILYLNQEVPKELLEFLRLRHFPTDPKASNWGTLREFLPGDSSSQQHQRPVLSFHVDPYVCNPSPESLPNVVVNGVLQGLYSFSISPDKAQPKAACHPAPLPPMP

SEQ ID NO: 739670 - protein, 152 aa, Homo sapiens
MLEVHIPSVGPEAEGPRQSPEKSHMVFRVEVLCSGRRHTVPRRYSEFHALHKRVRRRRPPTGPGPASVQPPPRPCEAGGRAPASATPITASVPAQPVSPRASVGGLGPSSPSAGPPLTRVCPSRARRRGRGRASGWGEEGLRAQSGCCDRTR

SEQ ID NO: 739671 - protein, 228 aa, Homo sapiens
SGRVRAPSRARGAAGAGARMLEVHIPSVGPEAEGPRQSPEKSHMVFRVEVLCSGRRHTVPRRYSEFHALHKRIKKLYKVPDFPSKRLPNWRTRGLEQRRQGLEAYIQGILYLNQEVPKELLEFLRLRHFPTDPKASNWGYRGADGGGQGLSAVSSTLREFLPGDSSSQQHQRPVLSFHVDPYVCNPSPESLPNVVVNGVLQGLYSFSISPDKAQPKAACHPAPLPPMP

SEQ ID NO: 739672 - protein, 207 aa, Homo sapiens
ARGAAGAGARMLEVHIPSVGPEAEGPRQSPEKSHMVSAAPGWGGAPGPAGFPRRRSVGTGAPGLGERALRAGPSGETLSRVWGPLGFASSRTMVRALEGPQGSEGQVRQPVLPGVRERRVPGQPRRRKAALCLGEREGGHVARRRCCGVLPRGLTRRPAARPRRQVFRVEVLCSGRRHTVPRRYSEFHALHKRVRRRRPPTGPGPAS

SEQ ID NO: 739673 - protein, 152 aa, Homo sapiens; identical to SEQ ID NO: 739670

SEQ ID NO: 739674 - protein, 212 aa, Homo sapiens; identical to SEQ ID NO: 739669

SEQ ID NO: 739675 - protein, 195 aa, Homo sapiens
MGRARDAILDALENLTAEELKKFKLKLLSVPLREGYGRIPRGALLSMDALDLTDKLVSFYLETYGAELTANVLRDMGLQEMAGQLQAATHQGSGAAPAGIQAPPQSAAKPGLHFIDQHRAALIARVTNVEWLLDALYGKVLTDEQYQAVRAEPTNPSKMRKLFSFTPAWNWTCKDLLLQALRESQSYLVEDLERS

SEQ ID NO: 739676 - protein, 231 aa, Homo sapiens
MSPSAAPSRVPPRRPAGGRDPGVPRRPGAPIQRPGWEGTKGVVRKRLLLEGNGPGRGVGRPEWEEGGESRFRPGADFLLVGGCSGVSGGSGRGSWSHGARARRHPGCAGEPDRRGAQEVQLQAATHQGSGAAPAGIQAPPQSAAKPGLHFIDQHRAALIARVTNVEWLLDALYGKVLTDEQYQAVRAEPTNPSKMRKLFSFTPAWNWTCKDLLLQALRESQSYLVEDLERS

SEQ ID NO: 739677 - protein, 176 aa, Homo sapiens
MGRARDAILDALENLTAEELKKFKLKLLSVPLREGYGRIPRGALLSMDALDLTDKLVSFYLETYGAELTANVLRDMGLQEMAGQLQAATHQGLHFIDQHRAALIARVTNVEWLLDALYGKVLTDEQYQAVRAEPTNPSKMRKLFSFTPAWNWTCKDLLLQALRESQSYLVEDLERS

SEQ ID NO: 739678 - protein, 149 aa, Homo sapiens
MDALDLTDKLVSFYLETYGAELTANVLRDMGLQEMAGQLQAATHQGSGAAPAGIQAPPQSAAKPGLHFIDQHRAALIARVTNVEWLLDALYGKVLTDEQYQAVRAEPTNPSKMRKLFSFTPAWNWTCKDLLLQALRESQSYLVEDLERS

SEQ ID NO: 739679 - protein, 226 aa, Homo sapiens
MGRARDAILDALENLTAEELKKFKLKLLSVPLREGYGRIPRGALLSMDALDLTDKLVSFYLETYGAELTANVLRDMGLQEMAGQLQAATHQGGSPRLAYRPTGPRPHGGKGREGDHLAHILPGSGAAPAGIQAPPQSAAKPGLHFIDQHRAALIARVTNVEWLLDALYGKVLTDEQYQAVRAEPTNPSKMRKLFSFTPAWNWTCKDLLLQALRESQSYLVEDLERS

SEQ ID NO: 739680 - protein, 176 aa, Homo sapiens; identical to SEQ ID NO: 739677

SEQ ID NO: 739681 - protein, 231 aa, Homo sapiens; identical to SEQ ID NO: 739676

SEQ ID NO: 739682 - protein, 113 aa, Homo sapiens
WCWCETEELRILLGLVGSALHCLELDLQGLAPPGPKGVPVLPGGGPGAELRLLPSNTPVSPWQSHQIILNLIFLYTIYEKPACELVCFPASSLLACAELSYASEATQPPAPCP

SEQ ID NO: 739683 - protein, 341 aa, Homo sapiens
MQEGELAISPISPVAAMPPLGTHVQARCEAQINLLGEGGICKLPGRLRIQPALWSREDVLHWLRWAEQEYSLPCTAEHGFEMNGRALCILTKDDFRHRAPSSGDVLYELLQYIKTQRRALVCGPFFGGIFRLKTPTQHSPVPPEEVTGPSQMDTRRGHLLQPPDPGLTSNFGHLDDPGLARWTPGKEESLNLCHCAELGCRTQGVCSFPAMPQAPIDGRIADCRLLWDYVYQLLLDTRYEPYIKWEDKDAKIFRVVDPNGLARLWGNHKNRVNMTYEKMSRALRHYYKLNIIKKEPGQKLLFRFLKTPGKMVQDKHSHLEPLESQEQDRIEFKDKRPEISP

SEQ ID NO: 739684 - protein, 264 aa, Homo sapiens
MQEGELAISPISPVAAMPPLGTHVQARCEAQINLLGEGGICKLPGRLRIQPALWSREDVLHWLRWAEQEYSLPCTAEHGFEMNGRALCILTKDDFRHRAPSSGDVLYELLQYIKTQRRALVCGPFFGGIFRLKTPTQHSPVPPEDCRLLWDYVYQLLLDTRYEPYIKWEDKDAKIFRVVDPNGLARLWGNHKNRVNMTYEKMSRALRHYYKLNIIKKEPGQKLLFRFLKTPGKMVQDKHSHLEPLESQEQDRIEFKDKRPEISP

SEQ ID NO: 739685 - protein, 260 aa, Homo sapiens
MNGRALCILTKDDFRHRAPSSGDVLYELLQYIKTQRRALVCGPFFGGIFRLKTPTQHSPVPPEEVTGPSQMDTRRGHLLQPPDPGLTSNFGHLDDPGLARWTPGKEESLNLCHCAELGCRTQGVCSFPAMPQAPIDGRIADCRLLWDYVYQLLLDTRYEPYIKWEDKDAKIFRVVDPNGLARLWGNHKNRVNMTYEKMSRALRHYYKLNIIKKEPGQKLLFRFLKTPGKMVQDKHSHLEPLESQEQDRIEFKDKRPEISP

SEQ ID NO: 739686 - protein, 317 aa, Homo sapiens
MQEGELAISPISPVAAMPPLGTHVQARCEAQINLLGEGGICKLPGRLRIQPALWSREDVLHWLRWAEQEYSLPCTAEHGFEMNGRALCILTKDDFRHRAPSSGDVLYELLQYIKTQRRALVCGPFFGGIFRLKTPTQHSPVPPEEVTGPSQMDTRRGHLLQPPDPGLTSNFGHLDDPGLARWTPGKEESLNLCHCAELGCRTQGVCSFPAMPQAPIDGRIADCRLLWDYVYQLLLDTRYEPYIKWEDKDAKIFRVVDPNGLARLWGNHKNRVNMTYEKMSRALRHYYKLNIIKKEPGQKLLFRNGLQLIFIFIWSFQ

SEQ ID NO: 739687 - protein, 398 aa, Homo sapiens
MQEGELAISPISPVAAMPPLGTHVQARCEAQINLLGEGGICKLPGRLRIQPALWSREDVLHWLRWAEQEYSLPCTAEHGFEMNGRALCILTKDDFRHRAPSSGQGNAQAFLYSGNPGDVLYELLQYIKTQRRALVCGPFFGGIFRLKTPTQHSPVPPEEVTGPSQMDTRRGHLLQPPDPGLTSNFGHLDDPGLARWTPGKEESLNLCHCAELGCRTQGVCSFPAMPQAPIDGRIADCRLLWDYVYQLLLDTRYEPYIKWEDKDAKIFRVVDPNGLARLWGNHKNRVNMTYEKMSRALRHYYKLNIIKKEPGQKLLFRFLKTPGKMVQDKHSHLEPLESQEQDRIEFKADSSSQQSSRIPSQTLYPQDYSHCLGRLGGLPSRTLGAGVSSFGQGNPGAK

SEQ ID NO: 739688 - protein, 355 aa, Homo sapiens
MQEGELAISPISPVAAMPPLGTHVQARCEAQINLLGEGGICKLPGRLRIQPALWSREDVLHWLRWAEQEYSLPCTAEHGFEMNGRALCILTKDDFRHRAPSSGQGNAQAFLYSGNPGDVLYELLQYIKTQRRALVCGPFFGGIFRLKTPTQHSPVPPEEVTGPSQMDTRRGHLLQPPDPGLTSNFGHLDDPGLARWTPGKEESLNLCHCAELGCRTQGVCSFPAMPQAPIDGRIADCRLLWDYVYQLLLDTRYEPYIKWEDKDAKIFRVVDPNGLARLWGNHKNRVNMTYEKMSRALRHYYKLNIIKKEPGQKLLFRFLKTPGKMVQDKHSHLEPLESQEQDRIEFKDKRPEISP

SEQ ID NO: 739689 - protein, 286 aa, Homo sapiens
MQEGELAISPISPVAAMPPLGTHVQARCEAQINLLGEGGICKLPGRLRDVLYELLQYIKTQRRALVCGPFFGGIFRLKTPTQHSPVPPEEVTGPSQMDTRRGHLLQPPDPGLTSNFGHLDDPGLARWTPGKEESLNLCHCAELGCRTQGVCSFPAMPQAPIDGRIADCRLLWDYVYQLLLDTRYEPYIKWEDKDAKIFRVVDPNGLARLWGNHKNRVNMTYEKMSRALRHYYKLNIIKKEPGQKLLFRFLKTPGKMVQDKHSHLEPLESQEQDRIEFKDKRPEISP

SEQ ID NO: 739690 - protein, 262 aa, Homo sapiens
MQEGELAISPISPVAAMPPLGTHVQARCEAQINLLGEGGICKLPGRLRDVLYELLQYIKTQRRALVCGPFFGGIFRLKTPTQHSPVPPEEVTGPSQMDTRRGHLLQPPDPGLTSNFGHLDDPGLARWTPGKEESLNLCHCAELGCRTQGVCSFPAMPQAPIDGRIADCRLLWDYVYQLLLDTRYEPYIKWEDKDAKIFRVVDPNGLARLWGNHKNRVNMTYEKMSRALRHYYKLNIIKKEPGQKLLFRNGLQLIFIFIWSFQ

SEQ ID NO: 739691 - protein, 148 aa, Homo sapiens
MQEGELAISPISPVAAMPPLGTHVQARCEAQINLLGEGGICKLPGRLRIQPALWSREDVLHWLRWAEQEYSLPCTAEHGFEMNGRALCILTKDDFRHRAPSSGDVLYELLQYIKTQRRALVCGPFFGGIFRLKTPTQHSPVPPEAPPL

SEQ ID NO: 739692 - protein, 112 aa, Homo sapiens
GKRPPRNHLVMAMVFPEEQSSHLNTVPSTAFLTAPRVPPGPLYHFYSPQDQAHSSLLGKDSRAGPAGRRRHPQPSVIKSTARPKPVISQQSAHSKVLGHQTILSLNRGRENV

SEQ ID NO: 739693 - protein, 1524 aa, Homo sapiens
MAAVYSGISLKLKSKTTSWEDKLKLAHFAWISHQCFLPNKEQVLLDWARQSLVAFYKKKLELKEDIVERLWIYIDNILHSRKLQNLLKNGKTINLQISLVKIINERVAEFSLSGSQRNICAVLRCCQGILSTPALAVIYTAKQELMVALLSQLCWSACRQPEGAVVAQLFEVIHLALGHYLLILQQQVNPRRAFGDVTAHLLQPCLVLRHLLSGGTWTQAGQGQLRQVLSRDIRSQIEAMFRGGIFQPELLSSYKEGLLDQQQGDVKTGAMKNLLAPMDTVLNRLVDAGYCAASLHTSVVANSVALLYKLFLDSYFKEGNQLLCFQVLPRLFGCLKISHLQEEQSKALSTSDWTTELLVVEQLLNSVANNNIYNIAADRIRHEEAQFRFYRHVAELLINHAQAPIPAWFRCLKTLISLNHLILEPDLDDLLASAWIDAEVTEFRTKKAQEALIRTVFQTYAKLRQVPRLFEEVLGVICRPAAEALRQPVLASGPSTVLSACLLELPPSQILDTWSLVLEKFQSLVLPYLQSDADMALKLLSLSLLLHCIMFNMRSLDSSTPLPIVRRTQCMMERMMRELVQPLLALLPDTPGPEPELWLQKVSDSVLLLSYTWAQVDAMFSLNCSQYHSMSGPLIGVALEISNLPSLLPGVKTQHWKKIEKFTAQFSSLGTYCLEQLYLQKMKRTLMQTSFRSEGAIQSLRCDAAFIIGSGRKSLNQRTTASWDGQVGMVSGLTYPVAHWHLIVSNLTILISYLCPDDVGYLASVLLRTLPMGKAQEVSIDEEAYITLEKISKAFLHSPLFPEMQSLHSAFLTCVTTSCSSILCSGAQRDSGLVSQQLPWLFEKDHMVVGHWENRFAKAGPEGIEPRGEIAQNLLSLVKSDFPIQLEGEQLESILGLLEVISALQLDSLLPPYHVHYFLVLLSMAVTKLGCSCSSSLALKFLTTCYQLLGYLQKGKSARSVFKIMYGSDIFEVVLTSLFRASSRFLIEMDDPAWLEFLQVIGTFLEELMQMLIQMKLSLVLNFRKITAFLSSSKPYTEAASSKQLENQNPQGRQLLLVSLTRLCHVLGPFLKEQKLGQEAPAALSELLQQVVLQTGAVLQLCSVPGARGWRLPSVLISSVSTLLEADLGQHCRDGGADISQGSDRTLLSHVALYQGVYSQILLELPALAGHDQSFQAALQFLTLFFLAPELHPKKDSVFTSMFHSVRRVLADPEIPVQVTQDIEPHLGALFTQMLEVGTTEDLRLVMQCILQGLDVSNMWKADVQAVVSAVTLLRLLLNCPLSGEKASLLWRACPQIVTALTLLNREASQEQPVSLTVVGPVLDVLAALLRQGEEAIGNPHHVSLAFSILLTVPLDHLKPLEYGSVFPRLHNVLFSILQCHPKVMLKAIPSFLNSFNRLVFSVMREGRQKDKGSIDDLPTVLKCARLVERMYSHIAARAEEFAVFSPFMVAQYVLEVQKVTLYPAVKSLLQEGIYLILDLCIEPDVQFLRASLQPGMRDIFKELYNDYLKYHKAKHEGEKRYTA

SEQ ID NO: 739694 - protein, 1524 aa, Homo sapiens; identical to SEQ ID NO: 739693

SEQ ID NO: 739695 - protein, 140 aa, Homo sapiens [sequence omitted]

SEQ ID NO: 739696 - protein, 1524 aa, Homo sapiens; identical to SEQ ID NO: 739693

SEQ ID NO: 739697 - protein, 1506 aa, Homo sapiens
MAAVYSGISLKLKSKTTSWEDKLKLAHFAWISHQCFLPNKEQVLLDWARQSLVAFYKKKLELKEDIVERLWIYIDNILHSRKLQNLLKNGKTINLQISLVKIINERVAEFSLSGSQRNICAVLRCCQGILSTPALAVIYTAKQELMVALLSQLCWSACRQPEGAVVAQLFEVIHLALGHYLLILQQQVNPRRAFGDVTAHLLQPCLVLRHLLSGGTWTQAGQGQLRQVLSRDIRSQIEAMFRGGIFQPELLSSYKEGLLDQQQGDVKTGAMKNLLAPMDTVLNRLVDAGYCAASLHTSVVANSVALLYKLFLDSYFKEGNQLLCFQVLPRLFGCLKISHLQEEQSKALSTSDWTTELLVVEQLLNSVANNNIYNIAADRIRHEEAQFRFYRHVAELLINHAQAPIPAWFRCLKTLISLNHLILEPDLDDLLASAWIDAEVTEFRTKKAQEALIRTVFQTYAKLRQVPRLFEEVLGVICRPAAEALRQPVLASGPSTVLSACLLELPPSQILDTWSLVLEKFQSLVLPYLQSDADMALKLLSLSLLLHCIMFNMRSLDSSTPLPIVRRTQCMMERMMRELVQPLLALLPDTPGPEPELWLQKVSDSVLLLSYTWAQVDAMFSLNCSQYHSMSGPLIGVALEISNLPSLLPGVKTQHWKKIEKFTAQFSSLGTYCLEQLYLQKMKRTLMQTSFRSEGAIQSLRCDAAFIIGSGRKSLNQRTTASWDGQVGMVSGLTYPVAHWHLIVSNLTILISYLCPDDVGYLASVLLRTLPMGKAQEVSIDEEAYITLEKISKAFLHSPLFPEMQSLHSAFLTCVTTSCSSILCSGAQRDSGLVSQQLPWLFEKDHMVVGHWENRFAKAGPEGIEPRGEIAQNLLSLVKSDFPIQLEGEQLESILGLLEVISALQLDSLLPPYHVHYFLVLLSMAVTKLGCSCSSSLALKFLTTCYQLLGYLQKGKSARSVFKIMYGSDIFEVVLTSLFRASSRFLIEMDDPAWLEFLQVIGTFLEELMQMLIQMKLSLVLNFRKITAFLSSSKPYTEAASSKQLENQNPQGRQLLLVSLTRLCHVLGPFLKEQKLGQEAPAALSELLQQVVLQTGAVLQLCSVPGARGWRLPSVLISSVSTLLEADLGQHCRDGGADISQGSDRTLLSHVALYQGVYSQILLELPALAGHDQSFQAALQFLTLFFLAPELHPNPEIPVQVTQDIEPHLGALFTQMLEVGTTEDLRLVMQCILQGLDVSNMWKADVQAVVSAVTLLRLLLNCPLSGEKASLLWRACPQIVTALTLLNREASQEQPVSLTVVGPVLDVLAALLRQGEEAIGNPHHVSLAFSILLTVPLDHLKPLEYGSVFPRLHNVLFSILQCHPKVMLKAIPSFLNSFNRLVFSVMREGRQKDKGSIDDLPTVLKCARLVERMYSHIAARAEEFAVFSPFMVAQYVLEVQKVTLYPAVKSLLQEGIYLILDLCIEPDVQFLRASLQPGMRDIFKELYNDYLKYHKAKHEGEKRYTA

SEQ ID NO: 739698 - protein, 1475 aa, Homo sapiens
MAAVYSGISLKLKSKTTSWEDKLKLAHFAWISHQCFLPNKEQVLLDWARQSLVAFYKKKLELKEDIVERLWIYIDNILHSRKLQNLLKNGKTINLQISLVKIINERVAEFSLSGSQRNICAVLRCCQGILSTPALAVIYTAKQELMVALLSQLCWSACRQPEGAVVAQLFEVIHLALGHYLLILQQQVNPRRAFGDVTAHLLQPCLVLRHLLSGGTWTQAGQGQLRQVLSRDIRSQIEAMFRGGIFQPELLSSYKEGLLDQQQGDVKTGAMKNLLAPMDTVLNRLVDAGYCAASLHTSVVANSVALLYKLFLDSYFKEGNQLLCFQVLPRLFGCLKISHLQEEQSKALSTSDWTTELLVVEQLLNSVANNNIYNIAADRIRHEEAQFRFYRHVAELLINHAQAPIPAWFRCLKTLISLNHLILEPDLDDLLASAWIDAEVTEFRTKKAQEALIRTVFQTYAKLRQVPRLFEEVLGVICRPAAEALRQPVLASGPSTVLSACLLELPPSQILDTWSLVLEKFQSLVLPYLQSDADMALKLLSLSLLLHCIMFNMRSLDSSTPLPIVRRTQCMMERMMRELVQPLLALLPDTPGPEPELWLQKVSDSVLLLSYTWAQVDAMFSLNCSQYHSMSGPLIGVALEISNLPSLLPGVKTQHWKKIEKFTAQFSSLGTYCLEQLYLQKMKRTLMQTSFRSEGAIQSLRCDAAFIIGSGRKSLNQRTTASWDGQVGMVSGLTYPVAHWHLIVSNLTILISYLCPDDVGYLASVLLRTLPMGKAQEVSIDEEAYITLEKISKAFLHSPLFPEMQSLHSAFLTCVTTSCSSILCSGAQRDSGLVSQQLPWLFEKDHMVVGHWENRFAKAGPEGIEPRGEIAQNLLSLVKSDFPIQLEGEQLESILGLLEVISALQLDSLLPPYHVHYFLVLLSMAVTKLGCSCSSSLALKFLTTCYQLLGYLQKGKSARSVFKIMYGSDIFEVVLTSLFRASSRFLIEMDDPAWLEFLQVIGTFLEELMQMLIQMKLSLVLNFRKITAFLSSSKPYTEAASSKQLENQNPQGRQLLLVSLTRLCHVLGPFLKEQKLGQEAPAALSELLQQVVLQTGAVLQLCSVPGARGWRLPSVLISSVSTLLEADLGQHCRDGGADISQGSDRTLLSHVALYQGVYSQILLELPALAGHDQSFQAALQFLTLFFLAPELHPKKDSVFTSMFHSVRRVLADPEIPVQVTQDIEPHLGALFTQMLEVGTTEDLRLVMQCILQGLDVSNMWKADVQAVVSAVTLLRLLLNCPLSGEKASLLWRACPQIVTALTLLNREASQEQPVSLTVVGPVLDVLAALLRQGEEAIGNPHHVSLAFSILLTVPLDHLKPLEYGSVFPRLHNVLFSILQCHPKVMLKAIPSFLNSFNRLVFSVMREGRQKDKGSIDDLPTVLKCARLVERMYSHIAARAEEFAVFSPFMVAQYVLEVQKVKLGSMSFTKYCVYGP

SEQ ID NO: 739699 - protein, 115 aa, Homo sapiens
MSYKPNLAAHMPAAALNAAGSVHSPSTSMATSSQYRQLLSDYGPPSLGYTQGTGNSQVPQSKYAELLAIIEELGKEIRPTYAGSKSAMERLKRGIIHARGLVRECLAETERNARS

SEQ ID NO: 739700 - protein, 135 aa, Homo sapiens
AWHQLSVPEAKSAAPTVCVRERPCGSGGGRRAAAEGGLAGSVHSPSTSMATSSQYRQLLSDYGPPSLGYTQGTGNSQVPQSKYAELLAIIEELGKEIRPTYAGSKSAMERLKRGIIHARGLVRECLAETERNARS

SEQ ID NO: 739701 - protein, 112 aa, Homo sapiens
MIYVLKYTTSPPFSPAGSVHSPSTSMATSSQYRQLLSDYGPPSLGYTQGTGNSQVPQSKYAELLAIIEELGKEIRPTYAGSKSAMERLKRGIIHARGLVRECLAETERNARS

SEQ ID NO: 739702 - protein, 115 aa, Homo sapiens; identical to SEQ ID NO: 739699

SEQ ID NO: 739703 - protein, 115 aa, Homo sapiens; identical to SEQ ID NO: 739699

SEQ ID NO: 739704 - protein, 115 aa, Homo sapiens; identical to SEQ ID NO: 739699

SEQ ID NO: 739705 - protein, 115 aa, Homo sapiens; identical to SEQ ID NO: 739699

SEQ ID NO: 739706 - protein, 115 aa, Homo sapiens; identical to SEQ ID NO: 739699

SEQ ID NO: 739707 - protein, 115 aa, Homo sapiens; identical to SEQ ID NO: 739699

SEQ ID NO: 739708 - protein, 115 aa, Homo sapiens; identical to SEQ ID NO: 739699

SEQ ID NO: 739709 - protein, 175 aa, Homo sapiens
SPGGGRCGQGQDPRGRARMEGCGAAGAAGLPGALRSRGRRDWDQDGVAGGQRTRRPGGLGRERGSRGYPMRSRGDPREAGSVHSPSTSMATSSQYRQLLSDYGPPSLGYTQGTGNSQVPQSKYAELLAIIEELGKEIRPTYAGSKSAMERLKRGIIHARGLVRECLAETERNARS

SEQ ID NO: 739710 - protein, 153 aa, Homo sapiens
MIYVLKYTTRHHFLQVIFHPCPHHQGEESALRIPVRPGLPQPPRDRPPAHPRGAGRGAAARTRAGLRRRRDPSPPNFGKLRAPSAPGGAGRGRRRSRPLTPGRPLPAPAAPPAPRKVCGRPCAAPGAWVRLRWECPLAFHQHGNVFTVPPAAQ

SEQ ID NO: 739711 - protein, 274 aa, Homo sapiens
AEFQIGCGGRGAAVLRLCSALVVSGSSGQRRLLARQMASRWQNMGTSVRRRSLQHQEQLEDSKELQPVVSHQETSVGALGSLCRQFQRRLPLRAVNLNLRAGPSWKRLETPEPGQQGLQAAARSAKSALGAVSQRIQESCQSGTKWLVETQVKARRRKRGAQKGSGSPTHSLSQKSTRLSGAAPAHSAADPWEKEHHRLSVRMGSHAHPLRRSRREAAFRSPYSSTEPLCSPSESDSDLEPVGAGIQHLQKLSQELDEAIMAEESGDIVSLIHD

SEQ ID NO: 739712 - protein, 461 aa, Homo sapiens
AEFQIGCGGRGAAVLRLCSALVVSGSSGQRRLLARQMASRWQNMGTSVRRRSLQHQEQLEDSKELQPVVSHQETSVGALGSLCRQFQRRLPLRAVNLNLRAGPSWKRLETPEPGQQGLQAAARSAKSALGAVSQRIQESCQSGTKWLVETQVKARRRKRGAQKGSGSPTHSLSQKSTRLSGAAPAHSAADPWEKEHHRLSVRMGSHAHPLRRSRREAAFRSPYSSTEPLCSPSESDSDLEPVGAGIQHLQKLSQELDEAIMAEERTLRGSSVPCLPMELGKAPDCYGVPGLSAHGPILGAGPRLWTSPNLGLFPHSTCIMAMMGSKAGPCQLYVLRGHIPTTFPGLILCSSGWEGPLRAHHTQWHQSLPFSLVVTSSLSFMTEEVPAGNAHLPRVFLTVLLLHLMHEQVKEKAHRADGHSRVGSTYLPLEARAANLTDPVINSTLGAPSSYSHLPAPPTPQ

SEQ ID NO: 739713 - protein, 231 aa, Homo sapiens [sequence omitted]

SEQ ID NO: 739714 - protein, 198 aa, Homo sapiens
AEFQIGCGGRGAAVLRLCSALVVSGSSGQRRLLARQMASRWQNMGTSVRRRSLQHQEQLEDSKELQPVVSHQETSVGALGSLCRQFQRRLPLRAVNLNLRAGPSWKRLETPEPGQQGLQAAARSAKSALGAVSQRIQESCQSGTKWLVETQVKARRRKRGAQKGSGSPTHSLSQILSLETHRTLDLEPSICLIYNMKC

SEQ ID NO: 739715 - protein, 171 aa, Homo sapiens
MASRWQNMGTSVRRRSLQHQEQLEDSKELQPVVSHQETSVGALGSLCRQFQRRLPLRAVNLNLRAGPSWKRLVFGESSAESLTHCVSGAKALEGPTLIPPFPTRDSEEGIGDISRLTTLGSRVPIYMLSAEHCGCARRGSPVQEQFLPFVNYLRNLLCHFIRKKPACDFPR

SEQ ID NO: 739716 - protein, 274 aa, Homo sapiens; identical to SEQ ID NO: 739711

SEQ ID NO: 739717 - protein, 284 aa, Homo sapiens
AEFQIGCGGRGAAVLRLCSALVVSGSSGQRRLLARQMASRWQNMGTSVRRRSLQHQEQLEDSKELQPVVSHQETSVGALGSLCRQFQRRLPLRAVNLNLRAGPSWKRLETPEPGQQGLQAAARSAKSALGAVSQRIQESCQSGTKWLVETQVKARRRKRGAQKGSGSPTHSLSQKSTRLSGAAPAHSAADPWEKEHHRLSVRMGSHAHPLRRSRREAAFRSPYSSTEPLCSPSESDSDLEPVGAGIQHLQKLSQELDEAIMAEERKQALSDRQGFILKDVYASP

SEQ ID NO: 739718 - protein, 274 aa, Homo sapiens; identical to SEQ ID NO: 739711

SEQ ID NO: 739719 - protein, 214 aa, Homo sapiens
AEFQIGCGGRGAAVLRLCSALVVSGSSGQRRLLARQMASRWQNMGTSVRRRSLQHQEQLEDSKELQPVVSHQETSVGALGSLCRQFQRRLPLRAVNLNLRAGPSWKRLETPEPENPGVLPKWHQVAGGDPGEGQEAEERSTEGQWIPNSQPEPEEHPAVWSRPCPLSRRPLGEGASPPLCPDGLTCPPITAIKAGGCLPEPLLLNRAPLLSQRV

SEQ ID NO: 739720 - protein, 105 aa, Homo sapiens
SAQSFLGVCRPQPDRLAQVHPQKVLHSAVPHGAAWDGRESEQRKCPLLGEGERRNIVQEKYRNVEVGKMSIVQPSKIMLNCLKNSPAWAGHCNPSTLGGRGGCIT

SEQ ID NO: 739721 - protein, 153 aa, Homo sapiens
PKAKKEAPVPPKAEAKTKVLKAKKAVFKGVHSHTKKDLHVTHLPAAHDTATPEAAQISSAERPQENKLDHYAIIKFLLTTESAMKKIEDSNTLVFVVDVKANKHQIKQAVKKLYDIDVAKVNTLIRPDGEKKAYVQLAPDYNALDVANKIGII

SEQ ID NO: 739722 - protein, 977 aa, Homo sapiens
MKPSIAEMLHRGRMLWIILLSTIALGWTTPIPLIEDSEEIDEPCFDPCYCEVKESLFHIHCDSKGFTNISQITEFWSRPFKLYLQRNSMRKLYTNSFLHLNNAVSINLGNNALQDIQTGAFNGLKILKRLYLHENKLDVFRNDTFLGLESLEYLQADYNVIKRIESGAFRNLSKLRVLILNDNLIPMLPTNLFKAVSLTHLDLRGNRLKVLFYRGMLDHIGRSLMELQLEENPWNCTCEIVQLKSWLERIPYTALVGDITCETPFHFHGKDLREIRKTELCPLLSDSEVEASLGIPHSSSSKENAWPTKPSSMLSSVHFTASSVEYKSSNKQPKPTKQPRTPRPPSTSQALYPGPNQPPIAPYQTRPPIPIICPTGCTCNLHINDLGLTVNCKERGFNNISELLPRPLNAKKLYLSSNLIQKIYRSDFWNFSSLDLLHLGNNRISYVQDGAFINLPNLKSLFLNGNDIEKLTPGMFRGLQSLHYLYFEFNVIREIQPAAFSLMPNLKLLFLNNNLLRTLPTDAFAGTSLARLNLRKNYFLYLPVAGVLEHLNAIVQIDLNENPWDCTCDLVPFKQWIETISSVSVVGDVLCRSPENLTHRDVRTIELEVLCPEMLHVAPAGESPAQPGDSHLIGAPTSASPYEFSPPGGPVPLSVLILSLLVLFFSAVFVAAGLFAYVLRRRRKKLPFRSKRQEGVDLTGIQMQCHRLFEDGGGGGGGSGGGGRPTLSSPEKAPPVGHVYEYIPHPVTQMCNNPIYKPREEEEVAVSSAQEAGSAERGGPGTQPPGMGEALLGSEQFAETPKENHSNYRTLLEKEKEWALAVSSSQLNTIVTVNHHHPHHPAVGGVSGVVGGTGGDLAGFRHHEKNGGVVLFPPGGGCGSGSMLLDRERPQPAPCTVGFVDCLYGTVPKLKELHVHPPGMQYPDLQQDARLKETLLFSAGKGFTDHQTQKSDYLELRAKLQTKPDYLEVLEKTTYRF

SEQ ID NO: 739723 - protein, 977 aa, Homo sapiens; identical to SEQ ID NO: 739722

SEQ ID NO: 739724 - protein, 69 aa, Homo sapiens
MCHSLPVTFFSTPPPMHLTQKVHEATLSAVSHRHCSIQGLCTGGQQDALGFLQGLSHAWVPVQSRPQGS

SEQ ID NO: 739725 - protein, 82 aa, Homo sapiens
RRRTTTPRDTFTCVTNIHMYTKPKFPPAMGCGLFSGVEQSLDFRSITHHNVSSTWLGDLRKRTIMAEGEAVTFFTSVIFVDA

SEQ ID NO: 739726 - protein, 406 aa, Homo sapiens
PGPAPRGSASRLGARHGDGGSAGLGGRPCIMETLSNASGTFAIRLLKILCQDNPSHNVFCSPVSISSALAMVLLGAKGNTATQMAQALSLNTEEDIHRAFQSLLTEVNKAGTQYLLRTANRLFGEKTCQFLSTFKESCLQFYHAELKELSFIRAAEESRKHINTWVSKKTEGKIEELLPGSSIDAETRLVLVNAIYFKGKWNEPFDETYTREMPFKINQEEQRPVQMMYQEATFKLAHVGEVRAQLLELPYARKELSLLVLLPDDGVELSTVEKSLTFEKLTAWTKPDCMKSTEVEVLLPKFKLQEDYDMESVLRHLGIVDAFQQGKADLSAMSAERDLCLSKFVHKSFVEVNEEGTEAAAASSCFVVAECCMESGPRFCADHPFLFFIRHNRANSILFCGRFSSP

SEQ ID NO: 739727 - protein, 376 aa, Homo sapiens
METLSNASGTFAIRLLKILCQDNPSHNVFCSPVSISSALAMVLLGAKGNTATQMAQALSLNTEEDIHRAFQSLLTEVNKAGTQYLLRTANRLFGEKTCQFLSTFKESCLQFYHAELKELSFIRAAEESRKHINTWVSKKTEGKIEELLPGSSIDAETRLVLVNAIYFKGKWNEPFDETYTREMPFKINQEEQRPVQMMYQEATFKLAHVGEVRAQLLELPYARKELSLLVLLPDDGVELSTVEKSLTFEKLTAWTKPDCMKSTEVEVLLPKFKLQEDYDMESVLRHLGIVDAFQQGKADLSAMSAERDLCLSKFVHKSFVEVNEEGTEAAAASSCFVVAECCMESGPRFCADHPFLFFIRHNRANSILFCGRFSSP

SEQ ID NO: 739728 - protein, 376 aa, Homo sapiens; identical to SEQ ID NO: 739727

SEQ ID NO: 739729 - protein, 194 aa, Homo sapiens
METLSNASGTFAIRLLKILCQDNPSHNVFCSPVSISSALAMVLLGAKGNTATQMAQALSLNTEEDIHRAFQSLLTEVNKAGTQYLLRTANRLFGEKTCQFLSTFKESCLQFYHAELKELSFIRAAEESRKHINTWVSKKTEGKIEELLPGSSIDAETRLVLVNAIYFKGKWNEPFDETYTREMPFKINQVGEAF

SEQ ID NO: 739730 - protein, 340 aa, Homo sapiens
REGHYIHWDHVMVPHWDPKISASYPRGRHSPPDDLGSSFYPELGPYSSRDPEVLREHMTQLKEAAIGVLVLSWYPPGMADDNGEPSDDLVPAILDTAHQYSIQVAFHIQPYKGRDDITVHDNIKYIIDTYGSHGAFYRYKNSMGKSLPLFYIYDSYLTSPEAWAHLLTPNGPHSIRNTPYDGVFIALLVEEGHTHDILAAGFDGMYTYFASNGFSFGSSHQNWKAVKNFCDANNLMFIPSVGPGYIDTSIRPWNNHNTRNRVNGKYYETALQAALTVRPEIVSITSFNEWHEGTQIEKAIPKKTPTRLYLDYLPHQPSLYLELTRRWAEHFIKEKEQWLM

SEQ ID NO: 739731 - protein, 340 aa, Homo sapiens; identical to SEQ ID NO: 739730

SEQ ID NO: 739732 - protein, 340 aa, Homo sapiens; identical to SEQ ID NO: 739730

SEQ ID NO: 739733 - protein, 319 aa, Homo sapiens
REGHYIHWDHVMVPHWDPKISASYPRGRHSPPDDLGSSFYPELGPYSSRDPEVLREHMTQLKEAAIGVLVLSWYPPGMADDNGEPSDDLVPAILDTAHQYSIQVAFHIQPYKGRDDITVHDNIKYIIDTYGSHGAFYRYKNSMGKSLPLFYIYDSYLTSPEAWAHLLTPNGPHSIRNTPYDGVFIALLVEEGHTHDILAAGFDGMYTYFASNGFSFGSSHQNWKAVKNFCDANNHNTRNRVNGKYYETALQAALTVRPEIVSITSFNEWHEGTQIEKAIPKKTPTRLYLDYLPHQPSLYLELTRRWAEHFIKEKEQWLM

SEQ ID NO: 739734 - protein, 340 aa, Homo sapiens; identical to SEQ ID NO: 739730

SEQ ID NO: 739735 - protein, 94 aa, Homo sapiens
KISVEGGYCVSLKWPLCCVSGVLVLSWYPPGMADDNGEPSDDLVPAILDTAHQYSIQVSLQEEATCSLPYSGELLSSAHRVSASTEVLGSSPKG

SEQ ID NO: 739736 - protein, 75 aa, Homo sapiens
SGVLVLSWYPPGMADDNGEPSDDLVPAILDTAHQYSIQVSLQEEATCSLPYSGELLSSAHRVSASTEVLGSSPKG

SEQ ID NO: 739737 - protein, 104 aa, Homo sapiens
MLGTQHHLSHWITGVCYHAWPIFVFLVEMGFCHVAQAGLELLTSSDLPALASQSAGITDVSHPTQLILKNNFKKTFETAQIYIKVVSTVERIFSLNHLRVKLPT

SEQ ID NO: 739738 - protein, 118 aa, Homo sapiens
SRRTVTCMCRGWGPICLGGPRDGSAVTEGAKTPFRVGEGERSHRFNMKNSFRKWEGWGPTAHAVPDGTPCRWVAGGGQGNRLQFSGMPLDLLTQWPNSWLLPSSPTPKTSRSEQLSCG

SEQ ID NO: 739739 - protein, 105 aa, Homo sapiens
MWQAPFSVSQWLGSGSLAVPPAPPCLLLPSSFPGPTRCSSCQLCCRATAALEPLTMSEPPALHVPLIAVSLPTPPWPRDPWTGWGWGVCPLCSSQEPQLRVSGVQ

SEQ ID NO: 739740 - protein, 105 aa, Homo sapiens; identical to SEQ ID NO: 739739

SEQ ID NO: 739741 - protein, 92 aa, Homo sapiens
VLSQALSAYSPHPGHPGRRRRQLLLISVSLKSLLVWAHTVRHCISTTPTVSHLLRVRPRDLQEAAGSIRVTTSLGSKPLARLPQRAEASATT

SEQ ID NO: 739742 - protein, 153 aa, Homo sapiens
SLLRGSLCQGSPKKLSLGLLPTPESFSKHDSYVQVVKGDTSVMSTFLSFLEERPLGKSQVWERSGLLARYCFQRCRCHLGNAHVCSATDWWQGVQEENINLKQREGGDKLTCTRELRSGVYVSERAKLYQCSQARLQTICPVETSMMMKMFYI

SEQ ID NO: 739743 - protein, 127 aa, Homo sapiens
VPIQLPGGNSRASVSFIHPWAQRCGRVQHACSLQVTRRRQSLGADTGDERPEVARLFPRPHSHVSFPRQGFEVGRVFHVLPGEVFWVPLSPFLRFPCPATLGTPGAACRTLQPPPGEAGFYLLSPAL

SEQ ID NO: 739744 - protein, 103 aa, Homo sapiens
MCLHKYAHTKLKKGCHLSTQLPAPSRSPNCSAEKNSLEEHKETQELFLLAFPVTSGITFGKSLHPQDLNLIIYKRTEAAICERSGFSSYVLSNQKVLSAIKLC

SEQ ID NO: 739745 - protein, 790 aa, Homo sapiens
MSSKAEKKQRLSGRGSSQASWSGRATRAAVATQEQGNAPAVSEPELQAELPKEEPEPRLEGPQAQSEESVEPEADVKPLFLSRAALTGLADAVWTQEHDAILEHFAQDPTESILTIFIDPCFGLKLELGMPVQTQNQLVYFIRQAPVPITWENFEATVQFGTVRGPYIPALLRLLGGVFAPQIFANTGWPESIRNHFASHLHKFLACLTDTRYKLEGHTVLYIPAEAMNMKPEMVIKDKELVQRLETSMIHWTRQIKEMLSAQETVETGENLGPLEEIEFWRNRCMDLSGISKQLVKKGVKHVESILHLAKSSYLAPFMKLAQQIQDGSRQAQSNLTFLSILKEPYQELAFMKPKDISSKLPKLISLIRIIWVNSPHYNTRERLTSLFRKVCDCQYHFARWEDGKQGPLPCFFGAQGPQITRNLLEIEDIFHKNLHTLRAVRGGILDVKNTCWHEDYNKFRAGIKDLEVMTQNLITSAFELVRDVPHGVLLLDTFHRLASREAIKRTYDKKAVDLYMLFNSELALVNRERNKKWPDLEPYVAQYSGKARWVHILRRRIDRVMTCLAGAHFLPRIGTGKESVHTYQQMVQAIDELVRKTFQEWTSSLDKDCIRRLDTPLLRISQEKAGMLDVNFDKYRSHLAPFPYTPLLQLSQEFHSHLLTPLFIILSLSHTICLLSSFYFFFSSFIFVSPHLPPCYQHFNFTTYLKTQQNKTMIGQARWLTPVIPALWEAEVGASLEPRSLRTAWATWQNPVSAKNTKISWAWWHKPVVSATWEGEVGGSPEPGRQRLQ

SEQ ID NO: 739746 - protein, 790 aa, Homo sapiens; identical to SEQ ID NO: 739745

SEQ ID NO: 739747 - protein, 401 aa, Homo sapiens
MVCDCQYHFARWEDGKQGPLPCFFGAQGPQITRNLLEIEDIFHKNLHTLRAVRGGILDVKNTCWHEDYNKFRAGIKDLEVMTQNLITSAFELVRDVPHGVLLLDTFHRLASREAIKRTYDKKAVDLYMLFNSELALVNRERNKKWPDLEPYVAQYSGKARWVHILRRRIDRVMTCLAGAHFLPRIGTGKESVHTYQQMVQAIDELVRKTFQEWTSSLDKDCIRRLDTPLLRISQEKAGMLDVNFDKYRSHLAPFPYTPLLQLSQEFHSHLLTPLFIILSLSHTICLLSSFYFFFSSFIFVSPHLPPCYQHFNFTTYLKTQQNKTMIGQARWLTPVIPALWEAEVGASLEPRSLRTAWATWQNPVSAKNTKISWAWWHKPVVSATWEGEVGGSPEPGRQRLQ

SEQ ID NO: 739748 - protein, 74 aa, Homo sapiens
RGQGQASLELRRAGRRDWCPAEREPAVRSRRAGVKEEKLESEGKAEERGPRSAKESDCTVASLTSGGSLRRAAP

SEQ ID NO: 739749 - protein, 963 aa, Homo sapiens
MAAQRIRAANSNGLPRCKSEGTLIDLSEGFSETSFNDIKVPSPSALLVDNPTPFGNAKEVIAIKDYCPTNFTTLKFSKGDHLYVLDTSGGEWWYAHNTTEMGYIPSSYVQPLNYRNSTLSDSGMIDNLPDSPDEVAKELELLGGWTDDKKVPGRMYSNNPFWNGVQTNPFLNGNVPVMPSLDELNPKSTVDLLLFDAGTSSFTESSSATTNSTGNIFDELPVTNGLHAEPPVRRDNPFFRSKRSYSLSELSVLQAKSDAPTSSSFFTGLKSPAPEQFQSREDFRTAWLNHRKLARSCHDLDLLGQSPGWGQTQAVETNIVCKLDSSGGAVQLPDTSISIHVPEGHVAPGETQQISMKALLDPPLELNSDRSCSISPVLEVKLSNLEVKTSIILEMKVSAEIKNDLFSKSTVGLQCLRSDSKEGPYVSVPLNCSCGDTVQAQLHNLEPCMYVAVVAHGPSILYPSTVWDFINKKVTVGLYGPKHIHPSFKTVVTIFGHDCAPKTLLVSEVTRQAPNPAPVALQLWGKHQFVLSRPQDLKVCMFSNMTNYEVKASEQAKVVRGFQLKLGKVSRLIFPITSQNPNELSDFTLRVQVKDDQEAILTQFCVQTPQPPPKSAIKPSGQRRFLKKNEVGKIILSPFATTTKYPTFQDRPVSSLKFGKLLKTVVRQNKNHYLLEYKKGDGIALLSEERVRLRGQLWTKEWYIGYYQGRVGLVHTKNVLVVGRARPSLCSGPELSTSVLLEQILRPCKFLTYIYASVRTLLMENISSWRSFADALGYVNLPLTFFCRAELDSEPERVASVLEKLKEDCNNTENKERKSFQKELVMALLKMDCQGLVVRLIQDFVLLTTAVEVAQRWRELAEKLAKVSKQQMDAYESPHRDRNGVVDSEAMWKPAYDFLLTWSHQIGDSYRDVIQELHLGLDKMKNPITKRWKHLTGTLILVNSLDVLRAAAFSPADQDDFVI

SEQ ID NO: 739750 - protein, 78 aa, Homo sapiens
VPSVALMLAGSALKGAGSVVMSAPCDLRRRPHCCASPFSPGQKAVSWDFSDGERLRLYQRIHFLLPPVERSHSSKKPG

SEQ ID NO: 739751 - protein, 343 aa, Homo sapiens
MGFSSKGSNEVGKIILSPFATTTKYPTFQDRPVSSLKFGKLLKTVVRQNKNHYLLEYKKGDGIALLSEERVRLRGQLWTKEWYIGYYQGRVGLVHTKNVLVVGRARPSLCSGPELSTSVLLEQILRPCKFLTYIYASVRTLLMENISSWRSFADALGYVNLPLTFFCRAELDSEPERVASVLEKLKEDCNNTENKERKSFQKELVMALLKMDCQGLVVRLIQDFVLLTTAVEVAQRWRELAEKLAKVSKQQMDAYESPHRDRNGVVDSEAMWKPAYDFLLTWSHQIGDSYRDVIQELHLGLDKMKNPITKRWKHLTGTLILVNSLDVLRAAAFSPADQDDFVI

SEQ ID NO: 739752 - protein, 123 aa, Homo sapiens
PFSGGRGCGPVQPPLPTPPGRCGLTPTSTGRPSPSWPSGDLSCPAGPNSTAQRRLRVPRPGPLAPSRPRMSGKLCSGSPRGGAGRSRRTEGARFENAEDGVCDRLPAPSSPPHLRRLQVLQGA

SEQ ID NO: 739753 - protein, 287 aa, Homo sapiens
PTKPQAGAGAAAARAYGAEPLARAVGESVRPSVRPSGRRSSRQAQRPRRLVSPHPEPPGGAGLAAAAMSMGLEITGTALAVLGWLGTIVCCALPMWRVSAFIGSNIITSQNIWEGLWMNCVVQSTGQMQCKVYDSLLALPQDLQAARALIVVAILLAAFGLLVALVGAQCTNCVQDDTAKAKITIVAGVLFLLAALLTLVPVSWSANTIIRDFYNPVVPEAQKREMGAGLYVGWAAAALQLLGGALLCCSCPPREKKYTATKVVYSAPRSTGPGASLGTGYDRKDYV

SEQ ID NO: 739754 - protein, 287 aa, Homo sapiens; identical to SEQ ID NO: 739753

SEQ ID NO: 739755 - protein, 262 aa, Homo sapiens
PTKPQAGAGAAAARAYGAEPLARAVGESVRPSVRPSGRRSSRQAQRPRRLVSPHPEPPGGAGLAAAAMSMGLEITGTALAVLGWLGTIVCCALPMWRVSAFIGSNIITSQNIWEGLWMNCVVQSTGQMQCKVYDSLLVALVGAQCTNCVQDDTAKAKITIVAGVLFLLAALLTLVPVSWSANTIIRDFYNPVVPEAQKREMGAGLYVGWAAAALQLLGGALLCCSCPPREKKYTATKVVYSAPRSTGPGASLGTGYDRKDYV

SEQ ID NO: 739756 - protein, 246 aa, Homo sapiens
PTKPQAGAGAAAARAYGAEPLARAVGESVRPSVRPSGRRSSRQAQRPRRLVSPHPEPPGGAGLAAAAMSMGLEITGTALAVLGWLGTIVCCALPMWRVSAFIGSNIITSRACTWAGRPRRCSCWGARCSAARVPHARRSTRPPRSSTPRRAPPAREPAWAQATTARTTSKGQTQGDPTTTTTTNTTTTTASWSAHQAIQRAALPRRPAHPQKPGSPRAGLGQLPQQPRLCGPGSRLRGPGTNLHGL

SEQ ID NO: 739757 - protein, 189 aa, Homo sapiens
TIRLGSEAWFEQNIWEGLWMNCVVQSTGQMQCKVYDSLLALPQDLQAARALIVVAILLAAFGLLVALVGAQCTNCVQDDTAKAKITIVAGVLFLLAALLTLVPVSWSANTIIRDFYNPVVPEAQKREMGAGLYVGWAAAALQLLGGALLCCSCPPREKKYTATKVVYSAPRSTGPGASLGTGYDRKDYV

SEQ ID NO: 739758 - protein, 145 aa, Homo sapiens
ILPKAQEESVPLPLPDSGGCPRCLFQGAQQAASSPPRLHFHLAPLSNLLPRSVTYVVLVLALGPQDPRSRMFPPQNPEFNRVCQFFFLPCKVVDLQALGVGTWAPEILIVSFVRCIAPHQHLQKPGSPTVSLQSPESHPIRHGGL

SEQ ID NO: 739759 - protein, 110 aa, Homo sapiens
LQLRKQSQLTVPWLSRGACGGKPPPSEGSVDSPGFSVLAGVPLLPNTCPEAACLHNQLPSERFRHALHSGQGLFLDREAEKYQIKMTCMYWKIICGLYVGGWKQTRVIYI

SEQ ID NO: 739760 - protein, 201 aa, Homo sapiens
PKFRNQLIAKGKKDSPKDKKTLLTMNWFGSNFFRCPEDLSLLNIYSPLLSHMSSEDEHFISNLRGHVPASAVVKQPVRGASGRTTITAIVQTGGGWSTGLFSVCRDRRICFCGLFCPMCLECDIARHYGECLCWPLLPGSTFALRIGTRERHKIQGTLCEDWLAVHCCWAFSICQVARELKMRTSQVYEICAVPMTKDTLV

SEQ ID NO: 739761 - protein, 241 aa, Homo sapiens
MEAAADGPAETQSPVEKDSPAKTQSPAQDTSIMSRNNADTGRVLALPEHKKKRKGNLPAESVKILRDWMYKHRFKAYPSEEEKQMLSEKTNLSLLQISNWFINARRRILPDMLQQRRNDPIIGHKTGKDAHATHLQSTEASVPAKSGPSGPDNVQSLPLWPLPKGQMSREKQPDPESAPSQKLTGIAQPKKKVKVSITSPSSPELVSPEEHADFSSFLLLVDAAVQRAAELELEKKQEPNP

SEQ ID NO: 739762 - protein, 103 aa, Homo sapiens
MYSLDPTLQGAEHFNFSKAGTHPRPLGSAPLGLGCGSITLLMTTAFCPLSTSDSWAPSAPPNDSPVTPQELLALSGLSSVPCSSVNKLPAWRPLCHRMWQVYD

SEQ ID NO: 739763 - protein, 108 aa, Homo sapiens
RSLLPSGSKLTEGVSSCWFLTAEGNEWLLQGQIAAGDIENISSQPTISLQIPDDCLSLEAIVSVSVFLYYCSADSSACMMKAILFSQPLQITDTQQGCIAPVELRYVF

SEQ ID NO: 739764 - protein, 108 aa, Homo sapiens; identical to SEQ ID NO: 739763

SEQ ID NO: 739765 - protein, 430 aa, Homo sapiens
GRASWAGPASGCSFTFSSGHLQLLLAGRLPGRADAPDAPPSGRRRSRSMGSAFERVVRRVVQELDHGGEFIPVTSLQSSTGFQPYCLVVRKPSSSWFWKPRYKCVNLSIKDILEPDAAEPDVQRGRSFHFYDAMDGQIQGSVELAAPGQAKIAGGAAVSDSSSTSMNVYSLSVDPNTWQTLLHERHLRQPEHKVLQQLRSRGDNVYVVTEVLQTQKEVEVTRTHKREGSGRFSLPGATCLQGEGQGHLSQKKTVTIPSGSTLAFRVAQLVIDSDLDVLLFPDKKQRTFQPPATGHKRSTSEGAWPQLPSGLSMMRCLHNFLTDGVPAEGAFTEDFQGLRAEVETISKELELLDRELCQLLLEGLEGVLRDQLALRALEGGAGAGPEPWAGGAPGRSSRCCPGVPGVVLRNAGAGTRYPCCLPAGGTDHAE

SEQ ID NO: 739766 - protein, 280 aa, Homo sapiens
MQAGTGLGCRDLAGRLPGRADAPDAPPSGRRRSRSMGSAFERVVRRVVQELDHGGEFIPVTSLQSSTGFQPYCLVVRKPSSSWFWKPRYKCVNLSIKDILEPDAAEPDVQRGRSFHFYDAMDGQIQGSVELAAPGQAKIAGGAAVSDSSSTSMNVYSLSVDPNTWQTLLHERHLRQPEHKVLQQLRSRGDNVYVVTEVLQTQKEVEVTRTHKREGSGRFSLPGATCLQGEGQGHLSQKKTVTIPSGSTLAFRVAQLVIDSDLDVLLFRKEAPPGATPKPP

SEQ ID NO: 739767 - protein, 117 aa, Homo sapiens
GRASWAGPASGCSFTFSSGHLQLLLAGRLPGRADAPDAPPSGRRRSRSMGSAFERVVRRVVQELDHGGEFIPVTSLQSSTGFQPYCLVVRKPSSSWFWKPRYKCVNLSLSGLSQEPH

SEQ ID NO: 739768 - protein, 66 aa, Homo sapiens
  misc_feature (12)..(12): Xaa can be any naturally occurring amino acid
GTRAAGAKEAPXLGLAGVADPVVGRCELVGSLLEQSAPWQERSTMSLCPGMAWQLSSRAECLPTSC

SEQ ID NO: 739769 - protein, 430 aa, Homo sapiens; identical to SEQ ID NO: 739765

SEQ ID NO: 739770 - protein, 494 aa, Homo sapiens
MQAGTGLGCRDSPDGSQGEQTRQTRHPRGADGHGSRAGAVPAPSCLLAQPPLSADPALRGFLGQLQPLHSGPGAPYPSGGPLWPLTPKASALDRWLMELQAQRRPWRTQLGSMGSAFERVVRRVVQELDHGGEFIPVTSLQSSTGFQPYCLVVRKPSSSWFWKPRYKCVNLSIKDILEPDAAEPDVQRGRSFHFYDAMDGQIQGSVELAAPGQAKIAGGAAVSDSSSTSMNVYSLSVDPNTWQTLLHERHLRQPEHKVLQQLRSRGDNVYVVTEVLQTQKEVEVTRTHKREGSGRFSLPGATCLQGEGQGHLSQKKTVTIPSGSTLAFRVAQLVIDSDLDVLLFPDKKQRTFQPPATGHKRSTSEGAWPQLPSGLSMMRCLHNFLTDGVPAEGAFTEDFQGLRAEVETISKELELLDRELCQLLLEGLEGVLRDQLALRALEGGAGAGPEPWAGGAPGRSSRCCPGVPGVVLRNAGAGTRYPCCLPAGGTDHAE

SEQ ID NO: 739771 - protein, 265 aa, Homo sapiens
MNVYSLSVDPNTWQTLLHERHLRQPEHKVLQQLRSRGDNVYVVTEVLQTQKEVEVTRTHKREGSGRFSLPGATCLQGEGQGHLSQKKTVTIPSGSTLAFRVAQLVIDSDLDVLLFPDKKQRTFQPPATGHKRSTSEGAWPQLPSGLSMMRCLHNFLTDGVPAEGAFTEDFQGLRAEVETISKELELLDRELCQLLLEGLEGVLRDQLALRALEGGAGAGPEPWAGGAPGRSSRCCPGVPGVVLRNAGAGTRYPCCLPAGGTDHAE

SEQ ID NO: 739772 - protein, 430 aa, Homo sapiens; identical to SEQ ID NO: 739765

SEQ ID NO: 739773 - protein, 429 aa, Homo sapiens
GRASWAGPASGCSFTFSSGHLQLLLAGRLPGRADAPDAPPSGRRRSRSMGSAFERVVRRVVQELDHGGEFIPVTSLQSSTGFQPYCLVVRKPSSSWFWKPRYKCVNLSIKDILEPDAAEPDVQRGRSFHFYDAMDGQIQGSVELAAPGQAKIAGGAAVSDSSSTSMNVYSLSVDPNTWQTLLHERHLRQPEHKVLQQLRSRGDNVYVVTEVLQTQKEVEVTRTHKREGSGRFSLPGATCLQGEGQGHLSQKKTVTIPSGSTLAFRVAQLVIDSDLDVLLFPDKKQRTFQPPATGHKRSTSEGAWPQLPSGLSMMRCLHNFLTDGVPAEGAFTEDFQGLRAEVETISKELELLDRELCQLLLEGLEGVLRDQLALRALEGGVLPCLGRWAASWSRVPRGRSAAPCPCPPGSWGTAGAKEHRPGSCWTSVA

SEQ ID NO: 739774 - protein, 210 aa, Homo sapiens
MGSLRRGRSLKTSRAYGQRWRPSPRNWSFWTESCASCCWRAWRGCCGTSWPCEPWREALEQGQSLGPVEPLDGPAGAVLECLVLSSGMLVPELAIPVVYLLGALTMLSETQHKLLAEALESQTLLGPLELVGSLLEQSAPWQERSTMSLPPGLLGNSWGEGAPAWVLLDECGLELGEDTPHVCWEPQAQGRMCALYASLALLSGLSQEPH

SEQ ID NO: 739775 - protein, 376 aa, Homo sapiens
GRASWAGPASGCSFTFSSGHLQLLLAGRLPGRADAPDAPPSGRRRSRSMGSAFERVVRRVVQELDHGGEFIPVTSLQSSTGFQPYCLVVRKPSSSWFWKPRYKCVNLSIKDILEPDAAEPDVQRGRSFHFYDAMDGQIQGSVELAAPGQAKIAGGAAVSDSSSTSMNVYSLSVDPNTWQTLLHERHLRQPEHKVLQQLRSRGDNVYVVTEVLQTQKEVEVTRTHKREGSGRFSLPGATCLQGEGQGHLSQKKTVTIPSGSTLAFRVAQLVIDSDLDVLLFPDKKQRTFQPPATGHKRSTSEGAWPQLPSGLSMMRCLHNFLTDGVPAEGAFTEDFQGLRAEVETISKELELLDRELCQLLLEGLEGVLPVQMSMLA

SEQ ID NO: 739776 - protein, 293 aa, Homo sapiens
GRASWAGPASGCSFTFSSGHLQLLLAGRLPGRADAPDAPPSGRRRSRSMGSAFERVVRRVVQELDHGGEFIPVTSLQSSTGFQPYCLVVRKPSSSWFWKPRYKCVNLSIKDILEPDAAEPDVQRGRSFHFYDAMDGQIQGSVELAAPGQAKIAGGAAVSDSSSTSMNVYSLSVDPNTWQTLLHERHLRQPEHKVLQQLRSRGDNVYVVTEVLQTQKEVEVTRTHKREGSGRFSLPGATCLQGEGQGHLSQKKTVTIPSGSTLAFRVAQLVIDSDLDVLLFRKEAPPGATPKPP

SEQ ID NO: 739777 - protein, 211 aa, Homo sapiens
MGSAFERVVRRVVQELDHGGEFIPVTSLQSSTGFQPYCLVVRKPSSSWFWKPRYKCVNLSIKDILEPDAAEPDVQRGRSFHFYDAMDGQIQGSVELAAPGQAKIAGGAAVSDSSSTSMNVYSLSVDPNTWQTLLHERHLRQPEHKVLQQLRSRGDQLALRALEGGAGAGPEPWAGGSPWTVQQVLSWSALVLSPECWCRNSLSLLSTCWGH

SEQ ID NO: 739778 - protein, 122 aa, Homo sapiens
GRASWAGPASGCSFTFSSGHLQLLLAGRLPGRADAPDAPPSGRRRSRSMGSAFERVVRRVVQELDHGGEFIPVTSLQSSTGFQPYCLVVRKPSSSWFWKPRYKCVNLSIKDILEPDAAEPGA

SEQ ID NO: 739779 - protein, 332 aa, Homo sapiens
GRASWAGPASGCSFTFSSGHLQLLLAGRLPGRADAPDAPPSGRRRSRSMGSAFERVVRRVVQELDHGGEFIPVTSLQSSTGFQPYCLVVRKPSSSWFWKPRYKCVNLSIKDILEPDAAEPDVQRGRSFHFYDAMDGQIQGSVELAAPGQAKIAGGAAVSDSSSTSMNVYSLSVDPNTWQTLLHERWARRGQGRAGPHPPQATLLLFIYLFKLFFEVRFCYLGQGGLELLASSSPPASASQSAGITGVSHCARSQPCSWEGHNLGASGKSQRQKSAVAGTSLQEGSCRGHLGPPLPGLDPKDRTEPQAAVRTRGGVNTGAQVRGPHLESGLGV

SEQ ID NO: 739780 - protein, 114 aa, Homo sapiens
PSEQLPALRLAAERSHLAAGCPGTRPAPAPHGPVPGPSPRPISMPQGEGQGHLSQKKTVTIPSGSTLAFRVAQLVIDSDLGELELGVSRAQALAEKQGGLGRATRQLGLPWAPG

SEQ ID NO: 739781 - protein, 430 aa, Homo sapiens; identical to SEQ ID NO: 739765

SEQ ID NO: 739782 - protein, 470 aa, Homo sapiens
MGSAFERVVRRVVQELDHGGEFIPVTSLQSSTGFQPYCLVVRKPSSSWFWKPRYKCVNLSIKDILEPDAAEPDVQRGRSFHFYDAMDGQIQGSVELAAPGQAKIAGGAAVSDSSSTSMNVYSLSVDPNTWQTLLHERHLRQPEHKVLQQLRSRGDNVYVVTEVLQTQKEVEVTRTHKREGSGRFSLPGATCLQGEGQGHLSQKKTVTIPSGSTLAFRVAQLVIDSDLGELELGVSRAQALAEKQGGLGRATRQLGLPWAPGWTTSCVWQVAEVLCSGVWVIGQGLSWTGELLVGEGRGCWDLGDMPVLSAPVWLPDVLLFPDKKQRTFQPPATGHKRSTSEGAWPQLPSGLSMMRCLHNFLTDGVPAEGAFTEDFQGLRAEVETISKELELLDRELCQLLLEGLEGVLRDQLALRALEGGAGAGPEPWAGGAPGRSSRCCPGVPGVVLRNAGAGTRYPCCLPAGGTDHAE

SEQ ID NO: 739783 - protein, 265 aa, Homo sapiens; identical to SEQ ID NO: 739771

SEQ ID NO: 739784 - protein, 470 aa, Homo sapiens; identical to SEQ ID NO: 739782

SEQ ID NO: 739785 - protein, 378 aa, Homo sapiens
MGSAFERVVRRVVQELDHGGEFIPVTSLQSSTGFQPYCLVVRKPSSSWFWKPRYKCVNLSIKDILEPDAAEPDVQRGRSFHFYDAMDGQIQGSVELAAPGQAKIAGGAAVSDSSSTSMNVYSLSVDPNTWQTLLHERHLRQPEHKVLQQLRSRGDNVYVVTEVLQTQKEVEVTRTHKREGSGRFSLPGATCLQGEGQGHLSQKKTVTIPSGSTLAFRVAQLVIDSDLDVLLFPDKKQRTFQPPATGHKRSTSEGAWPQLPSGLSMMRCLHNFLTDGVPAEGAFTEDFQGLRAEVETISKELELLDRELCQLLLEGLEGVLRDQLALRALEGGAGAGPEPWAGGSPWTVQQVLSWSALVLSPECWCRNSLSLLSTCWGH

SEQ ID NO: 739786 - protein, 135 aa, Homo sapiens
GRWGQVAGGREGGGLSRWAFRNPLLPDSLPVLSETQHKLLAEALESQTLLGPLELVGSLLEQSAPWQERSTMSLPPGLLGNSWGEGAPAWVLLDECGLELGEDTPHVCWEPQAQGRMCALYASLALLSGLSQEPH

SEQ ID NO: 739787 - protein, 213 aa, Homo sapiens
GRASWAGPASGCSFTFSSGHLQLLLAGRLPGRADAPDAPPSGRRRSRSMGSAFERVVRRVVQELDHGGEFIPVTSLQSSTGFQPYCLVVRKPSSSWFWKPRYKCVNLSIKDILEPDAAEPDVQRGRSFHFYDAMDGQIQGSVELAAPGQAKIAGGAAVSDSSSTSMNVYSLSVDPNTWQTLLHERHLRQPEHKVLQQRVFAHQLLALGRPGAQ

SEQ ID NO: 739788 - protein, 154 aa, Homo sapiens
SACPDRGFPGPCKHLGSASPSVPTDGVPAEGAFTEDFQGLRAEVETISKELELLDRELCQLLLEGLEGVLRDQLALRALEGGGAGEGARGTQGLPSQPDSPALPVPTAGAGPEPWAGGAPGRSSRCCPGVPGVVLRNAGAGTRYPCCLPAGGTD

SEQ ID NO: 739789 - protein, 431 aa, Homo sapiens
SLGRWWSDLAPVLRPYQPSRSQLLLLPVCLEMATLLLLLGVLVVSPDALGSTTAVQTPTSGEPLVSTSEPLSSKMYTTSITSDPKADSTGDQTSALPPSTSINEGSPLWTSIGASTGSPLPEPTTYQEVSIKMSSVPQETPHATSHPAVPITANSLGSHTVTGGTITTNSPETSSRTSGAPVTTAASSLETSRGTSGPPLTMATVSLETSKGTSGPPVTMATDSLETSTGTTGPPVTMTTGSLEPSSGASGPQVSSVKLSTMMSPTTSTNASTVPFRNPDENSRGMLPVAVLVALLAVIVLVALLLLWRRRQKRRTGALVLSRGGKRNGVVDAWAGPAQVPEEGAVTVTVGGSGGDKGSGFPDGEGSSRRPTLTTFFGRRKSRQGSLAMEELKSGSGPSLKGEEEPLVASEDGAVDAPAPDEPEGGDGAAP

SEQ ID NO: 739790 - protein, 431 aa, Homo sapiens; identical to SEQ ID NO: 739789

SEQ ID NO: 739791 - protein, 400 aa, Homo sapiens
MATLLLLLGVLVVSPDALGSTTAVQTPTSGEPLVSTSEPLSSKMYTTSITSDPKADSTGDQTSALPPSTSINEGSPLWTSIGASTGSPLPEPTTYQEVSIKMSSVPQETPHATSHPAVPITANSLGSHTVTGGTITTNSPETSSRTSGAPVTTAASSLETSRGTSGPPLTMATVSLETSKGTSGPPVTMATDSLETSTGTTGPPVTMTTGSLEPSSGASGPQVSSVKLSTMMSPTTSTNASTVPFRNPDENSRGMLPVAVLVALLAVIVLVALLLLWRRRQKRRTGALVLSRGGKRNGVVDAWAGPAQVPEEGAVTVTVGGSGGDKGSGFPDGEGSSRRPTLTTFFGRRKSRQGSLAMEELKSGSGPSLKGEEEPLVASEDGAVDAPAPDEPEGGDGAAP

SEQ ID NO: 739792 - protein, 431 aa, Homo sapiens; identical to SEQ ID NO: 739789

SEQ ID NO: 739793 - protein, 537 aa, Homo sapiens
MGDEDKRITYEDSEPSTGMNYTPSMHQEAQEETVMKLKGIDANEPTEGSILLKSSEKKLQETPTEANHVQRLRQMLACPPHGLLDRVITNVTIIVLLWAVVWSITGSECLPGGNLFGIIILFYCAIIGGKLLGLIKLPTLPPLPSLLGMLLAGFLIRNIPVINDNVQIKHKWSSSLRSIALSIILVRAGLGLDSKALKKLKGVCVRLSMGPCIVEACTSALLAHYLLGLPWQWGFILGFVLGAVSPAVVVPSMLLLQGGGYGVEKGVPTLLMAAGSFDDILAITGFNTCLGIAFSTGSTVFNVLRGVLEVVIGVATGSVLGFFIQYFPSRDQDKLVCKRTFLVLGLSVLAVFSSVHFGFPGSGGLCTLVMAFLAGMGWTSEKAEVEKIIAVAWDIFQPLLFGLIGAEVSIASLRPETVGLCVATVGIAVLIRILTTFLMVCFAGFNLKEKIFISFAWLPKATVQAAIGSVALDTARSHGEKQLEDYGMDVLTVAFLSILITAPIGSLLIGLLGPRLLQKVEHQNKDEEVQGETSVQV

SEQ ID NO: 739794 - protein, 474 aa, Homo sapiens
MGDEDKRITYEDSEPSTGMNYTPSMHQEAQEETVMKLKGIDANEPTEGSILLKSSEKKLQETPTEANHVQRLRQMLACPPHGLLDRVITNVTIIVLLWAVVWSITGSECLPGGNLFGIIILFYCAIIGGKLLGLIKLPTLPPLPSLLGMLLAGFLIRNIPVINDNVQIKHKWSSSLRSIALSIILVRAGLGLDSKALKKLKGVCVRLSMGPCIVEACTSALLAHYLLGLPWQWGFILGFVLGAVSPAVVVPSMLLLQGGGYGVEKGVPTLLMAAGSFDDILAITGFNTCLGIAFSTGSTVFNVLRGVLEVVIGVATGSVLGFFIQYFPSRDQDKLVCKRTFLVLGLSVLAVFSSVHFGFPGSGGLCTLVMAFLAGMGWTSEKAEVEKIIAVAWDIFQPLLFGLIGAEVSIASLRPETVGCNRICGFGHSKVTWRETIRRLWNGCVDSGIFVHPHHSPNWKSAYWFTGPQASAES

SEQ ID NO: 739795 - protein, 537 aa, Homo sapiens; identical to SEQ ID NO: 739793

SEQ ID NO: 739796 - protein, 465 aa, Homo sapiens
MGDEDKRITYEDSEPSTGMNYTPSMHQEAQEETVMKLKGIDANEPTEGSILLKSSEKKLQETPTEANHVQRLRQMLACPPHGLLDRVITNVTIIVLLWAVVWSITGSECLPGGNLFGIIILFYCAIIGGKLLGLIKLPTLPPLPSLLGMLLAGFLIRNIPVINDNVQIKHKWSSSLRSIALSIILVRAGLGLDSKALKKLKGVCVRLSMGPCIVEACTSALLAHYLLGLPWQWGFILGFVLGAVSPAVVVPSMLLLQGGGYGVEKGVPTLLMAAGSFDDILAITGFNTCLGIAFSTGSTVFNVLRGVLEVVIGVATGSVLGFFIQYFPSRDQDKLVCKRTFLVLGLSVLAVFSSVHFGFPGSGGLCTLVMAFLAGMGWTSEKAEVEKIIAVAWDIFQPLLFGLIGAEVSIASLRPETVGLCVATVGIAVLIRILTTFLMVCFAGFNLKEKIFISFAWLPKATVQV

SEQ ID NO: 739797 - protein, 110 aa, Homo sapiens
MRLHSSLGKSETLSQYFFKKKILEECTDHVSRPYGWGLCKDFGFYSEKLLHIGELFRGFLPGCLYPFWLTMTCKLLYVSSPYCFLGFLSFLFKVLAQDFLRLEPHKARRN

SEQ ID NO: 739798 - protein, 71 aa, Homo sapiens
RASTMSFNTLYLLQFQKQSCLLQQTGKCDAFVKFPVAKDTLHMPLDQEIALMGTLQMDFYTSEVMHWPHYS

SEQ ID NO: 739799 - protein, 276 aa, Homo sapiens
MFLVTISCYTRGGRIISTSSRSVMVMLHYRSDLLQMLDTLVFSSLLLFGFAEQKQLLEVELYADYRENSYVPTTGAIIEIHSKRIQLYGAYLRIHAHFTGLRYLLYNFPMTCAFIGVASNFTFLSVIVLFSYMQWVWGGIWPRHRFSLQVNIRKRDNSRKEVQRRISAHQPGPEGQEESTPQSDVTEDGESPEDPSGTEGQLSEEEKPDQQPLSGEEELEPEASDGSGSWEDAALLTEANLPAPAPASASAPVLETLGSSEPAGGALRQRPTCSSS

SEQ ID NO: 739800 - protein, 255 aa, Homo sapiens
MFLVTISCYTRGGRIISTSSRSVMLLFGFAEQKQLLEVELYADYRENSYVPTTGAIIEIHSKRIQLYGAYLRIHAHFTGLRYLLYNFPMTCAFIGVASNFTFLSVIVLFSYMQWVWGGIWPRHRFSLQVNIRKRDNSRKEVQRRISAHQPGPEGQEESTPQSDVTEDGESPEDPSGTEGQLSEEEKPDQQPLSGEEELEPEASDGSGSWEDAALLTEANLPAPAPASASAPVLETLGSSEPAGGALRQRPTCSSS

SEQ ID NO: 739801 - protein, 168 aa, Homo sapiens
GNESPERVRQQSSGLVARREEGLQARAIGNWKGSRHGSGVEGRERPFYPLPRLLSKALPCSPPFPHTHSAAGLAIKCGCLTHRLDHETLVAEGGLGEALGGRTETSKGFTAAHALWHNPLIYGAAFPSPDLEFPFSRTFFFLSSLGPPGPSTQQSLTVSCICPAKWSE

SEQ ID NO: 739802 - protein, 1127 aa, Homo sapiens
MKSPLYLVSRSLPSSSQLKGSPQAISRASELHLLETPLVVKKAKSLAMSVTTSGFSEFTPQSILRSTLRSTPLASPSPSPGRSPQRLKETRISFVEEDVHPKWIPGAADDSKLEVFTTPKKCAVPVETEWLKSKDRTTSFFLNSPEKEHQEMDEGSQSLEKLDVSKGNSSVSITSDETTLEYQDAPSPEDLEETVFTASKPKSSSTALTTNVTEQTEKDGDKDVFASEVTPSDLQKQMGNLEDAETKDLLVAAEAFSELNHLSPVQGTEASLCAPSVYEGKIFTQKSKVPVLDEGLTSVETYTPAIRANDNKSMADVLGDGGNSSLTISEGPIVSERRLNQEVALNLKEDHEVEVGVLKESVDLPEEKLPISDSPPDTQEIHVIEQEKLEAQDSGEEARNLSFNELYPSGTLKLQYNFDTIDQQFCDLADNKDTAECDIAEVDGELFVAQSNFTLILEGEEGEVEPGDFASSDVLPKAANTATEEKLVCSGENDNHGQIANLPSAVTSDQKSQKVDTLPYVPEPIKVAIAENLLDVIKDTRSKEITSDTMEQSIHETIPLVSQNIMCPTKLVKSAFKTAQETSTMTMNVSQVDDVVSSKTRTRGQRIQNVNVKSAQQEASADVATPKMPGQSVRKKTRKAKEISEASENIYSDVRGLSQNQQIPQNSVTPRRGRRKKEVNQDILENTSSVEQELQITTGRESKRLKSSQLLEPAVEETTKKEVKVSSVTKRTPRRIKRSVENQESVEIINDLKVSTVTSPSRMIRKLRSTNLDASENTGNKQDDKSSDKQLRIKHVRRVRGREVSPSDVREDSNLESSQLTVQAEFDMSAIPRKRGRPRKINPSEDVGSKAVKEERSPKKKEAPSIRRRSTRNTPAKSENVDVGKPALGKSILVPNEELSMVMSSKKKLTKKTESQSQKRSLHSVSEERTDEMTHKETNEQEERLLATASFTKSSRSSRTRSSKAILLPDLSEPNNEPLFSPASEVPRKAKAKKIEVPAQLKELVSDLSSQFVISPPALRSRQKNTSNKNKLEDELKDDAQSVETLGKPKAKRIRTSKTKQASKNTEKESAWSPPPIEIRLISPLASPADGVKSKPRKTTEVTGTGLGRNRKKLSSYPKQILRRKML

SEQ ID NO: 739803 - protein, 1379 aa, Homo sapiens
LQDPLFSERQHCNRLNIEELLKHMYEVCQEMGLMEDLLKLPFTDTEQECLREIFASPSASVQNHEFLLVHHLQRANYVPALKLNQTLKINVMNDRDPRLRERSLARNSILDQYGKILPRVHRKLAIERAKPYHLSTSSVFRLVSRPKPLSAVPKQVVTGTVLTRSVFINNVLSKIGEVWASKEPINSTTPFNSSKIEEPSPIVYSLPAPELPEAFFGTPISKASQKISRLLDLVVQPVPRPSQCSEFIQQSSMKSPLYLVSRSLPSSSQLKGSPQAISRASELHLLETPLVVKKAKSLAMSVTTSGFSEFTPQSILRSTLRSTPLASPSPSPGRSPQRLKETRISFVEEDVHPKWIPGAADDSKLEVFTTPKKCAVPVETEWLKSKDRTTSFFLNSPEKEHQEMDEGSQSLEKLDVSKGNSSVSITSDETTLEYQDAPSPEDLEETVFTASKPKSSSTALTTNVTEQTEKDGDKDVFASEVTPSDLQKQMGNLEDAETKDLLVAAEAFSELNHLSPVQGTEASLCAPSVYEGKIFTQKSKVPVLDEGLTSVETYTPAIRANDNKSMADVLGDGGNSSLTISEGPIVSERRLNQEVALNLKEDHEVEVGVLKESVDLPEEKLPISDSPPDTQEIHVIEQEKLEAQDSGEEARNLSFNELYPSGTLKLQYNFDTIDQQFCDLADNKDTAECDIAEVDGELFVAQSNFTLILEGEEGEVEPGDFASSDVLPKAANTATEEKLVCSGENDNHGQIANLPSAVTSDQKSQKVDTLPYVPEPIKVAIAENLLDVIKDTRSKEITSDTMEQSIHETIPLVSQNIMCPTKLVKSAFKTAQETSTMTMNVSQVDDVVSSKTRTRGQRIQNVNVKSAQQEASADVATPKMPGQSVRKKTRKAKEISEASENIYSDVRGLSQNQQIPQNSVTPRRGRRKKEVNQDILENTSSVEQELQITTGRESKRLKSSQLLEPAVEETTKKEVKVSSVTKRTPRRIKRSVENQESVEIINDLKVSTVTSPSRMIRKLRSTNLDASENTGNKQDDKSSDKQLRIKHVRRVRGREVSPSDVREDSNLESSQLTVQAEFDMSAIPRKRGRPRKINPSEDVGSKAVKEERSPKKKEAPSIRRRSTRNTPAKSENVDVGKPALGKSILVPNEELSMVMSSKKKLTKKTESQSQKRSLHSVSEERTDEMTHKETNEQEERLLATASFTKSSRSSRTRSSKAILLPDLSEPNNEPLFSPASEVPRKAKAKKIEVPAQLKELVSDLSSQFVISPPALRSRQKNTSNKNKLEDELKDDAQSVETLGKPKAKRIRTSKTKQASKNTEKESAWSPPPIEIRLISPLASPADGVKSKPRKTTEVTGTGLGRNRKKLSSYPKQILRRKML

SEQ ID NO: 739804 - protein, 1331 aa, Homo sapiens
MFSEIFASPSASVQNHEFLLVHHLQRANYVPALKLNQTLKINVMNDRDPRLRERSLARNSILDQYGKILPRVHRKLAIERAKPYHLSTSSVFRLVSRPKPLSAVPKQVVTGTVLTRSVFINNVLSKIGEVWASKEPINSTTPFNSSKIEEPSPIVYSLPAPELPEAFFGTPISKASQKISRLLDLVVQPVPRPSQCSEFIQQSSMKSPLYLVSRSLPSSSQLKGSPQAISRASELHLLETPLVVKKAKSLAMSVTTSGFSEFTPQSILRSTLRSTPLASPSPSPGRSPQRLKETRISFVEEDVHPKWIPGAADDSKLEVFTTPKKCAVPVETEWLKSKDRTTSFFLNSPEKEHQEMDEGSQSLEKLDVSKGNSSVSITSDETTLEYQDAPSPEDLEETVFTASKPKSSSTALTTNVTEQTEKDGDKDVFASEVTPSDLQKQMGNLEDAETKDLLVAAEAFSELNHLSPVQGTEASLCAPSVYEGKIFTQKSKVPVLDEGLTSVETYTPAIRANDNKSMADVLGDGGNSSLTISEGPIVSERRLNQEVALNLKEDHEVEVGVLKESVDLPEEKLPISDSPPDTQEIHVIEQEKLEAQDSGEEARNLSFNELYPSGTLKLQYNFDTIDQQFCDLADNKDTAECDIAEVDGELFVAQSNFTLILEGEEGEVEPGDFASSDVLPKAANTATEEKLVCSGENDNHGQIANLPSAVTSDQKSQKVDTLPYVPEPIKVAIAENLLDVIKDTRSKEITSDTMEQSIHETIPLVSQNIMCPTKLVKSAFKTAQETSTMTMNVSQVDDVVSSKTRTRGQRIQNVNVKSAQQEASADVATPKMPGQSVRKKTRKAKEISEASENIYSDVRGLSQNQQIPQNSVTPRRGRRKKEVNQDILENTSSVEQELQITTGRESKRLKSSQLLEPAVEETTKKEVKVSSVTKRTPRRIKRSVENQESVEIINDLKVSTVTSPSRMIRKLRSTNLDASENTGNKQDDKSSDKQLRIKHVRRVRGREVSPSDVREDSNLESSQLTVQAEFDMSAIPRKRGRPRKINPSEDVGSKAVKEERSPKKKEAPSIRRRSTRNTPAKSENVDVGKPALGKSILVPNEELSMVMSSKKKLTKKTESQSQKRSLHSVSEERTDEMTHKETNEQEERLLATASFTKSSRSSRTRSSKAILLPDLSEPNNEPLFSPASEVPRKAKAKKIEVPAQLKELVSDLSSQFVISPPALRSRQKNTSNKNKLEDELKDDAQSVETLGKPKAKRIRTSKTKQASKNTEKESAWSPPPIEIRLISPLASPADGVKSKPRKTTEVTGTGLGRNRKKLSSYPKQILRRKML

SEQ ID NO: 739805 - protein, 1148 aa, Homo sapiens
HGINPECPLRPGCSEFIQQSSMKSPLYLVSRSLPSSSQLKGSPQAISRASELHLLETPLVVKKAKSLAMSVTTSGFSEFTPQSILRSTLRSTPLASPSPSPGRSPQRLKETRISFVEEDVHPKWIPGAADDSKLEVFTTPKKCAVPVETEWLKSKDRTTSFFLNSPEKEHQEMDEGSQSLEKLDVSKGNSSVSITSDETTLEYQDAPSPEDLEETVFTASKPKSSSTALTTNVTEQTEKDGDKDVFASEVTPSDLQKQMGNLEDAETKDLLVAAEAFSELNHLSPVQGTEASLCAPSVYEGKIFTQKSKVPVLDEGLTSVETYTPAIRANDNKSMADVLGDGGNSSLTISEGPIVSERRLNQEVALNLKEDHEVEVGVLKESVDLPEEKLPISDSPPDTQEIHVIEQEKLEAQDSGEEARNLSFNELYPSGTLKLQYNFDTIDQQFCDLADNKDTAECDIAEVDGELFVAQSNFTLILEGEEGEVEPGDFASSDVLPKAANTATEEKLVCSGENDNHGQIANLPSAVTSDQKSQKVDTLPYVPEPIKVAIAENLLDVIKDTRSKEITSDTMEQSIHETIPLVSQNIMCPTKLVKSAFKTAQETSTMTMNVSQVDDVVSSKTRTRGQRIQNVNVKSAQQEASADVATPKMPGQSVRKKTRKAKEISEASENIYSDVRGLSQNQQIPQNSVTPRRGRRKKEVNQDILENTSSVEQELQITTGRESKRLKSSQLLEPAVEETTKKEVKVSSVTKRTPRRIKRSVENQESVEIINDLKVSTVTSPSRMIRKLRSTNLDASENTGNKQDDKSSDKQLRIKHVRRVRGREVSPSDVREDSNLESSQLTVQAEFDMSAIPRKRGRPRKINPSEDVGSKAVKEERSPKKKEAPSIRRRSTRNTPAKSENVDVGKPALGKSILVPNEELSMVMSSKKKLTKKTESQSQKRSLHSVSEERTDEMTHKETNEQEERLLATASFTKSSRSSRTRSSKAILLPDLSEPNNEPLFSPASEVPRKAKAKKIEVPAQLKELVSDLSSQFVISPPALRSRQKNTSNKNKLEDELKDDAQSVETLGKPKAKRIRTSKTKQASKNTEKESAWSPPPIEIRLISPLASPADGVKSKPRKTTEVTGTGLGRNRKKLSSYPKQILRRKML

SEQ ID NO: 739806 - protein, 1127 aa, Homo sapiens; identical to SEQ ID NO: 739802

SEQ ID NO: 739807 - protein, 993 aa, Homo sapiens
MKSPLYLVSRSLPSSSQLKGSPQAISRASELHLLETPLVVKKAKSLAMSVTTSGFSEFTPQSILRSTLRSTPLASPSPSPGRSPQRLKETRISFVEEDVHPKWIPGAADDSKLEVFTTPKKCAVPVETEWLKSKDRTTSFFLNSPEKEHQEMDEGSQSLEKLDVSKGNSSVSITSDETTLEYQDAPSPEDLEETVFTASKPKSSSTALTTNVTEQTEKDGDKDVFASEVTPSDLQKQMGNLEDAETKDLLVAAEAFSELNHLSPVQGTEASLCAPSVYEGKIFTQKSKVPVLDEGLTSVETYTPAIRANDNKSMADVLGDGGNSSLTISEGPIVSERRLNQEVALNLKEDHEVEVGVLKESVDLPEEKLPISDSPPDTQEIHVIEQEKLEAQDSGEEARNLSFNELYPSGTLKLQYNFDTIDQQFCDLADNKDTAECDIAEVDGELFVAQSNFTLILEGEEGEVEPGDFASSDVLPKAANTATEEKLVCSGENDNHGQIANLPSAVTSDQKSQKVDTLPYVPEPIKVAIAENLLDVIKDTRSKEITSDTMEQSIHETIPLVSQNIMCPTKLVKSAFKTAQETSTMTMNVSQVDDVVSSKTRTRGQRIQNVNVKSAQQEASADVATPKMPGQSVRKKTRKAKEISEASENIYSDVRGLSQNQQIPQNSVTPRRGRRKKEVNQDILENTSSVEQELQITTGRESKRLKSSQLLEPAVEETTKKEVKVSSVTKRTPRRIKRSVENQESVEIINDLKVSTVTSPSRMIRKLRSTNLDASENTGNKQDDKSSDKQLRIKHVRRVRGREVSPSDVREDSNLESSQLTVQAEFDMSAIPRKRGRPRKINPSEDVGSKAVKEERSPKKKEAPSIRRRSTRNTPAKSENVDVGKPALGKSILVPNEELSMVMSSKKKLTKKTESQSQKRSLHSVSEERTDEMTHKETNEQEERLLATASFTKSSRSSRTRSSKAILLPDLSEPNNEPLFSPASEVPRKAKER

SEQ ID NO: 739808 - protein, 1127 aa, Homo sapiens; identical to SEQ ID NO: 739802

SEQ ID NO: 739809 - protein, 992 aa, Homo sapiens
MKSPLYLVSRSLPSSSQLKGSPQAISRASELHLLETPLVVKKAKSLAMSVTTSGFSEFTPQSILRSTLRSTPLASPSPSPGRSPQRLKETRISFVEEDVHPKWIPGAADDSKLEVFTTPKKCAVPVETEWLKSKDRTTSFFLNSPEKEHQEMDEGSQSLEKLDVSKGNSSVSITSDETTLEYQDAPSPEDLEETVFTASKPKSSSTALTTNVTEQTEKDGDKDVFASEVTPSDLQKQMGNLEDAETKDLLVAAEAFSELNHLSPVQGTEASLCAPSVYEGKIFTQKSKVPVLDEGLTSVETYTPAIRANDNKSMADVLGDGGNSSLTISEGPIVSERRLNQEVALNLKEDHEVEVGVLKESVDLPEEKLPISDSPPDTQEIHVIEQEKLEAQDSGEEARNLSFNELYPSGTLKLQYNFDTIDQQFCDLADNKDTAECDIAEVDGELFVAQSNFTLILEGEEGEVEPGDFASSDVLPKAANTATEEKLVCSGENDNHGQIANLPSAVTSDQKSQKVDTLPYVPEPIKVAIAENLLDVIKDTRSKEITSDTMEQSIHETIPLVSQNIMCPTKLVKSAFKTAQETSTMTMNVSQVDDVVSSKTRTRGQRIQNVNVKSAQQEASADVATPKMPGQSVRKKTRKAKEISEASENIYSDVRGLSQNQQIPQNSVTPRRGRRKKEVNQDILENTSSVEQELQITTGRESKRLKSSQLLEPAVEETTKKEVKVSSVTKRTPRRIKRSVENQESVEIINDLKVSTVTSPSRMIRKLRSTNLDASENTGNKQDDKSSDKQLRIKHVRRVRGREVSPSDVREDSNLESSQLTVQAEFDMSAIPRKRGRPRKINPSEDVGSKAVKEERSPKKKEAPSIRRRSTRNTPAKSENVDVGKPALGKSILVPNEELSMVMSSKKKLTKKTESQSQKRSLHSVSEERTDEMTHKETNEQEERLLATASFTKSSRSSRTRSSKAILLPDLSEPNNEPLFSPASEVPRKAKG

SEQ ID NO: 739810 - protein, 112 aa, Homo sapiens
LLPQLQNFRPAQPFWLPDLGLRLTVFCGVLRAIMSVLTPLLLRGLTGSARRLPVPRAKIHSLPPEGKLGIMELAVGLTSCFVTFLLASGLDPVTPGDLQEARVKGSVLSLTL

SEQ ID NO: 739811 - protein, 105 aa, Homo sapiens
ASRAGFESAEDLGLRLTVFCGVLRAIMSVLTPLLLRGLTGSARRLPVPRAKIHSLPPEGKLGIMELAVGLTSCFVTFLLASGLDPVTPGDLQEARVKGSVLSLTL

SEQ ID NO: 739812 - protein, 107 aa, Homo sapiens
GWYWSGVYGWLPDLGLRLTVFCGVLRAIMSVLTPLLLRGLTGSARRLPVPRAKIHSLPPEGKLGIMELAVGLTSCFVTFLLASGLDPVTPGDLQEARVKGSVLSLTL

SEQ ID NO: 739813 - protein, 110 aa, Homo sapiens
AGTVRSVGIAAIWLPDLGLRLTVFCGVLRAIMSVLTPLLLRGLTGSARRLPVPRAKIHSLPPEGKLGIMELAVGLTSCFVTFLLASGLDPVTPGDLQEARVKGSVLSLTL

SEQ ID NO: 739814 - protein, 112 aa, Homo sapiens; identical to SEQ ID NO: 739810

SEQ ID NO: 739815 - protein, 112 aa, Homo sapiens; identical to SEQ ID NO: 739810

SEQ ID NO: 739816 - protein, 112 aa, Homo sapiens; identical to SEQ ID NO: 739810

SEQ ID NO: 739817 - protein, 111 aa, Homo sapiens
LPPRTSIRLGRARGKSAEGLRLTVFCGVLRAIMSVLTPLLLRGLTGSARRLPVPRAKIHSLPPEGKLGIMELAVGLTSCFVTFLLASGLDPVTPGDLQEARVKGSVLSLTL

SEQ ID NO: 739818 - protein, 107 aa, Homo sapiens; identical to SEQ ID NO: 739812

SEQ ID NO: 739819 - protein, 112 aa, Homo sapiens; identical to SEQ ID NO: 739810

SEQ ID NO: 739820 - protein, 112 aa, Homo sapiens; identical to SEQ ID NO: 739810

SEQ ID NO: 739821 - protein, 112 aa, Homo sapiens; identical to SEQ ID NO: 739810

SEQ ID NO: 739822 - protein, 101 aa, Homo sapiens
TRGSTHASGLRLTVFCGVLRAIMSVLTPLLLRGLTGSARRLPVPRAKIHSLPPEGKLGIMELAVGLTSCFVTFLLASGLDPVTPGDLQEARVKGSVLSLTL

SEQ ID NO: 739823 - protein, 103 aa, Homo sapiens
MVPVGKGMILGLRLTVFCGVLRAIMSVLTPLLLRGLTGSARRLPVPRAKIHSLPPEGKLGIMELAVGLTSCFVTFLLASGLDPVTPGDLQEARVKGSVLSLTL

SEQ ID NO: 739824 - protein, 102 aa, Homo sapiens
MPRAPQRSGEQQCRFGHVWRARTTGTVPGRQSGLSALGLSPQPQDLGSGPVRPSLSCRLLAAPPPADFFSRSEPIFSLVHWGMPDAVSDETWNWPLGLPPAS

SEQ ID NO: 739825 - protein, 95 aa, Homo sapiens
LLPQLQNFRPAQPFWLPDLGLRLTVFCGVLRAIMSVLTPLLLRGLTGSARRLPVPRAKILLLRDLPPCQRAGSCHTWRPTGGQSEGVRSVPHTVT

SEQ ID NO: 739826 - protein, 103 aa, Homo sapiens
HASAFWLPDLGLRLTVFCGVLRAIMSVLTPLLLRGLTGSARRLPVPRAKIHSLPPEGKLGIMELAVGLTSCFVTFLLASGLDPVTPGDLQEARVKGSVLSLTL

SEQ ID NO: 739827 - protein, 104 aa, Homo sapiens
MSPDLAPRRVLGVVVVTMSACLRAIMSVLTPLLLRGLTGSARRLPVPRAKIHSLPPEGKLGIMELAVGLTSCFVTFLLASGLDPVTPGDLQEARVKGSVLSLTL

SEQ ID NO: 739828 - protein, 112 aa, Homo sapiens; identical to SEQ ID NO: 739810

SEQ ID NO: 739829 - protein, 112 aa, Homo sapiens; identical to SEQ ID NO: 739810

SEQ ID NO: 739830 - protein, 103 aa, Homo sapiens; identical to SEQ ID NO: 739826

SEQ ID NO: 739831 - protein, 112 aa, Homo sapiens; identical to SEQ ID NO: 739810

SEQ ID NO: 739832 - protein, 70 aa, Homo sapiens
TCCITRLGERTQLPELTEEKYQHRNLTGKMLHESHRTATLAPSLSSAPQPSDLNSGSTTSSPGLQPHVPP

SEQ ID NO: 739833 - protein, 68 aa, Homo sapiens
PAASPGWVNGHNCQNSQNRSISTETSQEKCSTSLTEQPHWLLHCLQLHNLRHQWEHRLLPGPPAQRIS

SEQ ID NO: 739834 - protein, 136 aa, Homo sapiens
MAGVCLSVLAARVSALLHHWPFVSVPSTGLLKHRDPPGTFLPLGFHSCYSLLPFSTWRPPFLLLLCCPHLHLGPPSSREMAEPHSPPASHPLQRSSQSCPQHGSLHSPWVSPPVSCLPRTPDLPLPGWPRWILYSD

SEQ ID NO: 739835 - protein, 255 aa, Homo sapiens [sequence omitted]

SEQ ID NO: 739836 - protein, 115 aa, Homo sapiens
EGGREGAFGVLSLASTQLSLPSAPRLPLPAPSHGTQDPKEHLRLWVPGVQVFGPGSSRETSPPHDWQLPGSLAHLQIPAPPTVLTTQPATPLGQPCLSQTSCLSPCPPGRPLKPL

SEQ ID NO: 739837 - protein, 287 aa, Homo sapiens
PREPLLAGSQARPPAAGAATMEESGMAHESAEDLFHFNVGGWHFSVPRSKLSQFPDSLLWKEASALTSSESQRLFIDRDGSTFRHVHYYLYTSKLSFSSCAELNLLYEQALGLQLMPLLQTLDNLKEGKHHLRVRPADLPVAERASLNYWRTWKCISKPSEFPIKSPAFTGLHDKAPLGLMDTPLLDTEEEVHYCFLPLDLVAKYPSLVTEDNLLWLAETVALIECECSEFRFIVNFLRSQKILLPDNFSNIDVLEAEVEILEIPALTEAVRWYRMNMGMSPGNLGS

SEQ ID NO: 739838 - protein, 107 aa, Homo sapiens [sequence omitted]

SEQ ID NO: 739839 - protein, 262 aa, Homo sapiens
MAHESAEDLFHFNVGGWHFSVPRSKLSQFPDSLLWKEASALTSSESQRLFIDRDGSTFRHVHYYLYTSKLSFSSCAELNLLYEQALGLQLMPLLQTLDNLKEGKHHLRVRPADLPVAERASLNYWRTWKCISKPSEFPIKSPAFTGLHDKAPLGLMDTPLLDTEEEVHYCFLPLDLVAKYPSLVTEDNLLWLAETVALIECECSEFRFIVNFLRSQKILLPDNFSNIDVLEAEVEILEIPALTEAVRWYRMNMGMSPGNLGS

SEQ ID NO: 739840 - protein, 1150 aa, Homo sapiens
GSRAAAASRAAAAMSDIVEKTLTALPGLFLQNQPGGGPAAAKASFSSRLGSLVRGITALTSKHEEEKLIQQELSSLKATVSAPTTTLKMMKECMVRLIYCEMLGYDASFGYIHAIKLAQQGNLLEKRVGYLAVSLFLHESHELLLLLVNTVVKDLQSTNLVEVCMALTVVSQIFPREMIPAVLPLIEDKLQHSKEIVRRKAVLALYKFHLIAPNQVQHIHIKFRKALCDRDVGVMAASLHIYLRMIKENSSGYKDLTGSFVTILKQVVGGKLPVEFNYHSVPAPWLQIQLLRILGLLGKDDQRTSELMYDVLDESLRRAELNHNVTYAILFECVHTVYSIYPKSELLEKAAKCIGKFVLSPKINLKYLGLKALTYVIQQDPTLALQHQMTIIECLDHPDPIIKRETLELLYRITNAQNITVIVQKMLEYLHQSKEEYVIVNLVGKIAELAEKYAPDNAWFIQTMNAVFSVGGDVMHPDIPNNFLRLLAEGFDDETEDQQLRLYAVQSYLTLLDMENVFYPQRFLQVMSWVLGEYSYLLDKETPEEVIAKLYKLLMNDSVSSETKAWLIAAVTKLTSQAHSSNTVERLIHEFTISLDTCMRQHAFELKHLHENVELMKSLLPVDRSCEDLVVDASLSFLDGFVAEGLSQGAAPYKPPHQRQEEKLSQEKVLNFEPYGLSFSSSGFTGRQSPAGISLGSDVSGNSAETGLKETNSLKLEGIKKLWGKEGYLPKKESKTGDESGALPVPQESIMENVDQAITKKDQSQVLTQSKEEKEKQLLASSLFVGLGSESTINLLGKADTVSHKFRRKSKVKEAKSGETTSTHNMTCSSFSSLSNVAYEDDYYSNTLHDTGDKELKKFSLTSELLDSESLTELPLVEKFSYCSLSTPSLFANNNMEIFHPPQSTAASVAKESSLASSFLEETTEYIHSNAMEVCNNETISVSSYKIWKDDCLLMVWSVTNKSGLELKSADLEIFPAENFKVTEQPGCCLPVMEAESTKSFQYSVQIEKPFTEGNLTGFISYHMMDTHSAQLEFSVNLSLLDFIRPLKISSDDFGKLWLSFANDVKQNVKMSESQAALPSALKTLQQKLRLHIIEIIGNEGLLACQLLPSIPCLLHCRVHADVLALWFRSSCSTLPDYLLYQCQKVMEGS

SEQ ID NO: 739841 - protein, 252 aa, Homo sapiens
GSRAAAASRAAAAMSDIVEKTLTALPGLFLQNQPGGGPAAAKASFSSRLGSLVRGITALTSKHEEEKLIQQELSSLKATVSAPTTTLKMMKECMVRLIYCEMLGYDASFGYIHAIKLAQQGNLLEKRVGYLAVSLFLHESHELLLLLVNTVVKDLQSTNLVEVCMALTVVSQIFPREMIPAVLPLIEDKLQHSKEIVRRKAVLALYKFHLIAPNQVQHIHIKFRKALCDRDVGVMAASLHIYLRMIKVSWKF

SEQ ID NO: 739842 - protein, 120 aa, Homo sapiens
MSDIVEKTLTALPGLFLQNQPGGGPAAAKASFSSRLGSLVRGITALTSKHEEEKLIQQELSSLKATVSAPTTTLKMMKECMVRLIYCEMLGYDASFGYIHAIKLAQQGNLLEKRVGMYVF

SEQ ID NO: 739843 - protein, 447 aa, Homo sapiens
GTRGSCRRPRGLPGGPTAMSRDPGSGGWEEAPRAAAALCTLYHEAGQRLRRLQDQLAARDALIARLRARLAALEGDAAPSLVDALLEQVARFREQLRRQEGGAAEAQMRQEIERLTERLEEKEREMQQLLSQPQHEREKEVVLLRRSMAEGERARAASDVLCRSLANETHQLRRTLTATAHMCQHLAKCLDERQHAQRNVGERSPDQSEHTDGHTSVQSVIEKLQEENRLLKQKVTHVEDLNAKWQRYNASRDEYVRGLHAQLRGLQIPHEPELMRKEISRLNRQLEEKINDCAEVKQELAASRTARDAALERVQMLEQQILAYKDDFMSERADRERAQSRIQELEEKVASLLHQVSWRQDSREPDAGRIHAGSKTAKYLAADALELMVPGGWRPGTGSQQPEPPAEGGHPGAAQRGQGDLQCPHCLQCFSDEQGEELLRHVAECCQ

SEQ ID NO: 739844 - protein, 82 aa, Homo sapiens
VLSISIPLKLIHKSVKEMQELAAGGPFSKTAKLHRVHLRSCCLRTGVIVLPQDSLAGLVSALYRTGRGSFHLRGNSHSANHC

SEQ ID NO: 739845 - protein, 447 aa, Homo sapiens; identical to SEQ ID NO: 739843

SEQ ID NO: 739846 - protein, 469 aa, Homo sapiens
GTRGSCRRPRGLPGGPTAMSRDPGSGGWEEAPRAAAALCTLYHEAGQRLRRLQDQLAARDALIARLRARLAALEGDAAPSLVDALLEQVARFREQLRRQEGGAAEAQMRQVRGRVPEELRERELRVAAAGSWEIERLTERLEEKEREMQQLLSQPQHEREKEVVLLRRSMAEGERARAASDVLCRSLANETHQLRRTLTATAHMCQHLAKCLDERQHAQRNVGERSPDQSEHTDGHTSVQSVIEKLQEENRLLKQKVTHVEDLNAKWQRYNASRDEYVRGLHAQLRGLQIPHEPELMRKEISRLNRQLEEKINDCAEVKQELAASRTARDAALERVQMLEQQILAYKDDFMSERADRERAQSRIQELEEKVASLLHQVSWRQDSREPDAGRIHAGSKTAKYLAADALELMVPGGWRPGTGSQQPEPPAEGGHPGAAQRGQGDLQCPHCLQCFSDEQGEELLRHVAECCQ

SEQ ID NO: 739847 - protein, 442 aa, Homo sapiens
GTRGSCRRPRGLPGGPTAMSRDPGSGGWEEAPRAAAALCTLYHEAGQRLRRLQDQLAARDALIARLRARLAALEGDAAPSLVDALLEQVARFREQLRRQEGGAAEAQMRQEIERLTERLEEKEREMQQLLSQPQHEREKEVVLLRRSMAEGERARAASDVLCRSLANETHQLRRTLTATAHMCQHLAKCLDERQHAQRNVGERSPDQSEHTDGHTSVQSVIEKLQEENRLLKQKVTHVEDLNAKWQRYNASRDEYVRGLHAQLRGLQIPHEPELMRKEISRLNRQLEEKINDCAEVKQELAASRTARDAALERVQMLEQQILAYKDDFMSERADRERAQSRIQELEEKVASLLHQVSWRQDSREPDAGRIHAGSKTAKYLAADALELMVPGGWRPGTGSQQPEPPAEGGHPGAAQRGQGDLQCPHVCTEKLHFSSICHPAGS

SEQ ID NO: 739848 - protein, 173 aa, Homo sapiens [sequence omitted]

SEQ ID NO: 739849 - protein, 281 aa, Homo sapiens
MITTRCTGGRSDNLWPQPLGLAFSPLAVCDRVSSLCPFLMQSEHTDGHTSVQSVIEKLQEENRLLKQKVTHVEDLNAKWQRYNASRDEYVRGLHAQLRGLQIPHEPELMRKEISRLNRQLEEKINDCAEVKQELAASRTARDAALERVQMLEQQILAYKDDFMSERADRERAQSRIQELEEKVASLLHQVSWRQDSREPDAGRIHAGSKTAKYLAADALELMVPGGWRPGTGSQQPEPPAEGGHPGAAQRGQGDLQCPHCLQCFSDEQGEELLRHVAECCQ

SEQ ID NO: 739850 - protein, 171 aa, Homo sapiens
LEDPRYFPSLLEKINDCAEVKQELAASRTARDAALERVQMLEQQILAYKDDFMSERADRERAQSRIQELEEKVASLLHQVSWRQDSREPDAGRIHAGSKTAKYLAADALELMVPGGWRPGTGSQQPEPPAEGGHPGAAQRGQGDLQCPHCLQCFSDEQGEELLRHVAECCQ

SEQ ID NO: 739851 - protein, 390 aa, Homo sapiens
GTRGSCRRPRGLPGGPTAMSRDPGSGGWEEAPRAAAALCTLYHEAGQRLRRLQDQLAARDALIARLRARLAALEGDAAPSLVDALLEQVARFREQLRRQEGGAAEAQMRQEIERLTERLEEKEREMQQLLSQPQHEREKEVVLLRRSMAEGERARAASDVLCRSLANETHQLRRTLTATAHMCQHLAKCLDERQHAQRNVGERSPDQSEHTDGHTSVQSVIEKLQEENRLLKQKVTHVEDLNAKWQRYNASRDEYVRGLHAQLRGLQIPHEPELMRKEISRLNRQLEEKINDCAEVKQELAASRTARDAALERVQMLEQQILAYKDDFMSERADRERAQSRIQELEEKVASLLHQVSWRQVASLLHQVSWRQDSREPDAGRIHAGSFAPS

SEQ ID NO: 739852 - protein, 412 aa, Homo sapiens
GTRGSCRRPRGLPGGPTAMSRDPGSGGWEEAPRAAAALCTLYHEAGQRLRRLQDQLAARDALIARLRARLAALEGDAAPSLVDALLEQVARFREQLRRQEGGAAEAQMRQEIERLTERLEEKEREMQQLLSQPQHEREKEVVLLRRSMAEGERARAASDVLCRSLANETHQLRRTLTATAHMCQHLAKCLDERQHAQRNVGERSPDQSEHTDGHTSVQSVIEKLQEENRLLKQKVTHVEDLNAKWQRYNASRDEYVRGLHAQLRGLQIPHEPELMRKEISRLNRQLEEKINDCAEVKQELAAADRERAQSRIQELEEKVASLLHQVSWRQDSREPDAGRIHAGSKTAKYLAADALELMVPGGWRPGTGSQQPEPPAEGGHPGAAQRGQGDLQCPHVCTEKLHFSSICHPAGS

SEQ ID NO: 739853 - protein, 269 aa, Homo sapiens
GTRGSCRRPRGLPGGPTAMSRDPGSGGWEEAPRAAAALCTLYHEAGQRLRRLQDQLAARDALIARLRARLAALEGDAAPSLVDALLEQVARFREQLRRQEGGAAEAQMRQEIERLTERLEEKEREMQQLLSQPQHEREKEVVLLRRSMAEGERARAASDVLCRSLANETHQLRRTLTATAHMCQHLAKCLDERQHAQRNVGERSPDQSEHTDGHTSVQSVIEKLQEENRLLKQKVTHVEDLNAKWQRYNASRNIWQREVPVCVPSCSME

SEQ ID NO: 739854 - protein, 97 aa, Homo sapiens
EDLNAKWQRYNASRDEYVRGLHAQLRGLQIPHEPELMRKEISRLNRQLEEKINDCAEVKQELAASRTARDAALERVQMLEQQVSVPRAPDGTDQMSA

SEQ ID NO: 739855 - protein, 113 aa, Homo sapiens
MIIKEYRIPLPMTVEEYRIAQLYMIQVGRGGKGGSWGEGGSRQRTDTTCGLGGVVAFTVQCLPQNFLVSVNCAGPLASRHDARRTEHTMGARHQIAFRHCVPPPTTRTLALAF

SEQ ID NO: 739856 - protein, 1349 aa, Homo sapiens
MIIKEYRIPLPMTVEEYRIAQLYMIQKKSRNETYGEGSGVEILENRPYTDGPGGSGQYTHKVYHVGMHIPSWFRSILPKAALRVVEESWNAYPYTRTRFTCPFVEKFSIDIETFYKTDAGENPDVFNLSPVEKNQLTIDFIDIVKDPVPHNEYKTEEDPKLFQSTKTQRGPLSENWIEEYKKQVFPIMCAYKLCKVEFRYWGMQSKIERFIHDTGLRRVMVRAHRQAWCWQDEWYGLSMENIRELEKEAQLMLSRKMAQFNEDGEEATELVKHEAVSDQTSGEPPEPSSSNGEPLVGRGLKKQWSTSSKSSRSSKRGASPSRHSISEWRMQSIARDSDESSDDEFFDAHEDLSDTEEMFPKDITKWSSNDLMDKIESPEPEDTQDGLYRQGAPEFRVASSVEQLNIIEDEVSQPLAAPPSKIHVLLLVLHGGTILDTGAGDPSSKKGDANTIANVFDTVMRVHYPSALGRLAIRLVPCPPVCSDAFALVSNLSPYSHDEGCLSSSQDHIPLAALPLLATSSPQYQEAVATVIQRANLAYGDFIKSQEGMTFNGQVCLIGDCVGGILAFDALCYSNQPVSESQSSSRRGSVVSMQDNDLLSPGILMNAAHCCGGGGGGGGGGGSSGGGGSSGGSSLESSRHLSRSNVDIPRSNGTEDPKRQLPRKRSDSSTYELDTIQQHQAFLSSLHASVLRTEPCSRHSSSSTMLDGTGALGRFDFEITDLFLFGCPLGLVLALRKTVIPALDVFQLRPACQQVYNLFHPADPSASRLEPLLERRFHALPPFSVPRYQRYPLGDGCSTLLADVLQTHNAAFQEHGAPSSPGTAPASRGFRRASEISIASQVSGMAESYTASSIAQKAPDALSHTPSVRRLSLLALPAPSPTTPGPHPPARKASPGLERAPGLPELDIGEVAAKWWGQKRIDYALYCPDALTAFPTVALPHLFHASYWESTDVVSFLLRQVMRHDNSSILELDGKEVSVFTPSKPREKWQRKRTHVKLRNVTANHRINDALANEDGPQVLTGRFMYGPLDMVTLTGEKVDVHIMTQPPSGEWLYLDTLVTNNSGRVSYTIPESHRLGVGVYPIKMVVRGDHTFADSYITVLPKGTEFVVFSIDGSFAASVSIMGSDPKVRAGAVDVVRHWQDLGYLIIYVTGRPDMQKQRVVAWLAQHNFPHGVVSFCDGLVHDPLRHKANFLKLLISELHLRVHAAYGSTKDVAVYSAISLSPMQIYIVGRPTKKLQQQCQFITDGYAAHLAQLKYSHRARPARNTATRMALRKGSFGLPGQGDFLRSRNHLLRTISAQPSGPSHRHERTQSQADGEQRGQRSMSVAAGCWGRAMTGRLEPGAAAGPK

SEQ ID NO: 739857 - protein, 1349 aa, Homo sapiens; identical to SEQ ID NO: 739856

SEQ ID NO: 739858 - protein, 171 aa, Homo sapiens
MCGPVRMCGPVRMCGPVRMWAWEIVPGPCGGHGPHHTVLPALPHVLGPDGSGLSWKLAGTTSPRMAEGPEPPTQTGPGGSPRHFALCGSPSVLVPGVGPGAACHLPIHWPPSLPGPLPFGSSSNRGPACILLTRVSQLFNLTGFALIFESGDPLPPPMATAPLTCMKLSTC

SEQ ID NO: 739859 - protein, 1349 aa, Homo sapiens; identical to SEQ ID NO: 739856

SEQ ID NO: 739860 - protein, 1343 aa, Homo sapiens
MIIKEYRIPLPMTVEEYRIAQLYMIQKKSRNETYGEGSGVEILENRPYTDGPGGSGQYTHKVYHVGMHIPSWFRSILPKAALRVVEESWNAYPYTRTRFTCPFVEKFSIDIETFYKTDAGENPDVFNLSPVEKNQLTIDFIDIVKDPVPHNEYKTEEDPKLFQSTKTQRGPLSENWIEEYKKQVFPIMCAYKLCKVEFRYWGMQSKIERFIHDTGLRRVMVRAHRQAWCWQDEWYGLSMENIRELEKEAQLMLSRKMAQFNEDGEEATELVKHEAVSDQTSGEPPEPSSSNGEPLVGRGLKKQWSTSSKSSRSSKRGASPSRHSISEWRMQSIARDSDESSDDEFFDAHEDLSDTEEMFPKDITKWSSNDLMDKIESPEPEDTQDGLYRQGAPEFRVASSVEQLNIIEDEVSQPLAAPPSKIHVLLLVLHGGTILDTGAGDPSSKKGDANTIANVFDTVMRVHYPSALGRLAIRLVPCPPVCSDAFALVSNLSPYSHDEGCLSSSQDHIPLAALPLLATSSPQYQEAVATVIQRANLAYGDFIKSQEGMTFNGQVCLIGDCVGGILAFDALCYSNQPVSESQSSSRRGSVVSMQDNDLLSPGILMNAAHCCGGGGGGGGGGGSSGGGGSSGGSSLESSRHLSRSNVDIPRSNGTEDPKRQLPRKRSDSSTYELDTIQQHQAFLSSLHASVLRTEPCSRHSSSSTMLDGTGALGRFDFEITDLFLFGCPLGLVLALRKTVIPALDVFQLRPACQQVYNLFHPADPSASRLEPLLERRFHALPPFSVPRYQRYPLGDGCSTLLVETVQRNPELVLEGGPLAPLPHGDGFLETSMPVPAPTWQDGPRPGCAESDVLQTHNAAFQEHGAPSSPGTAPASRGFRRASEISIASQVSGMAESYTASSIAQIAAKWWGQKRIDYALYCPDALTAFPTVALPHLFHASYWESTDVVSFLLRQVMRHDNSSILELDGKEVSVFTPSKPREKWQRKRTHVKLRNVTANHRINDALANEDGPQVLTGRFMYGPLDMVTLTGEKVDVHIMTQPPSGEWLYLDTLVTNNSGRVSYTIPESHRLGVGVYPIKMVVRGDHTFADSYITVLPKGTEFVVFSIDGSFAASVSIMGSDPKVRAGAVDVVRHWQDLGYLIIYVTGRPDMQKQRVVAWLAQHNFPHGVVSFCDGLVHDPLRHKANFLKLLISELHLRVHAAYGSTKDVAVYSAISLSPMQIYIVGRPTKKLQQQCQFITDGYAAHLAQLKYSHRARPARNTATRMALRKGSFGLPGQGDFLRSRNHLLRTISAQPSGPSHRHERTQSQADGEQRGQRSMSVAAGCWGRAMTGRLEPGAAAGPK

SEQ ID NO: 739861 - protein, 440 aa, Homo sapiens
MIIKEYRIPLPMTVEEYRIAQLYMIQKKSRNETYGEGSGVEILENRPYTDGPGGSGQYTHKVYHVGMHIPSWFRSILPKAALRVVEESWNAYPYTRTRFTCPFVEKFSIDIETFYKTDAGENPDVFNLSPVEKNQLTIDFIDIVKDPVPHNEYKTEEDPKLFQSTKTQRGPLSENWIEEYKKQVFPIMCAYKLCKVEFRYWGMQSKIERFIHDTGLRRVMVRAHRQAWCWQDEWYGLSMENIRELEKEAQLMLSRKMAQFNEDGEEATELVKHEAVSDQTSGEPPEPSSSNGEPLVGRGLKKQWSTSSKSSRSSKRGASPSRHSISEWRMQSIARDSDESSDDEFFDAHEDLSDTEEMFPKDITKWSSNDLMDKIESPEPEDTQDGLYRQGAPEFRVASSVEQLNIIEIKNKIFTLCPACLLSLKIKRRKGRKRQSSRQK

SEQ ID NO: 739862 - protein, 137 aa, Homo sapiens
KLRDPIPGPSQPVVFKEVLRNHQATSILPRGCSPACTTSILPQGCSPGTYHLNLTTGMFICTYHFNLTTGMFTWHVPLQCYHGDVHLACTTSIFPQGCSPAMYYFNLTTGMMFTWHVPLQSYREDVHLARTTLASTL

SEQ ID NO: 739863 - protein, 285 aa, Homo sapiens
MGPGATRWTQGPHSTTVPCDAALMTSRHQSWTPPDQVQFEKCGKRVDRLDQRRSKLRVAGGHPGNSPWTVSLRNRQGQHFCAGSLVKEQWILTARQCFSSCHMPLTGYEVWLGTLFQNPQHGEPGLQRVPVAKMLCGPSGSQLVLLKLERSVTLNQRVALICLPPEWYVVPPGTKCEIAGWGETKGTGNDTVLNVALLNVISNQECNIKHRGHVRESEMCTEGLLAPVGACEGDYGGPLACFTHNCWVLKGIRIPNRVCARSRWPAVFTRVSVFVDWIHKVMRLG

SEQ ID NO: 739864 - protein, 285 aa, Homo sapiens; identical to SEQ ID NO: 739863

SEQ ID NO: 739865 - protein, 285 aa, Homo sapiens; identical to SEQ ID NO: 739863

SEQ ID NO: 739866 - protein, 558 aa, Homo sapiens
FLDQGLDDNYCRNPDGSERPWCYTTDPQIEREFCDLPRCGSEAQPRQEATSVSCFRGKGEGYRGTANTTTAGVPCQRWDAQIPHQHRFTPEKYACKDLRENFCWNLDGSEAPWCFTLRPGTRVGFCYQIRRCTDDVRPQGEAQAWGLQSRGWKPGTGGPGRGLGLMAARTGRRLLPRRGGAVPRHGQQDPQGCPVPALVRCDAAQAAVSPWCSRPRQGPNPGAACFDVWDQSLEMVETTLPRFCSRSRLRFTFTSEPHAQLEENFCQTQMGIAMGPGATRWTQGPHSTTVPCDAALMTSRHQSWTPPDQVQFEKCGKRVDRLDQRRSKLRVAGGHPGNSPWTVSLRNRQGQHFCAGSLVKEQWILTARQCFSSCHMPLTGYEVWLGTLFQNPQHGEPGLQRVPVAKMLCGPSGSQLVLLKLERSVTLNQRVALICLPPEWYVVPPGTKCEIAGWGETKGTGNDTVLNVALLNVISNQECNIKHRGHVRESEMCTEGLLAPVGACEGDYGGPLACFTHNCWVLKGIRIPNRVCARSRWPAVFTRVSVFVDWIHKVMRLG

SEQ ID NO: 739867 - protein, 183 aa, Homo sapiens [sequence omitted]

SEQ ID NO: 739868 - protein, 183 aa, Homo sapiens [sequence omitted]

SEQ ID NO: 739869 - protein, 145 aa, Homo sapiens [sequence omitted]

SEQ ID NO: 739870 - protein, 107 aa, Homo sapiens
LPIPLTAGTGNDTVLNVALLNVISNQECNIKHRGHVRESEMCTEGLLAPVGACEGDYGGPLACFTHNCWVLKGIRIPNRVCARSRWPAVFTRVSVFVDWIHKVMRLG

SEQ ID NO: 739871 - protein, 92 aa, Homo sapiens
MGPGATRWTQGPHSTTVPCDAALMTSRHQSWTPPDQVQFEKCGKRVDRLDQRRSKLRVAGGHPGNSPWTVSLRNRHGAKQFSCRRGSPRLNC

SEQ ID NO: 739872 - protein, 331 aa, Homo sapiens
MFHKAEELFSKTTNNEVDDMDTSDTQWGWFYLAECGKWHMFQPDTNSQCSVSSEDIEKSFKTNPCGSISFTTSKFSYKIDFAEMKQMNLTTGKQRLIKRAPFSISAFSYICENEAIPMPPHWENVNTQVPYQLIPLHNQTHEYNEVANLFGKTMDRNRIKRIQRIQNLDLWEFFCRKKAQLKKKRGVPQINEQMLFHGTSSEFVEAICIHNFDWRINGIHGAVFGKGTYFARDAAYSSRFCKDDIKHGNTFQIHGVSLQQRHLFRTYKSMFLARVLIGDYINGDSKYMRPPSKDGSYVNLYDSCVDDTWNPKIFVVFDANQIYPEYLIDFH

SEQ ID NO: 739873 - protein, 338 aa, Homo sapiens
MWEANPEMFHKAEELFSKTTNNEVDDMDTSDTQWGWFYLAECGKWHMFQPDTNSQCSVSSEDIEKSFKTNPCGSISFTTSKFSYKIDFAEMKQMNLTTGKQRLIKRAPFSISAFSYICENEAIPMPPHWENVNTQVPYQLIPLHNQTHEYNEVANLFGKTMDRNRIKRIQRIQNLDLWEFFCRKKAQLKKKRGVPQINEQMLFHGTSSEFVEAICIHNFDWRINGIHGAVFGKGTYFARDAAYSSRFCKDDIKHGNTFQIHGVSLQQRHLFRTYKSMFLARVLIGDYINGDSKYMRPPSKDGSYVNLYDSCVDDTWNPKIFVVFDANQIYPEYLIDFH

SEQ ID NO: 739874 - protein, 331 aa, Homo sapiens; identical to SEQ ID NO: 739872

SEQ ID NO: 739875 - protein, 320 aa, Homo sapiens
MWEANPEMFHKAEELFSKTTNNEVDDMDTSDTQWGWFYLAECGKWHMFQPDTNSQCSVSSEDIEKSFKTNPCGSISFTTSKFSYKIDFAEMKQMNLTTGKQRLIKRAPFSISAFSYICENEAIPMPPHWENVNTQVPYQLIPLHNQTHEYNEVANLFGKTMDRNRIKRIQRIQNLDLWEFFCRKKAQLKKKRGVPQINEQMLFHGTSSEFVEAICIHNFDWRINGIHGAVFGKGTYFARDAAYSSRFCKDDIKHGNTFQIHGVSLQQRHLFRTYKSMFLARVLIGDYINGDSKYMRPPSKDGSYVNDANQIYPEYLIDFH

SEQ ID NO: 739876 - protein, 331 aa, Homo sapiens; identical to SEQ ID NO: 739872

SEQ ID NO: 739877 - protein, 351 aa, Homo sapiens
MQFTVKTCLPSGNLELQYQEMFHKAEELFSKTTNNEVDDMDTSDTQWGWFYLAECGKWHMFQPDTNSQCSVSSEDIEKSFKTNPCGSISFTTSKFSYKIDFAEMKQMNLTTGKQRLIKRAPFSISAFSYICENEAIPMPPHWENVNTQVPYQLIPLHNQTHEYNEVANLFGKTMDRNRIKRIQRIQNLDLWEFFCRKKAQLKKKRGVPQINEQMLFHGTSSEFVEAICIHNFDWRINGIHGAVFGKGTYFARDAAYSSRFCKDDIKHGNTFQIHGVSLQQRHLFRTYKSMFLARVLIGDYINGDSKYMRPPSKDGSYVNLYDSCVDDTWNPKIFVVFDANQIYPEYLIDFH

SEQ ID NO: 739878 - protein, 243 aa, Homo sapiens
MWEANPEMFHKAEELFSKTTNNEVDDMDTSDTQWGWFYLAECGKWHMFQPDTNSQCSVSSEDIEKSFKTNPCGSISFTTSKFSYKIDFAEMKQMNLTTGKQRLIKRAPFSISAFSYICENEAIPMPPHWENVNTQVPYQLIPLHNQTHEYNEVANLFGKTMDRNRIKRIQRIQNLDLWEFFCRKKAQLKKKRGVPQINEQMLFHGTSSEFVEAICIHNFDWRINGIHGAVFGKGRFALQSSSH

SEQ ID NO: 739879 - protein, 130 aa, Homo sapiens
IPRITRRRRLRGSVFPPRAGVSQLPADPEPALPPTALFVGGRKPQPPLDMFGACYKQPLKPSGSEPPAEECRMTPRHAGCDVTEMQRILSQPTFTEHLLRAVSCQRKGVPIQTPREHSWISCKKEFEANP

SEQ ID NO: 739880 - protein, 130 aa, Homo sapiens; identical to SEQ ID NO: 739879

SEQ ID NO: 739881 - protein, 163 aa, Homo sapiens
IPRITRRRRLRGSVFPPRAGVSQLPADPEPALPPTALFVGGRKPQPPLDMFGACYKQPLKPSGSEPPAEECRMTPRHAGCDVTEMQRILSQPTFTEHLLRAVCTKLANMYSTSTDCREHCRRGMKAKQLKAEAGRSCQRKGVPIQTPREHSWISCKKEFEANP

SEQ ID NO: 739882 - protein, 158 aa, Homo sapiens
MALEVLMLLAVLIWTGAENLHVKISCSLDWLMVSVIPVAESRNLYIFADELHLGMGCPANRIHTYVYEFIYLVRDCGIRTRVVSEETLLFQTELYFTPRNIDHDPQEIHLECSTSRKSVWLTPVSTENEIKLDPSPFIADFQTTAEELGLLSSSPNLL

SEQ ID NO: 739883 - protein, 117 aa, Homo sapiens
MALEVLMLLAVLIWTGAENLHVKISCSLDWLMVSVIPVAESRNLYIFADELHLGMGCPANRIHTYVYEFIYLVRDCGIRTRVVSEETLLFQTELYFTPRNIDHDPQEIHLECSTSSV

SEQ ID NO: 739884 - protein, 50 aa, Homo sapiens
MPHMGPPLEQQSPRPESTDCGAQAGLAKCLLTQMEDSPPKPSSNDQHTCY

SEQ ID NO: 739885 - protein, 122 aa, Homo sapiens
SFVLLLADIESTCHVPVSNTALGTGNSRHRSLAFAQGAHRPVGANPEGHTACPFSAHRFWCELPLRVGEYWGGLPEEASFEPNLQRPSVYENCSRVLCTFSSTKVEAPTAPRNAPRQTLGAP

SEQ ID NO: 739886 - protein, 110 aa, Homo sapiens
GFAPDLRCTETGAFSPSWMPPENLTMPVTRLQTAGGTCRGLGMGGFGNLAPRTPSAKELRLLPRISRSTFGGTEGFRPGPEEFERLPGQAEAQPGEWRGCWATFRPSFPR

SEQ ID NO: 739887 - protein, 329 aa, Homo sapiens
MGGGPQWGDLLSLPLPPRGDAPPSSSAGEASSLRDYAASTMTEFLGMFGYDDQNTRDELARKISFEKLHAGSTPEAATSSMLPTSEDTLSKRARFSKYEEYIRKLKAGEQLSWPAPSTKTEERVGKEVVGTLPGLRLPSSTAHLETKATILPLPSHSSVQMQNLVARASKYDFFIQKLKTGENLRPQNGSTYKKPSKYDLENVKYLHLFKPGEGSPDMGGAIAFKTGKVGRPSKYDVRGIQKPGPAKVPPTPSLAPAPLASVPSAPSAPGPGPEPPASLSFNTPEYLKSTFSKTDSITTGTVSTVKNGLPTDKPAVTEDVNIYQKYIAR

SEQ ID NO: 739888 - protein, 169 aa, Homo sapiens
GDWGVVGYQCAVACVRRLHGTPASIMERISASKGLISPMMARLAAAALKPSATFDPGEQAGSCPESRHLLDWGGHLASGCRAESGGVWKKCPCGPCLPAPPLCLIFAPILLVSMWGPWFWLPTVGGPCFCFPICELGAMVPASSAALHPWGHCRSPLPVCSPSHIPSPP

SEQ ID NO: 739889 - protein, 1194 aa, Homo sapiens
MGGGPQWGDLLSLPLPPRGDAPPSSSAGEASSLRDYAASTMTEFLGMFGYDDQNTRDELARKISFEKLHAGSTPEAATSSMLPTSEDTLSKRARFSKYEEYIRKLKAGEQLSWPAPSTKTEERVGKEVVGTLPGLRLPSSTAHLETKATILPLPSHSSVQMQNLVARASKYDFFIQKLKTGENLRPQNGSTYKKPSKYDLENVKYLHLFKPGEGSPDMGGAIAFKTGKVGRPSKYDVRGIQKPGPAKVPPTPSLAPAPLASVPSAPSAPGPGPEPPASLSFNTPEYLKSTFSKTDSITTGTVSTVKNGLPTDKPAVTEDVNIYQKYIARFSGSQHCGHIHCAYQYREHYHCLDPECNYQRFTSKQDVIRHYNMHKKRDNSLQHGFMRFSPLDDCSVYYHGCHLNGKSTHYHCMQVGCNKVYTSTSDVMTHENFHKKNTQLINDGFQRFRATEDCGTADCQFYGQKTTHFHCRRPGCTFTFKNKCDIEKHKSYHIKDDAYAKDGFKKFYKYEECKYEGCVYSKATNHFHCIRAGCGFTFTSTSQMTSHKRKHERRHIRSSGALGLPPSLLGAKDTEHEESSNDDLVDFSALSSKNSSLSASPTSQQSSASLAAATAATEAGPSATKPPNSKISGLLPQGLPGSIPLALALSNSGLPTPTPYFPILAGRGSTSLPVGTPSLLGAVSSGSAASATPDTPTLVASGAGDSAPVAAASVPAPPASIMERISASKGLISPMMARLAAAALKPSATFDPGSGQQVTPARFPPAQVKPEPGESTGAPGPHEASQDRSLDLTVKEPSNESNGHAVPANSSLLSSLMNKMSQGNPGLGSLLNIKAEAEGSPAAEPSPFLGKAVKALVQEKLAEPWKVYLRRFGTKDFCDGQCDFLHKAHFHCVVEECGALFSTLDGAIKHANFHFRTEGGAAKGNTEAAFPASAAETKPPMAPSSPPVPPVTTATVSSLEGPAPSPASVPSTPTLLAWKQLASTIPQMPQIPASVPHLPASPLATTSLENAKPQVKPGFLQFQENDPCLATDCKYANKFHFHCLFGNCKYVCKTSGKAESHCLDHINPNNNLVNVRDQFAYYSLQCLCPNQHCEFRMRGHYHCLRTGCYFVTNITTKLPWHIKKHEKADGRAANGFKYFTKREECGRLGCKYNQVNSHFHCIREGCQFSFLLKHQMTSHARKHMRRMLGKNFDR

SEQ ID NO: 739890 - protein, 855 aa, Homo sapiens
MGGGPQWGDLLSLPLPPRGDAPPSSSAGEASSLRDYAASTMTEFLGMFGYDDQNTRDELARKISFEKLHAGSTPEAATSSMLPTSEDTLSKRARFSKYEEYIRKLKAGEQLSWPAPSTKTEERVGKEVVGTLPGLRLPSSTAHLETKATILPLPSHSSVQMQNLVARASKYDFFIQKLKTGENLRPQNGSTYKKPSKYDLENVKYLHLFKPGEGSPDMGGAIAFKTGKVGRPSKYDVRGIQKPGPAKVPPTPSLAPAPLASVPSAPSAPGPGPEPPASLSFNTPEYLKSTFSKTDSITTGTVSTVKNGLPTDKPAVTEDVNIYQKYIARFSGSQHCGHIHCAYQYREHYHCLDPECNYQRFTSKQDVIRHYNMHKKRDNSLQHGFMRFSPLDDCSVYYHGCHLNGKSTHYHCMQVGCNKVYTSTSDVMTHENFHKKNTQLINDGFQRFRATEDCGTADCQFYGQKTTHFHCRRPGCTFTFKNKCDIEKHKSYHIKDDAYAKDGFKKFYKYEECKYEGCVYSKATNHFHCIRAGCGFTFTSTSQMTSHKRKHERRHIRSSGALGLPPSLLGAKDTEHEESSNDDLVDFSALSSKNSSLSASPTSQQSSASLAAATAATEAGPSATKPPNSKISGLLPQGLPGSIPLALALSNSGLPTPTPYFPILAGRGSTSLPVGTPSLLGAVSSGSAASATPDTPTLVASGAGDSAPVAAASVPAPPASIMERISASKGLISPMMARLAAAALKPSATFDPGSGQQVTPARFPPAQVKPEPGESTGAPGPHEASQDRSLDLTVKEPSNESNGHAVPANSSLLSSLMNKVRAIHHTPPVPPPREIKAVLGGGGMCLFFNVLPLIR

SEQ ID NO: 739891 - protein, 1052 aa, Homo sapiens
ELPPEGVYMVQPQGCSDEEDHAEEPSKDGGALEEKDSDGAASKEDSGPSTRQASGEASSLRDYAASTMTEFLGMFGYDDQNTRDELARKISFEKLHAGSTPEAATSSMLPTSEDTLSKRARFSKYEEYIRKLKAGEQLSWPAPSTKTEERVGKEVVGTLPGLRLPSSTAHLETKATILPLPSHSSVQMQNLVARASKYDFFIQKLKTGENLRPQNGSTYKKPSKYDLENVKYLHLFKPGEGSPDMGGAIAFKTGKVGRPSKYDVRGIQKPGPAKVPPTPSLAPAPLASVPSAPSAPGPGPEPPASLSFNTPEYLKSTFSKTDSITTGTVSTVKNGLPTDKPAVTEDVNIYQKYIARFSGSQHCGHIHCAYQYREHYHCLDPECNYQRFTSKQDVIRHYNMHKKRDNSLQHGFMRFSPLDDCSVYYHGCHLNGKSTHYHCMQVGCNKVYTSTSDVMTHENFHKKNTQLINDGFQRFRATEDCGTADCQFYGQKTTHFHCRRPGCTFTFKNKCDIEKHKSYHIKDDAYAKDGFKKFYKYEECKYEGCVYSKATNHFHCIRAGCGFTFTSTSQMTSHKRKHERRHIRSSGALGLPPSLLGAKDTEHEESSNDDLVDFSALSSKNSSLSASPTSQQSSASLAAATAATEAGPSATKPPNSKISGLLPQGLPGSIPLALALSNSGLPTPTPYFPILAGRGSTSLPVGTPSLLGAVSSGSAASATPDTPTLVASGAGDSAPVAAASVPAPPASIMERISASKGLISPMMARLAAAALKPSATFDPGSGQQVTPARFPPAQVKPEPGESTGAPGPHEASQDRSLDLTVKEPSNESNGHAVPANSSLLSSLMNKMSQGNPGLGSLLNIKAEAEGSPAAEPSPFLGKAVKALVQEKLAEPWKVYLRRFGTKDFCDGQCDFLHKAHFHCVVEECGALFSTLDGAIKHANFHFRTEGGAAKGNTEAAFPASAAETKPPMAPSSPPVPPVTTATVSSLEGPAPSPASVPSTPTLLAWKQLASTIPQMPQIPASVPHLPASPLATTSLENAKPQVKPGFLQFQEK

SEQ ID NO: 739892 - protein, 1025 aa, Homo sapiens
MGGGPQWGDLLSLPLPPRGDAPPSSSAGEASSLRDYAASTMTEFLGMFGYDDQNTRDELARKISFEKLHAGSTPEAATSSMLPTSEDTLSKRARFSKYEEYIRKLKAGEQLSWPAPSTKTEERVGKEVVGTLPGLRLPSSTAHLETKATILPLPSHSSVQMQNLVARASKYDFFIQKLKTGENLRPQNGSTYKKPSKYDLENVKYLHLFKPGEGSPDMGGAIAFKTGKVGRPSKYDVRGIQKPGPAKVPPTPSLAPAPLASVPSAPSAPGPGPEPPASLSFNTPEYLKSTFSKTDSITTGTVSTVKNGLPTDKPAVTEDVNIYQKYIARFSGSQHCGHIHCAYQYREHYHCLDPECNYQRFTSKQDVIRHYNMHKKRDNSLQHGFMRFSPLDDCSVYYHGCHLNGKSTHYHCMQVGCNKVYTSTSDVMTHENFHKKNTQLINDGFQRFRATEDCGTADCQFYGQKTTHFHCRRPGCTFTFKNKCDIEKHKSYHIKDDAYAKDGFKKFYKYEECKYEGCVYSKATNHFHCIRAGCGFTFTSTSQMTSHKRKHERRHIRSSGALGLPPSLLGAKDTEHEESSNDDLVDFSALSSKNSSLSASPTSQQSSASLAAATAATEAGPSATKPPNSKISGLLPQGLPGSIPLALALSNSGLPTPTPYFPILAGRGSTSLPVGTPSLLGAVSSGSAASATPDTPTLVASGAGDSAPVAAASVPAPPASIMERISASKGLISPMMARLAAAALKPSATFDPGSGQQVTPARFPPAQVKPEPGESTGAPGPHEASQDRSLDLTVKEPSNESNGHAVPANSSLLSSLMNKMSQGNPGLGSLLNIKAEAEGSPAAEPSPFLGKAVKALVQEKLAEPWKVYLRRFGTKDFCDGQCDFLHKAHFHCVVEECGALFSTLDGAIKHANFHFRTEGGAAKGNTEAAFPASAAETKPPMAPSSPPVPPVTTATVSSLEGPAPSPASVPSTPTLLAWKQLASTIPQMPQIPASVPHLPASPLATTSLENAKPQVKPGFLQFQEK

SEQ ID NO: 739893 - protein, 865 aa, Homo sapiens
MGGGPQWGDLLSLPLPPRGDAPPSSSAGEASSLRDYAASTMTEFLGMFGYDDQNTRDELARKISFEKLHAGSTPEAATSSMLPTSEDTLSKRARFSKYEEYIRKLKAGEQLSWPAPSTKTEERVGKEVVGTLPGLRLPSSTAHLETKATILPLPSHSSVQMQNLVARASKYDFFIQKLKTGENLRPQNGSTYKKPSKYDLENVKYLHLFKPGEGSPDMGGAIAFKTGKVGRPSKYDVRGIQKPGPAKVPPTPSLAPAPLASVPSAPSAPGPGPEPPASLSFNTPEYLKSTFSKTDSITTGTVSTVKNGLPTDKPAVTEDVNIYQKYIARFSGSQHCGHIHCAYQYREHYHCLDPECNYQRFTSKQDVIRHYNMHKKRDNSLQHGFMRFSPLDDCSVYYHGCHLNGKSTHYHCMQVGCNKVYTSTSDVMTHENFHKKNTQLINDGFQRFRATEDCGTADCQFYGQKTTHFHCRRPGCTFTFKNKCDIEKHKSYHIKDDAYAKDGFKKFYKYEECKYEGCVYSKATNHFHCIRAGCGFTFTSTSQMTSHKRKHERRHIRSSGALGLPPSLLGAKDTEHEESSNDDLVDFSALSSKNSSLSASPTSQQSSASLAAATAATEAGPSATKPPNSKISGLLPQGLPGSIPLALALSNSGLPTPTPYFPILAGRGSTSLPVGTPSLLGAVSSGSAASATPDTPTLVASGAGDSAPVAAASVPAPPASIMERISASKGLISPMMARLAAAALKPSATFDPGEQAGSCPESRHLLDWGGHLASGCRAESGGVWKKCPCGPCLPAPPLCLIFAPILLVSMWGPWFWLPTVGGPCFCFPICELGAMVPASSAALHPWGHCRSPLPVCSPSHIPSPP

SEQ ID NO: 739894 - protein, 106 aa, Homo sapiens
SAGAWSEADFSNMMSTHYPAPRHQVTTWSCPQAIVSPHGPVPGPPCHHMVLFSGHHVTTQSYSWVTMSLYGPVPKPSCDHVVLSSGLPCHHAVLSPGHHATLWSCP

SEQ ID NO: 739895 - protein, 78 aa, Homo sapiens
PVDPGDPGSRPGCTSGPLGVPQSRQKAHEEKVRFEGGEVTHLRQKNTNVPRRSGAWFSHRRKCLLISPCAGPPGPWRP

SEQ ID NO: 739896 - protein, 161 aa, Homo sapiens
LALHGLGGLCSCLGLTLLRGPSSSLAAPSSFLVFVLGFLVVHIVALLLAEFACHLGVWLWVPVQPLGERGAPKRPGSLAVSSSCLAAGGGSLLAPWRRPERGASCSASSAFVAAATTATGKTFFLKNVFLWPGVAAHACYLSTLGGQGGRITRSGEQDHPG

SEQ ID NO: 739897 - protein, 386 aa, Homo sapiens
MAQWHCSQRTQAGGHGVGERLAQCQDQSSRHAAELRDFKNKMLPLLEVAEKEREALRTEADTISGRVDRLEREVDYLETQNPALPCVEFDEKVTGGPGTKGKGRRNEKYDMVTDCGYTISQVRSMKILKRFGGPAGLWTKDPLGQTEKIYVLDGTQNDTAFVFPRLRDFTLAMAARKASRVRVPFPWVGTGQLVYGGFLYFARRPPGRPGGGGEMENTLQLIKFHLANRTVVDSSVFPAEGLIPPYGLTADTYIDLAADEEGLWAVYATREDDRHLCLAKLDPQTLDTEQQWDTPCPRENAEAAFVICGTLYVVYNTRPASRARIQCSFDASGTLTPERAALPYFPRRYGAHASLRYNPRERQLYAWDDGYQIVYKLEMRKKEEEV

SEQ ID NO: 739898 - protein, 436 aa, Homo sapiens
PTPPPKLTLGLEGKRLTVRSFYSGTTLQAAMGPSTPLLILFLLSWSGPLQGQQHHLVEYMERRLAALEERLAQCQDQSSRHAAELRDFKNKMLPLLEVAEKEREALRTEADTISGRVDRLEREVDYLETQNPALPCVEFDEKVTGGPGTKGKGRRNEKYDMVTDCGYTISQVRSMKILKRFGGPAGLWTKDPLGQTEKIYVLDGTQNDTAFVFPRLRDFTLAMAARKASRVRVPFPWVGTGQLVYGGFLYFARRPPGRPGGGGEMENTLQLIKFHLANRTVVDSSVFPAEGLIPPYGLTADTYIDLAADEEGLWAVYATREDDRHLCLAKLDPQTLDTEQQWDTPCPRENAEAAFVICGTLYVVYNTRPASRARIQCSFDASGTLTPERAALPYFPRRYGAHASLRYNPRERQLYAWDDGYQIVYKLEMRKKEEEV

SEQ ID NO: 739899 - protein, 69 aa, Homo sapiens
MLPLLEVAEKEREALRTEADTISGRVDRLEREVDYLETQNPALPCVEFDEKVTGGPGTKGKGRRNEKYD

SEQ ID NO: 739900 - protein, 227 aa, Homo sapiens
MRVAGAAKLVVAVAVFLLTFYVISQVFEIKMDASLGNLFARSALDTAARSTKPPRYKCGISKACPEKHFAFKMASGAANVVGPKICLEDNVLMSGVKNNVGRGINVALANGKTGEVLDTKYFDMWGGDVAPFIEFLKAIQDGTIVLMGTYDDGATKLNDEARRLIADLGSTSITNLGFRDNWVFCGGKGIKTKSPFEQHIKNNKDTNKYEGWPEVVEMEGCIPQKQD

SEQ ID NO: 739901 - protein, 197 aa, Homo sapiens [sequence omitted]

SEQ ID NO: 739902 - protein, 227 aa, Homo sapiens; identical to SEQ ID NO: 739900

SEQ ID NO: 739903 - protein, 227 aa, Homo sapiens; identical to SEQ ID NO: 739900

SEQ ID NO: 739904 - protein, 227 aa, Homo sapiens; identical to SEQ ID NO: 739900

SEQ ID NO: 739905 - protein, 114 aa, Homo sapiens
MRVAGAAKLVVAVAVFLLTFYVISQVFEIKMDASLGNLFARSALDTAARSTKPPRYKCGISKACPEKHFAFKMASGAANVVGPKICLEDNVLMSGVKNNVGRGINVALANGKSC

SEQ ID NO: 739906 - protein, 182 aa, Homo sapiens
MRVAATKPPRYKCGISKACPEKHFAFKMASGAANVVGPKICLEDNVLMSGVKNNVGRGINVALANGKTGEVLDTKYFDMWGGDVAPFIEFLKAIQDGTIVLMGTYDDGATKLNDEARRLIADLGSTSITNLGFRDNWVFCGGKGIKTKSPFEQHIKNNKDTNKYEGWPEVVEMEGCIPQKQD

SEQ ID NO: 739907 - protein, 227 aa, Homo sapiens; identical to SEQ ID NO: 739900

SEQ ID NO: 739908 - protein, 227 aa, Homo sapiens; identical to SEQ ID NO: 739900

SEQ ID NO: 739909 - protein, 670 aa, Homo sapiens
MEGERRAYSKEVHQRINKQLEEIRRLEEVRGDLQVQISAAQNQVKRLRDSQRLENMDRLLKGRAQVQAEIEELQEQTRALDKQIQEWETRIFTHSKNVRSPGFILDQKVKIRRRIRILENQLDRVTCHFDNQLVRNAALREELDLLRIDRNRYLNVDRKLKKEIHHLHHLVSTLILSSTSAYAVREEAKAKMGLLRERAEKEEAQSEMEAQVLQRQILHLEQLHHFLKLKNNDRQPDPDVLEKREKQAGEVAEGVWKTSQERLVLCYEDALNKLSQLMGESDPDLLVQKYLEIEERNFAEFNFINEQNLELEHVQEEIKEMQEALVSARASKDDQHLLQEQQQKVLQQRMDKVHSEAERLEARFQDVRGQLEKLKADIQLLFTKAHCDSSMIDDLLGVKTSMGDRDMGLFLSLIEKRLVELLTVQAFLHAQSFTSLADAALLVLGQSLEDLPKKMAPLQPPDTLEDPPGFEASDDYPMSREELLSQVEKLVELQEQAEAQRQKDLAAAAAKLDGTLSVDLASTQRAGSSTVLVPTRHPHAIPGSILSHKTSRDRGSLGHVTFGGLSSSTGHLPSHITHGDPNTGHVTFGSTSASSGGHVTFRPVSASSYLGSTGYVGSSRGGENTEGGVESGGTASDSSGGLGSSRDHVSSTGPASSTGPGSSTSKDSRG

SEQ ID NO: 739910 - protein, 694 aa, Homo sapiens
MEGERRAYSKEVHQRINKQLEEIRRLEEVRGDLQVQISAAQNQVKRLRDSQRLENMDRLLKGRAQVQAEIEELQEQTRALDKQIQEWETRIFTHSKNVRSPGFILDQKVKIRRRIRILENQLDRVTCHFDNQLVRNAALREELDLLRIDRNRYLNVDRKLKKEIHHLHHLVSTLILSSTSAYAVREEAKAKMGLLRERAEKEEAQSEMEAQVLQRQILHLEQLHHFLKLKNNDRQPDPDVLEKREKQAGEVAEGVWKTSQERLVLCYEDALNKLSQLMGESDPDLLVQKYLEIEERNFAEFNFINEQNLELEHVQEEIKEMQEALVSARASKDDQHLLQEQQQKVLQQRMDKVHSEAERLEARFQDVRGQLEKLKADIQLLFTKAHCDSSMIDDLLGVKTSMGDRDMGLFLSLIEKRLVELLTVQAFLHAQSFTSLADAALLVLGQSLEDLPKKMAPLQPPDTLEDPPGFEASDDYPMSREELLSQVEKLVRVGPAGVGPGLSVCRGPVHLSLQVELQEQAEAQRQKDLAAAAAKLDGTLSVDLASTQRAGSSTVLVPTRHPHAIPGSILSHKTSRDRGSLGHVTFGGLSSSTGHLPSHITHGDPNTGHVTFGSTSASSGGHVTFRPVSASSYLGSTGYVGSSRGGENTEGGVESGGTASDSSGGLGSSRDHVSSTGPASSTGPGSSTSKDSRG

SEQ ID NO: 739911 - protein, 736 aa, Homo sapiens
PCLARMPLGRLAGSARSEEGSEAFLEGMVDWELSRLQRQCKVMEGERRAYSKEVHQRINKQLEEIRRLEEVRGDLQVQISAAQNQVKRLRDSQRLENMDRLLKGRAQVQAEIEELQEQTRALDKQIQEWETRIFTHSKNVRSPGFILDQKVKIRRRIRILENQLDRVTCHFDNQLVRNAALREELDLLRIDRNRYLNVDRKLKKEIHHLHHLVSTLILSSTSAYAVREEAKAKMGLLRERAEKEEAQSEMEAQVLQRQILHLEQLHHFLKLKNNDRQPDPDVLEKREKQAGEVAEGVWKTSQERLVLCYEDALNKLSQLMGESDPDLLVQKYLEIEERNFAEFNFINEQNLELEHVQEEIKEMQEALVSARASKDDQHLLQEQQQKVLQQRMDKVHSEAERLEARFQDVRGQLEKLKADIQLLFTKAHCDSSMIDDLLGVKTSMGDRDMGLFLSLIEKRLVELLTVQAFLHAQSFTSLADAALLVLGQSLEDLPKKMAPLQPPDTLEDPPGFEASDDYPMSREELLSQVEKLVRVGPAGVGPGLSVCRGPVHLSLQVELQEQAEAQRQKDLAAAAAKLDGTLSVDLASTQRAGSSTVLVPTRHPHAIPGSILSHKTSRDRGSLGHVTFGGLSSSTGHLPSHITHGDPNTGHVTFGSTSASSGGHVTFRPVSASSYLGSTGYVGSSRGGENTEGGVESGGTASDSSGGLGSSRDHVSSTGPASSTGPGSSTSKDSRG

SEQ ID NO: 739912 - protein, 536 aa, Homo sapiens
LFLSLPISTVLPACISPSPLLLPSLWLSLSALLCISVSHLPYLPTPLCLCDSSLFVSLPWFLCGLPHLHFLWPSVCLSVSVLSVSVSLSPSLWAPPCPTLPVEERNFAEFNFINEQNLELEHVQEEIKEMQEALVSARASKDDQHLLQEQQQKVLQQRMDKVHSEAERLEARFQDVRGQLEKLKAVLECNGMISAHCNLRFLGSSDSPASASPVAGTTDIQLLFTKAHCDSSMIDDLLGVKTSMGDRDMGLFLSLIEKRLVELLTVQAFLHAQSFTSLADAALLVLGQSLEDLPKKMAPLQPPDTLEDPPGFEASDDYPMSREELLSQVEKLVRVGPAGVGPGLSVCRGPVHLSLQVELQEQAEAQRQKDLAAAAAKLDGTLSVDLASTQRAGSSTVLVPTRHPHAIPGSILSHKTSRDRGSLGHVTFGGLSSSTGHLPSHITHGDPNTGHVTFGSTSASSGGHVTFRPVSASSYLGSTGYVGSSRGGENTEGGVESGGTASDSSGGLGSSRDHVSSTGPASSTGPGSSTSKDSRG

SEQ ID NO: 739913 - protein, 497 aa, Homo sapiens
LFLSLPISTVLPACISPSPLLLPSLWLSLSALLCISVSHLPYLPTPLCLCDSSLFVSLPWFLCGLPHLHFLWPSVCLSVSVLSVSVSLSPSLWAPPCPTLPVEERNFAEFNFINEQNLELEHVQEEIKEMQEALVSARASKDDQHLLQEQQQKVLQQRMDKVHSEAERLEARFQDVRGQLEKLKAVLECNGMISAHCNLRFLGSSDSPASASPVAGTTDIQLLFTKAHCDSSMIDDLLGVKTSMGDRDMGLFLSLIEKRLVELLTVQAFLHAQSFTSLADAALLVLGQSLEDLPKKMAPLQPPDTLEDPPGFEASDDYPMSREELLSQVEKLVRVGPAGVGPGLSVCRGPVHLSLQVELQEQAEAQRQKDLAAAAAKLDGTLSVDLASTQRAGSSTVLVPTRHPHAIPGSILSHKTSRDRGSLGHVTFGGLSSSTGHLPSHITHGDPNTGHVTFGSISAPSLSAEPWPPVDPPPPVSGSLSSSPSPRLSTHPVSLSL

SEQ ID NO: 739914 - protein, 141 aa, Homo sapiens
QEALVSARASKDDQHLLQEQQQKVLQQRMDKVHSEAERLEARFQDVRGQLEKLKAGEHPWAPPPEPGFSTWKDTISPRGLEALHGQPGSLAYQLPHICPSFQPGSIPPTVPCPSIHPSSVPPTVLHPSIHPSINASIHPSR

SEQ ID NO: 739915 - protein, 197 aa, Homo sapiens
VFFSPNSQPGSHCRTAALLFLPMPLGLVSLLSLLHHLGSNSKHLCVPILAGSHVRSGRSVWKVLLGPCLHPRDLAMSPCSAVLKMPASASCAWGIFLEWWKAALPMCTVGERCQGVSTPQEQLLTSDPWYRSTRLYCSLGGIILKSTFDPVSQSFLGAVIHQGNWPHAILYQLLSFPESCLYSLLKHLSNKLLALSE

SEQ ID NO: 739916 - protein, 728 aa, Homo sapiens
HEVKSGGCGAGLVAAGAVRVLYPASRAGERTRVPGSPAPSSLPLHSPGACGTEVDMDPQRSPLLEVKGNIELKRPLIKAPSQLPLSGSRLKRRPDQMEDGLEPEKKRTRGLGATTKITTSHPRVPSLTTVPQTQGQTTAQKVSKKTGPRCSTAIATGLKNQKPVPAVPVQKSGTSGVPPMAGGKKPSKRPAWDLKGQLCDLNAELKRCRERTQTLDQENQQLQDQLRDAQQQVKALGTERTTLEGHLAKVQAQAEQGQQELKNLRACVLELEERLSTQEGLVQELQKKQVELQEERRGLMSQLEEKERRLQTSEAALSSSQAEVASLRQETVAQAALLTEREERLHGLEMERRRLHNQLQELKGNIRVFCRVRPVLPGEPTPPPGLLLFPSGPGGPSDPPTRLSLSRSDERRGTLSGAPAPPTRHDFSFDRVFPPGSGQDEVFEEIAMLVQSALDGYPVCIFAYGQTGSGKTFTMEGGPGGDPQLEGLIPRALRHLFSVAQELSGQGWTYSFVASYVEIYNETVRDLLATGTRKGQGGECEIRRAGPGSEELTVTNARYVPVSCEKEVDALLHLARQNRAVARTAQNERSSRSHSVFQLQISGEHSSRGLQCGAPLSLVDLAGSERLDPGLALGPGERERLRETQAINSSLSTLGLVIMALSNKESHVPYRNSKLTYLLQNSLGGSAKMLMFVNISPLEENVSESLNSLRFASKVNQCVIGTAQANRK

SEQ ID NO: 739917 - protein, 728 aa, Homo sapiens; identical to SEQ ID NO: 739916

SEQ ID NO: 739918 - protein, 349 aa, Homo sapiens
PTQEFHPSLQCHRHKAGAVRVLYPASRAGERTRVPGSPAPSSLPLHDFSFDRVFPPGSGQDEVFEEIAMLVQSALDGYPVCIFAYGQTGSGKTFTMEGGPGGDPQLEGLIPRALRHLFSVAQELSGQGWTYSFVASYVEIYNETVRDLLATGTRKGQGGECEIRRAGPGSEELTVTNARYVPVSCEKEVDALLHLARQNRAVARTAQNERSSRSHSVFQLQISGEHSSRGLQCGAPLSLVDLAGSERLDPGLALGPGERERLRETQAINSSLSTLGLVIMALSNKESHVPYRNSKLTYLLQNSLGGSAKMLMFVNISPLEENVSESLNSLRFASKVNQCVIGTAQANRK

SEQ ID NO: 739919 - protein, 72 aa, Homo sapiens
LLSPGTPQAFREDILPLSFMESHGIFCVDAAWAVREGPGPHVAAADPSPPQLSSLLCDVTALASLLWGGEYF

SEQ ID NO: 739920 - protein, 296 aa, Homo sapiens [sequence omitted]

SEQ ID NO: 739921 - protein, 218 aa, Homo sapiens
MYFDIPLEHRETSIIKRHPPQRLQKLEPIDLPRVITSGRLLSQREARTMHKAKQVLEKKMQTPMYTSENRQYLHKMQVLEMIRKRQEAQMELKKSLHGEARINKQSPRDHKAKKTLQSTPRNDDHDLLTMLPDEILNRGPGNSKNTEFLKHQAVNNCCPWKIGKMETWLHEQEAQGQLLWDSSSSDSDEQGKDEKKPRALVRTRTERIPLFDEFFDQE

SEQ ID NO: 739922 - protein, 170 aa, Homo sapiens
MHKAKQVLEKKMQTPMYTSENRQYLHKMQVLEMIRKRQEAQMELKKSLHGEARINKQSPRDHKAKKTLQSTPRNDDHDLLTMLPDEILNRGPGNSKNTEFLKHQAVNNCCPWKIGKMETWLHEQEAQGQLLWDSSSSDSDEQGKDEKKPRALVRTRTERIPLFDEFFDQE

SEQ ID NO: 739923 - protein, 220 aa, Homo sapiens
MLLLFHSKRMPVAEAPQVAGGQGDGGDGEEAEPEGMFKACEDSKRKARGYLRLVPLFVLLALLVLASAGVLLWYFLGYKAEVMVSQVYSGSLRVLNRHFSQDLTRRESSAFRSETAKAQKMLKELITSTRLGTYYNSSSVYSFGEGPLTCFFWFILQIPEHRRLMLSPEVVQALLVEELLSTVNSSAAVPYRAEYEVDPEGLVILEASVKDIAALNSTLG

SEQ ID NO: 739924 - protein, 299 aa, Homo sapiens
MRLGSGTFATCCVAIEVLGIAVFLRGFFPAPVRSSARAEHGAEPPAPEPSAGASSNWTTLPPPLFSKVVIVLIDALRDDFVFGSKGVKFMPYTTYLVEKGASHSFVAEAKPPTVTMPRIKGIIEARLFMSLSLAFCSRAPKTYLNLKSFAADFKLKTVGLWEIYSGLVLLAALLFRPHNLPVLSHLASWIQTLMTNFILEAPENTMAVQITVMHYGFGQAFFNFTRQSPRKLHRGPLTPDLCAKTPKWSSSLPDTRREVRRPGCGPPLGIPELENPGTRDQLLSTTIVSDRTAVEPGTL

SEQ ID NO: 739925 - protein, 634 aa, Homo sapiens
MRLGSGTFATCCVAIEVLGIAVFLRGFFPAPVRSSARAEHGAEPPAPEPSAGASSNWTTLPPPLFSKVVIVLIDALRDDFVFGSKGVKFMPYTTYLVEKGASHSFVAEAKPPTVTMPRIKALMTGSLPGFVDVIRNLNSPALLEDSVIRQAKAAGKRIVFYGDETWVKLFPKHFVEYDGTTSFFVSDYTEVDNNVTRHLDKVLKRGDWDILILHYLGLDHIGHISGPNSPLIGQKLSEMDSVLMKIHTSLQSKERETPLPNLLVLCGDHGMSETGSHGASSTEEVNTPLILISSAFERKPGDIRHPKHDPTDGCGMRHMDDSTWITEFQKTVEGALLFPVVEGKTNCAEQKATYNISTPDAALRKPVAREMCRHMNKAPAHCARNTMISTARKENMESTPVKETAQDNQKIQYHPGDSKETQGRNLEATEPRKEQRHQMEVAHTWDTKIRPTKYTLNGGQTTTQRPNGRDHQPVLPRTKHPTKTNYSKKRAENKKEPIEQTPWGVIHVGHTLARYMEQIRTDDGHSMMHQPEDRNERNNRSTNEAGTKRRTRHRHANNGRQRKTNTLSVRANRQGSHGANTRSENPTAQDQRSSTATDRRSAPKVQDSTKRPKTRRHNTEDRHTDSERKVNTRN

SEQ ID NO: 739926 - protein, 1290 aa, Homo sapiens
MSGPLEGADGGGDPRPGESFCPGGVPSPGPPQHRPCPGPSLADDTDANSNGSSGNESNGHESRGASQRSSHSSSSGNGKDSALLETTESSKSTNSQSPSPPSSSIAYSLLSASSEQDNPSTSGCSSEQSARARTQKELMTALRELKLRLPPERRGKGRSGTLATLQYALACVKQVQANQEYYQQWSLEEGEPCSMDMSTYTLEELEHITSEYTLQNQDTFSVAVSFLTGRIVYISEQAAVLLRCKRDVFRGTRFSELLAPQDVGVFYGSTAPSRLPTWGTGASAGSGLRDFTQEKSVFCRIRGGPDRDPGPRYQPFRLTPYVTKIRVSDGAPAQPCCLLIAERIHSGYEAPRIPPDKRIFTTRHTPSCLFQDVDERAAPLLGYLPQDLLGAPVLLFLHPEDRPLMLAIHKKILQLAGQPFDHSPIRFCARNGEYVTMDTSWAGFVHPWSRKVAFVLGRHKVRTAPLNEDVFTPPAPSPAPSLDTDIQELSEQIHRLLLQPVHSPSPTGLCGVGAVTSPGPLHSPGSSSDSNGGDAEGPGPPAPVTFQQICKDVHLVKHQGQQLFIESRARPQSRPRLPATGTFKAKALPCQSPDPELEAGSAPVQAPLALVPEEAERKEASSCSYQQINCLDSILRYLESCNLPSTTKRKCASSSSYTTSSASDDDRQRTGPVSVGTKKDPPSAALSGEGATPRKEPVVGGTLSPLALANKAESVVSVTSQCSFSSTIVHVGDKKPPESDIIMMEDLPGLAPGPAPSPAPSPTVAPDPAPDAYRPVGLTKAVLSLHTQKEEQAFLSRFRDLGRLRGLDSSSTAPSALGERGCHHGPAPPSRRHHCRSKAKRSRHHQNPRAEAPCYVSHPSPVPPSTPWPTPPATTPFPAVVQPYPLPVFSPRGGPQPLPPAPTSVPPAAFPAPLVTPMVALVLPNYLFPTPSSYPYGALQTPAEGPPTPASHSPSPSLPALPPSPPHRPDSPLFNSRCSSPLQLNLLQLEELPRAEGAAVAGGPGSSAGPPPPSAEAAEPEARLAEVTESSNQDALSGSSDLLELLLQEDSRSGTGSAASGSLGSGLGSGSGSGSHEGGSTSASITRSSQSSHTSKYFGSIDSSEAEAGAARGGAEPGDQVIKYVLQDPIWLLMANADQRVMMTYQVPSRDMTSVLKQDRERLRAMQKQQPRFSEDQRRELGAVHSWVRKGQLPRALDVMACVDCGSSTQDPGHPDDPLFSELDGLGLEPMEEGGGEQGSSGGGSGEGEGCEEAQGGAKASSSQDLAMEEEEEGRSSSSPALPTAGNCTS

SEQ ID NO: 739927 - protein, 1290 aa, Homo sapiens; identical to SEQ ID NO: 739926

SEQ ID NO: 739928 - protein, 821 aa, Homo sapiens
MSGPLEGADGGGDPRPGESFCPGGVPSPGPPQHRPCPGPSLADDTDANSNGSSGNESNGHESRGASQRSSHSSSSGNGKDSALLETTESSKSTNSQSPSPPSSSIAYSLLSASSEQDNPSTSGCSSEQSARARTQKELMTALRELKLRLPPERRGKGRSGTLATLQYALACVKQVQANQEYYQQWSLEEGEPCSMDMSTYTLEELEHITSEYTLQNQDTFSVAVSFLTGRIVYISEQAAVLLRCKRDVFRGTRFSELLAPQDVGVFYGSTAPSRLPTWGTGASAGSGLRDFTQEKSVFCRIRGGPDRDPGPRYQPFRLTPYVTKIRVSDGAPAQPCCLLIAERIHSGYEAPRIPPDKRIFTTRHTPSCLFQDVDERAAPLLGYLPQDLLGAPVLLFLHPEDRPLMLAIHKKILQLAGQPFDHSPIRFCARNGEYVTMDTSWAGFVHPWSRKVAFVLGRHKVRTAPLNEDVFTPPAPSPAPSLDTDIQELSEQIHRLLLQPVHSPSPTGLCGVGAVTSPGPLHSPGSSSDSNGGDAEGPGPPAPVTFQQICKDVHLVKHQGQQLFIESRARPQSRPRLPATGTFKAKALPCQSPDPELEAGSAPVQAPLALVPEEAERKEASSCSYQQINCLDSILRYLESCNLPSTTKRKCASSSSYTTSSASDDDRQRTGPVSVGTKKDPPSAALSGEGATPRKEPVVGGTLSPLALANKAESVVSVTSQCSFSSTIVHVGDKKPPESDIIMMEDLPGLAPGPAPSPAPSPTVAPDPAPDAYRPVGLTKAVLSLHTQKEEQAFLSRFRDLGRLRGLDSSSTAPSALGERG

SEQ ID NO: 739929 - protein, 903 aa, Homo sapiens
MSGPLEGADGGGDPRPGESFCPGGVPSPGPPQHRPCPGPSLADDTDANSNGSSGNESNGHESRGASQRSSHSSSSGNGKDSALLETTESSKSTNSQSPSPPSSSIAYSLLSASSEQDNPSTSGCSSEQSARARTQKELMTALRELKLRLPPERRGKGRSGTLATLQYALACVKQVQANQEYYQQWSLEEGEPCSMDMSTYTLEELEHITSEYTLQNQDTFSVAVSFLTGRIVYISEQAAVLLRCKRDVFRGTRFSELLAPQDVGVFYGSTAPSRLPTWGTGASAGSGLRDFTQEKSVFCRIRGGPDRDPGPRYQPFRLTPYVTKIRVSDGAPAQPCCLLIAERIHSGYEAPRIPPDKRIFTTRHTPSCLFQDVDERAAPLLGYLPQDLLGAPVLLFLHPEDRPLMLAIHKKILQLAGQPFDHSPIRFCARNGEYVTMDTSWAGFVHPWSRKVAFVLGRHKVRTAPLNEDVFTPPAPSPAPSLDTDIQELSEQIHRLLLQPVHSPSPTGLCGVGAVTSPGPLHSPGSSSDSNGGDAEGPGPPAPVSDLLLPHPLIALSPLLLGTSTASPRVLPDPPLPSPSCLFLLVLLPSRRLCLPTGTFLFYCALAPDTGDTPWFCSLWCCVPQVTFQQICKDVHLVKHQGQQLFIESRARPQSRPRLPATGTFKAKALPCQSPDPELEAGSAPVQAPLALVPEEAERKEASSCSYQQINCLDSILRYLESCNLPSTTKRKCASSSSYTTSSASDDDRQRTGPVSVGTKKDPPSAALSGEGATPRKEPVVGGTLSPLALANKAESVVSVTSQCSFSSTIVHVGDKKPPESDIIMMEDLPGLAPGPAPSPAPSPTVAPDPAPDAYRPVGLTKAVLSLHTQKEEQAFLSRFRDLGRLRGLDSSSTAPSALGERG

SEQ ID NO: 739930 - protein, 871 aa, Homo sapiens
MSGPLEGADGGGDPRPGESFCPGGVPSPGPPQHRPCPGPSLADDTDANSNGSSGNESNGHESRGASQRSSHSSSSGNGKDSALLETTESSKSTNSQSPSPPSSSIAYSLLSASSEQDNPSTSGCSSEQSARARTQKELMTALRELKLRLPPERRGKGRSGTLATLQYALACVKQVQANQEYYQQWSLEEGEPCSMDMSTYTLEELEHITSEYTLQNQDTFSVAVSFLTGRIVYISEQAAVLLRCKRDVFRGTRFSELLAPQDVGVFYGSTAPSRLPTWGTGASAGEVPKRCGEDEQSQEIPAVRGRGTQTFPEWILRSLGKGQEAVLTPLLSVPGSGLRDFTQEKSVFCRIRGGPDRDPGPRYQPFRLTPYVTKIRVSDGAPAQPCCLLIAERIHSGYEAPRIPPDKRIFTTRHTPSCLFQDVDERAAPLLGYLPQDLLGAPVLLFLHPEDRPLMLAIHKKILQLAGQPFDHSPIRFCARNGEYVTMDTSWAGFVHPWSRKVAFVLGRHKVRTAPLNEDVFTPPAPSPAPSLDTDIQELSEQIHRLLLQPVHSPSPTGLCGVGAVTSPGPLHSPGSSSDSNGGDAEGPGPPAPVTFQQICKDVHLVKHQGQQLFIESRARPQSRPRLPATGTFKAKALPCQSPDPELEAGSAPVQAPLALVPEEAERKEASSCSYQQINCLDSILRYLESCNLPSTTKRKCASSSSYTTSSASDDDRQRTGPVSVGTKKDPPSAALSGEGATPRKEPVVGGTLSPLALANKAESVVSVTSQCSFSSTIVHVGDKKPPESDIIMMEDLPGLAPGPAPSPAPSPTVAPDPAPDAYRPVGLTKAVLSLHTQKEEQAFLSRFRDLGRLRGLDSSSTAPSALGERG

SEQ ID NO: 739931 - protein, 761 aa, Homo sapiens
MSGPLEGADGGGDPRPGESFCPGGVPSPGPPQHRPCPGPSLADDTDANSNGSSGNESNGHESRGASQRSSHSSSSGNGKDSALLETTESSKSTNSQSPSPPSSSIAYSLLSASSEQDNPSTSGCSSEQSARARTQKELMTALRELKLRLPPERRGKGRSGTLATLQYALACVKQVQANQEYYQQWSLEEGEPCSMDMSTYTLEELEHITSEYTLQNQDTFSVAVSFLTGRIVYISEQAAVLLRCKRDVFRGTRFSELLAPQDVGVFYGSTAPSRLPTWGTGASAGSGLRDFTQEKSVFCRIRGGPDRDPGPRYQPFRLTPYVTKIRVSDGAPAQPCCLLIAERIHSGYEAPRIPPDKRIFTTRHTPSCLFQDVDERAAPLLGYLPQDLLGAPVLLFLHPEDRPLMLAIHKKILQLAGQPFDHSPIRFCARNGEYVTMDTSWAGFVHPWSRKVAFVLGRHKVRTAPLNEDVFTPPAPSPAPSLDTDIQELSEQIHRLLLQPVHSPSPTGLCGVGAVTSPGPLHSPGSSSDSNGGDAEGPGPPAPVTFQQICKDVHLVKHQGQQLFIESRARPQSRPRLPATGTFKAKALPCQSPDPELEAGSAPVQAPLALVPEEAERKEASSCSYQQINCLDSILRYLESCNLPSTTKRKCASSSSYTTSSASDDDRQRTGPVSVGTKKDIIMMEDLPGLAPGPAPSPAPSPTVAPDPAPDAYRPVGLTKAVLSLHTQKEEQAFLSRFRDLGRLRGLDSSSTAPSALGERG

SEQ ID NO: 739932 - protein, 695 aa, Homo sapiens
MSGPLEGADGGGDPRPGESFCPGGVPSPGPPQHRPCPGPSLADDTDANSNGSSGNESNGHESRGASQRSSHSSSSGNGKDSALLETTESSKSTNSQSPSPPSSSIAYSLLSASSEQDNPSTSGCSSEQSARARTQKELMTALRDAPSRLPTWGTGASAGSGLRDFTQEKSVFCRIRGGPDRDPGPRYQPFRLTPYVTKIRVSDGAPAQPCCLLIAERIHSGYEAPRIPPDKRIFTTRHTPSCLFQDVDERAAPLLGYLPQDLLGAPVLLFLHPEDRPLMLAIHKKILQLAGQPFDHSPIRFCARNGEYVTMDTSWAGFVHPWSRKVAFVLGRHKVRTAPLNEDVFTPPAPSPAPSLDTDIQELSEQIHRLLLQPVHSPSPTGLCGVGAVTSPGPLHSPGSSSDSNGGDAEGPGPPAPVTFQQICKDVHLVKHQGQQLFIESRARPQSRPRLPATGTFKAKALPCQSPDPELEAGSAPVQAPLALVPEEAERKEASSCSYQQINCLDSILRYLESCNLPSTTKRKCASSSSYTTSSASDDDRQRTGPVSVGTKKDPPSAALSGEGATPRKEPVVGGTLSPLALANKAESVVSVTSQCSFSSTIVHVGDKKPPESDIIMMEDLPGLAPGPAPSPAPSPTVAPDPAPDAYRPVGLTKAVLSLHTQKEEQAFLSRFRDLGRLRGLDSSSTAPSALGERG

SEQ ID NO: 739933 - protein, 1421 aa, Homo sapiens
MSGPLEGADGGGDPRPGESFCPGGVPSPGPPQHRPCPGPSLADDTDANSNGSSGNESNGHESRGASQRSSHSSSSGNGKDSALLETTESSKSTNSQSPSPPSSSIAYSLLSASSEQDNPSTSGCSSEQSARARTQKELMTALRELKLRLPPERRGKGRSGTLATLQYALACVKQVQANQEYYQQWSLEEGEPCSMDMSTYTLEELEHITSEYTLQNQDTFSVAVSFLTGRIVYISEQAAVLLRCKRDVFRGTRFSELLAPQDVGVFYGSTAPSRLPTWGTGASAGSGLRDFTQEKSVFCRIRGGPDRDPGPRYQPFRLTPYVTKIRVSDGAPAQPCCLLIAERIHSGYEAPRIPPDKRIFTTRHTPSCLFQDVDERAAPLLGYLPQDLLGAPVLLFLHPEDRPLMLAIHKKILQLAGQPFDHSPIRFCARNGEYVTMDTSWAGFVHPWSRKVAFVLGRHKVRTAPLNEDVFTPPAPSPAPSLDTDIQELSEQIHRLLLQPVHSPSPTGLCGVGAVTSPGPLHSPGSSSDSNGGDAEGPGPPAPVTFQQICKDVHLVKHQGQQLFIESRARPQSRPRLPATGTFKAKALPCQSPDPELEAGSAPVQAPLALVPEEAERKEASSCSYQQINCLDSILRYLESCNLPSTTKRKCASSSSYTTSSASDDDRQRTGPVSVGTKKDPPSAALSGEGATPRKEPVVGGTLSPLALANKAESVVSVTSQCSFSSTIVHVGDKKPPESDIIMMEDLPGLAPGPAPSPAPSPTVAPDPAPDAYRPVGLTKAVLSLHTQKEEQAFLSRFRDLGRLRGLDSSSTAPSALGERGRIRPRWAGGMPRLAVPTGVWRTRAICPCVHGLTLLPPSASMPPSSAHPQLDPSCNLSLALFLSQINPLVPGSCDSSLKVPHLLSPPFCVGVRSSLWDLGLSSPWSACQGSVGSRGTNPRLRSLLTQSLPTGCHHGPAPPSRRHHCRSKAKRSRHHQNPRAEAPCYVSHPSPVPPSTPWPTPPATTPFPAVVQPYPLPVFSPRGGPQPLPPAPTSVPPAAFPAPLVTPMVALVLPNYLFPTPSSYPYGALQTPAEGPPTPASHSPSPSLPALPPSPPHRPDSPLFNSRCSSPLQLNLLQLEELPRAEGAAVAGGPGSSAGPPPPSAEAAEPEARLAEVTESSNQDALSGSSDLLELLLQEDSRSGTGSAASGSLGSGLGSGSGSGSHEGGSTSASITRSSQSSHTSKYFGSIDSSEAEAGAARGGAEPGDQVIKYVLQDPIWLLMANADQRVMMTYQVPSRDMTSVLKQDRERLRAMQKQQPRFSEDQRRELGAVHSWVRKGQLPRALDVMACVDCGSSTQDPGHPDDPLFSELDGLGLEPMEEGGGEQGSSGGGSGEGEGCEEAQGGAKASSSQDLAMEEEEEGRSSSSPALPTAGNCTS

SEQ ID NO: 739934 - protein, 587 aa, Homo sapiens
LELLTSGDPPALASQSAGIKGVSHRARPTSASSCPLPSVFAVVCCDLIVGGVGGSLLKVPNAPLSFARGGPDRDPGPRYQPFRLTPYVTKIRVSDGAPAQPCCLLIAERIHSGYEAPRIPPDKRIFTTRHTPSCLFQDVDERAAPLLGYLPQDLLGAPVLLFLHPEDRPLMLAIHKKILQLAGQPFDHSPIRFCARNGEYVTMDTSWAGFVHPWSRKVAFVLGRHKVRTAPLNEDVFTPPAPSPAPSLDTDIQELSEQIHRLLLQPVHSPSPTGLCGVGAVTSPGPLHSPGSSSDSNGGDAEGPGPPAPVTFQQICKDVHLVKHQGQQLFIESRARPQSRPRLPATGTFKAKALPCQSPDPELEAGSAPVQAPLALVPEEAERKEASSCSYQQINCLDSILRYLESCNLPSTTKRKCASSSSYTTSSASDDDRQRTGPVSVGTKKDPPSAALSGEGATPRKEPVVGGTLSPLALANKAESVVSVTSQCSFSSTIVHVGDKKPPESDIIMMEDLPGLAPGPAPSPAPSPTVAPDPAPDAYRPVGLTKAVLSLHTQKEEQAFLSRFRDLGRLRGLDSSSTAPSALGERG

SEQ ID NO: 739935 - protein, 373 aa, Homo sapiens [sequence omitted]

SEQ ID NO: 739936 - protein, 373 aa, Homo sapiens [sequence omitted]

SEQ ID NO: 739937 - protein, 821 aa, Homo sapiens; identical to SEQ ID NO: 739928

SEQ ID NO: 739938 - protein, 373 aa, Homo sapiens [sequence omitted]

SEQ ID NO: 739939 - protein, 220 aa, Homo sapiens
MEGRDNRTRAPPASITRSSQSSHTSKYFGSIDSSEAEAGAARGGAEPGDQVIKYVLQDPIWLLMANADQRVMMTYQVPSRDMTSVLKQDRERLRAMQKQQPRFSEDQRRELGAVHSWVRKGQLPRALDVMACVDCGSSTQDPGHPDDPLFSELDGLGLEPMEEGGGEQGSSGGGSGEGEGCEEAQGGAKASSSQDLAMEEEEEGRSSSSPALPTAGNCTS

SEQ ID NO: 739940 - protein, 157 aa, Homo sapiens
LGALLLVPPRRRAGFLVLEALTSHSTSLGEEHEVGSCGRGRMPASWVLVRVLDPSLCLLNPFLGRDMTSVLKQDRERLRAMQKQQPRFSEDQRRELGAVHSWVRKGQLPRALDVMVREAWDGEKKELSSSSRGRKKELSSSSRDRGQELISLMSLDH

SEQ ID NO: 739941 - protein, 68 aa, Homo sapiens
CLSLLLHSQGFKLSGLGYGGGGRRQELIQSSLTYSRKLHQLDSILGPSPGVHERLSSPMSQFSELRCG

SEQ ID NO: 739942 - protein, 821 aa, Homo sapiens; identical to SEQ ID NO: 739928

SEQ ID NO: 739943 - protein, 930 aa, Homo sapiens
  misc_feature (930)..(930): Xaa can be any naturally occurring amino acid
MSGPLEGADGGGDPRPGESFCPGGVPSPGPPQHRPCPGPSLADDTDANSNGSSGNESNGHESRGASQRSSHSSSSGNGKDSALLETTESSKSTNSQSPSPPSSSIAYSLLSASSEQDNPSTSGCSSEQSARARTQKELMTALRELKLRLPPERRGKGRSGTLATLQYALACVKQVQANQEYYQQWSLEEGEPCSMDMSTYTLEELEHITSEYTLQNQDTFSVAVSFLTGRIVYISEQAAVLLRCKRDVFRGTRFSELLAPQDVGVFYGSTAPSRLPTWGTGASAGSGLRDFTQEKSVFCRIRGGPDRDPGPRYQPFRLTPYVTKIRVSDGAPAQPCCLLIAERIHSGYEAPRIPPDKRIFTTRHTPSCLFQDVDERAAPLLGYLPQDLLGAPVLLFLHPEDRPLMLAIHKKILQLAGQPFDHSPIRFCARNGEYVTMDTSWAGFVHPWSRKVAFVLGRHKVRTAPLNEDVFTPPAPSPAPSLDTDIQELSEQIHRLLLQPVHSPSPTGLCGVGAVTSPGPLHSPGSSSDSNGGDAEGPGPPAPVSDLLLPHPLIALSPLLLGTSTASPRVLPDPPLPSPSCLFLLVLLPSRRLCLPTGTFLFYCALAPDTGDTPWFCSLWCCVPQVTFQQICKDVHLVKHQGQQLFIESRARPQSRPRLPATGTFKAKALPCQSPDPELEAGSAPVQAPLALVPEEAERKEASSCSYQQINCLDSILRYLESCNLPSTTKRKCASSSSYTTSSASDDDRQRTGPVSVGTKKDPPSAALSGEGATPRKEPVVGGTLSPLALANKAESVVSVTSQCSFSSTIVHVGDKKPPESDIIMMEDLPGLAPGPAPSPAPSPTVAPDPAPDAYRPVGLTKAVLSLHTQKEEQAFLSRFRDLGRLRGLDSSSTAPSALGERVLHDGPHPKRRTLRSKASVTHNRTSGEX

SEQ ID NO: 739944 - protein, 232 aa, Homo sapiens
MSGPLEGADGGGDPRPGESFCPGGVPSPGPPQHRPCPGPSLADDTDANSNGSSGNESNGHESRGASQRSSHSSSSGNGKDSALLETTESSKSTNSQSPSPPSSSIAYSLLSASSEQDNPSTSGCSSEQSARARTQKELMTALRELKLRLPPERRGKGRSGTLATLQYALACVKQVQANQEYYQQWSLEEGEPCSMDMSTYTLEELEHITSEYTLQNQDTFSVAVSFLTGRIA

SEQ ID NO: 739945 - protein, 116 aa, Homo sapiens
LLGYLPQDLLGAPVLLFLHPEDRPLMLAIHKKSEFLSPCSPFPLSWAFEWLPLWLCLLVPWSPGSLVAWPPSYSALPPFDRSSFPLPSVLQLAGQPFDHSPIRFCARNGEYVTMDT

SEQ ID NO: 739946 - protein, 608 aa, Homo sapiens
MSGPLEGADGGGDPRPGESFCPGGVPSPGPPQHRPCPGPSLADDTDANSNGSSGNESNGHESRGASQRSSHSSSSGNGKDSALLETTESSKSTNSQSPSPPSSSIAYSLLSASSEQDNPSTSGCSSEQSARARTQKELMTALRELKLRLPPERRGKGRSGTLATLQYALACVKQVQANQEYYQQWSLEEGEPCSMDMSTYTLEELEHITSEYTLQNQDTFSVAVSFLTGRIVYISEQAAVLLRCKRDVFRGTRFSELLAPQDVGVFYGSTAPSRLPTWGTGASAGSGLRDFTQEKSVFCRIRGGPDRDPGPRYQPFRLTPYVTKIRVSDGAPAQPCCLLIAERIHSGYEAPRIPPDKRIFTTRHTPSCLFQDVDERAAPLLGYLPQDLLGAPVLLFLHPEDRPLMLAIHKKILQLAGQPFDHSPIRFCARNGEYVTMDTSWAGFVHPWSRKVAFVLGRHKVRTAPLNEDVFTPPAPSPAPSLDTDIQELSEQIHRLLLQPVHSPSPTGLCGVGAVTSPGPLHSPGSSSDSNGGDAEGPGPPAPVSDLLLPHPLIALSPLLLGTSTASPRVLPDPPLPSPSCLFLLVLLPSRRLCLPTGTFLFYCALGP

SEQ ID NO: 739947 - protein, 628 aa, Homo sapiens
MARAGPRLVLSEEAVRAKSGLGPHRDLAELQSLSIPGTYQEKITHLGHSLMSLTGLKSLDLSRNSLVSLEGIQYLTALESLNLYYNCISSLAEVFRLHALTELVDVDFRLNPVVKVEPDYRLFVVHLLPKLQQLDDRPVRASERKASRLHFASEDSLDSKESVPASLKEGRPHHPRAKCTEALAKQSLVMDADDEAVLNLIAECEWDLGRPPGSTSFSQKGREADSRGSQESRHLLSPQLVQYQCGDSGKQGRETRRSSCRGCCLEKMPWSQLCGELPPLYGAEPEASRAPRPHTYFTPHPDSMDTEDSASSQKLDLSGEMVPGPLPAPGKCRKRRMPVGRFQTFSDQEGLGCPERTHGSSVPKESLSRQDSSESRNGRTLSQPEASETEEQRSRGVTDTREPSPGSHSALPGKKTALQVPAQQRGIPCSGKTHLVIFEEFTAAQDSSAMVGEDVGSLALESKSLQSRLAEQQQQHAREMSEVTAELHHTHKELDDLRQHLDKSLEENSRLKSLLLSMKKEVKSADTAATLNLQIAGLQTSVKRLCGEIVELKQHLEHYDKIQELTQMLQESHSSLVSTNEHLLQELSQVRAQHRAEVEQMHWSYQELKKTMALFPHSSASHGGCQAC

SEQ ID NO: 739948 - protein, 647 aa, Homo sapiens
MARAGPRLVLSEEAVRAKSGLGPHRDLAELQSLSIPGTYQEKITHLGHSLMSLTGLKSLDLSRNSLVSLEGIQYLTALESLNLYYNCISSLAEVFRLHALTELVDVDFRLNPVVKVEPDYRLFVVHLLPKLQQLDDRPVRASERKASRLHFASEDSLDSKESVPASLKEGRPHHPRAKCTEALAKQSLVMDADDEAVLNLIAECEWDLGRPPGSTSFSQKGREADSRGSQESRHLLSPQLVQYQCGDSGKQGRETRRSSCRGCCLEKMPWSQLCGELPPLYGAEPEASRAPRPHTYFTPHPDSMDTEDSASSQKLDLSGEMVPGPLPAPGKCRKRRMPVGRFQTFSDQEGLGCPERTHGSSVPKESLSRQDSSESRNGRTLSQPEASETEEQRSRGVTDTREPSPGSHSALPGKKTALQAALLETLLDLVDRSWGGCRSLHSNEAFLAQARHILSSVEEFTAAQDSSAMVGEDVGSLALESKSLQSRLAEQQQQHAREMSEVTAELHHTHKELDDLRQHLDKSLEENSRLKSLLLSMKKEVKSADTAATLNLQIAGLQTSVKRLCGEIVELKQHLEHYDKIQELTQMLQESHSSLVSTNEHLLQELSQVRAQHRAEVEQMHWSYQELKKTMALFPHSSASHGGCQAC

SEQ ID NO: 739949 - protein, 103 aa, Homo sapiens
MRSWNSQGAIQSLISLFSSFIHSIGVEPHLQGCSQGSGQWLGRRRQVGGSQWDTEGDGATEIGLCAGPGHLRAHAGRWAGPAGEGHTAGEDGSAKQPLPCCSA

SEQ ID NO: 739950 - protein, 647 aa, Homo sapiens; identical to SEQ ID NO: 739948

SEQ ID NO: 739951 - protein, 647 aa, Homo sapiens; identical to SEQ ID NO: 739948

SEQ ID NO: 739952 - protein, 344 aa, Homo sapiens
MDTEDSASSQKLDLSGEMVPGPLPAPGKCRKRRMPVGRFQTFSDQEGLGCPERTHGSSVPKESLSRQDSSESRNGRTLSQPEASETEEQRSRGVTDTREPSPGSHSALPGKKTALQAALLETLLDLVDRSWGGCRSLHSNEAFLAQARHILSSVEEFTAAQDSSAMVGEDVGSLALESKSLQSRLAEQQQQHAREMSEVTAELHHTHKELDDLRQHLDKSLEENSRLKSLLLSMKKEVKSADTAATLNLQIAGLQTSVKRLCGEIVELKQHLEHYDKIQELTQMLQESHSSLVSTNEHLLQELSQVRAQHRAEVEQMHWSYQELKKTMALFPHSSASHGGCQAC

SEQ ID NO: 739953 - protein, 70 aa, Homo sapiens
PPNHSASSPASQTAGFSKPSFLLSVSSAELHVPLLLLPILPFFCPQNTVEDDVLPNCSFGLSYNVNPFIL

SEQ ID NO: 739954 - protein, 34 aa, Homo sapiens
MGYAARVIYFSSSLFPDKAKVLERGFFSDRMTHT

SEQ ID NO: 739955 - protein, 70 aa, Homo sapiens
GTLAASPHRSGRATWLGGAGKAGPSLLTASSHRRKAISTRSGYNTEGRLNREQCCYHENDNLSLEEAPCH

SEQ ID NO: 739956 - protein, 141 aa, Homo sapiens
MRCRKTLSALPLAPVTDPVDPPLIFSLNWDGHSTGAQALLLLFPSCSFPPWSLRQHHGCPLSLHANIPQGIQKLLLREHLQADKLSSLLSFRGQIWEAFCRPPQRSRGITPVASILSLLLASPGFPSHCPLSFRSASWDHL

SEQ ID NO: 739957 - protein, 71 aa, Homo sapiens
EAILAKLEEFHQTDRTTQISPCLTHSRGSRQVCGLEALLEWMEFGLMKQIEEQELDCKDLSPPLNKAYHLQ

SEQ ID NO: 739958 - protein, 268 aa, Homo sapiens [sequence omitted]

SEQ ID NO: 739959 - protein, 268 aa, Homo sapiens [sequence omitted]

SEQ ID NO: 739960 - protein, 126 aa, Homo sapiens
MTSYRPRWGEMRGPWGCIGIHTGSCVPVCIGWIHIREQETGGLSPESVSSSSQGVWATVMIRGCGGEKGCVASLPSVLYPLWIDTQFSPPLLQVSETQASVSVFIRALLGYNSHTIKFTLLTTEWL

SEQ ID NO: 739961 - protein, 268 aa, Homo sapiens [sequence omitted]

SEQ ID NO: 739962 - protein, 174 aa, Homo sapiens
MFLTVKLLLGQRCSLKVSGQESVATLKRLVSRRLKVPEEQQHLLFRGQLLEDDKHLSDYCIGPNASINVIMQPLEKMALKEAHQPQTQPLWHQLGLVLAKHFEPQDAKAVLQLLRQEHEERLQKISLEHLEQLAQYLLAEEPHVEPAGERELEAKARPQSSCDMEEKEEAAADQ

SEQ ID NO: 739963 - protein, 78 aa, Homo sapiens
PRGPLIQRLAALGVRGPAGPLETPMRNELMLDARAPWAQLPSAKRAPKAGSHFVLQAGVLRPQPPRFKGSCCLSPPSS

SEQ ID NO: 739964 - protein, 82 aa, Homo sapiens
PRGPLIQRLAALGVRGPAGPLETPMRNELMLDARAPWAQLPSAKRAPKAGEGKCRQAGYPEASEEMGGSEEPVVALDLLELG

SEQ ID NO: 739965 - protein, 79 aa, Homo sapiens
ETLVKLHGWAPPPLCDWLENSAGSVPPSVIGEEKGASEDSLASQDFPSLSKSHLFLLRCCLQKAHVKGPIFDQITWLLL

SEQ ID NO: 739966 - protein, 82 aa, Homo sapiens; identical to SEQ ID NO: 739964

SEQ ID NO: 739967 - protein, 604 aa, Homo sapiens
MGAALGTGTRLAPWPGRACGALPRWTPTAPAQGCHSKPGPARPVPLKKRGYDVTRNPHLNKGMAFTLEERLQLGIHGLIPPCFLSQDVQLLRIMRYYERQQSDLDKYIILMTLQDRNEKLFYRVLTSDVEKFMPIVYTPTVGLACQHYGLTFRRPRGLFITIHDKGHLATMLNSWPEDNIKAVVVTDGERILGLGDLGCYGMGIPVGKLALYTACGGVNPQQCLPVLLDVGTNNEELLRDPLYIGLKHQRVHGKAYDDLLDEFMQAVTDKFGINCLIQFEDFANANAFRLLNKYRNKYCMFNDDIQGTASVAVAGILAALRITKNKLSNHVFVFQGAGEAAMGIAHLLVMALEKEGVPKAEATRKIWMVDSKGLIVKGRSHLNHEKEMFAQDHPEVNSLEEVVRLVKPTAIIGVAAIAGAFTEQILRDMASFHERPIIFALSNPTSKAECTAEKCYRVTEGRGIFASGSPFKSVTLEDGKTFIPGQGNNAYVFPGVALGVIAGGIRHIPDEIFLLTAEQIAQEVSEQHLSQGRLYPPLSTIRDVSLRIAIKVLDYAYKHNLASYYPEPKDKEAFVRSLVYTPDYDSFTLDSYTWPKEAMNVQTV

SEQ ID NO: 739968 - protein, 132 aa, Homo sapiens
MGIAHLLVMALEKEGVPKAEATRKIWMVDSKGLIVKGRSHLNHEKEMFAQDHPEVNSLEEVVRLVKPTAIIGVAAIAGAFTEQILRDMASFHERPIIFALSNPTSKAECTAEKCYRVTEVSGESFLPPAERT

SEQ ID NO: 739969 - protein, 604 aa, Homo sapiens; identical to SEQ ID NO: 739967

SEQ ID NO: 739970 - protein, 661 aa, Homo sapiens
VVGPLFEELTSSASSRPPARSTHWRERTHRPQLLTPPAPQRDRVDLSSPSSAGLPRTMGAALGTGTRLAPWPGRACGALPRWTPTAPAQGCHSKPGPARPVPLKKRGYDVTRNPHLNKGMAFTLEERLQLGIHGLIPPCFLSQDVQLLRIMRYYERQQSDLDKYIILMTLQDRNEKLFYRVLTSDVEKFMPIVYTPTVGLACQHYGLTFRRPRGLFITIHDKGHLATMLNSWPEDNIKAVVVTDGERILGLGDLGCYGMGIPVGKLALYTACGGVNPQQCLPVLLDVGTNNEELLRDPLYIGLKHQRVHGKAYDDLLDEFMQAVTDKFGINCLIQFEDFANANAFRLLNKYRNKYCMFNDDIQGTASVAVAGILAALRITKNKLSNHVFVFQGAGEAAMGIAHLLVMALEKEGVPKAEATRKIWMVDSKGLIVKGRSHLNHEKEMFAQDHPEVNSLEEVVRLVKPTAIIGVAAIAGAFTEQILRDMASFHERPIIFALSNPTSKAECTAEKCYRVTEGRGIFASGSPFKSVTLEDGKTFIPGQGNNAYVFPGVALGVIAGGIRHIPDEIFLLTAEQIAQEVSEQHLSQGRLYPPLSTIRDVSLRIAIKVLDYAYKHNLASYYPEPKDKEAFVRSLVYTPDYDSFTLDSYTWPKEAMNVQTV

SEQ ID NO: 739971 - protein, 450 aa, Homo sapiens
  misc_feature (5)..(5): Xaa can be any naturally occurring amino acid
  misc_feature (7)..(7): Xaa can be any naturally occurring amino acid
GWYAXEXWDIVEPTSLRLNSWPEDNIKAVVVTDGERILGLGDLGCYGMGIPVGKLALYTACGGVNPQQCLPVLLDVGTNNEELLRDPLYIGLKHQRVHGKAYDDLLDEFMQAVTDKFGINCLIQFEDFANANAFRLLNKYRNKYCMFNDDIQGTASVAVAGILAALRITKNKLSNHVFVFQGAGEAAMGIAHLLVMALEKEGVPKAEATRKIWMVDSKGLIVKGRSHLNHEKEMFAQDHPEVNSLEEVVRLVKPTAIIGVAAIAGAFTEQILRDMASFHERPIIFALSNPTSKAECTAEKCYRVTEGRGIFASGSPFKSVTLEDGKTFIPGQGNNAYVFPGVALGVIAGGIRHIPDEIFLLTAEQIAQEVSEQHLSQGRLYPPLSTIRDVSLRIAIKVLDYAYKHNLASYYPEPKDKEAFVRSLVYTPDYDSFTLDSYTWPKEAMNVQTV

SEQ ID NO: 739972 - protein, 263 aa, Homo sapiens [sequence omitted]

SEQ ID NO: 739973 - protein, 448 aa, Homo sapiens
RLKASSNFFLLELPGSPCGGVTPVLAVVVTDGERILGLGDLGCYGMGIPVGKLALYTACGGVNPQQCLPVLLDVGTNNEELLRDPLYIGLKHQRVHGKAYDDLLDEFMQAVTDKFGINCLIQFEDFANANAFRLLNKYRNKYCMFNDDIQGTASVAVAGILAALRITKNKLSNHVFVFQGAGEAAMGIAHLLVMALEKEGVPKAEATRKIWMVDSKGLIVKGRSHLNHEKEMFAQDHPEVNSLEEVVRLVKPTAIIGVAAIAGAFTEQILRDMASFHERPIIFALSNPTSKAECTAEKCYRVTEGRGIFASGSPFKSVTLEDGKTFIPGQGNNAYVFPGVALGVIAGGIRHIPDEIFLLTAEQIAQEVSEQHLSQGRLYPPLSTIRDVSLRIAIKVLDYAYKHNLASYYPEPKDKEAFVRSLVYTPDYDSFTLDSYTWPKEAMNVQTV

SEQ ID NO: 739974 - protein, 423 aa, Homo sapiens
MGAALGTGTRLAPWPGRACGALPRWTPTAPAQGCHSKPGPARPVPLKKRGYDVTRNPHLNKGMAFTLEERLQLGIHGLIPPCFLSQDVQLLRIMRYYERQQSDLDKYIILMTLQDRNEKLFYRVLTSDVEKFMPIVYTPTVGLACQHYGLTFRRPRGLFITIHDKGHLATMLNSWPEDNIKAVVVTDGERILGLGDLGCYGMGIPVGKLALYTACGGVNPQQCLPVLLDVGTNNEELLRDPLYIGLKHQRVHGKAYDDLLDEFMQAVTDKFGINCLIQFEDFANANAFRLLNKYRNKYCMFNDDIQGTASVAVAGILAALRITKNKLSNHVFVFQGAGEAAMGIAHLLVMALEKEGVPKAEATRKIWMVDSKGLIVKGRSHLNHEKEMFAQDHPEVNSLEEVVRLVKPTAIIGPRDFCQWKSF

SEQ ID NO: 739975 - protein, 217 aa, Homo sapiens
MFAQDHPEVNSLEEVVRLVKPTAIIGVAAIAGAFTEQILRDMASFHERPIIFALSNPTSKAECTAEKCYRVTEGRGIFASGSPFKSVTLEDGKTFIPGQGNNAYVFPGVALGVIAGGIRHIPDEIFLLTAEQIAQEVSEQHLSQGRLYPPLSTIRDVSLRIAIKVLDYAYKHNLASYYPEPKDKEAFVRSLVYTPDYDSFTLDSYTWPKEAMNVQTV

SEQ ID NO: 739976 - protein, 217 aa, Homo sapiens; identical to SEQ ID NO: 739975

SEQ ID NO: 739977 - protein, 586 aa, Homo sapiens
MGAALGTGTRLAPWPGRACGALPRWTPTAPAQGCHSKPGPARPVPLKKRGYDVTRNPHLNKGMAFTLEERLQLGIHGLIPPCFLSQDVQLLRIMRYYERQQSDLDKYIILMTLQDRNEKLFYRVLTSDVEKFMPIVYTPTVGLACQHYGLTFRRPRGLFITIHDKGHLATMLNSWPEDNIKAVVVTDGERILGLGDLGCYGMGIPVGKLALYTACGGVNPQQCLPVLLDVGTNNEELLRDPLYIGLKHQRVHGKAYDDLLDEFMQAVTDKFGINCLIQFEDFANANAFRLLNKYRNKYCMFNDDIQGTASVAVAGILAALRITKNKLSNHVFVFQGAGEAAMGIAHLLVMALEKEGVPKAEATRKIWMVDSKGLIVKGRSHLNHEKEMFAQDHPEVNSLEEVVRLVKPTAIIGVAAIAGAFTEQILRDMASFHERPIIFALSNPTSKAECTAEKCYRVTEGRGIFASGSPFKSVTLEDGKTFIPGQGNNAYVFPGVALGVIAGGIRHIPDEIFLLTAEQIAQEVSEQHLSQGRLYPPLSTIRDVSLRIAIKVLDYAYKHNTGQLHLAQGSHECSDGLRQSQRLVWG

SEQ ID NO: 739978 - protein, 349 aa, Homo sapiens
MGAALGTGTRLAPWPGRACGALPRWTPTAPAQGCHSKPGPARPVPLKKRGYDVTRNPHLNKGMAFTLEERLQLGIHGLIPPCFLSQDVQLLRIMRYYERQQSDLDKYIILMTLQDRNEKLFYRVLTSDVEKFMPIVYTPTVGLACQHYGLTFRRPRGLFITIHDKGHLATMLNSWPEDNIKAVVVTDGERILGLGDLGCYGMGIPVGKLALYTACGGVNPQQCLPVLLDVGTNNEELLRDPLYIGLKHQRVHGKAYDDLLDEFMQAVTDKFGINCLIQFEDFANANAFRLLNKYRNKYCMFNDDIQGRFPPHLMKLQGTNLYSQPHWDAKGVRKGCHPIVGLLPAAVEK

SEQ ID NO: 739979 - protein, 213 aa, Homo sapiens
VVGPLFEELTSSASSRPPARSTHWRERTHRPQLLTPPAPQRDRVDLSSPSSAGLPRTMGAALGTGTRLAPWPGRACGALPRWTPTAPAQGCHSKPGPARPVPLKKRGYDVTRNPHLNKGMAFTLEERLQLGIHGLIPPCFLSQDVQLLRIMRYYERQQSDLDKYIILMTLQDRNEKLFYRVLTSDVEKFMPIVYTPTVGLACQHYGLTFRRPR

SEQ ID NO: 739980 - protein, 70 aa, Homo sapiens
SSHLLVLPNNPGYLLEKKKTGTPGVGSVNGCCLFQELLRDPLYIGLKHQRVHGKAYDDLLDEFMQAVTDK

SEQ ID NO: 739981 - protein, 479 aa, Homo sapiens
MLQINQMFSVQLSLGEQTWESEGSSIKKAQQAVANKALTESTLPKPVQKPPKSNVNNNPGSITPTVELNGLAMKRGEPAIYRPLDPKPFPNYRANYNFRGMYNQRYHCPVPKIFYVQLTVGNNEFFGEGKTRQAARHNAAMKALQALQNEPIPERSPQNGESGKDMDDDKDANKSEISLVFEIALKRNMPVSFEVIKESGPPHMKSFVTRVSVGEFSAEGEGNSKKLSKKRAATTVLQELKKLPPLPVVEKPKLFFKKRPKTIVKAGPEYGQGMNPISRLAQIQQAKKEKEPDYVLLSERGMPRRREFVMQVKVGNEVATGTGPNKKIAKKNAAEAMLLQLGYKASTNLQDQLEKTGENKGWSGPKPGFPEPTNNTPKGILHLSPDVYQEMEASRHKVISGTTLGYLSPKDMNQPSSSFFSISPTSNSSATIARELLMNGTSSTAEAIGLKGSSPTPPCSPVQPSKQLEYLARIQGFQV

SEQ ID NO: 739982 - protein, 538 aa, Homo sapiens [sequence omitted]

SEQ ID NO: 739983 - protein, 570 aa, Homo sapiens [sequence omitted]

SEQ ID NO: 739984 - protein, 105 aa, Homo sapiens
MLQINQMFSVQLSLGEQTWESEGSSIKKAQQAVANKALTESTLPKPVQKPPKSNVNNNPGSITPTVELNGLAMKRGEPAIYRPLDPKPFPNYRANYNFRGMYNQR

SEQ ID NO: 739985 - protein, 151 aa, Homo sapiens [sequence omitted]

SEQ ID NO: 739986 - protein, 114 aa, Homo sapiens
MLQINQMFSVQLSLGEQTWESEGSSIKKAQQAVANKALTESTLPKPVQKPPKSNVNNNPGSITPTVELNGLAMKRGEPAIYRPLDPKPFPNYRANYNFRGMYNQRFVCLFWFCS

SEQ ID NO: 739987 - protein, 81 aa, Homo sapiens
GAAGAPGRRAEAGGGGGRGARGVEAGGGRAGSVLCSVCQCWSRLQSVPGKKRLPTTRTLAYFLKIEEKKEDRKRRTQRYTK

SEQ ID NO: 739988 - protein, 511 aa, Homo sapiens [sequence omitted]

SEQ ID NO: 739989 - protein, 524 aa, Homo sapiens
GAAGAPGRRAEAGGGGGRGARGVEAGGGRAGSVLCSVCQCWSRLQSVPGKKMFSVQLSLGEQTWESEGSSIKKAQQAVANKALTESTLPKPVQKPPKSNVNNNPGSITPTVELNGLAMKRGEPAIYRPLDPKPFPNYRANYNFRGMYNQRYHCPVPKIFYVQLTVGNNEFFGEGKTRQAARHNAAMKALQALQNEPIPERSPQNGESGKDMDDDKDANKSEISLVFEIALKRNMPVSFEVIKESGPPHMKSFVTRVSVGEFSAEGEGNSKKLSKKRAATTVLQELKKLPPLPVVEKPKLFFKKRPKTIVKAGPEYGQGMNPISRLAQIQQAKKEKEPDYVLLSERGMPRRREFVMQVKVGNEVATGTGPNKKIAKKNAAEAMLLQLGYKASTNLQDQLEKTGENKGWSGPKPGFPEPTNNTPKGILHLSPDVYQEMEASRHKVISGTTLGYLSPKDMNQPSSSFFSISPTSNSSATIARELLMNGTSSTAEAIGLKGSSPTPPCSPVQPSKQLEYLARIQGFQV

SEQ ID NO: 739990 - protein, 511 aa, Homo sapiens [sequence omitted]

SEQ ID NO: 739991 - protein, 479 aa, Homo sapiens; identical to SEQ ID NO: 739981

SEQ ID NO: 739992 - protein, 479 aa, Homo sapiens; identical to SEQ ID NO: 739981

SEQ ID NO: 739993 - protein, 479 aa, Homo sapiens; identical to SEQ ID NO: 739981

SEQ ID NO: 739994 - protein, 538 aa, Homo sapiens [sequence omitted]

SEQ ID NO: 739995 - protein, 233 aa, Homo sapiens
MLQINQVKVGNEVATGTGPNKKIAKKNAAEAMLLQLGYKASTNLQDQLEKTGENKGWSGPKPGFPEPTNNTPKGILHLSPDVYQEMEASRHKVISGTTLGYLSPKDMNQPSSSFFSISPTSNSSATIARELLMNGTSSTAEAIGLKGSSPTPPCSPVQPSKQLEYLARIQGFQAALSALKQFSEQGLDPIDGAMNIEKGSLEKQAKHLREKADNNQAPPGSIAQDCKKSNSAV

SEQ ID NO: 739996 - protein, 83 aa, Homo sapiens
LTLAPVQMTFHAIGSSIEASHDQAALSALKQFSEQGLDPIDGAMNIEKGSLEKQAKHLREKADNNQAPPGSIAQDCKKSNSAV

SEQ ID NO: 739997 - protein, 137 aa, Homo sapiens
MANPKEKTAMCLVNELARFNRVQPQYKLLNERGPAHSKMFSVQLSLGEQTWESEGSSIKKAQQAVANKALTESTLPKPVQKPPKSNVNNNPGSITPTVELNGLAMKRGEPAIYRPLDPKPFPNYRANYNFRGMYNQR

SEQ ID NO: 739998 - protein, 523 aa, Homo sapiens
MEPAAALHFSLPASLLLLLLLLLLSLCALVSAQFTVVGPANPILAMVGENTTLRCHLSPEKNAEDMEVRWFRSQFSPAVFVYKGGRERTEEQMEEYRGRITFVSKDINRGSVALVIHNVTAQENGIYRCYFQEGRSYDEAILRLVVAGLGSKPLIEIKAQEDGSIWLECISGGWYPEPLTVWRDPYGEVVPALKEVSIADADGLFMVTTAVIIRDKYVRNVSCSVNNTLLGQEKETVIFIPESFMPSASPWMVALAVILTASPWMVSMTVILAVFIIFMAVSICCIKKLQREKKILSGEKKVEQEEKEIAQQLQEELRWRRTFLHAADVVLDPDTAHPELFLSEDRRSVRRGPYRQRVPDNPERFDSQPCVLGWESFASGKHYWEVEVENVMVWTVGVCRHSVERKGEVLLIPQNGFWTLEMFGNQYRALSSPERILPLKESLCRVGVFLDYEAGDVSFYNMRDRSHIYTCPRSAFTVPVRPFFRLGSDDSPIFICPALTGASGVMVPEEGLKLHRVGTHQSL

SEQ ID NO: 739999 - protein, 407 aa, Homo sapiens
MEPAAALHFSLPASLLLLLLLLLLSLCALVSGLGSKPLIEIKAQEDGSIWLECISGGWYPEPLTVWRDPYGEVVPALKEVSIADADGLFMVTTAVIIRDKYVRNVSCSVNNTLLGQEKETVIFIPESFMPSASPWMVALAVILTASPWMVSMTVILAVFIIFMAVSICCIKKLQREKKILSGEKKVEQEEKEIAQQLQEELRWRRTFLHAADVVLDPDTAHPELFLSEDRRSVRRGPYRQRVPDNPERFDSQPCVLGWESFASGKHYWEVEVENVMVWTVGVCRHSVERKGEVLLIPQNGFWTLEMFGNQYRALSSPERILPLKESLCRVGVFLDYEAGDVSFYNMRDRSHIYTCPRSAFTVPVRPFFRLGSDDSPIFICPALTGASGVMVPEEGLKLHRVGTHQSL

SEQ ID NO: 740000 - protein, 517 aa, Homo sapiens
MEPAAALHFSLPASLLLLLLLLLLSLCALVSAQFTVVGPANPILAMVGENTTLRCHLSPEKNAEDMEVRWFRSQFSPAVFVYKGGRERTEEQMEEYRGRITFVSKDINRGSVALVIHNVTAQENGIYRCYFQEGRSYDEAILRLVVAGLGSKPLIEIKAQEDGSIWLECISGGWYPEPLTVWRDPYGEVVPALKEVSIADADGLFMVTTAVIIRDKYVRNVSCSVNNTLLGQEKETVIFIPESFMPSASPWMVALAVILTASPWMVSMTVILAVFIIFMAVSICCIKKLQREKKILSGEKKVEQEEKEIAQQLQEECVEKTDVVLDPDTAHPELFLSEDRRSVRRGPYRQRVPDNPERFDSQPCVLGWESFASGKHYWEVEVENVMVWTVGVCRHSVERKGEVLLIPQNGFWTLEMFGNQYRALSSPERILPLKESLCRVGVFLDYEAGDVSFYNMRDRSHIYTCPRSAFTVPVRPFFRLGSDDSPIFICPALTGASGVMVPEEGLKLHRVGTHQSL

SEQ ID NO: 740001 - protein, 407 aa, Homo sapiens; identical to SEQ ID NO: 739999

SEQ ID NO: 740002 - protein, 523 aa, Homo sapiens; identical to SEQ ID NO: 739998

SEQ ID NO: 740003 - protein, 307 aa, Homo sapiens
MEPAAALHFSLPASLLLLLLLLLLSLCALVSESFMPSASPWMVALAVILTASPWMVSMTVILAVFIIFMAVSICCIKKLQREKKILSGEKKVEQEEKEIAQQLQEECVEKTDVVLDPDTAHPELFLSEDRRSVRRGPYRQRVPDNPERFDSQPCVLGWESFASGKHYWEVEVENVMVWTVGVCRHSVERKGEVLLIPQNGFWTLEMFGNQYRALSSPERILPLKESLCRVGVFLDYEAGDVSFYNMRDRSHIYTCPRSAFTVPVRPFFRLGSDDSPIFICPALTGASGVMVPEEGLKLHRVGTHQSL

SEQ ID NO: 740004 - protein, 338 aa, Homo sapiens
MEPAAALHFSLPASLLLLLLLLLLSLCALVSAQFTVVGPANPILAMVGENTTLRCHLSPEKNAEDMEVRWFRSQFSPAVFVYKGGRERTEEQMEEYRGRITFVSKDINRGSVALVIHNVTAQENGIYRCYFQEGRSYDEAILRLVVAGLGSKPLIEIKAQEDGSIWLECISGGWYPEPLTVWRDPYGEVVPALKEVSIADADGLFMVTTAVIIRDKYVRNVSCSVNNTLLGQEKETVIFIPESFMPSASPWMVALAVILTASPWMVSMTVILAVFIIFMAVSICCIKKLQREKKILSGEKKVEQEEKEIAQQLQEELRWRKVYVSIQVQWGHQWLQTS

SEQ ID NO: 740005 - protein, 168 aa, Homo sapiens
QDEKSVNDASSVSASQRISCIPKTHISNKYGNNFLQEAHMREKSFQCNESGKAFNCSSLLKKCQIIHLGEKKYKCDICGKVFNQKRYLAYHHRCHTGEKPYKCNQCGKTFSYKSSLVIHKAIHTGEKPHKCNECGKVFNQKAYLASHHRLHTGEKPYKCEECDKVFSR

SEQ ID NO: 740006 - protein, 118 aa, Homo sapiens
RDMHSQAPPGACVRRYEMRRPHCPRYQLQRWPVQVTDGLTASTDSEPAPPSLTAALSPSTPASLEFLALSPLGLARPSWLALRQFSAAAGRQGGARTHIQGPQASIFSPKSTSSVTKH

SEQ ID NO: 740007 - protein, 1013 aa, Homo sapiens
REVGSGKPRLSPSGRLPPASLRLRPGSERPELGKMRRPRRPGGLGGSGGLRLLLCLLLLSSRPGGCSAVSAHGCLFDRRLCSHLEVCIQDGLFGQCQVGVGQARPLLQVTSPVLQRLQGVLRQLMSQGLSWHDDLTQYVISQEMERIPRLRPPEPRPRDRSGLAPKRPGPAGELLLQDIPTGSAPAAQHRLPQPPVGKGGAGASSSLSPLQAELLPPLLEHLLLPPQPPHPSLSYEPALLQPYLFHQFGSRDGSRVSEGSPGMVSVGPLPKAEAPALFSRTASKGIFGDHPGHSYGDLPGPSPAQLFQDSGLLYLAQELPAPSRARVPRLPEQGSSSRAEDSPEGYEKEGLGDRGEKPASPAVQPDAALQRLAAVLAGYGVELRQLTPEQLSTLLTLLQLLPKGAGRNPGGVVNVGADIKKTMEGPVEGRDTAELPARTSPMPGHPTASPTSSEVQQVPSPVSSEPPKAARPPVTPVLLEKKSPLGQSQPTVAGQPSARPAAEEYGYIVTDQKPLSLAAGVKLLEILAEHVHMSSGSFINISVVGPALTFRIRHNEQNLSLADVTQQAGLVKSELEAQTGLQILQTGVGQREEAAAVLPQTAHSTSPMRSVLLTLVALAGVAGLLVALAVALCVRQHARQQDKERLAALGPEGAHGDTTFEYQDLCRQHMATKSLFNRAEGPPEPSRVSSVSSQFSDAAQASPSSHSSTPSWCEEPAQANMDISTGHMILAYMEDHLRNRDRLAKEWQALCAYQAEPNTCATAQGEGNIKKNRHPDFLPYDHARIKLKVESSPSRSDYINASPIIEHDPRMPAYIATQGPLSHTIADFWQMVWESGCTVIVMLTPLVEDGVKQCDRYWPDEGASLYHVYEVNLVSEHIWCEDFLVRSFYLKNVQTQETRTLTQFHFLSWPAEGTPASTRPLLDFRRKVNKCYRGRSCPIIVHCSDGAGRTGTYILIDMVLNRMAKGVKEIDIAATLEHVRDQRPGLVRSKDQFEFALTAVAEEVNAILKALPQ

SEQ ID NO: 740008 - protein, 1013 aa, Homo sapiens; identical to SEQ ID NO: 740007

SEQ ID NO: 740009 - protein, 984 aa, Homo sapiens
REVGSGKPRLSPSGRLPPASLRLRPGSERPELGKMRRPRRPGGLGGSGGLRLLLCLLLLSSRPGGCSAVSAHGCLFDRRLCSHLEVCIQDGLFGQCQVGVGQARPLLQVTSPVLQRLQGVLRQLMSQGLSWHDDLTQYVISQEMERIPRLRPPEPRPRDRSGLAPKRPGPAGELLLQDIPTGSAPAAQHRLPQPPVGKGGAGASSSLSPLQAELLPPLLEHLLLPPQPPHPSLSYEPALLQPYLFHQFGSRDGSRVSEGSPGMVSVGPLPKAEAPALFSRTASKGIFGDHPGHSYGDLPGPSPAQLFQDSGLLYLAQELPAPSRARVPRLPEQGSSSRAEDSPEGYEKEGLGDRGEKPASPAVQPDAALQRLAAVLAGYGVELRQLTPEQLSTLLTLLQLLPKGAGRNPGGVVNVGADIKKTMEGPVEGRDTAELPARTSPMPGHPTASPTSSEVQQVPSPVSSEPPKAARPPVTPVLLEKKSPLGQSQPTVAGQPSARPAAEEYGYIVTDQNVVGPALTFRIRHNEQNLSLADVTQQAGLVKSELEAQTGLQILQTGVGQREEAAAVLPQTAHSTSPMRSVLLTLVALAGVAGLLVALAVALCVRQHARQQDKERLAALGPEGAHGDTTFEYQDLCRQHMATKSLFNRAEGPPEPSRVSSVSSQFSDAAQASPSSHSSTPSWCEEPAQANMDISTGHMILAYMEDHLRNRDRLAKEWQALCAYQAEPNTCATAQGEGNIKKNRHPDFLPYDHARIKLKVESSPSRSDYINASPIIEHDPRMPAYIATQGPLSHTIADFWQMVWESGCTVIVMLTPLVEDGVKQCDRYWPDEGASLYHVYEVNLVSEHIWCEDFLVRSFYLKNVQTQETRTLTQFHFLSWPAEGTPASTRPLLDFRRKVNKCYRGRSCPIIVHCSDGAGRTGTYILIDMVLNRMAKGVKEIDIAATLEHVRDQRPGLVRSKDQFEFALTAVAEEVNAILKALPQ

SEQ ID NO: 740010 - protein, 669 aa, Homo sapiens
NRLGSEAWVVREKPASPAVQPDAALQRLAAVLAGYGVELRQLTPEQLSTLLTLLQLLPKGAGRNPGGVVNVGADIKKTMEGPVEGRDTAELPARTSPMPGHPTASPTSSEVQQVPSPVSSEPPKAARPPVTPVLLEKKSPLGQSQPTVAGQPSARPAAEEYGYIVTDQKPLSLAAGVKLLEILAEHVHMSSGSFINISVVGPALTFRIRHNEQNLSLADVTQQAGLVKSELEAQTGLQILQTGVGQREEAAAVLPQTAHSTSPMRSVLLTLVALAGVAGLLVALAVALCVRQHARQQDKERLAALGPEGAHGDTTFEYQDLCRQHMATKSLFNRAEGPPEPSRVSSVSSQFSDAAQASPSSHSSTPSWCEEPAQANMDISTGHMILAYMEDHLRNRDRLAKEWQALCAYQAEPNTCATAQGEGNIKKNRHPDFLPYDHARIKLKVESSPSRSDYINASPIIEHDPRMPAYIATQGPLSHTIADFWQMVWESGCTVIVMLTPLVEDGVKQCDRYWPDEGASLYHVYEVNLVSEHIWCEDFLVRSFYLKNVQTQETRTLTQFHFLSWPAEGTPASTRPLLDFRRKVNKCYRGRSCPIIVHCSDGAGRTGTYILIDMVLNRMAKGVKEIDIAATLEHVRDQRPGLVRSKDQFEFALTAVAEEVNAILKALPQ

SEQ ID NO: 740011 - protein, 877 aa, Homo sapiens
MRRPRRPGGLGGSGGLRLLLCLLLLSSRPGGCSAVSAHGCLFDRRLCSHLEVCIQDGLFGQCQVGVGQARPLLQVTSPVLQRLQGVLRQLMSQGLSWHDDLTQYVISQEMERIPRLRPPEPRPRDRSGLAPKRPGPAGELLLQDIPTGSAPAAQHRLPQPPVGKGGAGASSSLSPLQAELLPPLLEHLLLPPQPPHPSLSYEPALLQPYLFHQFGSRDGSRVSEGSPGMVSVGPLPKAEAPALFSRTASKGIFGDHPGHSYGDLPGPSPAQLFQDSGLLYLAQELPAPSRARVPRLPEQGSSSRAEDSPEGYEKEGLGDRGEKPASPAVQPDAALQRLAAVLAGYGVELRQLTPEQLSTLLTLLQLLPKGAGRNPGGVVNVGADIKKTMEGPVEGRDTAELPARTSPMPGHPTASPTSSEVQQVPSPVSSEPPKAARPPVTPVLLEKKSPLGQSQPTVAGQPSARPAAEEYGYIVTDQNVVGPALTFRIRHNEQNLSLADVTQQAGLVKSELEAQTGLQILQTGVGQDLCRQHMATKSLFNRAEGPPEPSRVSSVSSQFSDAAQASPSSHSSTPSWCEEPAQANMDISTGHMILAYMEDHLRNRDRLAKEWQALCAYQAEPNTCATAQGEGNIKKNRHPDFLPYDHARIKLKVESSPSRSDYINASPIIEHDPRMPAYIATQGPLSHTIADFWQMVWESGCTVIVMLTPLVEDGVKQCDRYWPDEGASLYHVYEVNLVSEHIWCEDFLVRSFYLKNVQTQETRTLTQFHFLSWPAEGTPASTRPLLDFRRKVNKCYRGRSCPIIVHCSDGAGRTGTYILIDMVLNRMAKGVKEIDIAATLEHVRDQRPGLVRSKDQFEFALTAVAEEVNAILKALPQ

SEQ ID NO: 740012 - protein, 536 aa, Homo sapiens
REVGSGKPRLSPSGRLPPASLRLRPGSERPELGKMRRPRRPGGLGGSGGLRLLLCLLLLSSRPGGCSAVSAHGCLFDRRLCSHLEVCIQDGLFGQCQVGVGQARPLLQVTSPVLQRLQGVLRQLMSQGLSWHDDLTQYVISQEMERIPRLRPPEPRPRDRSGLAPKRPGPAGELLLQDIPTGSAPAAQHRLPQPPVGKGGAGASSSLSPLQAELLPPLLEHLLLPPQPPHPSLSYEPALLQPYLFHQFGSRDGSRVSEGSPGMVSVGPLPKAEAPALFSRTASKGIFGDHPGHSYGDLPGPSPAQLFQDSGLLYLAQELPAPSRARVPRLPEQGSSSRAEDSPEGYEKEGLGDRGEKPASPAVQPDAALQRLAAVLAGYGVELRQLTPEQLSTLLTLLQLLPKGAGRNPGGVVNVGADIKKTMEGPVEGRDTAELPARTSPYAPVWKNGVEGRHTRLPLLLSPGPASDSHLGALPSLASRPASSHHPPTMRCSTSLLLAQENISRKNYFCTSVNKVSVLSVQLQKKKKKKRKKKKE

SEQ ID NO: 740013 - protein, 128 aa, Homo sapiens
REVGSGKPRLSPSGRLPPASLRLRPGSERPELGKMRRPRRPGGLGGSGGLRLLLCLLLLSSRPGGCSAVSAHGCLFDRRLCSHLEVCIQDGLFGQCQVGVGQARPLLQVTSPVLQRLQGVLRQLMSQE

SEQ ID NO: 740014 - protein, 877 aa, Homo sapiens
REVGSGKPRLSPSGRLPPASLRLRPGSERPELGKMRRPRRPGGLGGSGGLRLLLCLLLLSSRPGGCSAVSAHGCLFDRRLCSHLEVCIQDGLFGQCQVGVGQARPLLQVTSPVLQRLQGVLRQLMSQGLSWHDDLTQYVISQEMERIPRLRPPEPRPRDRSGLAPKRPGPAGELLLQDIPTGSAPAAQHRLPQPPVGKGGAGASSSLSPLQAELLPPLLEHLLLPPQPPHPSLSYEPALLQPYLFHQFGSRDGSRVSEGSPGMVSVGPLPKAEAPALFSRTASKGIFGDHPGHSYGDLPGPSPAQLFQDSGLLYLAQELPAPSRARVPRLPEQGSSSRAEDSPEGYEKEGLGDRGEKPASPAVQPDAALQRLAAVLAGYGVELRQLTPEQLSTLLTLLQLLPKGAGRNPGGVVNVGADIKKTMEGPVEGRDTAELPARTSPMPGHPTASPTSSEVQQVPSPVSSEPPKAARPPVTPVLLEKKSPLGQSQPTVAGQPSARPAAEEYGYIVTDQNVVGPALTFRIRHNEQNLSLADVTQQAGLVKSELEAQTGLQILQTGVGQREEAAAVLPQTAHSTSPMRSVLLTLVALAGVAGLLVALAVALCVRQHARQQDKERLAALGPEGAHGDTTFEYQDLCRQHMATKSLFNRAEGPPEPSRVSSVSSQFSDAAQASPSSHSSTPSWCEEPAQANMDISTGHMILAYMEDHLRNRDRLAKEWQALCAYQAEPNTCATAQGEGNIKKNRHPDFLPYDHARIKLKVESSPSRSDYINASPIIEHDPRMPAYIATQGPLSHTIADFWQMVWESGCTVIVMLTPLVEDGVKQCDRYWPDEGASLYHVYELAGRGHTGLHAAPAGLPQEGEQVLPGPLLPHHRALQ

SEQ ID NO: 740015 - protein, 66 aa, Homo sapiens
AVPRSTLAFAGAAVQTTQAGRRGLCKLSGPESCAGKLVRSGSCDCKLVRSGSCDCKLVRSGRVIVN

SEQ ID NO: 740016 - protein, 118 aa, Homo sapiens [sequence omitted]

SEQ ID NO: 740017 - protein, 118 aa, Homo sapiens [sequence omitted]

SEQ ID NO: 740018 - protein, 118 aa, Homo sapiens [sequence omitted]

SEQ ID NO: 740019 - protein, 118 aa, Homo sapiens [sequence omitted]

SEQ ID NO: 740020 - protein, 828 aa, Homo sapiens
MRLEGEGRSARAGQNLSRAGSARRGAPRDLSMNNLTELQPGLFHHLRFLEELRLSGNHLSHIPGQAFSGLYSLKILMLQNNQLGGIPAEALWELPSLQSLDLNYNKLQEFPVAIRTLGRLQELGFHNNNIKAIPEKAFMGNPLLQTIHFYDNPIQFVGRSAFQYLPKLHTLSLNGAMDIQEFPDLKGTTSLEILTLTRAGIRLLPSGMCQQLPRLRVLELSHNQIEELPSLHRCQKLEEIGLQHNRIWEIGADTFSQLSSLQALDLSWNAIRSIHPEAFSTLHSLVKLDLTDNQLTTLPLAGLGGLMHLKLKGNLALSQAFSKDSFPKLRILEVPYAYQCCPYGMCASFFKASGQWEAEDLHLDDEESSKRPLGLLARQAENHYDQDLDELQLEMEDSKPHPSVQCSPTPGPFKPCEYLFESWGIRLAVWAIVLLSVLCNGLVLLTVFAGGPVPLPPVKFVVGAIAGANTLTGISCGLLASVDALTFGQFSEYGARWETGLGCRATGFLAVLGSEASVLLLTLAAVQCSVSVSCVRAYGKSPSLGSVRAGVLGCLALAGLAAALPLASVGEYGASPLCLPYAPPEGQPAALGFTVALVMMNSFCFLVVAGAYIKLYCDLPRGDFEAVWDCAMVRHVAWLIFADGLLYCPVAFLSFASMLGLFPVTPEAVKSVLLVVLPLPACLNPLLYLLFNPHFRDDLRRLRPRAGDSGPLAYAAAGELEKSSCDSTQALVAFSDVDLILEASEAGRPPGLETYGFPSVTLISCQQPGAPRLEGSHCVEPEGNHFGNPQPSMDGELLLRAEGSTPAGGGLSGGGGFQPSGLAFASHV

SEQ ID NO: 740021 - protein, 929 aa, Homo sapiens
ERRLWCKGKPTGQGMGRPRLTLVCHVSIIISARDLSMNNLTELQPGLFHHLRFLEELRLSGNHLSHIPGQAFSGLYSLKILMLQNNQLGGIPAEALWELPSLQSLRLDANLISLVPERSFEGLSSLRHLWLDDNALTEIPVRALNNLPALQAMTLALNRISHIPDYAFQNLTSLVVLHLHNNRIQHLGTHSFEGLHNLETLDLNYNKLQEFPVAIRTLGRLQELGFHNNNIKAIPEKAFMGNPLLQTIHFYDNPIQFVGRSAFQYLPKLHTLSLNGAMDIQEFPDLKGTTSLEILTLTRAGIRLLPSGMCQQLPRLRVLELSHNQIEELPSLHRCQKLEEIGLQHNRIWEIGADTFSQLSSLQALDLSWNAIRSIHPEAFSTLHSLVKLDLTDNQLTTLPLAGLGGLMHLKLKGNLALSQAFSKDSFPKLRILEVPYAYQCCPYGMCASFFKASGQWEAEDLHLDDEESSKRPLGLLARQAENHYDQDLDELQLEMEDSKPHPSVQCSPTPGPFKPCEYLFESWGIRLAVWAIVLLSVLCNGLVLLTVFAGGPVPLPPVKFVVGAIAGANTLTGISCGLLASVDALTFGQFSEYGARWETGLGCRATGFLAVLGSEASVLLLTLAAVQCSVSVSCVRAYGKSPSLGSVRAGVLGCLALAGLAAALPLASVGEYGASPLCLPYAPPEGQPAALGFTVALVMMNSFCFLVVAGAYIKLYCDLPRGDFEAVWDCAMVRHVAWLIFADGLLYCPVAFLSFASMLGLFPVTPEAVKSVLLVVLPLPACLNPLLYLLFNPHFRDDLRRLRPRAGDSGPLAYAAAGELEKSSCDSTQALVAFSDVDLILEASEAGRPPGLETYGFPSVTLISCQQPGAPRLEGSHCVEPEGNHFGNPQPSMDGELLLRAEGSTPAGGGLSGGGGFQPSGLAFASHV

SEQ ID NO: 740022 - protein, 87 aa, Homo sapiens
QAQWEHWKLTPFWATGMVLWLCLLTHLPKATGSPCAPFNSGDFLGLGPFFLCQEKWGALLSSSQCSGGMERSQGLSLPAHPASLAAL

SEQ ID NO: 740023 - protein, 105 aa, Homo sapiens
NKDTNIEVTFLSSNITSSSKITIPKQQRYGKGIIAHATPQCQINQVKFKFQSSNRVWKKDRTTIIGKFCTALLPVNDREKMVCLPEPVNLQASVTVSCDLKIACV

SEQ ID NO: 740024 - protein, 70 aa, Homo sapiens
LHCWSFLSPGAVILLTFSISPVMLVKVEDEAITGCTKGVEHLVISALGACSPQGFLELESYVGNMACIWK

SEQ ID NO: 740025 - protein, 110 aa, Homo sapiens
ISAAERRPGRRRRSRSSHGRDEAEGRRKGGEELSQSLRGAGFRGRHRGKRLSQPEEGQARSLSHLPRILSSPGSGDASASGPHRSCQPWRQLLLRGQRRGCPLHGIWIRL

SEQ ID NO: 740026 - protein, 364 aa, Homo sapiens
MAFEELLSQVGGLGRFQMLHLVFILPSLMLLIPHILLENFAAAIPGHRCWVHMLDNNTGSGNETGILSEDALLRISIPLDSNLRPEKCRRFVHPQWQLLHLNGTIHSTSEADTEPCVDGWVYDQSYFPSTIVTKDLVCDYQSLKSVVQFLLLTGMLVGGIIGGHVSDRFGRRFILRWCLLQLAITDTCAAFAPTFPVYCVLRFLAGFSSMIIISNNSLPITEWIRPNSKALVVILSSGALSIGQIILGGLAYVFRDWQTLHVVASVPFFVFFLLSRWLVESARWLIITNKLDEGLKALRKVARTNGIKNAEETLNIEVVRSTMQEELDAAQTKTTVCDLFRNPSMRKRICILVFLRKKNLKEKA

SEQ ID NO: 740027 - protein, 210 aa, Homo sapiens
MLVGGIIGGHVSDRFGRRFILRWCLLQLAITDTCAAFAPTFPVYCVLRFLAGFSSMIIISNNSLPITEWIRPNSKALVVILSSGALSIGQIILGGLAYVFRDWQTLHVVASVPFFVFFLLSRWLVESARWLIITNKLDEGLKALRKVARTNGIKNAEETLNIEVVRSTMQEELDAAQTKTTVCDLFRNPSMRKRICILVFLRKKNLKEKA

SEQ ID NO: 740028 - protein, 256 aa, Homo sapiens
MAFEELLSQVGGLGRFQMLHLVFILPSLMLLIPHILLENFAAAIPGHRCWVHMLDNNTGSGNETGILSEDALLRISIPLDSNLRPEKCRRFVHPQWQLLHLNGTIHSTSEADTEPCVDGWVYDQSYFPSTIVTKDLVCDYQSLKSVVQFLLLTGMLVGGIIGGHVSDRWLVESARWLIITNKLDEGLKALRKVARTNGIKNAEETLNIEVVRSTMQEELDAAQTKTTVCDLFRNPSMRKRICILVFLRKKNLKEKA

SEQ ID NO: 740029 - protein, 346 aa, Homo sapiens
MAFEELLSQVGGLGRFQMLHLVFILPSLMLLIPHILLENFAAAIPGHRCWVHMLDNNTGSGNETGILSEDALLRISIPLDSNLRPEKCRRFVHPQWQLLHLNGTIHSTSEADTEPCVDGWVYDQSYFPSTIVTKDLVCDYQSLKSVVQFLLLTGMLVGGIIGGHVSDRFGRRFILRWCLLQLAITDTCAAFAPTFPVYCVLRFLAGFSSMIIISNNSLPITEWIRPNSKALVVILSSGALSIGQIILGGLAYVFRDWQTLHVVASVPFFVFFLLSRWLVESARWLIITNKLDEGLKALRVVRSTMQEELDAAQTKTTVCDLFRNPSMRKRICILVFLRKKNLKEKA

SEQ ID NO: 740030 - protein, 491 aa, Homo sapiens
MALLWGLLVLSWSCLQGPCSVFSPVSAMEPLGRQLTSGPNQEQVSPLTLLKLGNQEPGGQTALKSPPGVCSRDPTPEQTHRLARAMMAFTADLFSLVAQTSTCPNLILSPLSVALALSHLALGAQNHTLQRLQQVLHAGSGPCLPHLLSRLCQDLGPGAFRLAARMYLQKGFPIKEDFLEQSEQLFGAKPVSLTGKQEDDLANINQWVKEATEGKIQEFLSGLPEDTVLLLLNAIHFQGFWRNKFDPSLTQRDSFHLDEQFTVPVEMMQARTYPLRWFLLEQPEIQVAHFPFKNNMSFVVLVPTHFEWNVSQVLANLSWDTLHPPLVWERPTKVRLPKLYLKHQMDLVATLSQLGLQELFQAPDLRGISEQSLVVSGVQHQSTLELSEVGVEAAAATSIAMSRMSLSSFSVNRPFLFFIFEDTTGLPLFVGSVRNPNPSAPRELKEQQDSPGNKDFLQSLKGFPRGDKLFGPDLKLVPPMEEDYPQFGSPK

SEQ ID NO: 740031 - protein, 416 aa, Homo sapiens
MALLWGLLVLSWSCLQGPCSVFSPVSAMEPLGRQLTSGPNQEQVSPLTLLKLGNQEPGGQTALKSPPGVCSRDPTPEQTHRLARAMMAFTADLFSLVAQTSTCPNLILSPLSVALALSHLALGAQNHTLQRLQQVLHAGSGPCLPHLLSRLCQDLGPGAFRLAARMYLQKGFPIKEDFLEQSEQLFGAKPVSLTGKQEDDLANINQWVKEATEGKIQEFLSGLPEDTVLLLLNAIHFQGFWRNKFDPSLTQRDSFHLDEQFTVPVEMMQARTYPLRWFLLEQPEIQVAHFPFKNNMSFVVLVPTHFEWNVSQVLANLSWDTLHPPLVWERPTKVRLPKLYLKHQMDLVATLSQLGLQELFQAPDLRGISEQSLVVSGVQHQSTLELSEVLLKPLRATSFAIVPQVPLALFVPALPF

SEQ ID NO: 740032 - protein, 66 aa, Homo sapiens
AKESLANARSLCHTSVVLRGHLAGSSSQPMAGCCKPHSLNAAPKILKINCKNKIKAGSEMVFLGLA

SEQ ID NO: 740033 - protein, 610 aa, Homo sapiens
MWLPLVLLLAVLLLAVLCKVYLGLFSGSSPNPFSEDVKRPPAPLVTDKEARKKVLKQAFSANQVPEKLDVVVIGSGFGGLAAAAILAKAGKRVLVLEQHTKAGGCCHTFGKNGLEFDTGIHYIGRMEEGSIGRFILDQITEGQLDWAPLSSPFDIMVLEGPNGRKEYPMYSGEKAYIQGLKEKFPQEEAIIDKYIKLVKVVSSGAPHAILLKFLPLPVVQLLDRCGLLTRFSPFLQASTQSLAEVLQQLGASSELQAVLSYIFPTYGVTPNHSAFSMHALLVNHYMKGGFYPRGGSSEIAFHTIPVIQRAGGAVLTKATVQSVLLDSAGKACGVSVKKGHELVNIYCPIVVSNAGLFNTYEHLLPGNARCLPGVKQQLGTVRPGLGMTSVFICLRGTKEDLHLPSTNYYVYYDTDMDQAMERYVSMPREEAAEHIPLLFFAFPSAKDPTWEDRFPGRSTMIMLIPTAYEWFEEWQAELKGKRGSDYETFKNSFVEASMSVVLKLFPQLEGKVESVTAGSPLTNQFYLAAPRGACYGADHDLGRLHPCVMASLRAQSPIPNLYLTGQDIFTCGLVGALQGALLCSSAILKRNLYSDLKNLDSRIRAQKKKN

SEQ ID NO: 740034 - protein, 549 aa, Homo sapiens [sequence omitted]

SEQ ID NO: 740035 - protein, 481 aa, Homo sapiens
MWLPLVLLLAVLLLAVLCKVYLGLFSGSSPNPFSEDVKRPPAPLVTDKEARKKVLKQAFSANQVPEKLDVVVIGSGFGGLAAAAILAKAGKRVLVLEQHTKAGGCCHTFGKNGLEFDTGIHYIGRMEEGSIGRFILDQITEGQLDWAPLSSPFDIMVLEGPNGRKEYPMYSGEKAYIQGLKEKFPQEEAIIDKYIKLVKVVSSGAPHAILLKFLPLPVVQLLDRCGLLTRFSPFLQASTQSLAEVLQQLGASSELQAVLSYIFPTYGVTPNHSAFSMHALLVNHYMKGGFYPRGGSSEIAFHTIPVIQRAGGAVLTKATVQSVLLDSAGKACGVSVKKGHELVNIYCPIVVSNAGLFNTYEHLLPGNARCLPGVKQQLGTVRPGLGMTSVFICLRGTKEDLHLPSTNYYVYYDTDMDQAMERYVSMPREEAAEHIPLLFFAFPSAKDPTWEDRFPGGECDCRIPTHQPVLSGCSPRCLLRG

SEQ ID NO: 740036 - protein, 527 aa, Homo sapiens
MWLPLVLLLAVLLLAVLCKVYLGLFSGSSPNPFSEDVKRPPAPLVTDKEARKKVLKQAFSANQVPEKLDVVVIGSGFGGLAAAAILAKAGKRVLVLEQHTKAGGCCHTFGKNGLEFDTGIHYIGRMEEGSIGRFILDQITEGQLDWAPLSSPFDIMVLEGPNGRKEYPMYSGEKAYIQGLKEKFPQEEAIIDKYIKLVKVVSSGAPHAILLKFLPLPVVQLLDRCGLLTRFSPFLQASTQSLAEVLQQLGASSELQAVLSYIFPTYGVTPNHSAFSMHALLVNHYMKGGFYPRGGSSEIAFHTIPVIQRAGGAVLTKATVQSVLLDSAGKACGVSVKKGHELVNIYCPIVVSNAGLFNTYEHLLPGNARCLPGVKQQLGTVRPGLGMTSVFICLRGTKEDLHLPSTNYYVYYDTDMDQAMERYVSMPREEAAEHIPLLFFAFPSAKDPTWEDRFPGRSTMIMLIPTAYEWFEEWQAELKGKRGSDYETFKNSFVEASMSVVLKLFPQLEGKWNVPVDSCWNAGSPFD

SEQ ID NO: 740037 - protein, 610 aa, Homo sapiens; identical to SEQ ID NO: 740033

SEQ ID NO: 740038 - protein, 401 aa, Homo sapiens
MWLPLVLLLAVLLLAVLCKVYLGLFSGSSPNPFSEDVKRPPAPLVTDKEARKKVLKQGVTPNHSAFSMHALLVNHYMKGGFYPRGGSSEIAFHTIPVIQRAGGAVLTKATVQSVLLDSAGKACGVSVKKGHELVNIYCPIVVSNAGLFNTYEHLLPGNARCLPGVKQQLGTVRPGLGMTSVFICLRGTKEDLHLPSTNYYVYYDTDMDQAMERYVSMPREEAAEHIPLLFFAFPSAKDPTWEDRFPGRSTMIMLIPTAYEWFEEWQAELKGKRGSDYETFKNSFVEASMSVVLKLFPQLEGKVESVTAGSPLTNQFYLAAPRGACYGADHDLGRLHPCVMASLRAQSPIPNLYLTGQDIFTCGLVGALQGALLCSSAILKRNLYSDLKNLDSRIRAQKKKN

SEQ ID NO: 740039 - protein, 610 aa, Homo sapiens; identical to SEQ ID NO: 740033

SEQ ID NO: 740040 - protein, 610 aa, Homo sapiens; identical to SEQ ID NO: 740033

SEQ ID NO: 740041 - protein, 269 aa, Homo sapiens
MWLPLVLLLAVLLLAVLCKVYLGLFSGSSPNPFSEDVKRPPAPLVTDKEARKKVLKQAFSANQVPEKLDVVVIGSGFGGLAAAAILAKAGKRVLVLEQHTKAGGCCHTFGKNGLEFDTGIHYIGRMEEGSIGRFILDQITEGQLDWAPLSSPFDIMVLEGPNGRKEYPMYSGEKAYIQGLKEKFPQEEAIIDKYIKLVKVVSSGAPHAILLKFLPLPVVQLLDRCGLLTRFSPFLQASTQSLAEVLQQLGASSELQAVLSYIFPTYASL

SEQ ID NO: 740042 - protein, 259 aa, Homo sapiens
MWLPLVLLLAVLLLAVLCKVYLGLFSGSSPNPFSEDVKRPPAPLVTDKEARKKVLKQAFSANQVPEKLDVVVIGSGFGGLAAAAILAKAGKRVLVLEQHTKAGGCCHTFGKNGLEFDTGIHYIGRMEEGSIGRFILDQITEGQLDWAPLSSPFDIMVLEGPNGRKEYPMYSGEKAYIQGLKEKFPQEEAIIDKYIKLVKVVSSGAPHAILLKFLPLPVVQLLDRCGLLTRFSPFLQASTQSVSLTHLGNPVCQCEEGRH

SEQ ID NO: 740043 - protein, 516 aa, Homo sapiens
WAESEEHPSGARGTLCVAARSPQRNMALLWGLLVLSWSCLQGPCSVFSPVSAMEPLGRQLTSGPNQEQVSPLTLLKLGNQEPGGQTALKSPPGVCSRDPTPEQTHRLARAMMAFTADLFSLVAQTSTCPNLILSPLSVALALSHLALGAQNHTLQRLQQVLHAGSGPCLPHLLSRLCQDLGPGAFRLAARMYLQKGFPIKEDFLEQSEQLFGAKPVSLTGKQEDDLANINQWVKEATEGKIQEFLSGLPEDTVLLLLNAIHFQGFWRNKFDPSLTQRDSFHLDEQFTVPVEMMQARTYPLRWFLLEQPEIQVAHFPFKNNMSFVVLVPTHFEWNVSQVLANLSWDTLHPPLVWERPTKVRLPKLYLKHQMDLVATLSQLGLQELFQAPDLRGISEQSLVVSGVQHQSTLELSEVGVEAAAATSIAMSRMSLSSFSVNRPFLFFIFEDTTGLPLFVGSVRNPNPSAPRELKEQQDSPGNKDFLQSLKGFPRGDKLFGPDLKLVPPMEEDYPQFGSPK

SEQ ID NO: 740044 - protein, 509 aa, Homo sapiens
GLEKLEPVLGKKILMPRNMALLWGLLVLSWSCLQGPCSVFSPVSAMEPLGRQLTSGPNQEQVSPLTLLKLGNQEPGGQTALKSPPGVCSRDPTPEQTHRLARAMMAFTADLFSLVAQTSTCPNLILSPLSVALALSHLALGAQNHTLQRLQQVLHAGSGPCLPHLLSRLCQDLGPGAFRLAARMYLQKGFPIKEDFLEQSEQLFGAKPVSLTGKQEDDLANINQWVKEATEGKIQEFLSGLPEDTVLLLLNAIHFQGFWRNKFDPSLTQRDSFHLDEQFTVPVEMMQARTYPLRWFLLEQPEIQVAHFPFKNNMSFVVLVPTHFEWNVSQVLANLSWDTLHPPLVWERPTKVRLPKLYLKHQMDLVATLSQLGLQELFQAPDLRGISEQSLVVSGVQHQSTLELSDGGVEAAAATSIAMSRMSLSSFSVNRPFLFFIFEDTTGLPLFVGSVRNPNPSAPRELKEQQDSPGNKDFLQSLKGFPRGDKLFGPDLKLVPPMEEDYPQFGSPK

SEQ ID NO: 740045 - protein, 401 aa, Homo sapiens
WAESEEHPSGARGTLCVAARSPQRNMALLWGLLVLSWSCLQGPCSVFSPVSAMEPLGRQLTSGPNQEQVSPLTLLKLGNQEPGGQTALKSPPGVCSRDPTPEQTHRLARAMMAFTADLFSLVAQTSTCPNLILSPLSVALALSHLALGVSGGDKFDPSLTQRDSFHLDEQFTVPVEMMQARTYPLRWFLLEQPEIQVAHFPFKNNMSFVVLVPTHFEWNVSQVLANLSWDTLHPPLVWERPTKVRLPKLYLKHQMDLVATLSQLGLQELFQAPDLRGISEQSLVVSGVQHQSTLELSEVGVEAAAATSIAMSRMSLSSFSVNRPFLFFIFEDTTGLPLFVGSVRNPNPSAPRELKEQQDSPGNKDFLQSLKGFPRGDKLFGPDLKLVPPMEEDYPQFGSPK

SEQ ID NO: 740046 - protein, 516 aa, Homo sapiens; identical to SEQ ID NO: 740043

SEQ ID NO: 740047 - protein, 516 aa, Homo sapiens; identical to SEQ ID NO: 740043

SEQ ID NO: 740048 - protein, 516 aa, Homo sapiens; identical to SEQ ID NO: 740043

SEQ ID NO: 740049 - protein, 133 aa, Homo sapiens
MTKVPATKKLQSSPNSGAVRPFYASENLRQVPDKPMKSIKYMDKEIINLKKDLIRSRLSHCRTQRRMGKRPNREATSKQERNDNEMFHLATLLDPTNIKEGIRIPLQKETPCFPREVISPSGTNSLTPYPSIK

SEQ ID NO: 740050 - protein, 164 aa, Homo sapiens [sequence omitted]

SEQ ID NO: 740051 - protein, 672 aa, Homo sapiens
MRAGRGATPARELFRDAAFPAADSSLFCDLSTPLAQFREDITWRRPQEICATPRLFPDDPREGQVKQGLLGDCWFLCACAALQKSRHLLDQVIPPGQPSWADQEYRGSFTCRIWQFGRWVEVTTDDRLPCLAGRLCFSRCQREDVFWLPLLEKVYAKVHGSYEHLWAGQVADALVDLTGGLAERWNLKGVAGSGGQQDRPGRWEHRTCRQLLHLKDQCLISCCVLSPRAGARELGEFHAFIVSDLRELQGQAGQCILLLRIQNPWGRRCWQGLWREGGEGWSQVDAAVASELLSQLQEGEFWVEEEEFLREFDELTVGYPVTEAGHLQSLYTERLLCHTRALPGAWVKGQSAGGCRNNSGFPSNPKFWLRVSEPSEVYIAVLQRSRLHAADWAGRARALVGDSHTSWSPASIPGKHYQAVGLHLWKVEKRRVNLPRVLSMPPVAGTACHAYDREVHLRCELSPGYYLAVPSTFLKDAPGEFLLRVFSTGRVSLSAIRAVAKNTTPGAALPAGEWGTVQLRGSWRVGQTAGGSRNFASYPTNPCFPFSVPEGPGPRCVRITLHQHCRPSDTEFHPIGFHIFQVPEGGRSQDAPPLLLQEPLLSCVPHRYAQEVSRLCLLPAGTYKVVPSTYLPDTEGAFTVTIATRIDRPSIHSQEMLGQFLQEVSVMAVMKT

SEQ ID NO: 740052 - protein, 543 aa, Homo sapiens
MRAGRGATPARELFRDAAFPAADSSLFCDLSTPLAQFREDITWRRPQEICATPRLFPDDPREGQVKQGLLGDCWFLCACAALQKSRHLLDQVIPPGQPSWADQEYRGSFTCRIWQFGRWVEVTTDDRLPCLAGRLCFSRCQREDVFWLPLLEKVYAKVHGSYEHLWAGQVADALVDLTGGLAERWNLKGVAGSGGQQDRPGRWEHRTCRQLLHLKDQCLISCCVLSPRAGARELGEFHAFIVSDLRELQGQAGQCILLLRIQNPWGRRCWQGLWREGGEGWSQVDAAVASELLSQLQEGEFWVEEEEFLREFDELTVGYPVTEAGHLQSLYTERLLCHTRALPGAWVKGQSAGGCRNNSGFPSNPKFWLRVSEPSEVYIAVLQRSRLHAADWAGRARALVGDSHTSWSPASIPGKHYQAVGLHLWKVEKRRVNLPRVLSMPPVAGTACHAYDREVHLRCELSPGYYLAVPSTFLKDAPGEFLLRVFSTGRVSLSLAPAASASLCISTAGPVTPSSTPSASISSRSQRVEGARTHPHCCCRSRC

SEQ ID NO: 740053 - protein, 513 aa, Homo sapiens
MRAGRGATPARELFRDAAFPAADSSLFCDLSTPLAQFREDITWRRPQEICATPRLFPDDPREGQVKQGLLGDCWFLCACAALQKSRHLLDQVIPPGQPSWADQEYRGSFTCRIWQFGRWVEVTTDDRLPCLAGRLCFSRCQREDVFWLPLLEKVYAKVHGSYEHLWAGQVADALVDLTGGLAERWNLKGVAGSGGQQDRPGRWEHRTCRQLLHLKDQCLISCCVLSPRAGARELGEFHAFIVSDLRELQGQAGQCILLLRIQNPWGRRCWQGLWREGGEGWSQVDAAVASELLSQLQEGEFWVEEEEFLREFDELTVGYPVTEAGHLQSLYTERLLCHTRALPGAWVKGQSAGGCRNNSGFPSNPKFWLRVSEPSEVYIAVLQRSRLHAADWAGRARALVGDSHTSWSPASIPGKHYQAVGLHLWKVEKRRVNLPRVLSMPPVAGTACHAYDREVHLRCELSPGYYLAVPSTFLKDAPGEFLLRVFSTGRVSLRSQRVEGARTHPHCCCRSRC

SEQ ID NO: 740054 - protein, 138 aa, Homo sapiens
MRAGRGATPARELFRDAAFPAADSSLFCDLSTPLAQFREDITWRRPQVPEGGRSQDAPPLLLQEPLLSCVPHRYAQEVSRLCLLPAGTYKVVPSTYLPDTEGAFTVTIATRIDRPSIHSQEMLGQFLQEVSVMAVMKT

SEQ ID NO: 740055 - protein, 112 aa, Homo sapiens
MRAGRGATPARELFRDAAFPAADSSLFCDLSTPLAQFREDITWRRPQEICATPRLFPDDPREGQVKQGLLGDCWFLCACAALQKSRHLLDQVRGPFPVFVLEPVSFCVSPAC

SEQ ID NO: 740056 - protein, 628 aa, Homo sapiens
IQVCVRVLCRPRCLWSTQLWPHRGRDTGVAPGGAYITLAFCFSCAWQVIPPGQPSWADQEYRGSFTCRIWQFGRWVEVTTDDRLPCLAGRLCFSRCQREDVFWLPLLEKVYAKVHGSYEHLWAGQVADALVDLTGGLAERWNLKGVAGSGGQQDRPGRWEHRTCRQLLHLKDQCLISCCVLSPRAGARELGEFHAFIVSDLRELQGQAGQCILLLRIQNPWGRRCWQGLWREGGEGWSQVDAAVASELLSQLQEGEFWVEEEEFLREFDELTVGYPVTEAGHLQSLYTERLLCHTRALPGAWVKGQSAGGCRNNSGFPSNPKFWLRVSEPSEVYIAVLQRSRLHAADWAGRARALVGDSHTSWSPASIPGKHYQAVGLHLWKVEKRRVNLPRVLSMPPVAGTACHAYDREVHLRCELSPGYYLAVPSTFLKDAPGEFLLRVFSTGRVSLSAIRAVAKNTTPGAALPAGEWGTVQLRGSWRVGQTAGGSRNFASYPTNPCFPFSVPEGPGPRCVRITLHQHCRPSDTEFHPIGFHIFQVPEGGRSQDAPPLLLQEPLLSCVPHRYAQEVSRLCLLPAGTYKVVPSTYLPDTEGAFTVTIATRIDRPSIHSQEMLGQFLQEVSVMAVMKT

SEQ ID NO: 740057 - protein, 233 aa, Homo sapiens [sequence omitted]

SEQ ID NO: 740058 - protein, 444 aa, Homo sapiens
MRAGRGATPARELFRDAAFPAADSSLFCDLSTPLAQFREDITWRRPQEICATPRLFPDDPREGQVKQGLLGDCWFLCACAALQKSRHLLDQVIPPGQPSWADQEYRGSFTCRIWQFGRWVEVTTDDRLPCLAGRLCFSRCQREDVFWLPLLEKVYAKVHGSYEHLWAGQVADALVDLTGGLAERWNLKGVAGSGGQQDRPGRWEHRTCRQLLHLKDQCLISCCVLSPRAGARELGEFHAFIVSDLRELQGQAGQCILLLRIQNPWGRRCWQGLWREGGEGWSQVDAAVASELLSQLQEGEFWVEEEEFLREFDELTVGYPVTEAGHLQSLYTERLLCHTRALPGAWVKGQSAGGCRNNSGFPSNPKFWLRVSEPSEVYIAVLQRSRLHAADWAGRARALVGDSHTSWSPASIPGKHYQAVGLHLWKGVTLGTTLFPVPSWMWPT

SEQ ID NO: 740059 - protein, 517 aa, Homo sapiens
MRAGRGATPARELFRDAAFPAADSSLFCDLSTPLAQFREDITWRRPQEICATPRLFPDDPREGQVKQGLLGDCWFLCACAALQKSRHLLDQVIPPGQPSWADQEYRGSFTCRIWQFGRWVEVTTDDRLPCLAGRLCFSRCQREDVFWLPLLEKVYAKVHGSYEHLWAGQVADALVDLTGGLAERWNLKGVAGSGGQQDRPGRWEHRTCRQLLHLKDQCLISCCVLSPRAGARELGEFHAFIVSDLRELQGQAGQCILLLRIQNPWGRRCWQGLWREGGEGWSQVDAAVASELLSQLQEGEFWVEEEEFLREFDELTVGYPVTEAGHLQSLYTERLLCHTRALPGAWVKGQSAGGCRNNSGFPSNPKFWLRVSEPSEVYIAVLQRSRLHAADWAGRARALVGDSHTSWSPASIPGKHYQAVGLHLWKVPEGGRSQDAPPLLLQEPLLSCVPHRYAQEVSRLCLLPAGTYKVVPSTYLPDTEGAFTVTIATRIDRPSIHSQEMLGQFLQEVSVMAVMKT

SEQ ID NO: 740060 - protein, 139 aa, Homo sapiens
MRAGRGATPARELFRDAAFPAADSSLFCDLSTPLAQFREDITWRRPQEICATPRLFPDDPREGQVKQGLLGDCWFLCACAALQKSRHLLDQVSCPVQLPADWTCKVQPVWLEFPCLPISCRLRVSSDTSPDSATWGSWK

SEQ ID NO: 740061 - protein, 625 aa, Homo sapiens
MRAGRGATPARELFRDAAFPAADSSLFCDLSTPLAQFREDITWRRPQEICATPRLFPDDPREGQVKQGLLGDCWFLCACAALQKSRHLLDQVIPPGQPSWADQEYRGSFTCRIWQFGRWVEVTTDDRLPCLAGRLCFSRCQREDVFWLPLLEKVYAKVHGSYEHLWAGQVADALVDLTGGLAERWNLKGVAGSGGQQDRPGRWEHRTCRQLLHLKDQCLISCCVLSPRAGARELGEFHAFIVSDLRELQGQAGQCILLLRIQNPWGRRCWQGLWREGGEGWSQVDAAVASELLSQLQEGEFWVEEEEFLREFDELTVGYPVTEAGHLQSLYTERLLCHTRALPGAWVKGQSAGGCRNNSGFPSNPKFWLRVSEPSEVYIAVLQRSRLHAADWAGRARALVGDSHTSWSPASIPGKHYQAVGLHLWKVEKRRVNLPRVLSMPPVAGTACHAYDREVHLRCELSPGYYLAVPSTFLKDAPGEFLLRVFSTGRVSLSAIRAVAKNTTPGAALPAGEWGTVQPGPRCVRITLHQHCRPSDTEFHPIGFHIFQVPEGGRSQDAPPLLLQEPLLSCVPHRYAQEVSRLCLLPAGTYKVVPSTYLPDTEGAFTVTIATRIDRTPYGGLTPRG

SEQ ID NO: 740062 - protein, 124 aa, Homo sapiens
MPGVFSLERLLCHTRALPGAWVKGQSAGGCRNNSGFPSNPKFWLRVSEPSEVYIAVLQRSRLHAADWAGRARALVGDSHTSWSPASIPGKHYQAVGLHLWKVTQPRLAHARFSRWCGGPWRSGF

SEQ ID NO: 740063 - protein, 105 aa, Homo sapiens
HTHISPQTVSAPRHLLQGLGDRAEVQRSRALLSQHISLGSEGQQQPHTVKLGSGTGLMQGSATPDTGIQLSSLPDQVSSTVCVASGCSDGEGCRLLGLGGQHPEP

SEQ ID NO: 740064 - protein, 126 aa, Homo sapiens
ERQLDLGTLNKVFASQWLNARQVVCGTKCNTLFVVDVQSGHITRIPLMRDKEAGLAQAQQGCGIHAIELNPSKTLLATGGENPNSLGHLPAAHPGPPVAWGDRHGHKDWIFAVAWLSDTVAVSGSR

SEQ ID NO: 740065 - protein, 292 aa, Homo sapiens
MTRTYENFQYLENKVKVQGFKNGPLPLQSLLQRLRSGPCHLLLSLGLGLLLLVIICVVGFQNSKFQRDLVTLRTDFSNFTSNTVAEIQALTSQGSSLEETIASLKAEVEGFKQERQAVHSEMLLRVQQLVQDLKKLTCQVATLNNNGEEASTEGTCCPVNWVEHQDSCYWFSHSGMSWAEAEKYCQLKNAHLVVINSREEQNFVQKYLGSAYTWMGLSDPEGAWKWVDGTDYATGFQNWKPGQPDDWQGHGLGGGEDCAHFHPDGRWNDDVCQRPYHWVCEAGLGQTSQESH

SEQ ID NO: 740066 - protein, 143 aa, Homo sapiens
MTRTYENFQYLENKVKVQGFKNGPLPLQSLLQRLRSGPCHLLLSLGLGLLLLVIICVVGFQNSKFQRDLVTLRTDFSNFTSNTVAEIQALTSQGSSLEETIASLKAEVEGFKQERQAGVSELQEHTTQKAHLGHCPHCPSVCV

SEQ ID NO: 740067 - protein, 118 aa, Homo sapiens
RQGLALLPRLEYSGVIMAHCSLRLLGINDSPTSASRVAGTTGTQHHTQLIFVFFVETGFCHVAQAGLELLASSDLPTLPPKMLGLRSEPPHPASVFLKLAILKIEAISLPLCFYSSNM

SEQ ID NO: 740068 - protein, 107 aa, Homo sapiens [sequence omitted]

SEQ ID NO: 740069 - protein, 113 aa, Homo sapiens
PSRKVTCTKSCSQQAIFVGQNYPTRIRQIIDKDRQPQEVEAFKGKILYQRHPQSMPHRDPVPHLNPTCQRQVTLVCPAVPISGKSTVFSDVPLLTGHKMHWKYLQGGKSPPTK

SEQ ID NO: 740070 - protein, 66 aa, Homo sapiens
SILSIDGEKLQEAERLLTPRTVGSTLQGETGFLRSPRRRVQAFSPLSRPPALPHPRSQRRTGFCFH

SEQ ID NO: 740071 - protein, 69 aa, Homo sapiens
LYVSCCRLLDLSRSPHHITQPLCPMGGQTVFQCRRKGCKVRAVCEEGTNESYCEKVCMVKKWITKNKAS

SEQ ID NO: 740072 - protein, 103 aa, Homo sapiens
LISSKVYQKGRKLEKWTGSYMKRTRDKWQKAIKEEDSRSLLCGGFYLCSHGFKPRLRESGHSAFTESLQCCWAATQYTTYIKKQNLTKVYVPIGINSTSRNLS

SEQ ID NO: 740073 - protein, 142 aa, Homo sapiens
MFSHLPFDCVLLLLLLLLTRSSEVEYRAEVGQNAYLPCFYTPAAPGNLVPVCWGKGACPVFECGNVVLRTDERDVNYWTSRYWLNGDFRKGDVSLTIENVTLADSGIYCCRIQIPGIMNDEKFNLKLVIKPGEWTFACHLYE

SEQ ID NO: 740074 - protein, 301 aa, Homo sapiens
MFSHLPFDCVLLLLLLLLTRSSEVEYRAEVGQNAYLPCFYTPAAPGNLVPVCWGKGACPVFECGNVVLRTDERDVNYWTSRYWLNGDFRKGDVSLTIENVTLADSGIYCCRIQIPGIMNDEKFNLKLVIKPAKVTPAPTLQRDFTAAFPRMLTTRGHGPAETQTLGSLPDINLTQISTLANELRDSRLANDLRDSGATIRIGIYIGAGICAGLALALIFGALIFKWYSHSKEKIQNLSLISLANLPPSGLANAVAEGIRSEENIYTIEENVYEVEEPNEYYCYVSSRQQPSQPLGCRFAMP

SEQ ID NO: 740075 - protein, 307 aa, Homo sapiens
MACSFPEMEKPHSPLESWLSFSLYAGSSEVEYRAEVGQNAYLPCFYTPAAPGNLVPVCWGKGACPVFECGNVVLRTDERDVNYWTSRYWLNGDFRKGDVSLTIENVTLADSGIYCCRIQIPGIMNDEKFNLKLVIKPAKVTPAPTLQRDFTAAFPRMLTTRGHGPAETQTLGSLPDINLTQISTLANELRDSRLANDLRDSGATIRIGIYIGAGICAGLALALIFGALIFKWYSHSKEKIQNLSLISLANLPPSGLANAVAEGIRSEENIYTIEENVYEVEEPNEYYCYVSSRQQPSQPLGCRFAMP

SEQ ID NO: 740076 - protein, 103 aa, Homo sapiens
SVIVCSQFKIADHLSSKHTDRIEFQKGSSFRFLAHVQIHASGRKFQCTLSMLPSLGLVVNIQQSFMRKNVFCCMTEGFTKQTVVSIVSNMLHVHFRKQSPVIS

SEQ ID NO: 740077 - protein, 999 aa, Homo sapiens
MADKVRRQRPRRRVCWALVAVLLADLLALSDTLAVMSVDLGSESMKVAIVKPGVPMEIVLNKESRRKTPVIVTLKENERFFGDSAASMAIKNPKATLRYFQHLLGKQADNPHVALYQARFPEHELTFDPQRQTVHFQISSQLQFSPEEVLGMVLNYSRSLAEDFAEQPIKDAVITVPVFFNQAERRAVLQAARMAGLKVLQLINDNTATALSYGVFRRKDINTTAQNIMFYDMGSGSTVCTIVTYQMVKTKEAGMQPQLQIRGVGFDRTLGGLEMELRLRERLAGLFNEQRKGQRAKDVRENPRAMAKLLREANRLKTVLSANADHMAQIEGLMDDVDFKAKVTRVEFEELCADLFERVPGPVQQALQSAEMSLDEIEQVILVGGATRVPRVQEVLLKAVGKEELGKNINADEAAAMGAVYQAAALSKAFKVKPFVVRDAVVYPILVEFTREVEEEPGIHSLKHNKRVLFSRMGPYPQRKVITFNRYSHDFNFHINYGDLGFLGPEDLRVFGSQNLTTVKLKGVGDSFKKYPDYESKGIKAHFNLDESGVLSLDRVESVFETLVEDSAEEESTLTKLGNTISSLFGGGTTPDAKENGTDTVQEEEESPAEGSKDEPGEQVELKEEAEAPVEDGSQPPPPEPKGDATPEGEKATEKENGDKSEAQKPSEKAEAGPEGVAPAPEGEKKQKPARKRRMVEEIGVELVVLDLPDLPEDKLAQSVQKLQDLTLRDLEKQEREKAANSLEAFIFETQDKLYQPEYQEVSTEEQREEISGKLSAASTWLEDEGVGATTVMLKEKLAELRKLCQGLFFRVEERKKWPERLSALDNLLNHSSMFLKGARLIPEMDQIFTEVEMTTLEKVINETWAWKNATLAEQAKLPATEKPVLLSKDIEAKMMALDREVQYLLNKAKFTKPRPRPKDKNGTRAEPPLNASASDQGEKVIPPAGQTEDAEPISEPEKVETGSEPGDTEPLELGGPGAEPEQKEQSTGQKRPLKNDEL

SEQ ID NO: 740078 - protein, 164 aa, Homo sapiens
QRAPRPGPAGARDAAESGTMADKVRRQRPRRRVCWALVAVLLADLLALSDTLAVMSVDLGSESMKVAIVKPGVPMEIVLNKESRRKTPVIVTLKENERFFGDSAASMAIKNPKATLRYFQHLLGKQADNPHVALYQARFPEHELTFDPQRQTVHFQISSPFSPL

SEQ ID NO: 740079 - protein, 106 aa, Homo sapiens
AWSLSWSHPQAWKNATLAEQAKLPATEKPVLLSNKAKFTKPRPRPKDKNGTRAEPPLNASASDQGEKVIPPAGQTEDAEPISEPEKVETGELEPMVEHVDVALAQG

SEQ ID NO: 740080 - protein, 1076 aa, Homo sapiens
RKEVAGVDGGAGRPPLLGETACELRGRVGSAREGRADAERSASHRGARSSAPGLSPLAGAGRDPFPGVGAAAFVRGTMADKVRRQRPRRRVCWALVAVLLADLLALSDTLAVMSVDLGSESMKVAIVKPGVPMEIVLNKESRRKTPVIVTLKENERFFGDSAASMAIKNPKATLRYFQHLLGKQADNPHVALYQARFPEHELTFDPQRQTVHFQISSQLQFSPEEVLGMVLNYSRSLAEDFAEQPIKDAVITVPVFFNQAERRAVLQAARMAGLKVLQLINDNTATALSYGVFRRKDINTTAQNIMFYDMGSGSTVCTIVTYQMVKTKEAGMQPQLQIRGVGFDRTLGGLEMELRLRERLAGLFNEQRKGQRAKDVRENPRAMAKLLREANRLKTVLSANADHMAQIEGLMDDVDFKAKVTRVEFEELCADLFERVPGPVQQALQSAEMSLDEIEQVILVGGATRVPRVQEVLLKAVGKEELGKNINADEAAAMGAVYQAAALSKAFKVKPFVVRDAVVYPILVEFTREVEEEPGIHSLKHNKRVLFSRMGPYPQRKVITFNRYSHDFNFHINYGDLGFLGPEDLRVFGSQNLTTVKLKGVGDSFKKYPDYESKGIKAHFNLDESGVLSLDRVESVFETLVEDSAEEESTLTKLGNTISSLFGGGTTPDAKENGTDTVQEEEESPAEGSKDEPGEQVELKEEAEAPVEDGSQPPPPEPKGDATPEGEKATEKENGDKSEAQKPSEKAEAGPEGVAPAPEGEKKQKPARKRRMVEEIGVELVVLDLPDLPEDKLAQSVQKLQDLTLRDLEKQEREKAANSLEAFIFETQDKLYQPEYQEVSTEEQREEISGKLSAASTWLEDEGVGATTVMLKEKLAELRKLCQGLFFRVEERKKWPERLSALDNLLNHSSMFLKGARLIPEMDQIFTEVEMTTLEKVINETWAWKNATLAEQAKLPATEKPVLLSKDIEAKMMALDREVQYLLNKAKFTKPRPRPKDKNGTRAEPPLNASASDQGEKVIPPAGQTEDAEPISEPEKVETGSEPGDTEPLELGGPGAEPEQKEQSTGQKRPLKNDEL

SEQ ID NO: 740081 - protein, 1117 aa, Homo sapiens
RKEVAGVDGGAGRPPLLGETACELRGRVGSAREGRADAERSASHRGARSSAPGLSPLAGAGRDPFPGVGAAAFVRGTMADKVRRQRPRRRVCWALVAVLLADLLALSDTLAVMSVDLGSESMKVAIVKPGVPMEIVLNKESRRKTPVIVTLKENERFFGDSAASMAIKNPKATLRYFQHLLGKQADNPHVALYQARFPEHELTFDPQRQTVHFQISSECSVGEGGLGNAAGLLIGVCSRLSCLNAWLSLAPTTFLPLRQLQFSPEEVLGMVLNYSRSLAEDFAEQPIKDAVITVPVFFNQAERRAVLQAARMAGLKVLQLINDNTATALSYGVFRRKDINTTAQNIMFYDMGSGSTVCTIVTYQMVKTKEAGMQPQLQIRGVGFDRTLGGLEMELRLRERLAGLFNEQRKGQRAKDVRENPRAMAKLLREANRLKTVLSANADHMAQIEGLMDDVDFKAKVTRVEFEELCADLFERVPGPVQQALQSAEMSLDEIEQVILVGGATRVPRVQEVLLKAVGKEELGKNINADEAAAMGAVYQAAALSKAFKVKPFVVRDAVVYPILVEFTREVEEEPGIHSLKHNKRVLFSRMGPYPQRKVITFNRYSHDFNFHINYGDLGFLGPEDLRVFGSQNLTTVKLKGVGDSFKKYPDYESKGIKAHFNLDESGVLSLDRVESVFETLVEDSAEEESTLTKLGNTISSLFGGGTTPDAKENGTDTVQEEEESPAEGSKDEPGEQVELKEEAEAPVEDGSQPPPPEPKGDATPEGEKATEKENGDKSEAQKPSEKAEAGPEGVAPAPEGEKKQKPARKRRMVEEIGVELVVLDLPDLPEDKLAQSVQKLQDLTLRDLEKQEREKAANSLEAFIFETQDKLYQPEYQEVSTEEQREEISGKLSAASTWLEDEGVGATTVMLKEKLAELRKLCQGLFFRVEERKKWPERLSALDNLLNHSSMFLKGARLIPEMDQIFTEVEMTTLEKVINETWAWKNATLAEQAKLPATEKPVLLSKDIEAKMMALDREVQYLLNKAKFTKPRPRPKDKNGTRAEPPLNASASDQGEKVIPPAGQTEDAEPISEPEKVETGSEPGDTEPLELGGPGAEPEQKEQSTGQKRPLKNDEL

SEQ ID NO: 740082 - protein, 1076 aa, Homo sapiens; identical to SEQ ID NO: 740080

SEQ ID NO: 740083 - protein, 1194 aa, Homo sapiens
SGRGSGGGWRCGPATPPRGDSVRAPGAGRERKGEAARTPGGSASHRGARSSAPGLSPLAGAGRDPFPGVGAAAFVRGTMADKVRRQRPRRRVCWALVAVLLADLLALSDTLAVMSVDLGSESMKVAIVKPGVPMEIVLNKESRRKTPVIVTLKENERFFGDSAASMAIKNPKATLRYFQHLLGKQADNPHVALYQARFPEHELTFDPQRQTVHFQISSQLQFSPEEVLGMVLNYSRSLAEDFAEQPIKDAVITVPVFFNQAERRAVLQAARMAGLKVLQLINDNTATALSYGVFRRKDINTTAQNIMFYDMGSGSTVCTIVTYQMVKTKEAGMQPQLQIRGVGFDRTLGGLEMELRLRERLAGLFNEQRKGQRAKDVRENPRAMAKLLREANRLKTVLSANADHMAQIEGLMDDVDFKAKVTRVEFEELCADLFERVPGPVQQALQSAEMSLDEIEQVILVGGATRVPRVQEVLLKAVGKEELGKNINADEAAAMGAVYQAAALSKAFKVKPFVVRDAVVYPILVEFTREVEEEPGIHSLKHNKRVLFSRMGPYPQRKVITFNRYSHDFNFHINYGDLGFLGPEDLRVFGSQNLTTVKLKGVGDSFKKYPDYESKGIKAHFNLDESGVLSLDRVESVFETLVEDSAEEESTLTKLGNTISSLFGGGTTPDAKENGTDTVQVSSGWSQGSMEDGGEMQVVAAEEGGEGRPPLPCCVNHSLPRILWALSCFLTGAPKAHSPHCRCSSFVQLDCHSPSRPLTVSIQQSPVWNPHGVAVPSQACLEALLLIVPWGACGVSQEEEESPAEGSKDEPGEQVELKEEAEAPVEDGSQPPPPEPKGDATPEGEKATEKENGDKSEAQKPSEKAEAGPEGVAPAPEGEKKQKPARKRRMVEEIGVELVVLDLPDLPEDKLAQSVQKLQDLTLRDLEKQEREKAANSLEAFIFETQDKLYQPEYQEVSTEEQREEISGKLSAASTWLEDEGVGATTVMLKEKLAELRKLCQGLFFRVEERKKWPERLSALDNLLNHSSMFLKGARLIPEMDQIFTEVEMTTLEKVINETWAWKNATLAEQAKLPATEKPVLLSKDIEAKMMALDREVQYLLNKAKFTKPRPRPKDKNGTRAEPPLNASASDQGEKVIPPAGQTEDAEPISEPEKVETGSEPGDTEPLELGGPGAEPEQKEQSTGQKRPLKNDEL

SEQ ID NO: 740084 - protein, 637 aa, Homo sapiens
YESKGIKAHFNLDESGVLSLDRVESVFETLVEVLLKAVGKEELGKNINADEAAAMGAVYQAAALSKAFKVKPFVVRDAVVYPILVEFTREVEEEPGIHSLKHNKRVLFSRMGPYPQRKVITFNRYSHDFNFHINYGDLGFLGPEDLRVFGSQNLTTVKLKGVGDSFKKYPDYESKGIKAHFNLDESGVLSLDRVESVFETLVEDSAEEESTLTKLGNTISSLFGGGTTPDAKENGTDTVQEEEESPAEGSKDEPGEQVELKEEAEAPVEDGSQPPPPEPKGDATPEGEKATEKENGDKSEAQKPSEKAEAGPEGVAPAPEGEKKQKPARKRRMVEEIGVELVVLDLPDLPEDKLAQSVQKLQDLTLRDLEKQEREKAANSLEAFIFETQDKLYQPEYQEVSTEEQREEISGKLSAASTWLEDEGVGATTVMLKEKLAELRKLCQGLFFRVEERKKWPERLSALDNLLNHSSMFLKGARLIPEMDQIFTEVEMTTLEKVINETWAWKNATLAEQAKLPATEKPVLLSKDIEAKMMALDREVQYLLNKAKFTKPRPRPKDKNGTRAEPPLNASASDQGEKVIPPAGQTEDAEPISEPEKVETGSEPGDTEPLELGGPGAEPEQKEQSTGQKRPLKNDEL

SEQ ID NO: 740085 - protein, 480 aa, Homo sapiens
RCESMSIGQSDSAIISAWASPGRFNLDESGVLSLDRVESVFETLVEDSAEEESTLTKLGNTISSLFGGGTTPDAKENGTDTVQEEEESPAEGSKDEPGEQVELKEEAEAPVEDGSQPPPPEPKGDATPEGEKATEKENGDKSEAQKPSEKAEAGPEGVAPAPEGEKKQKPARKRRMVEEIGVELVVLDLPDLPEDKLAQSVQKLQDLTLRDLEKQEREKAANSLEAFIFETQDKLYQPEYQEVSTEEQREEISGKLSAASTWLEDEGVGATTVMLKEKLAELRKLCQGLFFRVEERKKWPERLSALDNLLNHSSMFLKGARLIPEMDQIFTEVEMTTLEKVINETWAWKNATLAEQAKLPATEKPVLLSKDIEAKMMALDREVQYLLNKAKFTKPRPRPKDKNGTRAEPPLNASASDQGEKVIPPAGQTEDAEPISEPEKVETGSEPGDTEPLELGGPGAEPEQKEQSTGQKRPLKNDEL

SEQ ID NO: 740086 - protein, 1076 aa, Homo sapiens; identical to SEQ ID NO: 740080

SEQ ID NO: 740087 - protein, 1076 aa, Homo sapiens; identical to SEQ ID NO: 740080

SEQ ID NO: 740088 - protein, 1076 aa, Homo sapiens; identical to SEQ ID NO: 740080

SEQ ID NO: 740089 - protein, 163 aa, Homo sapiens
CCGDSKDLPGRPNTEVEMTTLEKVINETWAWKNATLAEQAKLPATEKPVLLSKDIEAKMMALDREVQYLLNKAKFTKPRPRPKDKNGTRAEPPLNASASDQGEKVIPPAGQTEDAEPISEPEKVETGSEPGDTEPLELGGPGAEPEQKEQSTGQKRPLKNDEL

SEQ ID NO: 740090 - protein, 1076 aa, Homo sapiens; identical to SEQ ID NO: 740080

SEQ ID NO: 740091 - protein, 66 aa, Homo sapiens
  misc_feature (5)..(5): Xaa can be any naturally occurring amino acid
  misc_feature (8)..(8): Xaa can be any naturally occurring amino acid
SCNFXQRXYEVLSHPCDLEVWRRGREGQLTGSFCSTSVVKNGNCSPPQPHSLFPTHIGPKFGKNHY

SEQ ID NO: 740092 - protein, 1007 aa, Homo sapiens
RKEVAGVDGGAGRPPLLGETACELRGRVGSAREGRADAERSASHRGARSSAPGLSPLAGAGRDPFPGVGAAAFVRGTMADKVRRQRPRRRVCWALVAVLLADLLALSDTLAVMSVDLGSESMKVAIVKPGVPMEIVLNKESRRKTPVIVTLKENERFFGDSAASMAIKNPKATLRYFQHLLGKQADNPHVALYQARFPEHELTFDPQRQTVHFQISSQLQFSPEEVLGMVLNYSRSLAEDFAEQPIKDAVITVPVFFNQAERRAVLQAARMAGLKVLQLINDNTATALSYGVFRRKDINTTAQNIMFYDMGSGSTVCTIVTYQMVKTKEAGMQPQLQIRGVGFDRTLGGLEMELRLRERLAGLFNEQRKGQRAKDVRENPRAMAKLLREANRLKTVLSANADHMAQIEGLMDDVDFKAKVTRVEFEELCADLFERVPGPVQQALQSAEMSLDEIEQVILVGGATRVPRVQEVLLKAVGKEELGKNINADEAAAMGAVYQAAALSKAFKVKPFVVRDAVVYPILVEFTREVEEEPGIHSLKHNKRVLFSRMGPYPQRKVITFNRYSHDFNFHINYGDLGFLGPEDLRVFGSQNLTTVKLKGVGDSFKKYPDYESKGIKAHFNLDESGVLSLDRVESVFETLVEDSAEEESTLTKLGNTISSLFGGGTTPDAKENGTDTVQEEEESPAEGSKDEPGEQVELKEEAEAPVEDGSQPPPPEPKGDATPEGEKATEKENGDKSEAQKPSEKAEAGPEGVAPAPEGEKKQKPARKRRMVEEIGVELVVLDLPDLPEDKLAQSVQKLQDLTLRDLEKQEREKAANSLEAFIFETQDKLYQPEYQEVSTEEQREEISGKLSAASTWLEDEGVGATTVMLKEKLAELRKLCQGLFFRVEERKKWPERLSALDNLLNHSSMFLKGARLIPEMDQIFTEVEMTTLEKVINETWAWKNATLAEQAKLPATEKPVLLSKDIEAKMMALDREVQYLLNKAKFTKPRPRPKDKNAQVPARFV

SEQ ID NO: 740093 - protein, 695 aa, Homo sapiens
RKEVAGVDGGAGRPPLLGETACELRGRVGSAREGRADAERSASHRGARSSAPGLSPLAGAGRDPFPGVGAAAFVRGTMADKVRRQRPRRRVCWALVAVLLADLLALSDTLAVMSVDLGSESMKVAIVKPGVPMEIVLNKESRRKTPVIVTLKENERFFGDSAASMAIKNPKATLRYFQHLLGKQADNPHVALYQARFPEHELTFDPQRQTVHFQISSQLQFSPEEVLGMVLNYSRSLAEDFAEQPIKDAVITVPVFFNQAERRAVLQAARMAGLKVLQLINDNTATALSYGVFRRKDINTTAQNIMFYDMGSGSTVCTIVTYQMVKTKEAGMQPQLQIRGVGFDRTLGGLEMELRLRERLAGLFNEQRKGQRAKDVRENPRAMAKLLREANRLKTVLSANADHMAQIEGLMDDVDFKAKVTRVEFEELCADLFERVPGPVQQALQSAEMSLDEIEQVILVGGATRVPRVQEVLLKAVGKEELGKNINADEAAAMGAVYQAAALSKAFKVKPFVVRDAVVYPILVEFTREVEEEPGIHSLKHNKRVLFSRMGPYPQRKVITFNRYSHDFNFHINYGDLGFLGPEDLRVFGSQNLTTVKLKGVGDSFKKYPDYESKGIKAHFNLDESGVLSLDRVESVFETLVEDSAEEESTLTKLGNTISSLFGGGTTPYLRLGSPSSSIPSVAGARAAASAPRQE

SEQ ID NO: 740094 - protein, 696 aa, Homo sapiens
RKEVAGVDGGAGRPPLLGETACELRGRVGSAREGRADAERSASHRGARSSAPGLSPLAGAGRDPFPGVGAAAFVRGTMADKVRRQRPRRRVCWALVAVLLADLLALSDTLAVMSVDLGSESMKVAIVKPGVPMEIVLNKESRRKTPVIVTLKENERFFGDSAASMAIKNPKATLRYFQHLLGKQADNPHVALYQARFPEHELTFDPQRQTVHFQISSQLQFSPEEVLGMVLNYSRSLAEDFAEQPIKDAVITVPVFFNQAERRAVLQAARMAGLKVLQLINDNTATALSYGVFRRKDINTTAQNIMFYDMGSGSTVCTIVTYQMVKTKEAGMQPQLQIRGVGFDRTLGGLEMELRLRERLAGLFNEQRKGQRAKDVRENPRAMAKLLREANRLKTVLSANADHMAQIEGLMDDVDFKAKVTRVEFEELCADLFERVPGPVQQALQSAEMSLDEIEQVILVGGATRVPRVQEVLLKAVGKEELGKNINADEAAAMGAVYQAAALSKAFKVKPFVVRDAVVYPILVEFTREVEEEPGIHSLKHNKRVLFSRMGPYPQRKVITFNRYSHDFNFHINYGDLGFLGPEDLRVFGSQNLTTVKLKGVGDSFKKYPDYESKGIKAHFNLDESGVLSLDRVESVFETLVEDSAEEESTLTKLGNTISSLFGGGTTPDAKENGTDTVQVSSGWSQGSMEDGGGCR

SEQ ID NO: 740095 - protein, 179 aa, Homo sapiens
YESKGIKAHFNLDESGVLSLDRVESVFETLVEVLLKAVGKEELGKNINADEAAAMGAVYQAAALSKAFKVKPFVVRDAVVYPILVEFTREVEEEPGIHSLKHNKRVLFSRMGPYPQRKVITFNRYSHDFNFHINYGDLGFLGPEDLRVFGSQNLTTVKLKGVGDSFKGARAAASAPRQE

SEQ ID NO: 740096 - protein, 128 aa, Homo sapiens
RHEGAQGTFKPLSGEGSCQPCPANSHSNTIVISRLPVPRLSQSWGRRSGGKRGTMADKVRRQRPRRRVCWALVAVLLADLLALSDTLAVMSVDLGSESMKVAIVKPGVPMEIVLNKESRCLEGFLNYI

SEQ ID NO: 740097 - protein, 85 aa, Homo sapiens
KSAHNSSNSTRVTFDYEVHIIHQAFNLCHVVSVGTEDLFERVPGPVQQALQSAEMSLDEIEQVILVGGATRVPRVQEVLLKAVGK

SEQ ID NO: 740098 - protein, 999 aa, Homo sapiens; identical to SEQ ID NO: 740077

SEQ ID NO: 740099 - protein, 788 aa, Homo sapiens
DFKAKVTRVEFEELCADLFERVLGLYSRPSIVTYQMVKTKEAGMQPQLQIRGVGFDRTLGGLEMELRLRERLAGLFNEQRKGQRAKDVRENPRAMAKLLREANRLKTVLSANADHMAQIEGLMDDVDFKAKVTRVEFEELCADLFERVPGPVQQALQSAEMSLDEIEQVILVGGATRVPRVQEVLLKAVGKEELGKNINADEAAAMGAVYQAAALSKAFKVKPFVVRDAVVYPILVEFTREVEEEPGIHSLKHNKRVLFSRMGPYPQRKVITFNRYSHDFNFHINYGDLGFLGPEDLRVFGSQNLTTVKLKGVGDSFKKYPDYESKGIKAHFNLDESGVLSLDRVESVFETLVEDSAEEESTLTKLGNTISSLFGGGTTPDAKENGTDTVQEEEESPAEGSKDEPGEQVELKEEAEAPVEDGSQPPPPEPKGDATPEGEKATEKENGDKSEAQKPSEKAEAGPEGVAPAPEGEKKQKPARKRRMVEEIGVELVVLDLPDLPEDKLAQSVQKLQDLTLRDLEKQEREKAANSLEAFIFETQDKLYQPEYQEVSTEEQREEISGKLSAASTWLEDEGVGATTVMLKEKLAELRKLCQGLFFRVEERKKWPERLSALDNLLNHSSMFLKGARLIPEMDQIFTEVEMTTLEKVINETWAWKNATLAEQAKLPATEKPVLLSKDIEAKMMALDREVQYLLNKAKFTKPRPRPKDKNGTRAEPPLNASASDQGEKVIPPAGQTEDAEPISEPEKVETGSEPGDTEPLELGGPGAEPEQKEQSTGQKRPLKNDEL

SEQ ID NO: 740100 - protein, 647 aa, Homo sapiens
GYSEDPGAWGCTAGLQSAEMSLDEIEQVILVGGATRVPRVQEVLLKAVGKEELGKNINADEAAAMGAVYQAAALSKAFKVKPFVVRDAVVYPILVEFTREVEEEPGIHSLKHNKRVLFSRMGPYPQRKVITFNRYSHDFNFHINYGDLGFLGPEDLRVFGSQNLTTVKLKGVGDSFKKYPDYESKGIKAHFNLDESGVLSLDRVESVFETLVEDSAEEESTLTKLGNTISSLFGGGTTPDAKENGTDTVQEEEESPAEGSKDEPGEQVELKEEAEAPVEDGSQPPPPEPKGDATPEGEKATEKENGDKSEAQKPSEKAEAGPEGVAPAPEGEKKQKPARKRRMVEEIGVELVVLDLPDLPEDKLAQSVQKLQDLTLRDLEKQEREKAANSLEAFIFETQDKLYQPEYQEVSTEEQREEISGKLSAASTWLEDEGVGATTVMLKEKLAELRKLCQGLFFRVEERKKWPERLSALDNLLNHSSMFLKGARLIPEMDQIFTEVEMTTLEKVINETWAWKNATLAEQAKLPATEKPVLLSKDIEAKMMALDREVQYLLNKAKFTKPRPRPKDKNGTRAEPPLNASASDQGEKVIPPAGQTEDAEPISEPEKVETGSEPGDTEPLELGGPGAEPEQKEQSTGQKRPLKNDEL

SEQ ID NO: 740101 - protein, 1076 aa, Homo sapiens; identical to SEQ ID NO: 740080

SEQ ID NO: 740102 - protein, 461 aa, Homo sapiens
MDTDLSKPGLACSGLDRVESVFETLVEDSAEEESTLTKLGNTISSLFGGGTTPDAKENGTDTVQEEEESPAEGSKDEPGEQVELKEEAEAPVEDGSQPPPPEPKGDATPEGEKATEKENGDKSEAQKPSEKAEAGPEGVAPAPEGEKKQKPARKRRMVEEIGVELVVLDLPDLPEDKLAQSVQKLQDLTLRDLEKQEREKAANSLEAFIFETQDKLYQPEYQEVSTEEQREEISGKLSAASTWLEDEGVGATTVMLKEKLAELRKLCQGLFFRVEERKKWPERLSALDNLLNHSSMFLKGARLIPEMDQIFTEVEMTTLEKVINETWAWKNATLAEQAKLPATEKPVLLSKDIEAKMMALDREVQYLLNKAKFTKPRPRPKDKNGTRAEPPLNASASDQGEKVIPPAGQTEDAEPISEPEKVETGSEPGDTEPLELGGPGAEPEQKEQSTGQKRPLKNDEL

SEQ ID NO: 740103 - protein, 1076 aa, Homo sapiens; identical to SEQ ID NO: 740080

SEQ ID NO: 740104 - protein, 144 aa, Homo sapiens
AWSLSWSHPQAWKNATLAEQAKLPATEKPVLLSKDIEAKMMALDREVQYLLNKAKFTKPRPRPKDKNGTRAEPPLNASASDQGEKVIPPAGQTEDAEPISEPEKVETGSEPGDTEPLELGGPGAEPEQKEQSTGQKRPLKNDEL

SEQ ID NO: 740105 - protein, 1076 aa, Homo sapiens; identical to SEQ ID NO: 740080

SEQ ID NO: 740106 - protein, 1046 aa, Homo sapiens
  misc_feature (1038)..(1038): Xaa can be any naturally occurring amino acid
  misc_feature (1045)..(1045): Xaa can be any naturally occurring amino acid
RKEVAGVDGGAGRPPLLGETACELRGRVGSAREGRADAERSASHRGARSSAPGLSPLAGAGRDPFPGVGAAAFVRGTMADKVRRQRPRRRVCWALVAVLLADLLALSDTLAVMSVDLGSESMKVAIVKPGVPMEIVLNKESRRKTPVIVTLKENERFFGDSAASMAIKNPKATLRYFQHLLGKQADNPHVALYQARFPEHELTFDPQRQTVHFQISSQLQFSPEEVLGMVLNYSRSLAEDFAEQPIKDAVITVPVFFNQAERRAVLQAARMAGLKVLQLINDNTATALSYGVFRRKDINTTAQNIMFYDMGSGSTVCTIVTYQMVKTKEAGMQPQLQIRGVGFDRTLGGLEMELRLRERLAGLFNEQRKGQRAKDVRENPRAMAKLLREANRLKTVLSANADHMAQIEGLMDDVDFKAKVTRVEFEELCADLFERVPGPVQQALQSAEMSLDEIEQVILVGGATRVPRVQEVLLKAVGKEELGKNINADEAAAMGAVYQAAALSKAFKVKPFVVRDAVVYPILVEFTREVEEEPGIHSLKHNKRVLFSRMGPYPQRKVITFNRYSHDFNFHINYGDLGFLGPEDLRVFGSQNLTTVKLKGVGDSFKKYPDYESKGIKAHFNLDESGVLSLDRVESVFETLVEDSAEEESTLTKLGNTISSLFGGGTTPDAKENGTDTVQEEEESPAEGSKDEPGEQVELKEEAEAPVEDGSQPPPPEPKGDATPEGEKATEKENGDKSEAQKPSEKAEAGPEGVAPAPEGEKKQKPARKRRMVEEIGVELVVLDLPDLPEDKLAQSVQKLQDLTLRDLEKQEREKAANSLEAFIFETQDKLYQPEYQEVSTEEQREEISGKLSAASTWLEDEGVGATTVMLKEKLAELRKLCQGLFFRVEERKKWPERLSALDNLLNHSSMFLKGARLIPEMDQIFTEVEMTTLEKVINETWAWKNATLAEQAKLPATEKPVLLSKDIEAKMMALDREVQYLLNKAKFTKPRPRPKDKNGTRAEPPLNASASDQGEKVIPPAGQTEDAEGISEPRILXGLPKKFXL

SEQ ID NO: 740107 - protein, 1096 aa, Homo sapiens
RKEVAGVDGGAGRPPLLGETACELRGRVGSAREGRADAERSASHRGARSSAPGLSPLAGAGRDPFPGVGAAAFVRGTMADKVRRQRPRRRVCWALVAVLLADLLALSDTLAVMSVDLGSESMKVAIVKPGVPMEIVLNKESRRKTPVIVTLKENERFFGDSAASMAIKNPKATLRYFQHLLGKQADNPHVALYQARFPEHELTFDPQRQTVHFQISSQLQFSPEEVLGMVLNYSRSLAEDFAEQPIKDAVITVPVFFNQAERRAVLQAARMAGLKVLQLINDNTATALSYGVFRRKDINTTAQNIMFYDMGSGSTVCTIVTYQMVKTKEAGMQPQLQIRGVGFDRTLGGLEMELRLRERLAGLFNEQRKGQRAKDVRENPRAMAKLLREANRLKTVLSANADHMAQIEGLMDDVDFKAKVTRVEFEELCADLFERVPGPVQQALQSAEMSLDEIEQVILVGGATRVPRVQEVLLKAVGKEELGKNINADEAAAMGAVYQAAALSKAFKVKPFVVRDAVVYPILVEFTREVEEEPGIHSLKHNKRVLFSRMGPYPQRKVITFNRYSHDFNFHINYGDLGFLGPEDLRVFGSQNLTTVKLKGVGDSFKKYPDYESKGIKAHFNLDESGVLSLDRVESVFETLVEDSAEEESTLTKLGNTISSLFGGGTTPDAKENGTDTVQEEEESPAEGSKDEPGEQVELKEEAEAPVEDGSQPPPPEPKGDATPEGEKATEKENGDKSEAQKPSEKAEAGPEGVAPAPEGEKKQKPARKRRMVEEIGVELVVLDLPDLPEDKLAQSVQKLQDLTLRDLEKQEREKAANSLEAFIFETQDKLYQPEYQEVSTEEQREEISGKLSAASTWLEDEGVGATTVMLKEKLAELRKLCQGLFFRVEERKKWPERLSALDNLLNHSSMFLNGGPGSSQRWNTIFIERVEIDTPSRSNTSLNETLGACERTAHFCDPKQRLRMARAHTHTPAEAPQTETRRQQIESAPGPEHEDATGATTSAQESTKDGREPRPKDQKREEPGEPEHRPEKTRRGKEAATEKGEHEPKRDDNRRTVSTPRDEQADMIARSSRHTGKDRRGLDKDSEGRERTTDT

SEQ ID NO: 740108 - protein, 611 aa, Homo sapiens
RKEVAGVDGGAGRPPLLGETACELRGRVGSAREGRADAERSASHRGARSSAPGLSPLAGAGRDPFPGVGAAAFVRGTMADKVRRQRPRRRVCWALVAVLLADLLALSDTLAVMSVDLGSESMKVAIVKPGVPMEIVLNKESRRKTPVIVTLKENERFFGDSAASMAIKNPKATLRYFQHLLGKQADNPHVALYQARFPEHELTFDPQRQTVHFQISSQLQFSPEEVLGMVLNYSRSLAEDFAEQPIKDAVITVPVFFNQAERRAVLQAARMAGLKVLQLINDNTATALSYGVFRRKDINTTAQNIMFYDMGSGSTVCTIVTYQMVKTKEAGMQPQLQIRGVGFDRTLGGLEMELRLRERLAGLFNEQRKGQRAKDVRENPRAMAKLLREANRLKTVLSANADHMAQIEGLMDDVDFKAKVTRVEFEELCADLFERVPGPVQQALQSAEMSLDEIEQVILVGGATRVPRVQEVLLKAVGKEELGKNINADEAAAMGAVYQAAALSKAFKVKPFVVRDAVVYPILVEFTREVEEEPGIHSLKHNKRVLFSRMGPYPQRKVITFNRYSHDFNFHINYGDLGFLGPEDLRVFGSQNLTTVKLKGVGDSFKLVGQV

SEQ ID NO: 740109 - protein, 284 aa, Homo sapiens
MTDVPATFTQAECNGDKPPENGQQTITKISEELTDVDSPLPHYRVEPSLEGALTKGSQEERRKLQGNMLLNSSMEDKMLKENPEEKLFIVHKAITDLSLQETSADEMTFREGHQWEKIPLSGSNQEIRRQKERITEQPLKEEEDEDRKNKGHQAAEIEWLGFRKPSQADMLHSKHDEEQKVWDEEIDDDDDDNCNNDEDEVRVIEFKKKHEEVSQFKEEGDASEDSPLSSASSQAVTPDEQPTLGKKSDISRNAYSRYNTISYRKIRKGNTKQRIDEFESMMHL

SEQ ID NO: 740110 - protein, 284 aa, Homo sapiens; identical to SEQ ID NO: 740109

SEQ ID NO: 740111 - protein, 297 aa, Homo sapiens
MKTLSPDRIQPHIMTDVPATFTQAECNGDKPPENGQQTITKISEELTDVDSPLPHYRVEPSLEGALTKGSQEERRKLQGNMLLNSSMEDKMLKENPEEKLFIVHKAITDLSLQETSADEMTFREGHQWEKIPLSGSNQEIRRQKERITEQPLKEEEDEDRKNKGHQAAEIEWLGFRKPSQADMLHSKHDEEQKVWDEEIDDDDDDNCNNDEDEVRVIEFKKKHEEVSQFKEEGDASEDSPLSSASSQAVTPDEQPTLGKKSDISRNAYSRYNTISYRKIRKGNTKQRIDEFESMMHL

SEQ ID NO: 740112 - protein, 128 aa, Homo sapiens
MMSFENVKEKSREGGPHAHTPEEELCFVVTHYPQVQTTLNLFFHIFKVLTQPLSLLWGCDQKPRTVPTLGNGAWDTCQQHIRTSSWTANTLVIQNQHSRESTVSVCLFMLIRMQHILKTDTLQQFRIC

SEQ ID NO: 740113 - protein, 776 aa, Homo sapiens
MALADKRLENLQIYKVLQCVRNKDKKQIEKLTKLGYPELINYTEPINGLSALHLASVSNDIDMVSFLLDLGAHPDVQDRMGCTPTMRAAELGHELSMEILAKAKADMTIVDNEGKGVLFYCILPTKRHYRCALIALEHGADVNNSTYEGKPIFLRACEDAHDVKDVCLTFLEKGANPNAINSSTGRTALMEASREGVVEIVRGILERGGEVNAFDNDRHHAAHFAAKGGFFDILKLLFAYNGDVGLISINGNTPLHYAAMGGFADCCKYIAQRGCDLKWKNLDHKTPRAVAKEGGFKAASKEIRRAERIANKLARPGAKNPNPLWALRLHDWSVEREAFLREAFAVLDRGDGSISKNDFVMVLEERQDYASSEQLAAIAHLHEKTRGGGVNINEFFKGTRYLNKSFVLGSYGPKKKEKGMGKKGKKGKFVLPLPICVIPEYAFPRRQDGGPPYYMIETYKNVTDSSRFNRDHPPEHPIQDDSVWYIDDSEKVFSNINIITKAGDLASLKKAFESGIPVDMKDNYYKTPLMTACASGNIDVVKFLLEKGANVNATDNFLWTPLHFACHAGQQDIVELLVESGALIDAASINNSTPLNRAIESCRLDTVKYLLDIGAKFQLENRKGHSAMDVAKAYADYRIIDLIKEKLDNLPKPAENQKLKGKTPPILKTEGPEIKKEEELLSSIYGVPTTSEGKKVQKGNVVHLNSLITSGYTKKVDITFIPRRIWSPEATTAELIRKRELRRERFTHEVDFDDFMMPFQKNITEKARALEAALKT

SEQ ID NO: 740114 - protein, 791 aa, Homo sapiens
MALADKRLENLQIYKVLQCVRNKDKKQIEKLTKLGYPELINYTEPINGLSALHLASVSNDIDMVSFLLDLGAHPDVQDRMGCTPTMRAAELGHELSMEILAKAKADMTIVDNEGKGMCTQSSMPYASSMKGVLFYCILPTKRHYRCALIALEHGADVNNSTYEGKPIFLRACEDAHDVKDVCLTFLEKGANPNAINSSTGRTALMEASREGVVEIVRGILERGGEVNAFDNDRHHAAHFAAKGGFFDILKLLFAYNGDVGLISINGNTPLHYAAMGGFADCCKYIAQRGCDLKWKNLDHKTPRAVAKEGGFKAASKEIRRAERIANKLARPGAKNPNPLWALRLHDWSVEREAFLREAFAVLDRGDGSISKNDFVMVLEERQDYASSEQLAAIAHLHEKTRGGGVNINEFFKGTRYLNKSFVLGSYGPKKKEKGMGKKGKKGKFVLPLPICVIPEYAFPRRQDGGPPYYMIETYKNVTDSSRFNRDHPPEHPIQDDSVWYIDDSEKVFSNINIITKAGDLASLKKAFESGIPVDMKDNYYKTPLMTACASGNIDVVKFLLEKGANVNATDNFLWTPLHFACHAGQQDIVELLVESGALIDAASINNSTPLNRAIESCRLDTVKYLLDIGAKFQLENRKGHSAMDVAKAYADYRIIDLIKEKLDNLPKPAENQKLKGKTPPILKTEGPEIKKEEELLSSIYGVPTTSEGKKVQKGNVVHLNSLITSGYTKKVDITFIPRRIWSPEATTAELIRKRELRRERFTHEVDFDDFMMPFQKNITEKARALEAALKT

SEQ ID NO: 740115 - protein, 295 aa, Homo sapiens
MALADKRLENLQIYKVLQCVRNKDKKQIEKLTKLGYPELINYTEPINGLSALHLASVSNDIDMVSFLLDLGAHPDVQDRMGCTPTMRAAELGHELSMEILAKAKADMTIVDNEGKGVLFYCILPTKRHYRCALIALEHGADVNNSTYEGKPIFLRACEDAHDVKDVCLTFLEKGANPNAINSSTGRTALMEASREGVVEIVRGILERGGEVNAFDNDRHHAAHFAAKGGFFDILKLLFAYNGDVGLISINGNTPLHYAAMGGFADCCKYIAQRGCDLEWKNLDHIRRAERIASSR

SEQ ID NO: 740116 - protein, 776 aa, Homo sapiens; identical to SEQ ID NO: 740113

SEQ ID NO: 740117 - protein, 239 aa, Homo sapiens
MALADKRLENLQIYKVLQCVRNKDKKQIEKLTKLGYPELINYTEPINGLSALHLASVSNDIDMVSFLLDLGAHPDVQDRMGCTPTMRAAELGHELSMEILAKAKADMTIVDNEGKGVLFYCILPTKRHYRCALIALEHGADVNNSTYEGKPIFLRACEDAHDVKDVCLTFLEKGANPNAINSSTGRTALMEASREGVVEIVRGILERGGEVNAFDNDRHHAAHFAAKGGFFDVIIYSLL

SEQ ID NO: 740118 - protein, 95 aa, Homo sapiens
PIVDKIRTIAQAVYGAKDIELCPEAQVKIDRYTQQGFGNLPICMAKTDLSLSHQPDKKGVPRDFILPISDVRASIGAGFIYPLVGTGSRESPLWL

SEQ ID NO: 740119 - protein, 137 aa, Homo sapiens
PIVDKIRTIAQAVYGAKDIELCPEAQVKIDRYTQQGFGNLPICMAKTDLSLSHQPDKKGVPRDFILPISDVRASIGAGFIYPLVGTSRSVAQAKVQWHDLGSLQPPPPGFTPFSCLSLPSSRDYRHPPPHLANFLYF

SEQ ID NO: 740120 - protein, 427 aa, Homo sapiens [sequence omitted]

SEQ ID NO: 740121 - protein, 122 aa, Homo sapiens
LPNGSLPASVELALPGTALAMRLRHRQRALPTTLATASKPLFMPGTAPKDLAHAWDRPQGPHWLQSAAGRVVGEGMDTPWAGAGRTRPIIGHLVAMATTQGCLRLKICGLQGAPALALAESQ

SEQ ID NO: 740122 - protein, 276 aa, Homo sapiens
AKRAAWVRGLLIEFRRRGSLCRERAREMEMGRRIHLELRNRTPSDVKELVLDNSRSNEGKLEGLTDEFEELEFLSTINVGLTSIANLPKLNKLKKLELSDNRVSGGLEVLAEKCPNLTHLNLSGNKIKDLSTIEPLKKLENLKSLDLFNCEVTNLNDYRENVFKLLPQLTYLDGYDRDDKEAPDSDAEGYVEGLDDEEEDEDEEEYDEDAQVVEDEEDEDEEEEGEEEDVSGEEEEDEEGYNDGEVDDEEDEEELGEEERGQKRKREPEDEGEDDD

SEQ ID NO: 740123 - protein, 246 aa, Homo sapiens
AKRAAWVRGLLIEFRRRGSLCRERAREMEMGRRIHLELRNRTPSDVKELVLDNSRSNEGKLEGLTDEFEELEFLSTINVGLTSIANLPKLNKLKKLELSDNRVSGGLEVLAEKCPNLTHLNLSGNKIKDLSTIEPLKKLENLKSLDLFNCEVTNLNDYRENVFKLLPQLTYLDGYDRDDKEAPDSDAEGYVEGLDDEEEDEDEEEYDEDAQVVEDEDDEEDEEELGEEERGQKRKREPEDEGEDDD

SEQ ID NO: 740124 - protein, 514 aa, Homo sapiens
NVSYMCQPGYTMELNGSRIRTCTINGTWSGVMPTCRAVTCPTPPQISNGRLEGTNFDWGFSISYICSPGYELSFPAVLTCVGNGTWSGEVPQCLPKFCGDPGIPAQGKREGKSFIYQSEVSFSCNFPFILVGSSTRICQADGTWSGSSPHCIEPTQTSCENPGVPRHGSQNNTFGFQVGSVVQFHCKKGHLLQGSTTRTCLPDLTWSGIQPECIPHSCKQPETPAHANVVGMDLPSHGYTLIYTCQPGFFLAGGTEHRVCRSDNTWTGKVPICEAGSKILVKDPRPALGTPSPKLSVPDDVFAQNYIWKGSYNFKGRKQPMTLTVTSFNASTGRVNATLSNSNMELLLSGVYKSQEARLMLRIYLIKVPAHASVKKMKEENWAMDGFVSAEPDGATYVFQGFIQGKDYGQFGLQRLGLNMSEGSNSSNQPHGTNSSSVAIAILVPFFALIFAGFGFYLYKQRTAPKTQYTGCSVHENNNGQAAFENPMYDTNAKSVEGKAVRFDPNLNTVCTMV

SEQ ID NO: 740125 - protein, 85 aa, Homo sapiens
SGPFDCHLPDAIPSLRLPSWVLGPKVQSLSSPGALAIPWILRGKRAKSFTAGYCGDTRLPPASPTTNLDARSSHRNENLEVKGLE

SEQ ID NO: 740126 - protein, 444 aa, Homo sapiens
FNQVAFPLQYTPRKFVIHPESNNLIIIETDHNAYTEATKAQRKQQMAEEMVEAAGEDERELAAEMAAAFLNENLPESIFGAPKAGNGQWASVIRVMNPIQGNTLDLVQLEQNEAAFSVAVCRFSNTGEDWYVLVGVAKDLILNPRSVAGGFVYTYKLVNNGEKLEFLHKTPVEEVPAAIAPFQGRVLIGVGKLLRVYDLGKKKLLRKCENKHIANYISGIQTIGHRVIVSDVQESFIWVRYKRNENQLIIFADDTYPRWVTTASLLDYDTVAGADKFGNICVVRLPPNTNDEVDEDPTGNKALWDRGLLNGASQKAEVIMNYHVGETVLSLQKTTLIPGGSESLVYTTLSGGIGILVPFTSHEDHDFFQHVEMHLRSEHPPLCGRDHLSFRSYYFPVKNVIDGDLCEQFNSMEPNKQKNVSEELDRTPPEVSKKLEDIRTRYAF

SEQ ID NO: 740127 - protein, 444 aa, Homo sapiens; identical to SEQ ID NO: 740126

SEQ ID NO: 740128 - protein, 444 aa, Homo sapiens; identical to SEQ ID NO: 740126

SEQ ID NO: 740129 - protein, 444 aa, Homo sapiens; identical to SEQ ID NO: 740126

SEQ ID NO: 740130 - protein, 444 aa, Homo sapiens; identical to SEQ ID NO: 740126

SEQ ID NO: 740131 - protein, 144 aa, Homo sapiens
RPPRPRWSCGPQSSIHTSPLPPPPISLSQPWAPGQVDSPRHSSTAFPGPGDPLQRRGSLRPGSRSADLPFFPASSGIVEAPYGDSSQSLFVGDRDRDKTMEVTGFGVTRCSSLPFPRHASCCRSLVKSLSLIPFLGDSSSLGLQ

SEQ ID NO: 740132 - protein, 428 aa, Homo sapiens
MGGLFSRWRTKPSTVEVLESIDKEIQALEEFREKNQRLQKLWVGRLILYSSVLYLFTCLIVYLWYLPDEFTARLAMTLPFFAFPLIIWSIRTVIIFFFSKRTERNNEALDDLKSQRKKILEEVMEKETYKTAKLILERFDPDSKKAKECEPPSAGAAVTARPGQEIRQRTAAQRNLSPTPASPNQGPPPQVPVSPGPPKDSSAPGGPPERTVTPALSSNVLPRHLGSPATSVPGMGLHPPGPPLARPILPRERGALDRIVEYLVGDGPQNRYALICQQCFSHNGMALKEEFEYIAFRCAYCFFLNPARKTRPQAPRLPEFSFEKRQVVEGSSSVGPLPSGSVLSSDNQFNEESLEHDVLDDNTEQTDDKIPATEQTNQVIEKASDSEEPEEKQETENEEASVIETNSTVPGADSIPDPELSGESLTAE

SEQ ID NO: 740133 - protein, 429 aa, Homo sapiens
MCWPSYLDERSGPSTVDVLESIDQEIQALEEFREKNQRLQKLWVGRLILYSSVLYLFTCLIVYLWYLPDEFTARLAMTLPFFAFPLIIWSIRTVIIFFFSKRTERNNEALDDLKSQRKKILEEVMEKETYKTAKLILERFDPDSKKAKECEPPSAGAAVTARPGQEIRQRTAAQRNLSPTPASPNQGPPPQVPVSPGPPKDSSAPGGPPERTVTPALSSNVLPRHLGSPATSVPGMGLHPPGPPLARPILPRERGALDRIVEYLVGDGPQNRYALICQQCFSHNGMALKEEFEYIAFRCAYCFFLNPARKTRPQAPRLPEFSFEKRQVVEGSSSVGPLPSGSVLSSDNQFNEESLEHDVLDDNTEQTDDKIPATEQTNQVIEKASDSEEPEEKQETENEEASVIETNSTVPGADSIPDPELSGESLTAE

SEQ ID NO: 740134 - protein, 360 aa, Homo sapiens
DFCESEQTVPFYRVKPLIIWSIRTVIIFFFSKRTERNNEALDDLKSQRKKILEEVMEKETYKTAKLILERFDPDSKKAKECEPPSAGAAVTARPGQEIRQRTAAQRNLSPTPASPNQGPPPQVPVSPGPPKDSSAPGGPPERTVTPALSSNVLPRHLGSPATSVPGMGLHPPGPPLARPILPRERGALDRIVEYLVGDGPQNRYALICQQCFSHNGMALKEEFEYIAFRCAYCFFLNPARKTRPQAPRLPEFSFEKRQVVEGSSSVGPLPSGSVLSSDNQFNEESLEHDVLDDNTEQTDDKIPATEQTNQVIEKASDSEEPEEKQETENEEASVIETNSTVPGADSIPDPELSGESLTAE

SEQ ID NO: 740135 - protein, 144 aa, Homo sapiens [sequence omitted]

SEQ ID NO: 740136 - protein, 428 aa, Homo sapiens; identical to SEQ ID NO: 740132

SEQ ID NO: 740137 - protein, 305 aa, Homo sapiens
MEKETYKTAKLILERFDPDSKKAKECEPPSAGAAVTARPGQEIRQRTAAQRNLSPTPASPNQGPPPQVPVSPGPPKDSSAPGGPPERTVTPALSSNVLPRHLGSPATSVPGMGLHPPGPPLARPILPRERGALDRIVEYLVGDGPQNRYALICQQCFSHNGMALKEEFEYIAFRCAYCFFLNPARKTRPQAPRLPEFSFEKRQVVEGSSSVGPLPSGSVLSSDNQFNEESLEHDVLDDNTEQTDDKIPATEQTNQVIEKASDSEEPEEKQETENEEASVIETNSTVPGADSIPDPELSGESLTAE

SEQ ID NO: 740138 - protein, 428 aa, Homo sapiens; identical to SEQ ID NO: 740132

SEQ ID NO: 740139 - protein, 93 aa, Homo sapiens
GGGEGQPNPSLSPPSPESLEHDVLDDNTEQTDDKIPATEQTNQVIEKASDSEEPEEKQETENEEASVIETNSTVPGADSIPDPELSGESLTAE

SEQ ID NO: 740140 - protein, 240 aa, Homo sapiens
MGGLFSRWRTKPSTVEVLESIDKEIQALEEFREKNQRLQKLWVGRLILYSSVLYLFTCLIVYLWYLPDEFTARLAMTLPFFAFPLIIWSIRTVIIFFFSKRTERNNEALDDLKSQRKKILEEVMEKETYKTAKLILERFDPDSKKAKECEPPSAGAAVTARPGQEIRQRTAAQRNLSPTPASPNQGPPPQVPVSPGPPKDSSAPGGPPERTVTPALSSNVLPRHLGSPATSVPGMGKQST

SEQ ID NO: 740141 - protein, 488 aa, Homo sapiens
MVRPLCRCPRAPPAAAALLPLGAAVAPPPAVAPPSPDRITVRETMSEETATSDNDNSYARVRAVVMTRDDSSGGWLPLGGSGLSSVTVFKVPHQEENGCADFFIRGERLRDKMVVLECMLKKDLIYNKVTPTFHHWKIDDKKFGLTFQSPADARAFDRGIRRAIEDISQGCPESKNEAEGADDLQANEEDSSSSLVKDHLFQQETVVTSEPYRSSNIRPSPFEDLNARRVYMQSQANQITFGQPGLDIQSRSMEYVQRQISKECGSLKSQNRVPLKSIRHVSFQDEDEIVRINPRDILIRRYADYRHPDMWKNDLERDDADSSIQFSKPDSKKSDYLYSCGDETKLSSPKDSVVFKTQPSSLKIKKSKRRKEDGERSRCVYCQERFNHEENVRGKCQDAPDPIKRCIYQVSCMLCAESMLYHCMSDSEGDFSDPCSCDTSDDKFCLRWLALVALSFIVPCMCCYVPLRMCHRCGEACGCCGGKHKAAG

SEQ ID NO: 740142 - protein, 488 aa, Homo sapiens; identical to SEQ ID NO: 740141

SEQ ID NO: 740143 - protein, 488 aa, Homo sapiens; identical to SEQ ID NO: 740141

SEQ ID NO: 740144 - protein, 488 aa, Homo sapiens; identical to SEQ ID NO: 740141

SEQ ID NO: 740145 - protein, 371 aa, Homo sapiens
MVRPLCRCPRAPPAAAALLPLGAAVAPPPAVAPPSPDRITVRETMSEETATSDNDNSYARVRAVVMTRDDSSGGWLPLGGSGLSSVTVFKVPHQEENGCADFFIRGERLRDKMVVLECMLKKDLIYNKVTPTFHHWKIDDKKFGLTFQSPADARAFDRGIRRAIEDISQGCPESKNEAEGADDLQANEEDSSSSLVKDHLFQQETVVTSEPYRSSNIRPSPFEDLNARRVYMQSQANQITFGQPGLDIQSRSMEYVQRQISKECGSLKSQNRVPLKSIRHVSFQDEDEIVRINPRDILIRRYADYRHPDMWKNDLERDDADSSIQFSKPDSKKSDYLYSCGDETKGFSEFALHSSHQVNTHKDKVMLCYPS

SEQ ID NO: 740146 - protein, 398 aa, Homo sapiens
MLGRSGYRALPLGDFDRFQQSSFGFLGSQKGCLSPERGGVGTGADVPQSWPSCLCHGLISFLGFLLLLVTFPISGWFALKIVPTYERMIVFRLGRIRTPQGPGMVLLLPFIDSFQRVDLRTRAFNVPPCKLASKDGAVLSVGADVQFRIWDPVLSVMTVKDLNTATRMTAQNAMTKALLKRPLREIQMEKLKISDQLLLEINDVTRAWGLEVDRVELAVEAVLQPPQDSPAGPNLDSTLQQLALHFLGGSMNSMAGGAPSPGPADTVEMVSEVEPPAPQVGARSSPKQPLAEGLLTALQPFLSEALVSQVGACYQFNVVLPSGTQSAYFLDLTTGRGRVGHGVPDGIPDVVVEMAEADLRALLCRELRPLGAYMSGRLKVKGDLAMAMKLEAVLRALK

SEQ ID NO: 740147 - protein, 378 aa, Homo sapiens
MLGRSGYRALPLGDFDRFQQSSFGFLGSQKGCLSPERGGVGTGADVPQSWPSCLCHGLISFLGFLLLLVTFPISGWFALKLASKDGAVLSVGADVQFRIWDPVLSVMTVKDLNTATRMTAQNAMTKALLKRPLREIQMEKLKISDQLLLEINDVTRAWGLEVDRVELAVEAVLQPPQDSPAGPNLDSTLQQLALHFLGGSMNSMAGGAPSPGPGRGTSGTPGVPVGHPLMLLVGRCPMADLAAPAYAHDCWPGWPTLAWRVKVTGEPCFRPRWRGAQAMCRNNQGVDYRDPITRRSQPSWALIEKESMSPKKCPDKNRHQQTPNVDERTQLSSTHTTRAERQHATQHSATVDNKTIRSQRHTAVATPLLVDIAALMTT

SEQ ID NO: 740148 - protein, 348 aa, Homo sapiens
MLGRSGYRALPLGDFDRFQQSSFGFLGSQKGCLSPERGGVGTGADVPQSWPSCLCHGLISFLGFLLLLVTFPISGWFALKLASKDGAVLSVGADVQFRIWDPVLSVMTVKDLNTATRMTAQNAMTKALLKRPLREIQMEKLKISDQLLLEINDVTRAWGLEVDRVELAVEAVLQPPQDSPAGPNLDSTLQQLALHFLGGSMNSMAGGAPSPGPADTVEMVSEVEPPAPQVGARSSPKQPLAEGLLTALQPFLSEALVSQVGACYQFNVVLPSGTQSAYFLDLTTGRGRVGHGVPDGIPDVVVEMAEADLRALLCRELRPLGAYMSGRLKVKGDLAMAMKLEAVLRALK

SEQ ID NO: 740149 - protein, 311 aa, Homo sapiens
MIVFRLGRIRTPQGPGMVLLLPFIDSFQRVDLRTRAFNVPPCKLASKDGAVLSVGADVQFRIWDPVLSVMTVKDLNTATRMTAQNAMTKALLKRPLREIQMEKLKISDQLLLEINDVTRAWGLEVDRVELAVEAVLQPPQDSPAGPNLDSTLQQLALHFLGGSMNSMAGGAPSPGPADTVEMVSEVEPPAPQVGARSSPKQPLAEGLLTALQPFLSEALVSQVGACYQFNVVLPSGTQSAYFLDLTTGRGRVGHGVPDGIPDVVVEMAEADLRALLCRELRPLGAYMSGRLKVKGDLAMAMKLEAVLRALK

SEQ ID NO: 740150 - protein, 398 aa, Homo sapiens; identical to SEQ ID NO: 740146

SEQ ID NO: 740151 - protein, 356 aa, Homo sapiens
MTDVPQSWPSCLCHGLISFLGFLLLLVTFPISGWFALKIVPTYERMIVFRLGRIRTPQGPGMVLLLPFIDSFQRVDLRTRAFNVPPCKLASKDGAVLSVGADVQFRIWDPVLSVMTVKDLNTATRMTAQNAMTKALLKRPLREIQMEKLKISDQLLLEINDVTRAWGLEVDRVELAVEAVLQPPQDSPAGPNLDSTLQQLALHFLGGSMNSMAGGAPSPGPADTVEMVSEVEPPAPQVGARSSPKQPLAEGLLTALQPFLSEALVSQVGACYQFNVVLPSGTQSAYFLDLTTGRGRVGHGVPDGIPDVVVEMAEADLRALLCRELRPLGAYMSGRLKVKGDLAMAMKLEAVLRALK

SEQ ID NO: 740152 - protein, 401 aa, Homo sapiens
APAPPRVAARVKPEAAARRAGPRRAHWPGRAPRGGAGRVSCQKPCSADVPQSWPSCLCHGLISFLGFLLLLVTFPISGWFALKIVPTYERMIVFRLGRIRTPQGPGMVLLLPFIDSFQRVDLRTRAFNVPPCKLASKDGAVLSVGADVQFRIWDPVLSVMTVKDLNTATRMTAQNAMTKALLKRPLREIQMEKLKISDQLLLEINDVTRAWGLEVDRVELAVEAVLQPPQDSPAGPNLDSTLQQLALHFLGGSMNSMAGGAPSPGPADTVEMVSEVEPPAPQVGARSSPKQPLAEGLLTALQPFLSEALVSQVGACYQFNVVLPSGTQSAYFLDLTTGRGRVGHGVPDGIPDVVVEMAEADLRALLCRELRPLGAYMSGRLKVKGDLAMAMKLEAVLRALK

SEQ ID NO: 740153 - protein, 499 aa, Homo sapiens
MLGRSGYRALPLGDFDRFQQSSFGFLGSQKGCLSPERGGVGTGADVPQSWPSCLCHGLISFLGFLLLLVTFPISGWFALKIVPTYERMIVFRLGRIRTPQGPGMVLLLPFIDSFQRVDLRTRAFNVPPCKVRGFSAALTEELGACPECTVVPGPQPVSHHLRGEGGRRDQKIDGSRRTSLLHTPNPTYLVTPFALEELAAKQVVQAGWPQWACPPCTPSPLSVSLSWLPQQLASKDGAVLSVGADVQFRIWDPVLSVMTVKDLNTATRMTAQNAMTKALLKRPLREIQMEKLKISDQLLLEINDVTRAWGLEVDRVELAVEAVLQPPQDSPAGPNLDSTLQQLALHFLGGSMNSMAGGAPSPGPADTVEMVSEVEPPAPQVGARSSPKQPLAEGLLTALQPFLSEALVSQVGACYQFNVVLPSGTQSAYFLDLTTGRGRVGHGVPDGIPDVVVEMAEADLRALLCRELRPLGAYMSGRLKVKGDLAMAMKLEAVLRALK

SEQ ID NO: 740154 - protein, 398 aa, Homo sapiens; identical to SEQ ID NO: 740146

SEQ ID NO: 740155 - protein, 106 aa, Homo sapiens
IDGASHGTGRQQADVRVGDYWLRSRYHSRSPSLFQVTGLGTKISAGEAGGGGGIKMTQLQPPILPFTEASPCSRHPEKCFVCIILVSPPSSLISRSCYRNTDETMG

SEQ ID NO: 740156 - protein, 106 aa, Homo sapiens; identical to SEQ ID NO: 740155

SEQ ID NO: 740157 - protein, 106 aa, Homo sapiens; identical to SEQ ID NO: 740155

SEQ ID NO: 740158 - protein, 116 aa, Homo sapiens
IVVFYCCTNITTNLVAENNTHLLFHSFCGSEVQAQLSSLQSCNQGVSEGWGLSLIRMLNWGKICFQIYPGCWQNSGPCFHRTESFIFLLAIGYRLPSAFRDHPEFLLGCCKPKIKF

SEQ ID NO: 740159 - protein, 106 aa, Homo sapiens
PSPPWPSHPARKHRLFAEFNPCLNICLFETRCLRGPHGQVRAHSWGRGGEAAEDWTCRFVSNSETPGGESWGQSMDRAHSVGSQTQDSPGFLIKRKETAVRSGSRL

SEQ ID NO: 740160 - protein, 96 aa, Homo sapiens
KRCSMRPQPDPKDPAPIGRLNSRARARKWRATGCSVAEFEYWFHSWLAVRPRASYHKTGRIPAPNSERSQAEMILLCEVRRAVLGTWSSELCSLFL

SEQ ID NO: 740161 - protein, 94 aa, Homo sapiens
KRCSMRPQPDPKDPAPIGRLNSRARARKWRATGCSVAEFEYWFHSWLAVRPRASYHKTGRIPAPNSERSQAEMILLCEVRRAVLGTWSSELYKN

SEQ ID NO: 740162 - protein, 145 aa, Homo sapiens
MLPSSIQISGEPLSGAEVRDICRGLRDNAVRLLSLRGCRLCDRDFGRICRALAGATSLAQLNLNLGVVSSPSRIKQLAEALRTNRSIQSLFLHGSPLTDAGLALLNPALALHPALVALDLGDCMLGDEAINLICGLLPPDGAKSG

SEQ ID NO: 740163 - protein, 316 aa, Homo sapiens
MLPSSIQISGEPLSGAEVRDICRGLRDNAVRLLSLRGCRLCDRDFGRICRALAGATSLAQLNLNLGVVSSPSRIKQLAEALRTNRSIQSLFLHGSPLTDAGLALLNPALALHPALVALDLGDCMLGDEAINLICGLLPPDGAKSGLKELTLSANPGITPKGWSRLAIAVAHSSQVRVLNLDYNPLGDHVAGMLAVAVASSRTLEVLDLEGTGLTNQSAQTLLDMVENYPTALRSLVLAENSISPELQQQICDLLSEGEEEEEVAGGAGDTQEWERGREPAAHQRGSSSWMCPSDPSSQMVLMTSGLGDSLLAETEM

SEQ ID NO: 740164 - protein, 95 aa, Homo sapiens
MDASVVVWSVSCIERVQLVSPVLVMDGGRRDLLQGGRRNGRIPGVQARDLFAQIAGAVRYLHDHHLVHRDSSGKRAAEPGRAPVKLTASVRPQAM

SEQ ID NO: 740165 - protein, 484 aa, Homo sapiens
MDLGKDQSHLKHHQTPDPHQEENHSPEVIGTWSLRNRELLRKRKAEVHEKETSQWLFGEQKKRKQQRTGKGNRRGRKRQQNTELKVEPQPQIEKEIVEKALAPIEKKTEPPGSITKVFPSVASPQKVVPEEHFSEICQESNIYQENFSEYQEIAVQNHSSETCQHVSEPEDLSPKMYQEISVLQDNSSKICQDMKEPEDNSPNTCQVISVIQDHPFKMYQDMAKREDLAPKMCQEAAVPKILPCPTSEDTADLAGCSLQAYPKPDVPKGYILDTDQNPAEPEEYNETDQGIAETEGLFPKIQEIAEPKDLSTKTHQESAEPKYLPHKTCNEIIVPKAPSHKTIQETPHSEDYSIEINQETPGSEKYSPETYQEIPGLEEYSPEIYQETSQLEEYSPEIYQETPGPEDLSTETYKNKDVPKECFPEPHQETGGPQGQDPKAHQEDAKDAYTFPQEMKEKPKEEPGIPAILNESHPENDVYSYVLF

SEQ ID NO: 740166 - protein, 484 aa, Homo sapiens; identical to SEQ ID NO: 740165

SEQ ID NO: 740167 - protein, 484 aa, Homo sapiens; identical to SEQ ID NO: 740165

SEQ ID NO: 740168 - protein, 484 aa, Homo sapiens; identical to SEQ ID NO: 740165

SEQ ID NO: 740169 - protein, 309 aa, Homo sapiens
MYQEISVLQDNSSKICQDMKEPEDNSPNTCQVISVIQDHPFKMYQDMAKREDLAPKMCQEAAVPKILPCPTSEDTADLAGCSLQAYPKPDVPKGYILDTDQNPAEPEEYNETDQGIAETEGLFPKIQEIAEPKDLSTKTHQESAEPKYLPHKTCNEIIVPKAPSHKTIQETPHSEDYSIEINQETPGSEKYSPETYQEIPGLEEYSPEIYQETSQLEEYSPEIYQETPGPEDLSTETYKNKDVPKECFPEPHQETGGPQGQDPKAHQEDAKDAYTFPQEMKEKPKEEPGIPAILNESHPENDVYSYVLF

SEQ ID NO: 740170 - protein, 358 aa, Homo sapiens
MDLGKDQSHLKHHQTPDPHQEENHSPEVIGTWSLRNRELLRKRKAEVHEKETSQWLFGEQKKRKQQRTGKGNRRGRKRQQNTELKVEPQPQIEKEIVEKALAPIEKKTEPPGSITKVFPSVASPQKVVPEEHFSEICQESNIYQENFSEYQEIAVQNHSSETCQHVSEPEDLSPKMYQEISVLQDNSSKICQDMKEPEDNSPNTCQVISVIQDHPFKMYQDMAKREDLAPKMCQEAAVPKILPCPTSEDTADLAGCSLQAYPKPDVPKGYILDTDQNPAEPEEYNETDQGIAETEGLFPKIQEIAEPKDLSTKTHQEDAKDAYTFPQEMKEKPKEEPGIPAILNESHPENDVYSYVLF

SEQ ID NO: 740171 - protein, 104 aa, Homo sapiens
NIHLKRIKKYLGLKNIHLKYTKKHPSLKNIHLKYTKKHRGLKTSLLRHIKIRMCLKNAFQNHTKKQVGPKARILKHTRKMLKMLILFLKVRAVYSTKVGTSPPE

SEQ ID NO: 740172 - protein, 81 aa, Homo sapiens
LAKPFCCDARTPYYGNDGCMVISMPIPYRISWPHRLVLGCSPIMERAVQTEVFCCLARWSSRLLIVSDLSSLRRSKQALDI

SEQ ID NO: 740173 - protein, 103 aa, Homo sapiens
MDVLVINMLTQSKYYWLSRVDVFGSDCTQIMERRGGRSEVLLDVLDRWKFYDVMILRYIRVETTRRAANIKIYRLLCMIYFTPLYNQSKGKIKLVSKTCFIIF

SEQ ID NO: 740174 - protein, 795 aa, Homo sapiens
METALAKTPQKRQVMFLAILLLLWEAGSEAVRYSIPEETESGYSVANLAKDLGLGVGELATRGARMHYKGNKELLQLDIKTGNLLLYEKLDREVMCGATEPCILHFQLLLENPVQFFQTDLQLTDINDHAPEFPEKEMLLKIPESTQPGTVFPLKIAQDFDIGSNTVQNYTISPNSHFHVATHNRGDGRKYPELVLDKALDREERPELSLTLTALDGGAPPRSGTTTIRIVVLDNNDNAPEFLQSFYEVQVPENSPLNSLVVVVSARDLDAGAYGSVAYALFQGDEVTQPFVIDEKTAEIRLKRALDFEATPYYNVEIVATDGGGLSGKCTVAIEVVDVNDNAPELTMSTLSSPTPENAPETVVAVFSVSDPDSGDNGRMICSIQNDLPFLLKPTLKNFYTLVTQRTLDRESQAEYNITITVTDMGTPRLKTEHNITVLVSDVNDNAPAFTQTSYTLFVRENNSPALHIGSVSATDRDSGTNAQVTYSLLPPQNPHLRLASLVSINADNGHLFALRSLDYEALQAFEFRVGATDRGSPALSSEALVRVLVLDANDNSPFVLYPLQNGSAPCTELVPRAAEPGYLVTKVVAVDGDSGQNAWLSYQLLKATEPGLFSMWAHNGEVRTARLLSERDAAKHRLVVLVKDNGEPPRSATATLHVLLVDGFSQPYLPLPEAAPAQAQADSLTVYLVVALASVSSLFLFSVLLFVAVRLCRRSRAASVGRCSVPEGPFPGHLVDVSGTGTLSQSYHYEVCLTGDSGAGEFKFLKPIIPNLLPQGAGEEIGKTAAFRNSFGLN

SEQ ID NO: 740175 - protein, 201 aa, Homo sapiens
METALAKTPQKRQVMFLAILLLLWEAGSEAVRYSIPEETESGYSVANLAKDLGLGVGELATRGARMHYKGNKELLQLDIKTGNLLLYEKLDREVMCGATEPCILHFQLLLENPVQFFQTDLQLTDINDHAPEFPEKEMLLKIPESTQPGTVFPLKIAQDFDIGSNTVQNYTISPNSHFHVATHNRGDGRKYPELVLDKAPE

SEQ ID NO: 740176 - protein, 140 aa, Homo sapiens
GLLGAEELEGQGAQCWTAHPRPGLLAGACACKASSFPAARRGPPAPAAVPGPLAASQRRAERALRLLKRFGKAGGSEGGAGTSALSSGLPPGDPRPGRPRMDPSAECASCDRGRPLSPGRGQRARIKVLETQQSAASKWI

SEQ ID NO: 740177 - protein, 145 aa, Homo sapiens
MVYVEQQRHSGCVLTMTEWETAAPAVAETPDIKLFGKWSTDDVHISDISLQDYIAVKEKYAKYLPHSAGWYAAKCFHKAQCPCGRRISPEIRRDNGQTQRVIFRDSGVNPSKHPGGKTQRPEKPRGPVKTGAHHRQTVEHRAETH

SEQ ID NO: 740178 - protein, 1044 aa, Homo sapiens
IRVSALTPGRPDRELSLARLAGDRTGSGRPSVHPSGEKLQIRSPGMGPAPLPLLLGLFLPALWRRAITEAREEAKPYPLFPGPFPGSLQTDHTPLLSLPHASGYQPALMFSPTQPGRPHTGNVAIPQVTSVESKPLPPLAFKHTVGHIILSEHKGVKFNCSINVPNIYQDTTISWWKDGKELLGGHHRITQFYPDDEVTAIIASFSITSVQRSDNGSYICKMKINNEEIVSDPIYIEVQGLPHFTKQPESMNVTRNTAFNLTCQAVGPPEPVNIFWVQNSSRVNEQPEKSPGVLTVPGLTEMAVFSCEAHNDKGLTVSQGVQINIKAIPSPPTEVSIRNSTAHSILISWVPGFDGYSPFRNCSIQVKEADPLGNGSVMIFNTSALPHLYQIKQLQALANYSIGVSCMNEIGWSAVSPWILASTTEGAPSVAPLNVTVFLNESSDNVDIRWMKPPTKQQDGELVGYRISHVWQSAGISKELLEEVGQNGSRARISVQVHNATCTVRIAAVTRGGVGPFSDPVKIFIPAHGWVDYAPSSTPAPGNADPVLIIFGCFCGFILIGLILYISLAIRKRVQETKFGNAFTEEDSELVVNYIAKKSFCRRAIELTLHSLGVSEELQNKLEDVVIDRNLLILGKILGEGEFGSVMEGNLKQEDGTSLKVAVKTMKLDNSSQREIEEFLSEAACMKDFSHPNVIRLLGVCIEMSSQGIPKPMVILPFMKYGDLHTYLLYSRLETGPKHIPLQTLLKFMVDIALGMEYLSNRNFLHRDLAARNCMLRDDMTVCVADFGLSKKIYSGDYYRQGRIAKMPVKWIAIESLADRVYTSKSDVWAFGVTMWEIATRGMTPYPGVQNHEMYDYLLHGHRLKQPEDCLDELYEIMYSCWRTDPLDRPTFSVLRLQLEKLLESLPDVRNQADVIYVNTQLLESSEGLAQGSTLAPLDLNIDPDSIIASCTPRAAISVVTAEVHDSKPHEGRYILNGGSEEWEDLTSAPSAAVTAEKNSVLPGERLVRNGVSWSHSSMLPLGSSLPDELLFADDSSEGSEVLM

SEQ ID NO: 740179 - protein, 422 aa, Homo sapiens
AITAGKGPGELSIKILGEGEFGSVMEGNLKQEDGTSLKVAVKTMKLDNSSQREIEEFLSEAACMKDFSHPNVIRLLGVCIEMSSQGIPKPMVILPFMKYGDLHTYLLYSRLETGPKHIPLQTLLKFMVDIALGMEYLSNRNFLHRDLAARNCMLRDDMTVCVADFGLSKKIYSGDYYRQGRIAKMPVKWIAIESLADRVYTSKSDVWAFGVTMWEIATRGMTPYPGVQNHEMYDYLLHGHRLKQPEDCLDELYEIMYSCWRTDPLDRPTFSVLRLQLEKLLESLPDVRNQADVIYVNTQLLESSEGLAQGSTLAPLDLNIDPDSIIASCTPRAAISVVTAEVHDSKPHEGRYILNGGSEEWEDLTSAPSAAVTAEKNSVLPGERLVRNGVSWSHSSMLPLGSSLPDELLFADDSSEGSEVLM

SEQ ID NO: 740180 - protein, 1061 aa, Homo sapiens
IRVSALTPGRPDRELSLARLAGDRTGSGRPSVHPSGEKLQIRSPGMGPAPLPLLLGLFLPALWRRAITEAREEAKPYPLFPGPFPGSLQTDHTPLLSLPHASGYQPALMFSPTQPGRPHTGNVAIPQVTSVESKPLPPLAFKHTVGHIILSEHKGVKFNCSINVPNIYQDTTISWWKDGKELLGGHHRITQFYPDDEVTAIIASFSITSVQRSDNGSYICKMKINNEEIVSDPIYIEVQGLPHFTKQPESMNVTRNTAFNLTCQAVGPPEPVNIFWVQNSSRVNEQPEKSPGVLTVPGLTEMAVFSCEAHNDKGLTVSQGVQINIKAIPSPPTEVSIRNSTAHSILISWVPGFDGYSPFRNCSIQVKEADPLGNGSVMIFNTSALPHLYQIKQLQALANYSIGVSCMNEIGWSAVSPWILASTTEGAPSVAPLNVTVFLNESSDNVDIRWMKPPTKQQDGELVGYRISHVWQSAGISKELLEEVGQNGSRARISVQVHNATCTVRIAAVTRGGVGPFSDPVKIFIPAHGWVDYAPSSTPAPGNADPVLIIFGCFCGFILIGLILYISLAIRKRVQETKFGNAFTEEDSELVVNYIAKKSFCRRAIELTLHSLGVSEELQNKLEDVVIDRNLLILGKILGEGEFGSVMEGNLKQEDGTSLKVAVKTMKLDNSSQREIEEFLSEAACMKDFSHPNVIRLLGVCIEMSSQGIPKPMVILPFMKYGDLHTYLLYSRLETGPKHIPLQTLLKFMVDIALGMEYLSNRNFLHRDLAARNCITHLAILARSPASCSYCRLRDDMTVCVADFGLSKKIYSGDYYRQGRIAKMPVKWIAIESLADRVYTSKSDVWAFGVTMWEIATRGMTPYPGVQNHEMYDYLLHGHRLKQPEDCLDELYEIMYSCWRTDPLDRPTFSVLRLQLEKLLESLPDVRNQADVIYVNTQLLESSEGLAQGSTLAPLDLNIDPDSIIASCTPRAAISVVTAEVHDSKPHEGRYILNGGSEEWEDLTSAPSAAVTAEKNSVLPGERLVRNGVSWSHSSMLPLGSSLPDELLFADDSSEGSEVLM

SEQ ID NO: 740181 - protein, 1044 aa, Homo sapiens; identical to SEQ ID NO: 740178

SEQ ID NO: 740182 - protein, 792 aa, Homo sapiens
IRVSALTPGRPDRELSLARLAGDRTGSGRPSVHPSGEKLQIRSPGMGPAPLPLLLGLFLPALWRRAITEAREEAKPYPLFPGPFPGSLQTDHTPLLSLPHASGYQPALMFSPTQPGRPHTGNVAIPQVTSVESKPLPPLAFKHTVGHIILSEHKGVKFNCSINVPNIYQDTTISWWKDGKELLGGHHRITQFYPDDEVTAIIASFSITSVQRSDNGSYICKMKINNEEIVSDPIYIEVQGLPHFTKQPESMNVTRNTAFNLTCQAVGPPEPVNIFWVQNSSRVNEQPEKSPGVLTVPGLTEMAVFSCEAHNDKGLTVSQGVQINIKAIPSPPTEVSIRNSTAHSILISWVPGFDGYSPFRNCSIQVKEADPLGNGSVMIFNTSALPHLYQIKQLQALANYSIGVSCMNEIGWSAVSPWILASTTEGAPSVAPLNVTVFLNESSDNVDIRWMKPPTKQQDGELVGYRISHVWQSAGISKELLEEVGQNGSRARISVQVHNATCTVRIAAVTRGGVGPFSDPVKIFIPAHGWVDYAPSSTPAPGNADPVLIIFGCFCGFILIGLILYISLAIRKRVQETKFGNAFTEEDSELVVNYIAKKSFCRRAIELTLHSLGVSEELQNKLEDVVIDRNLLILGKILGEGEFGSVMEGNLKQEDGTSLKVAVKTMKLDNSSQREIEEFLSEAACMKDFSHPNVIRLLGVCIEMSSQGIPKPMVILPFMKYGDLHTYLLYSRLETGPKHIPLQTLLKFMVDIALGMEYLSNRNFLHRDLAARNCITHLAILARSPASCSYCR

SEQ ID NO: 740183 - protein, 175 aa, Homo sapiens
MGALVIRGIRNFNLENRAEREISKMKPSVAPRHPSTNSLLREQISLYPEVKGEIARKDEKLLSFLKDVYVDSKDPVSSLQVKAAETCQEPKEFRLPKDHHFDMINIKSIPKGKISIVEALTLLNNHKLFPETWTAEKIMQEYQLEQKDVNSLLKYFVTFEVEIFPPEDKKAIRSK

SEQ ID NO: 740184 - protein, 175 aa, Homo sapiens; identical to SEQ ID NO: 740183

SEQ ID NO: 740185 - protein, 175 aa, Homo sapiens; identical to SEQ ID NO: 740183

SEQ ID NO: 740186 - protein, 175 aa, Homo sapiens; identical to SEQ ID NO: 740183

SEQ ID NO: 740187 - protein, 132 aa, Homo sapiens
MCMLIPKILCLPCRAYDVVKDTAIKQMSNNVTIIMGKVKAAETCQEPKEFRLPKDHHFDMINIKSIPKGKISIVEALTLLNNHKLFPETWTAEKIMQEYQLEQKDVNSLLKYFVTFEVEIFPPEDKKAIRSK

SEQ ID NO: 740188 - protein, 168 aa, Homo sapiens
MGALVIRGIRNFNLENRAEREISKMKPSVAPRHPSTNSLLREQISREWCEGVSGPGGAESLCCPAVPSVGPEAEGSASACSAAAARVGGALEGGAARPVTLRLSSAPAVRSAAPPTSETQRQQPVLPLTRPSPAAVTDLIQGIKIREGHRAFSRGLHWTMDAEPDLEF

SEQ ID NO: 740189 - protein, 175 aa, Homo sapiens; identical to SEQ ID NO: 740183

SEQ ID NO: 740190 - protein, 175 aa, Homo sapiens; identical to SEQ ID NO: 740183

SEQ ID NO: 740191 - protein, 437 aa, Homo sapiens
HSLPSYTALLDLSHNNLSRLRAEWTPTRLTQLHSLLLSHNHLNFISSEAFSPVPNLRYLDLSSNQLRTLDEFLFSDLQVLEVLLLYNNHIMAVDRCAFDDMAQLQKLYLSQNQISRFPLELVKEGAKLPKLTLLDLSSNKLKNLPLPDLQKLPAWIKNGLYLHNNPLNCDCELYQLFSHWQYRQLSSVMDFQEDLYCMNSKKLHNVFNLSFLNCGEYKERAWEAHLGDTLIIKCDTKQQGMTKVWVTPSNERVLDEVTNGTVSVSKDGSLLFQQVQVEDGGVYTCYAMGETFNETLSVELKVHNFTLHGHHDTLNTAYTTLVGCILSVVLVLIYLYLTPCRCWCRGVEKPSSHQGDSLSSSMLSTTPNHDPMAGGDKDDGFDRRVAFLEPAGPGQGQNGKLKPGNTLPVPEATGKGQRRMSDPESVSSVFSDTPIVV

SEQ ID NO: 740192 - protein, 437 aa, Homo sapiens; identical to SEQ ID NO: 740191

SEQ ID NO: 740193 - protein, 412 aa, Homo sapiens
GGGGGCDMEPGAGGRNTARAQRAGSPNTPPPREQERKLEQEKLSGVVKSVHRRLRKKYREVGDFDKIWREHCEDEETLCEYAVAMKNLADNHWAKTCEGEGRIEWCCSVCREYFQNGGKRKALEKDEKRAVLATKTTPALNMHESSQLEGHLTNLSFTNPEFITELLQASGKIRLLDVGSCFNPFLKFEEFLTVGIDIVPAVESVYKCDFLNLQLQQPLQLAQDAIDAFLKQLKNPIDSLPGELFHVVVFSLLLSYFPSPYQRWICCKKAHELLVLNGLLLIITPDSSHQNRHAMMMKSWKIAIESLGFKRFKYSKFSHMHLMAFRKISLKTTSDLVSRNYPGMLYIPQDFNSIEDEEYSNPSCYVRSDIEDEQLAYGFTELPDAPYDSDSGESQASSIPFYELEDPILLLS

SEQ ID NO: 740194 - protein, 412 aa, Homo sapiens; identical to SEQ ID NO: 740193

SEQ ID NO: 740195 - protein, 249 aa, Homo sapiens
MEMGRRIHLELRNRTPSDVKELVLDNSRSNEGKLEGLTDEFEELEFLSTINVGLTSIANLPKLNKLKKLELSDNRVSGGLEVLAEKCPNLTHLNLSGNKIKDLSTIEPLKKLENLKSLDLFNCEVTNLNDYRENVFKLLPQLTYLDGYDRDDKEAPDSDAEGYVEGLDDEEEDEDEEEYDEDAQVVEDEEDEDEEEEGEEEDVSGEEEEDEEGYNDGEVDDEEDEEELGEEERGQKRKREPEDEGEDDD

SEQ ID NO: 740196 - protein, 200 aa, Homo sapiens
MEMGRRIHLELRNRTPSDVKELVLDNSRSNEGKLEGLTDEFEELEFLSTINVGLTSIANLPKLNKLKKLELSDNRVSGGLEVLAEKCPNLTHLNLSGNKIKDLSTIEPLKKLENLKSLDLFNCEVTNLNDYRENVFKLLPQLTYLDGYDRDDKEAPDSDAEGYVEGLDDEEEDEDEEEYDEEGYNDGEVDDEEDYHTNHK

SEQ ID NO: 740197 - protein, 114 aa, Homo sapiens
MEMGRRIHLELRNRTPSDVKELVLDNSRSNEGKLEGLTDEFEELEFLSTINVGLTSIANLPKLNKLKKLELSDNRVSGGLEVLAEKCPNLTHLNLSGNKIKDLSTIEPLKLIFF

SEQ ID NO: 740198 - protein, 159 aa, Homo sapiens
MEMGRRIHLELRNRTPSDVKELVLDNSRSNEGKLEGLTDEFEELEFLSTINVGLTSIANLPKLNKLKKLELSDNRVSGGLEVLAEKCPNLTHLNLSGNKIKDLSTIEPLVSHSDPPLPAGVGGGRNWHQQILLLHLSFSHLIFLTLMMCYEIELSYCFC

SEQ ID NO: 740199 - protein, 93 aa, Homo sapiens
MEMGRRIHLELRNRTPSDVKELVLDNSRSNEGKLEGLTDEFEELEFLSTINVGLTSIANLPKLNKLKKPETYFFLIVTLLWGWNKILFLLPKK

SEQ ID NO: 740200 - protein, 209 aa, Homo sapiens
  misc_feature (5)..(5): Xaa can be any naturally occurring amino acid
RQYSXAYVARLGGKKLENLKSLDLFNCEVTNLNDYRENVFKLLPQLTYLDGYDRDDKEAPDSDAEGYVEGLDDEEEDEDEEEYDEDAQVVEDEEDEDEEEEGEEEDVSGEEERMKKVITMDEVRCTRTDELKTLAEDEHGVTPRTTSSPWKRLTGDATTGRPYCWTLQRTYGRTCRDQSHSARVQYTTARQTHRHATAKPPTNPAPTPP

SEQ ID NO: 740201 - protein, 249 aa, Homo sapiens; identical to SEQ ID NO: 740195

SEQ ID NO: 740202 - protein, 249 aa, Homo sapiens; identical to SEQ ID NO: 740195

SEQ ID NO: 740203 - protein, 249 aa, Homo sapiens; identical to SEQ ID NO: 740195

SEQ ID NO: 740204 - protein, 249 aa, Homo sapiens; identical to SEQ ID NO: 740195

SEQ ID NO: 740205 - protein, 249 aa, Homo sapiens; identical to SEQ ID NO: 740195

SEQ ID NO: 740206 - protein, 249 aa, Homo sapiens; identical to SEQ ID NO: 740195

SEQ ID NO: 740207 - protein, 256 aa, Homo sapiens
MEMGRRIHLELRNRTPSDVKELVLDNSRSNEGKLEGLTDEFEELEFLSTINVGLTSIANLPKLNKLKKLELSDNRVSGGLEVLAEKCPNLTHLNLSGNKIKDLSTIEPLKKLENLKSLDLFNCEVTNLNDYRENVFKLLPQLTYLDGYDRDDKEAPDSDAEGYVEGLDDEEEDEDEEEYDEDAQVVEDEEDEDEEEEGEEEDVSGEEEVSVLSPEEDEEGYNDGEVDDEEDEEELGEEERGQKRKREPEDEGEDDD

SEQ ID NO: 740208 - protein, 205 aa, Homo sapiens
MQFTQINVGLTSIANLPKLNKLKKLELSDNRVSGGLEVLAEKCPNLTHLNLSGNKIKDLSTIEPLKKLENLKSLDLFNCEVTNLNDYRENVFKLLPQLTYLDGYDRDDKEAPDSDAEGYVEGLDDEEEDEDEEEYDEDAQVVEDEEDEDEEEEGEEEDVSGEEEEDEEGYNDGEVDDEEDEEELGEEERGQKRKREPEDEGEDDD

SEQ ID NO: 740209 - protein, 199 aa, Homo sapiens
QDFELAGTPRIYKLTTEKLELSDNRVSGGLEVLAEKCPNLTHLNLSGNKIKDLSTIEPLKKLENLKSLDLFNCEVTNLNDYRENVFKLLPQLTYLDGYDRDDKEAPDSDAEGYVEGLDDEEEDEDEEEYDEDAQVVEDEEDEDEEEEGEEEDVSGEEEEDEEGYNDGEVDDEEDEEELGEEERGQKRKREPEDEGEDDD

SEQ ID NO: 740210 - protein, 201 aa, Homo sapiens
LEELGSLPQSKLPKLNKLKKLELSDNRVSGGLEVLAEKCPNLTHLNLSGNKIKDLSTIEPLKKLENLKSLDLFNCEVTNLNDYRENVFKLLPQLTYLDGYDRDDKEAPDSDAEGYVEGLDDEEEDEDEEEYDEDAQVVEDEEDEDEEEEGEEEDVSGEEEEDEEGYNDGEVDDEEDEEELGEEERGQKRKREPEDEGEDDD

SEQ ID NO: 740211 - protein, 260 aa, Homo sapiens
MEMGRRIHLELRNRTPSDVKELVLDNSRSNEGKLEGLTDEFEELEFLSTINVGLTSIANLPKLNKLKKLELSDNRVSGGLEVLAEKCPNLTHLNLSGNKIKDLSTIEPLKKLENLKSLDLFNCEVTNLNDYRENVFKLLPQLTYLDGYDRDDKEAPDSDAEGYVEGLDDEEEDEDGMAGGGGIKYYFYCHSLFFSPTFSLCPVFVPVNAIAKYTLSEHLFLTLKEDGLEFSYVSWYFPSLLGWLEGCGWSQFGYSMPRRG

SEQ ID NO: 740212 - protein, 181 aa, Homo sapiens
MEMGRRIHLELRNRTPSDVKELVLDNSRSNEGKLEGLTDEFEELEFLSTINVGLTSIANLPKLNKLKKLELSDNRVSGGLEVLAEKCPNLTHLNLSGNKIKDLSTIEPLKKLENLKSLDLFNCEVTNLNDYRENVFKLLPQLTYLDGYDRDDKEAPDSDAEGYVEGLDDEEEDEDDKQRKY

SEQ ID NO: 740213 - protein, 212 aa, Homo sapiens
LEELGSLPQSKLPKLNKLKKLELSDNRVSGGLEVLAEKCPNLTHLNLSGNKIKDLSTIEPLKKLENLKSLDLFNCEVTNLNDYRENVFKLLPQLTYLDGYDRDDKEAPDSDAEGYVEGLDDEEEDEDGMAGGGGIKYYFYCHSLFFSPTFSLCPVFVPVNAIAKYTLSEHLFLTLKEDGLEFSYVSWYFPSLLGWLEGCGWSQFGYSMPRRG

SEQ ID NO: 740214 - protein, 226 aa, Homo sapiens [sequence omitted]

SEQ ID NO: 740215 - protein, 104 aa, Homo sapiens
MEMGRRIHLELRNRTPSDVKELVLDNSRSNEGKLEGLTDEFEELEFLSTINVGLTSIANLPKLNKLKKLELSDNRVSGGLEVLAEKCPNLTHLNLSALVEGSSK

SEQ ID NO: 740216 - protein, 142 aa, Homo sapiens
INPLPPQQEWINQPVRVNVKREYDHMNGSRESPVDCSVSKCSKLVGGGESNPMNYNSYMDEKNGPPPPNMTTNERRVIVPAGNSRTRLPGRHSLPHSLGGREHLNLYLILYSLWNCKMEKAARQPGVVARACNPSTLRGQDG

SEQ ID NO: 740217 - protein, 104 aa, Homo sapiens
ERNLDPRHICNLRAPLWPSPQFLPCTRKGLSNRSSLVLGGLCYGPLKYAVLAEFICPALFTLAALMSSYGWYVFCSYSGHQQFFLQILCPAGYVCSFLFPQQHI

SEQ ID NO: 740218 - protein, 333 aa, Homo sapiens
GFGDSTKKDTEVETLKHDTAAVDRSVKRLFKVRSDLDFAEQLWCKMSSSVISYQDLVKCFTLIIQSLQRGDIQPWLHSGSNSLLSKLIHQSYHGTMDTVSLSGTIPVQMLLEIGLDKLKKDYISFFIGQELASLNHLEYFIAPSVDIQEQVYRVQKLHHILEILVSCMPFIKSQHELLFSLTQICIKYYKQNPLDEQHIFQLPVRPTAVKNLYQSEKPQKWRVEIYSGQKKIKTVWQLSDSSPIDHLNFHKPDFSELTLNGSLEERIFFTNMVTCSQVHFKVKCADEVLYKHKPKREREKKVIIVEPENSNVWKPSKQKREEDPEDSLMKLQN

SEQ ID NO: 740219 - protein, 422 aa, Homo sapiens
GQLEISIMAASISGYTFSAVCFHSANSNADHEGFLLGEVRQEETFSISDSQISNTEFLQVIEIHNHQPCSKLFSFYDYASKVNEESLDRILKDRRKKVIGWYRFRRNTQQQMSYREQVLHKQLTRILGVPDLVFLLFSFISTANNSTHALEYVLFRPNRRYNQRISLAIPNLGNTSQQEYKVSSVPNTSQSYAKVIKEHGTDFFDKDGVMKDIRAIYQVYNALQEKVQAVCADVEKSERVVESCQAEVNKLRRQITQRKNEKEQERRLQQAVLSRQMPSESLDPAFSPRMPSSGFAAEGRSTLGDAEASDPPPPYSDFHPNNQESTLSHSRMERSVFMPRPQAVGSSNYASTSAGLKYPGSGADLPPPQRAAGDSGEDSDDSDYENLIDPTEPSNSEYSHSKDSRPMAHPDEDPRNTQTSQI

SEQ ID NO: 740220 - protein, 311 aa, Homo sapiens
MSYREQVLHKQLTRILGVPDLVFLLFSFISTANNSTHALEYVLFRPNRRYNQRISLAIPNLGNTSQQEYKVSSVPNTSQSYAKVIKEHGTDFFDKDGVMKDIRAIYQVYNALQEKVQAVCADVEKSERVVESCQAEVNKLRRQITQRKNEKEQERRLQQAVLSRQMPSESLDPAFSPRMPSSGFAAEGRSTLGDAEASDPPPPYSDFHPNNQESTLSHSRMERSVFMPRPQAVGSSNYASTSAGLKYPGSGADLPPPQRAAGDSGEDSDDSDYENLIDPTEPSNSEYSHSKDSRPMAHPDEDPRNTQTSQI

SEQ ID NO: 740221 - protein, 422 aa, Homo sapiens; identical to SEQ ID NO: 740219

SEQ ID NO: 740222 - protein, 81 aa, Homo sapiens
QESTLSHSRMERSVFMPRPQAVGSSNYASTSAGLKYPGSGADLPPPQRAAGDSGEDSDDSDYENLIDQIRYTFSCLHDFVR

SEQ ID NO: 740223 - protein, 746 aa, Homo sapiens
DARAPAAARMELGCWTQLGLTFLQLLLISSLPREYTVINEACPGAEWNIMCRECCEYDQIECVCPGKREVVGYTIPCCRNEENECDSCLIHPGCTIFENCKSCRNGSWGGTLDDFYVKGFYCAECRAGWYGGDCMRCGQVLRAPKGQILLESYPLNAHCEWTIHAKPGFVIQLRFVMLSLEFDYMCQYDYVEVRDGDNRDGQIIKRVCGNERPAPIQSIGSSLHVLFHSDGSKNFDGFHAIYEEITACSSSPCFHDGTCVLDKAGSYKCACLAGYTGQRCENLLEAGKSKIKASEDSLSVLEERNCSDPGGPVNGYQKITGGPGLINGRHAKIGTVVSFFCNNSYVLSGNEKRTCQQNGEWSGKQPICIKACREPKISDLVRRRVLPMQVQSRETPLHQLYSAAFSKQKLQSAPTKKPALPFGDLPMGYQHLHTQLQYECISPFYRRLGSSRRTCLRTGKWSGRAPSCIPICGKIENITAPKTQGLRWPWQAAIYRRTSGVHDGSLHKGAWFLVCSGALVNERTVVVAAHCVTDLGKVTMIKTADLKVVLGKFYRDDDRDEKTIQSLQISAIILHPNYDPILLDADIAILKLLDKARISTRVQPICLAASRDLSTSFQESHITVAGWNVLADVRSPGFKNDTLRSGVVSVVDSLLCEEQHEDHGIPVSVTDNMFCASWEPTAPSDICTAETGGIAAVSFPGRASPEPRWHLMGLVSWSYDKTCSHRLSTAFTKVLPFKDWIERNMK

SEQ ID NO: 740224 - protein, 729 aa, Homo sapiens
DARAPAAARMELGCWTQLGLTFLQLLLISSLPREYTVINEACPGAEWNIMCRECCEYDQIECVCPGKREVVGYTIPCCRNEENECDSCLIHPGCTIFENCKSCRNGSWGGTLDDFYVKGFYCAECRAGWYGGDCMRCGQVLRAPKGQILLESYPLNAHCEWTIHAKPGFVIQLRFVMLSLEFDYMCQYDYVEVRDGDNRDGQIIKRVCGNERPAPIQSIGSSLHVLFHSDGSKNFDGFHAIYEEITACSSSPCFHDGTCVLDKAGSYKCACLAGYTGQRCENLLEERNCSDPGGPVNGYQKITGGPGLINGRHAKIGTVVSFFCNNSYVLSGNEKRTCQQNGEWSGKQPICIKACREPKISDLVRRRVLPMQVQSRETPLHQLYSAAFSKQKLQSAPTKKPALPFGDLPMGYQHLHTQLQYECISPFYRRLGSSRRTCLRTGKWSGRAPSCIPICGKIENITAPKTQGLRWPWQAAIYRRTSGVHDGSLHKGAWFLVCSGALVNERTVVVAAHCVTDLGKVTMIKTADLKVVLGKFYRDDDRDEKTIQSLQISAIILHPNYDPILLDADIAILKLLDKARISTRVQPICLAASRDLSTSFQESHITVAGWNVLADVRSPGFKNDTLRSGVVSVVDSLLCEEQHEDHGIPVSVTDNMFCASWEPTAPSDICTAETGGIAAVSFPGRASPEPRWHLMGLVSWSYDKTCSHRLSTAFTKVLPFKDWIERNMK

SEQ ID NO: 740225 - protein, 323 aa, Homo sapiens
MAALIAENFRFLSLFFKSKDVMIFNGLVALGTVGSQELFSVVAFHCPCSPARNYLYGLAAIGVPALVLFIIGIILNNHTWNLVAECQHRRTKNCSAAPTFLLLSSILGRAAVAPVTWSVISLLRGEAYVCALSEFVDPSSLTAREEHFPSAHATEILARFPCKENPDNLSDFREEVSRRLRYESQLFGWLLIGVVAILVFLTKCLKHYCSPLSYRQEAYWAQYRANEDQLFQRTAEVHSRVLAANNVRRFFGFVALNKDDEELIANFPVEGTQPRPQWNAITGVYLYRENQGLPLYSRLHKWAQGLAGNGAAPDNVEMALLPS

SEQ ID NO: 740226 - protein, 323 aa, Homo sapiens; identical to SEQ ID NO: 740225

SEQ ID NO: 740227 - protein, 323 aa, Homo sapiens; identical to SEQ ID NO: 740225

SEQ ID NO: 740228 - protein, 323 aa, Homo sapiens; identical to SEQ ID NO: 740225

SEQ ID NO: 740229 - protein, 323 aa, Homo sapiens; identical to SEQ ID NO: 740225

SEQ ID NO: 740230 - protein, 323 aa, Homo sapiens; identical to SEQ ID NO: 740225

SEQ ID NO: 740231 - protein, 323 aa, Homo sapiens; identical to SEQ ID NO: 740225

SEQ ID NO: 740232 - protein, 266 aa, Homo sapiens
MAAIGVPALVLFIIGIILNNHTWNLVAECQHRRTKNCSAAPTFLLLSSILGRAAVAPVTWSVISLLRGEAYVCALSEFVDPSSLTAREEHFPSAHATEILARFPCKENPDNLSDFREEVSRRLRYESQLFGWLLIGVVAILVFLTKCLKHYCSPLSYRQEAYWAQYRANEDQLFQRTAEVHSRVLAANNVRRFFGFVALNKDDEELIANFPVEGTQPRPQWNAITGVYLYRENQGLPLYSRLHKWAQGLAGNGAAPDNVEMALLPS

SEQ ID NO: 740233 - protein, 323 aa, Homo sapiens; identical to SEQ ID NO: 740225

SEQ ID NO: 740234 - protein, 323 aa, Homo sapiens; identical to SEQ ID NO: 740225

SEQ ID NO: 740235 - protein, 323 aa, Homo sapiens; identical to SEQ ID NO: 740225

SEQ ID NO: 740236 - protein, 180 aa, Homo sapiens
GITATRACFSYPSRTCSFFHSLWGVGLRQFLAPPELCPFSGQLFGWLLIGVVAILVFLTKCLKHYCSPLSYRQEAYWAQYRANEDQLFQRTAEVHSRVLAANNVRRFFGFVALNKDDEELIANFPVEGTQPRPQWNAITGVYLYRENQGLPLYSRLHKWAQGLAGNGAAPDNVEMALLPS

SEQ ID NO: 740237 - protein, 323 aa, Homo sapiens; identical to SEQ ID NO: 740225

SEQ ID NO: 740238 - protein, 294 aa, Homo sapiens
MAALIAENFRFLSLFFKSKDVMIFNGLVALGTVGSQELFSVVAFHCPCSPARNYLYGLAAIGVPALVLFIIGIILNNHTWNLVAECQHRRTKNCSAAPTFLLLSSILGRAAVAPVTWSVISLLRGEAYVCALSEFVDPSSLTAREEHFPSAHATEILARFPCKENPDNLSDFREEVSRRLRYESQLFGWLLIGVVAILVFLTKCLKHYCSPLSYRQEAYWAQYRANEDQLFQRTAEVHSRVLAANNVRRFFGFVALNKDDEELIANFPMLFVNGTTWSQTEPHCLLTSISEGDF

SEQ ID NO: 740239 - protein, 207 aa, Homo sapiens
MAALIAENFRFLSLFFKSKDVMIFNGLVALGTVGSQELFSVVAFHCPCSPARNYLYGLAAIGVPALVLFIIGIILNNHTWNLVAECQHRRTKNCSAAPTFLLLSSILGRAAVAPVTWSVISLLRGEAYVCALSEFVDPSSLTAREEHFPSAHATEILARFPCKENPDNLSDFREEVSRRLRYESQLFGWLLIGVVAILVFLTKCLKH

SEQ ID NO: 740240 - protein, 81 aa, Homo sapiens
SAHPCPHPPVFAGLGLSTRTPSVSTSESSAGAGTGTGTSTPSTPTTTSQSRLIASSPNPVVPFQFYSELLRVRWATTVRWP

SEQ ID NO: 740241 - protein, 420 aa, Homo sapiens
MSRSSPSGKGHSRMAEPRFNNPYFWPPPPTMPSQLDNLVLINKIKEQLMAEKIRPPHLPPTSASSQQPLLVPPAPAESSQAVMSLPKLQQVPGLHPQAVPQPDVALHARPATSTVTGLGLSTRTPSVSTSESSAGAGTGTGTSTPSTPTTTSQSRLIASSPTLISGITSPPLLDSIKTIQGHGLLGPPKSERGRKKIKAENPGGPPVLVVPYPILASGETAKEGKTYRCKVCPLTFFTKSEMQIHSKSHTEAKPHKCPHCSKSFANASYLAQHLRIHLGVKPYHCSYCDKSFRQLSHLQQHTRIHTGDRPYKCPHPGCEKAFTQLSNLQSHQRQHNKDKPYKCPNCYRAYSDSASLQIHLSAHAIKHAKAYCCSMCGRAYTSETYLMKHMSKHTVVEHLVSHHSPQRTESPGIPVRISLI

SEQ ID NO: 740242 - protein, 444 aa, Homo sapiens
RAGARARSLCRSPSPALLGPPGAGLRPRPGGAASTARMAEPRFNNPYFWPPPPTMPSQLDNLVLINKIKEQLMAEKIRPPHLPPTSASSQQPLLVPPAPAESSQAVMSLPKLQQVPGLHPQAVPQPDVALHARPATSTVTGLGLSTRTPSVSTSESSAGAGTGTGTSTPSTPTTTSQSRLIASSPTLISGITSPPLLDSIKTIQGHGLLGPPKSERGRKKIKAENPGGPPVLVVPYPILASGETAKEGKTYRCKVCPLTFFTKSEMQIHSKSHTEAKPHKCPHCSKSFANASYLAQHLRIHLGVKPYHCSYCDKSFRQLSHLQQHTRIHTGDRPYKCPHPGCEKAFTQLSNLQSHQRQHNKDKPYKCPNCYRAYSDSASLQIHLSAHAIKHAKAYCCSMCGRAYTSETYLMKHMSKHTVVEHLVSHHSPQRTESPGIPVRISLI

SEQ ID NO: 740243 - protein, 306 aa, Homo sapiens
MSRSSPSGKGHSRMAEPRFNNPYFWPPPPTMPSQLDNLVLINKIKEQLMAEKIRPPHLPPTSASSQQPLLVPPAPAESSQAVMSLPKLQQVPGLHPQAVPQPDVALHARPATSTVTGLGLSTRTPSVSTSESSAGAGTGTGTSTPSTPTTTSQSRLIASSPTLISGITSPPLLDSIKTIQGHGLLGPPKSERGRKKIKAENPGGPPVLVVPYPILASGETAKEGKTYRCKVCPLTFFTKSEMQIHSKSHTEAKPHKCPHCSKSFANASYLAQHLRIHLGVKPYHCSYCDKSFRQLSHLQQHTRRPT

SEQ ID NO: 740244 - protein, 367 aa, Homo sapiens
MSRSSPSGKGHSRMAEPRFNNPYFWPPPPTMPSQLDNLVLINKIKEQLMAEKIRPPHLPPTSASSQQPLLVPPAPAESSQAVMSLPKLQQVPGLHPQAVPQPDVALHARPATSTVTGLGLSTRTPSVSTSESSAGAGTGTGTSTPSTPTTTSQSRLIASSPTLISGITSPPLLDSIKTIQGHGLLGPPKSERGRKKIKAENPGGPPVLVVPYPILASGETAKEGKTYRCKVCPLTFFTKSEMQIHSKSHTEAKPHKCPHCSKSFANASYLAQHLRIHLGVKPYHCSYCDKSFRQLSHLQQHTRIHTGDRPYKCPHPGCEKAFTQLSNLQCLARTSRAVPWASLSRGVRQLQEAETRGVGDPQDQRVQ

SEQ ID NO: 740245 - protein, 66 aa, Homo sapiens
EPEPEPGACAGAPARPCSGRRARGCGRVPEAPPAQPGAVGNTEEVTGWGFRESSVEEGTLELGLEG

SEQ ID NO: 740246 - protein, 115 aa, Homo sapiens
VRLSEDPPRALTLVLPRISQDIQRRHSVQSGSPEIPRGFPGAMREKGAPGSSWQTRPPGSAWSNASSSFKGLFVFPAMEWESPAEALGPSAGKGSPGRQVPGADPAPSPHRHTPI

SEQ ID NO: 740247 - protein, 420 aa, Homo sapiens; identical to SEQ ID NO: 740241

SEQ ID NO: 740248 - protein, 427 aa, Homo sapiens
  misc_feature (373)..(373): Xaa can be any naturally occurring amino acid
  misc_feature (394)..(394): Xaa can be any naturally occurring amino acid
  misc_feature (398)..(398): Xaa can be any naturally occurring amino acid
  misc_feature (404)..(404): Xaa can be any naturally occurring amino acid
  misc_feature (409)..(409): Xaa can be any naturally occurring amino acid
MSRSSPSGKGHSRMAEPRFNNPYFWPPPPTMPSQLDNLVLINKIKEQLMAEKIRPPHLPPTSASSQQPLLVPPAPAESSQAVMSLPKLQQVPGLHPQAVPQPDVALHARPATSTVTGLGLSTRTPSVSTSESSAGAGTGTGTSTPSTPTTTSQSRLIASSPTLISGITSPPLLDSIKTIQGHGLLGPPKSERGRKKIKAENPGGPPVLVVPYPILASGETAKEGKTYRCKVCPLTFFTKSEMQIHSKSHTEAKPHKCPHCSKSFANASYLAQHLRIHLGVKPYHCSYCDKSFRQLSHLQQHTRIHTGDRPYKCPHPGCEKAFTQLSNLQSHQRQHNKDKPYKCPNCYRAYSDSASLQIRYPSTDSGICTWNTXLVACNGKGHALLPGGGPLVPXSRSXGQGWQXPQSQXDDNKRKQTKMEESHPAGG

SEQ ID NO: 740249 - protein, 406 aa, Homo sapiens
  misc_feature (382)..(382): Xaa can be any naturally occurring amino acid
  misc_feature (385)..(385): Xaa can be any naturally occurring amino acid
MSRSSPSGKGHSRMAEPRFNNPYFWPPPPTMPSQLDNLVLINKIKEQLMAEKIRPPHLPPTSASSQQPLLVPPAPAESSQAVMSLPKLQQVPGLHPQAVPQPDVALHARPATSTVTGLGLSTRTPSVSTSESSAGAGTGTGTSTPSTPTTTSQSRLIASSPTLISGITSPPLLDSIKTIQGHGLLGPPKSERGRKKIKAENPGGPPVLVVPYPILASGETAKEGKTYRCKVCPLTFFTKSEMQIHSKSHTEAKPHKCPHCSKSFANASYLAQHLRIHLGVKPYHCSYCDKSFRQLSHLQQHTRIHTGDRPYKCPHPGCEKAFTQLSNLQSHQRQHNKDKPYKCPNCYRAYSDSASLQIRYPSTDSGICRAAEPVATRSGERXLLXKNESQAGEGFILQSWGRRSSL

SEQ ID NO: 740250 - protein, 420 aa, Homo sapiens; identical to SEQ ID NO: 740241

SEQ ID NO: 740251 - protein, 303 aa, Homo sapiens
MSRSSPSGKGHSRMAEPRFNNPYFWPPPPTMPSQLDNLVLINKIKEQLMAEKIRPPHLPPTSASSQQPLLVPPAPAESSQAVMSLPKLQQVPGLHPQAVPQPDVALHARPATSTVTGLGLSTRTPSVSTSESSAGAGTGTGTSTPSTPTTTSQSRLIASSPTLISGITSPPLLDSIKTIQGHGLLGPPKSERGRKKIKAENPGGPPVLVVPYPILASGETAKEGKTYRCKVCPLTFFTKSEMQIHSKSHTEAKPHKCPHCSKSFANASYLAQHLRIHLGVKPYHCSYCDKSFRQLSHLQQHTR

SEQ ID NO: 740252 - protein, 332 aa, Homo sapiens
MSRSSPSGKGHSRMAEPRFNNPYFWPPPPTMPSQLDNLVLINKIKEQLMAEKIRPPHLPPTSASSQQPLLVPPAPAESSQAVMSLPKLQQVPGLHPQAVPQPDVALHARPATSTVTGLGLSTRTPSVSTSESSAGAGTGTGTSTPSTPTTTSQSRLIASSPTLISGITSPPLLDSIKTIQGHGLLGPPKSERGRKKIKAENPGGPPVLVVPYPILASGETAKEGKTYRWGSWRDGVRVGLGLGLEPGLLQEPSSGAETGPLGLRGRARVQRGGAFWRAPPTSQVPVRGGLLGRGIEAWTLRCGLWLAATPTAWGCESRFPPPFKQCSQPWPP

SEQ ID NO: 740253 - protein, 1547 aa, Homo sapiens
QRWSQPSAAPGGSGSSLSLCLSATMVLESVVADLLNRFLGDYVENLNKSQLKLGIWGGNVALDNLQIKENALSELDVPFKVKAGQIDKLTLKIPWKNLYGEAVVATLEGLYLLVVPGASIKYDAVKEEKSLQDVKQKELSRIEEALQKAAEKGTHSGEFIYGLENFVYKDIKPGRKRKKHKKHFKKPFKGLDRSKDKPKEAKKDTFVEKLATQVIKNVQVKITDIHIKYEDDVTDPKRPLSFGVTLGELSLLTANEHWTPCILNEADKIIYKLIRLDSLSAYWNVNCSMSYQRSREQILDQLKNEILTSGNIPPNYQYIFQPISASAKLYMNPYAESELKTPKLDCNIEIQNIAIELTKPQYLSMIDLLESVDYMVRNAPYRKYKPYLPLHTNGRRWWKYAIDSVLEVHIRRYTQMWSWSNIKKHRQLLKSYKIAYKNKLTQSKVSEEIQKEIQDLEKTLDVFNIILARQQAQVEVIRSGQKLRKKSADTGEKRGGWFSGLWGKKESKKKDEESLIPETIDDLMTPEEKDKLFTAIGYSESTHNLTLPKQYVAHIMTLKLVSTSVTIRENKNIPEILKIQIIGLGTQVSQRPGAQALKVEAKLEHWYITGLRQQDIVPSLVASIGDTTSSLLKIKFETNPEDSPADQTLIVQSQPVEVIYDAKTVNAVVEFFQSNKGLDLEQITSATLMKLEEIKERTATGLTHIIETRKVLDLRINLKPSYLVVPQTGFHHEKSDLLILDFGTFQLNSKDQGLQKTTNSSLEEIMDKAYDKFDVEIKNVQLLFARAEETWKKCRFQHPSTMHILQPMDIHVELAKAMVEKDIRMARFKVSGGLPLMHVRISDQKMKDVLYLMNSIPLPQKSSAQSPERQVSSIPIISGGTKGLLGTSLLLDTVESESDDEYFDAEDGEPQTCKSMKGSELKKAAEVPNEELINLLLKFEIKEVILEFTKQQKEEDTILVFNVTQLGTEATMRTFDLTVVSYLKKISLDYHEIEGSKKKPLHLISSSDKPGLDLLKVEYIKADKNGPSFQTAFGKTEQTVKVAFSSLNLLLQTQALVASINYLTTIIPSDDQSISVAKEVQISTEKQQKNSTLPKAIVSSRDSDIIDFRLFAKLNAFCVIVCNEKNNIAEIKIQGLDSSLSLQSRKQSLFARLENIIVTDVDPKTVHKKAVSIMGNEVFRFNLDLYPDATEGDLYTDMSKVDGVLSLNVGCIQIVYLHKFLMSLLNFLNNFQTAKESLSAATAQAAERAATSVKDLAQRSFRVSINIDLKAPVIVIPQSSISTNAVVVDLGLIRVHNQFSLVSDEDYLNPPVIDRMDVQLTKLTLYRTVIQPGIYHPDIQLLHPINLEFLVNRNLAASWYHKVPVVEIKGHLDSMNVSLNQEDLNLLFRILTENLCEGTEDLDKVKPRVQETGEIKEPLEISISQDVHDSKNTLTTGVEEIRSVDIINMLLNFEIKEVVVTLMKKSEKKGRPLHELNVLQLGMEAKVKTYDMTAKAYLKKISMQCFDFTDSKGEPLHIINSSNVTDEPLLKMLLTKVTSFISRILEY

SEQ ID NO: 740254 - protein, 1446 aa, Homo sapiens
QRWSQPSAAPGGSGSSLSLCLSATMVLESVVADLLNRFLGDYVENLNKSQLKLGIWGGNVALDNLQIKENALSELDVPFKVKAGQIDKLTLKIPWKNLYGEAVVATLEGLYLLVVPGASIKYDAVKEEKSLQDVKQKELSRIEEALQKAAEKGTHSGEFIYGLENFVYKDIKPGRKRKKHKKHFKKPFKGLDRSKDKPKEAKKDTFVEKLATQVIKNVQVKITDIHIKYEDDVTDPKRPLSFGVTLGELSLLTANEHWTPCILNEADKIIYKLIRLDSLSAYWNVNCSMSYQRSREQILDQLKNEILTSGNIPPNYQYIFQPISASAKLYMNPYAESELKTPKLDCNIEIQNIAIELTKPQYLSMIDLLESVDYMVRNAPYRKYKPYLPLHTNGRRWWKYAIDSVLEVHIRRYTQMWSWSNIKKHRQLLKSYKIAYKNKLTQSKVSEEIQKEIQDLEKTLDVFNIILARQQAQVEVIRSGQKLRKKSADTGEKRGGWFSGLWGKKESKKKDEESLIPETIDDLMTPEEKDKLFTAIGYSESTHNLTLPKQYVAHIMTLKLVSTSVTIRENKNIPEILKIQIIGLGTQVSQRPGAQALKVEAKLEHWYITGLRQQDIVPSLVASIGDTTSSLLKIKFETNPEDSPADQTLIVQSQPVEVIYDAKTVNAVVEFFQSNKGLDLEQITSATLMKLEEIKERTATGLTHIIETRKVLDLRINLKPSYLVVPQTGFHHEKSDLLILDFGTFQLNSKDQGLQKTTNSSLEEIMDKAYDKFDVEIKNVQLLFARAEETWKKCRFQHPSTMHILQPMDIHVELAKAMVEKDIRMARFKVSGGLPLMHVRISDQKMKDVLYLMNSIPLPQKSSAQSPERQVSSIPIISGGTKGLLGTSLLLDTVESESDDEYFDAEDGEPQTCKSMKGSELKKAAEVPNEELINLLLKFEIKEVILEFTKQQKEEDTILVFNVTQLGTEATMRTFDLTVVSYLKKISLDYHEIEGSKKKPLHLISSSDKPGLDLLKVEYIKADKNGPSFQTAFGKTEQTVKVAFSSLNLLLQTQALVASINYLTTIIPSDDQSISVAKEVQISTEKQQKNSTLPKAIVSSRDSDIIDFRLFAKLNAFCVIVCNEKNNIAEIKIQGLDSSLSLQSRKQSLFARLENIIVTDVDPKTVHKKAVSIMGNEVFRFNLDLYPDATEGDLYTDMSKVDGVLSLNVGCIQIVYLHKFLMSLLNFLNNFQTAKESLSAATAQAAERAATSVKDLAQRSFRVSINIDLKAPVIVIPQSSISTNAVVVDLGLIRVHNQFSLVSDEDYLNPPVIDRMDVQLTKLTLYRTVIQPGIYHPDIQLLHPINLEFLVNRNLAASWYHKVPVVEIKGHLDSMNVSLNQEDLNLLFRILTENLCEGTEDLDKVKPRVQETGEIKEPLEISISQDVHDSKNTLTTGVEEIRLWLL

SEQ ID NO: 740255 - protein, 1504 aa, Homo sapiens
QRWSQPSAAPGGSGSSLSLCLSATMVLESVVADLLNRFLGDYVENLNKSQLKLGIWGGNVALDNLQIKENALSELDVPFKVKAGQIDKLTLKIPWKNLYGEAVVATLEGLYLLVVPGASIKYDAVKEEKSLQDVKQKELSRIEEALQKAAEKDKPKEAKKDTFVEKLATQVIKNVQVKITDIHIKYEDDVTDPKRPLSFGVTLGELSLLTANEHWTPCILNEADKIIYKLIRLDSLSAYWNVNCSMSYQRSREQILDQLKNEILTSGNIPPNYQYIFQPISASAKLYMNPYAESELKTPKLDCNIEIQNIAIELTKPQYLSMIDLLESVDYMVRNAPYRKYKPYLPLHTNGRRWWKYAIDSVLEVHIRRYTQMWSWSNIKKHRQLLKSYKIAYKNKLTQSKVSEEIQKEIQDLEKTLDVFNIILARQQAQVEVIRSGQKLRKKSADTGEKRGGWFSGLWGKKESKKKDEESLIPETIDDLMTPEEKDKLFTAIGYSESTHNLTLPKQYVAHIMTLKLVSTSVTIRENKNIPEILKIQIIGLGTQVSQRPGAQALKVEAKLEHWYITGLRQQDIVPSLVASIGDTTSSLLKIKFETNPEDSPADQTLIVQSQPVEVIYDAKTVNAVVEFFQSNKGLDLEQITSATLMKLEEIKERTATGLTHIIETRKVLDLRINLKPSYLVVPQTGFHHEKSDLLILDFGTFQLNSKDQGLQKTTNSSLEEIMDKAYDKFDVEIKNVQLLFARAEETWKKCRFQHPSTMHILQPMDIHVELAKAMVEKDIRMARFKVSGGLPLMHVRISDQKMKDVLYLMNSIPLPQKSSAQSPERQVSSIPIISGGTKGLLGTSLLLDTVESESDDEYFDAEDGEPQTCKSMKGSELKKAAEVPNEELINLLLKFEIKEVILEFTKQQKEEDTILVFNVTQLGTEATMRTFDLTVVSYLKKISLDYHEIEGSKKKPLHLISSSDKPGLDLLKVEYIKADKNGPSFQTAFGKTEQTVKVAFSSLNLLLQTQALVASINYLTTIIPSDDQSISVAKEVQISTEKQQKNSTLPKAIVSSRDSDIIDFRLFAKLNAFCVIVCNEKNNIAEIKIQGLDSSLSLQSRKQSLFARLENIIVTDVDPKTVHKKAVSIMGNEVFRFNLDLYPDATEGDLYTDMSKVDGVLSLNVGCIQIVYLHKFLMSLLNFLNNFQTAKESLSAATAQAAERAATSVKDLAQRSFRVSINIDLKAPVIVIPQSSISTNAVVVDLGLIRVHNQFSLVSDEDYLNPPVIDRMDVQLTKLTLYRTVIQPGIYHPDIQLLHPINLEFLVNRNLAASWYHKVPVVEIKGHLDSMNVSLNQEDLNLLFRILTENLCEGTEDLDKVKPRVQETGEIKEPLEISISQDVHDSKNTLTTGVEEIRSVDIINMLLNFEIKEVVVTLMKKSEKKGRPLHELNVLQLGMEAKVKTYDMTAKAYLKKISMQCFDFTDSKGEPLHIINSSNVTDEPLLKMLLTKVTSFISRILEY

SEQ ID NO: 740256 - protein, 474 aa, Homo sapiens
FFFCILIQFKSVWLVHFNSFTTKLGGRDWLQFFCLLFFTDDQGIKISAASNFKLHIVLIFLDLDRFSILSLGCEQKVLDFLNFRRHGDKARREQARTGTACGDREKQIGICSLVMDPEETSVYLDYYYATSPNSDIRETHSHVPYTSVFLPVFYTAVFLTGVLGNLVLMGALHFKPGSRRLIDIFIINLAASDFIFLVTLPLWVDKEASLGLWRTGSFLCKGSSYMISVNMHCSVLLLTCMSVDRYLAIVWPVVSRKFRRTDCAYVVCASIWFISCLLGLPTLLSRELTLIDDKPYCAEKKATPIKLIWSLVALIFTFFVPLLSIVTCYCCIARKLCAHYQQSGKHNKKLKKSIKIIFIVVAAFLVSWLPFNTFKFLAIVSGLRQEHYLPSAILQLGMEVSGPLAFANSCVNPFIYYIFDSYIRRAIVHCLCPCLKNYDFGSSTETSDSHLTKALSTFIHAEDFARRRKRSVSL

SEQ ID NO: 740257 - protein, 129 aa, Homo sapiens
FFFCILIQFKSVWLVHFNSFTTKLGGRDWLQFFCLLFFTDDQGIKISAASNFKLHIVLIFLDLDRFSILSLGCEQKVLDFLNFRRHGDKARREQARTGTACGDREKQDRKRQTAFKAPGLTLEATPKWR

SEQ ID NO: 740258 - protein, 191 aa, Homo sapiens
MSGALDVLQMKEEDVLKFLAAGTHLGGTNLDFQMEQYIYKRKSDGIYIINLKRTWEKLLLAARAIVAIENPADVSVISSRNTGQRAVLKFAAATGATPIAGRFTPGTFTNQIQAAFREPRLLVVTDPRADHQPLTEASYVNLPTIALCNTDSPLRYVDIAIPCNNKGAHSVGLMWWMLAREVLRMRGTIFP

SEQ ID NO: 740259 - protein, 191 aa, Homo sapiens; identical to SEQ ID NO: 740258

SEQ ID NO: 740260 - protein, 191 aa, Homo sapiens; identical to SEQ ID NO: 740258

SEQ ID NO: 740261 - protein, 191 aa, Homo sapiens; identical to SEQ ID NO: 740258

SEQ ID NO: 740262 - protein, 191 aa, Homo sapiens; identical to SEQ ID NO: 740258

SEQ ID NO: 740263 - protein, 191 aa, Homo sapiens; identical to SEQ ID NO: 740258

SEQ ID NO: 740264 - protein, 191 aa, Homo sapiens; identical to SEQ ID NO: 740258

SEQ ID NO: 740265 - protein, 191 aa, Homo sapiens; identical to SEQ ID NO: 740258

SEQ ID NO: 740266 - protein, 191 aa, Homo sapiens; identical to SEQ ID NO: 740258

SEQ ID NO: 740267 - protein, 209 aa, Homo sapiens
MLRHVGEVSGPALAEIDLARSCSGYLQNKVRDQQLVYSAGVYRLPKTAADPSAEYIYKRKSDGIYIINLKRTWEKLLLAARAIVAIENPADVSVISSRNTGQRAVLKFAAATGATPIAGRFTPGTFTNQIQAAFREPRLLVVTDPRADHQPLTEASYVNLPTIALCNTDSPLRYVDIAIPCNNKGAHSVGLMWWMLAREVLRMRGTIFP

SEQ ID NO: 740268 - protein, 191 aa, Homo sapiens; identical to SEQ ID NO: 740258

SEQ ID NO: 740269 - protein, 162 aa, Homo sapiens
MSGALDVLQMKEEDVLKFLAAGTHLGGTNLDFQMEQYIYKRKSDGIYIINLKRTWEKLLLAARAIVAIENPADVSVISSRNTGQRAVLKFAAATGATPIAGRFTPGTFTNQIQAAFREPRLLVVTDPRADHQPLTEASYVNLPTIALCNTDSPLRSSHCSGH

SEQ ID NO: 740270 - protein, 147 aa, Homo sapiens
SSCPPKAEAKAKALKAKKAVLKGATATKKMIHTSPTFQWPKTLRLWRQPKYPWKSAPRRNKLDHYAIIKFPLTTESAMKKIGDSNTLVFIVDVKANKHQIKQAVKKLYDIDMAKVNTLIRPDGEKKAYVPLAPDYDALDVANKIGII

SEQ ID NO: 740271 - protein, 349 aa, Homo sapiens
MALLRKINQVLLFLLIVTLCVILYKKVHKGTVPKNDADDESETPEELEEEIPVVICAAAGRMGATMAAINSIYSNTDANILFYVVGLRNTLTRIRKWIEHSKLREINFKIVEFNPMVLKGKIRPDSSRPELLQPLNFVRFYLPLLIHQHEKVIYLDDDVIVQGDIQELYDTTLALGHAAAFSDDCDLPSAQDINRLVGLQNTYMGYLDYRKKAIKDLGISPSTCSFNPGVIVANMTEWKHQRITKQLEKWMQKNVEENLYSSSLGGGVATSPMLIVFHGKYSTINPLWHIRHLGWNPDARYSEHFLQEAKLLHWNGRHKPWDFPSVHNDLWESWFVPDPAGIFKLNHHS

SEQ ID NO: 740272 - protein, 349 aa, Homo sapiens; identical to SEQ ID NO: 740271

SEQ ID NO: 740273 - protein, 146 aa, Homo sapiens
MGYLDYRKKAIKDLGISPSTCSFNPGVIVANMTEWKHQRITKQLEKWMQKNVEENLYSSSLGGGVATSPMLIVFHGKYSTINPLWHIRHLGWNPDARYSEHFLQEAKLLHWNGRHKPWDFPSVHNDLWESWFVPDPAGIFKLNHHS

SEQ ID NO: 740274 - protein, 349 aa, Homo sapiens; identical to SEQ ID NO: 740271

SEQ ID NO: 740275 - protein, 274 aa, Homo sapiens [sequence omitted]

SEQ ID NO: 740276 - protein, 756 aa, Homo sapiens
GSWSSLGPAGFAPAPPAFHSCPGRRVFKAGHTRLEIRDRAPPQALCTPLPGDLHWCSSVNMVQRYQSPVRVYKYPFELVMAAYEKRFPTCPQIPVFLGSEVLRESRSPDGAVHVVERSCRLRVDAPRLLRKIAGVEHVVFVQTNILNWKERTLLIEAHNETFANRVVVNEHCSYTVHPENEDWTCFEQSASLDIRSFFGFENALEKIAMKQYTANVKRGKEVIEHYLNELISQGTSHIPRWTPAPVREEDARNQAGPRDPSSLEAHGPRSTLGPALEAVSMDGDKLDADYIERCLGHLTPMQESCLIQLRHWLQETHKGKIPKDEHILRFLRAHDFHLDKAREMLRQSLSWRKQHQVDLLLQTWQPPALLEEFYAGGWHYQDIDGRPLYILRLGQMDTKGLMKAVGEEALLRHVLSVNEEGQKRCEGSTRQLGRPISSWTCLLDLEGLNMRHLWRPGVKALLRMIEVVEDNYPETLGRLLIVRAPRVFPVLWTLISPFINENTRRKFLIYSGSNYQGPGGLVDYLDREVIPDFLGGESVCNVPEGGLVPKSLYMTEEEQEHTDQLWQWSETYHSASVLRGAPHEVAVEILEGESVITWDFDILRGDVVFSLYHTKQAPRLGAREPGTRASGQLIDKGWVLGRDYSRVEAPLVCREGESIQGSHVTRWPGVYLLQWQMHSPPSSVACSLPGVDDVLTALHSPGPKCKLLYYCEVLASEDFRGSMSSLESCTSGFSQLSAATSSSSSGQSHSSSLVSR

SEQ ID NO: 740277 - protein, 96 aa, Homo sapiens
VGQPDTTIHTSNYLIRAMTRTAKPKPVCRGSTGSPGRAKSTQHHHTKEQLFRILLKLKNMKPQRGFLACLLWTQDCSKHSWILPFDPHNSHVFLCL

SEQ ID NO: 740278 - protein, 110 aa, Homo sapiens
PHLLLGEGPGGMEGVCGRLPRTTRRALFLLELEPAPGVFLGARALPLNGLCLQTICCADHEPSPQCQTDSSSGPAVPLGPLRKAQKPGTPNRVQLLPPALLGAAHLVTCV

SEQ ID NO: 740279 - protein, 105 aa, Homo sapiens
MLHLASIPTAAGLPASCFVKNGPDFHQTLIGLGLAFILPQPLHRLLATGCSLLQPGQCRSPGTDPGPGRPANSIALISHSAHQCWLPTPTAPPEGRFVSGLHHAL

SEQ ID NO: 740280 - protein, 328 aa, Homo sapiens
SEKENDPLRTPEALPEEKKIEYRLLKEEIANREKQRLIKSDQLKTSSSSPANSDVEIDGIGRIAMVTKQVTDAESKLKKHRILLMKDESVLKNLVQQEAKKKESVRNAEAKITKLTEQLQATEKILNVNRMFLKKLQEQIHRVQQRVTIKKALTLKYGEELARAKAVASKEIGKRKLEQDRFGPNKMMRLDSSPVSSPRKHSAELIAMEKRRLQKLEYEYALKIQKLKEARALKAKEQQNISPVVEEEPEFSLPQPSLHDLTQDKLTLDTEENDVDDEILSGSSRERRRSFLESNYFTKPNLKHTDTANKECINKLNKNTVEKPEKFL

SEQ ID NO: 740281 - protein, 158 aa, Homo sapiens
GEGEMAQPADSESGLSLLCKITFKSRPSLAPPAASSSLAAKASLGGGGGGGLFAASGAISYAEVLKQGPLPPGAARPLGEVSRGAQEAEGGDGDGEGCSGPPSAPASQARALPPPPYTTFPGSKPKFDWVSAPDGPERHFRFNGAGGGIGAPRRRAAA

SEQ ID NO: 740282 - protein, 104 aa, Homo sapiens
RRDLYGQCPRTVSDLALQNAFGDRWGPYFAEYDWCSTCSSSSESDNEGYFLGEPIPQPARLRYVTSDELLHKYSSYGLPKSSTLGGRGQLHSRKRQKSKNCIIS

SEQ ID NO: 740283 - protein, 202 aa, Homo sapiens
RLRPVRRALVAALPRASGRWGRQQRGRRHAGHGSLGGGEHSRLNPLRRLWLTLTAAFLLTLLLQLLPPGLLPGCAIFQDLIRYGKTKCGEPSRPAACRAFDVPKRYFSHFYIISVLWNGFLLWCLTQSLFLGAPFPSWLHGLLRILGAAQFQGGELALSAFLVLVFLWLHSLRRLFECLYVSVFSNVMIHVVQYCFGLVYYV

SEQ ID NO: 740284 - protein, 145 aa, Homo sapiens
VREKWSADMWRLGLPHLGSLQWAPTSGSSLRNPGKIPKTLVPHYCELVGANPKVRPNPARFLQNCRAPGGFMSNRFVETNPAIREQTVKSMLLLAPKLNEANLNVELMKHFARLQAKDEQGPIRCNTTVCLGKIGSYLSASRECP

SEQ ID NO: 740285 - protein, 643 aa, Homo sapiens
QAGHLRAQGQREVRAAQRSHSPARTHSMMSLSVRPQRRLLSARVNRSQSFAGVLGSHERGPRSFPVFSPPGPPRKPPALSRVSRMFSVAHPAAKVPQPERLDLVYTALKRGLTAYLEVHQQEQEKLQGQIRESKRNSRLGFLYDLDKQVKSIERFLRRLEFHASKIDELYEAYCVQRRLRDGAYNMVRAYTTGSPGSREARDSLAEATRGHREYTESMCLLESELEAQLGEFHLRMKGLAGFARLCVGDQYEICMKYGRQRWKLRGRIEGSGKQVWDSEETIFLPLLTEFLSIKVTELKGLANHVVVGSVSCETKDLFAALPQVVAVDINDLGTIKLSLEVTWSPFDKDDQPSAASSVNKASTVTKRFSTYSQSPPDTPSLREQAFYNMLRRQEELENGTAWSLSSESSDDSSSPQLSGTARHSPAPRPLVQQPEPLPIQVAFRRPETPSSGPLDEEGAVAPVLANGHAPYSRTLSHISEASVDAALAEASVEAVGPESLAWGPSPPTHPAPTHGEHPSPVPPALDPGHSATSSTLGTTGSVPTSTDPAPSAHLDSVHKSTDSGPSELPGPTHTTTGSTYSAITTTHSAPSPLTHTTTGSTHKPIISTLTTTGPTLNIIGPVQTTTSPTHTMPSPTHTTASPN

SEQ ID NO: 740286 - protein, 1232 aa, Homo sapiens
GFTRMWSPARTHSMMSLSVRPQRRLLSARVNRSQSFAGVLGSHERGPRSFPVFSPPGPPRKPPALSRVSRMFSVAHPAAKVPQPERLDLVYTALKRGLTAYLEVHQQEQEKLQGQIRESKRNSRLGFLYDLDKQVKSIERFLRRLEFHASKIDELYEAYCVQRRLRDGAYNMVRAYTTGSPGSREARDSLAEATRGHREYTESMCLLESELEAQLGEFHLRMKGLAGFARLCVGDQYEICMKYGRQRWKLRGRIEGSGKQVWDSEETIFLPLLTEFLSIKVTELKGLANHVVVGSVSCETKDLFAALPQVVAVDINDLGTIKLSLEVTWSPFDKDDQPSAASSVNKASTVTKRFSTYSQSPPDTPSLREQAFYNMLRRQEELENGTAWSLSSESSDDSSSPQLSGTARHSPAPRPLVQQPEPLPIQVAFRRPETPSSGPLDEEGAVAPVLANGHAPYSRTLSHISEASVDAALAEASVEAVGPESLAWGPSPPTHPAPTHGEHPSPVPPALDPGHSATSSTLGTTGSVPTSTDPAPSAHLDSVHKSTDSGPSELPGPTHTTTGSTYSAITTTHSAPSPLTHTTTGSTHKPIISTLTTTGPTLNIIGPVQTTTSPTHTMPSPTHTTASPTHTSTSPTHTPTSPTHKTSMSPPTTTSPTPSGMGLVQTATSPTHPTTSPTHPTTSPILINVSPSTSLELATLSSPSKHSDPTLPGTDSLPCSPPVSNSYTQADPMAPRTPHPSPAHSSRKPLTSPAPDPSESTVQSLSPTPSPPTPAPQHSDLCLAMAVQTPVPTAAGGSGDRSLEEALGALMAALDDYRGQFPELQGLEQEVTRLESLLMQRQGLTRSRASSLSITVEHALESFSFLNEDEDEDNDVPGDRPPSSPEAGAEDSIDSPSARPLSTGCPALDAALVRHLYHCSRLLLKLGTFGPLRCQEAWALERLLREARVLEAVCEFSRRWEIPASSAQEVVQFSASRPGFLTFWDQCTERLSCFLCPVERVLLTFCNQYGARLSLRQPGLAEAVCVKFLEDALGQKLPRRPQPGPGEQLTVFQFWSFVETLDSPTMEAYVTETAEEVLLVRNLNSDDQAVVLKALRLAPEGRLRRDGLRALSSLLVHGNNKVMAAVSTQLRSLSLGPTFRERALLCFLDQLEDEDVQTRVAGCLALGCIKAPEGIEPLVYLCQTDTEAVREAARQSLQQCGEEGQSAHRRLEESLDALPRIFGPGSMASTAF

SEQ ID NO: 740287 - protein, 1204 aa, Homo sapiens
RPGTSERKDSARSAQPSAAMSFPVFSPPGPPRKPPALSRVSRMFSVAHPAAKVPQPERLDLVYTALKRGLTAYLEVHQQEQEKLQGQIRESKRNSRLGFLYDLDKQVKSIERFLRRLEFHASKIDELYEAYCVQRRLRDGAYNMVRAYTTGSPGSREARDSLAEATRGHREYTESMCLLESELEAQLGEFHLRMKGLAGFARLCVGDQYEICMKYGRQRWKLRGRIEGSGKQVWDSEETIFLPLLTEFLSIKVTELKGLANHVVVGSVSCETKDLFAALPQVVAVDINDLGTIKLSLEVTWSPFDKDDQPSAASSVNKASTVTKRFSTYSQSPPDTPSLREQAFYNMLRRQEELENGTAWSLSSESSDDSSSPQLSGTARHSPAPRPLVQQPEPLPIQVAFRRPETPSSGPLDEEGAVAPVLANGHAPYSRTLSHISEASVDAALAEASVEAVGPESLAWGPSPPTHPAPTHGEHPSPVPPALDPGHSATSSTLGTTGSVPTSTDPAPSAHLDSVHKSTDSGPSELPGPTHTTTGSTYSAITTTHSAPSPLTHTTTGSTHKPIISTLTTTGPTLNIIGPVQTTTSPTHTMPSPTHTTASPTHTSTSPTHTPTSPTHKTSMSPPTTTSPTPSGMGLVQTATSPTHPTTSPTHPTTSPILINVSPSTSLELATLSSPSKHSDPTLPGTDSLPCSPPVSNSYTQADPMAPRTPHPSPAHSSRKPLTSPAPDPSESTVQSLSPTPSPPTPAPQHSDLCLAMAVQTPVPTAAGGSGDRSLEEALGALMAALDDYRGQFPELQGLEQEVTRLESLLMQRQGLTRSRASSLSITVEHALESFSFLNEDEDEDNDVPGDRPPSSPEAGAEDSIDSPSARPLSTGCPALDAALVRHLYHCSRLLLKLGTFGPLRCQEAWALERLLREARVLEAVCEFSRRWEIPASSAQEVVQFSASRPGFLTFWDQCTERLSCFLCPVERVLLTFCNQYGARLSLRQPGLAEAVCVKFLEDALGQKLPRRPQPGPGEQLTVFQFWSFVETLDSPTMEAYVTETAEEVLLVRNLNSDDQAVVLKALRLAPEGRLRRDGLRALSSLLVHGNNKVMAAVSTQLRSLSLGPTFRERALLCFLDQLEDEDVQTRVAGCLALGCIKAPEGIEPLVYLCQTDTEAVREAARQSLQQCGEEGQSAHRRLEESLDALPRIFGPGSMASTAF

SEQ ID NO: 740288 - protein, 1153 aa, Homo sapiens
RPGTSERKDSARSAQPSAAMAYLEVHQQEQEKLQGQIRESKRNSRLGFLYDLDKQVKSIERFLRRLEFHASKIDELYEAYCVQRRLRDGAYNMVRAYTTGSPGSREARDSLAEATRGHREYTESMCLLESELEAQLGEFHLRMKGLAGFARLCVGDQYEICMKYGRQRWKLRGRIEGSGKQVWDSEETIFLPLLTEFLSIKVTELKGLANHVVVGSVSCETKDLFAALPQVVAVDINDLGTIKLSLEVTWSPFDKDDQPSAASSVNKASTVTKRFSTYSQSPPDTPSLREQAFYNMLRRQEELENGTAWSLSSESSDDSSSPQLSGTARHSPAPRPLVQQPEPLPIQVAFRRPETPSSGPLDEEGAVAPVLANGHAPYSRTLSHISEASVDAALAEASVEAVGPESLAWGPSPPTHPAPTHGEHPSPVPPALDPGHSATSSTLGTTGSVPTSTDPAPSAHLDSVHKSTDSGPSELPGPTHTTTGSTYSAITTTHSAPSPLTHTTTGSTHKPIISTLTTTGPTLNIIGPVQTTTSPTHTMPSPTHTTASPTHTSTSPTHTPTSPTHKTSMSPPTTTSPTPSGMGLVQTATSPTHPTTSPTHPTTSPILINVSPSTSLELATLSSPSKHSDPTLPGTDSLPCSPPVSNSYTQADPMAPRTPHPSPAHSSRKPLTSPAPDPSESTVQSLSPTPSPPTPAPQHSDLCLAMAVQTPVPTAAGGSGDRSLEEALGALMAALDDYRGQFPELQGLEQEVTRLESLLMQRQGLTRSRASSLSITVEHALESFSFLNEDEDEDNDVPGDRPPSSPEAGAEDSIDSPSARPLSTGCPALDAALVRHLYHCSRLLLKLGTFGPLRCQEAWALERLLREARVLEAVCEFSRRWEIPASSAQEVVQFSASRPGFLTFWDQCTERLSCFLCPVERVLLTFCNQYGARLSLRQPGLAEAVCVKFLEDALGQKLPRRPQPGPGEQLTVFQFWSFVETLDSPTMEAYVTETAEEVLLVRNLNSDDQAVVLKALRLAPEGRLRRDGLRALSSLLVHGNNKVMAAVSTQLRSLSLGPTFRERALLCFLDQLEDEDVQTRVAGCLALGCIKAPEGIEPLVYLCQTDTEAVREAARQSLQQCGEEGQSAHRRLEESLDALPRIFGPGSMASTAF

SEQ ID NO: 740289 - protein, 1064 aa, Homo sapiens
GFTRMWSPARTHSMMSLSVRPQRRLLSARVNRSQSFAGVLGSHERGPRSFPVFSPPGPPRKPPALSRVSRMFSVAHPAAKVPQPERLDLVYTALKRGLTAYLEVHQQEQEKLQGQIRESKRNSRLGFLYDLDKQVKSIERFLRRLEFHASKIDELYEAYCVQRRLRDGAYNMVRAYTTGSPGSREARDSLAEATRGHREYTESMCLLESELEAQLGEFHLRMKGLAGFARLCVGDQYEICMKYGRQRWKLRGRIEGSGKQVWDSEETIFLPLLTEFLSIKVTELKGLANHVVVGSVSCETKDLFAALPQVVAVDINDLGTIKLSLEVTWSPFDKDDQPSAASSVNKASTVTKRFSTYSQSPPDTPSLREQAFYNMLRRQEELENGTAWSLSSESSDDSSSPQLSGTARHSPAPRPLVQQPEPLPIQVAFRRPETPSSGPLDEEGAVAPVLANGHAPYSRTLSHISEASVDAALAEASVEAVGPESLAWGPSPPTHPAPTHGEHPSPVPPALDPGHSATSSTLGTTGSVPTSLRVYGSESKPTLPGTDSLPCSPPVSNSYTQADPMAPRTPHPSPAHSSRKPLTSPAPDPSESTVQSLSPTPSPPTPAPQHSDLCLAMAVQTPVPTAAGGSGDRSLEEALGALMAALDDYRGQFPELQGLEQEVTRLESLLMQRQGLTRSRASSLSITVEHALESFSFLNEDEDEDNDVPGDRPPSSPEAGAEDSIDSPSARPLSTGCPALDAALVRHLYHCSRLLLKLGTFGPLRCQEAWALERLLREARVLEAVCEFSRRWEIPASSAQEVVQFSASRPGFLTFWDQCTERLSCFLCPVERVLLTFCNQYGARLSLRQPGLAEAVCVKFLEDALGQKLPRRPQPGPGEQLTVFQFWSFVETLDSPTMEAYVTETAEEVLLVRNLNSDDQAVVLKALRLAPEGRLRRDGLRALSSLLVHGNNKVMAAVSTQLRSLSLGPTFRERALLCFLDQLEDEDVQTRVAGCLALGCIKAPEGIEPLVYLCQTDTEAVREAARQSLQQCGEEGQSAHRRLEESLDALPRIFGPGSMASTAF

SEQ ID NO: 740290 - protein, 1241 aa, Homo sapiens
GFTRMWSPARTHSMMSLSVRPQRRLLSARVNRSQSFAGVLGSHERGPRSFPVFSPPGPPRKPPALSRVSRMFSVAHPAAKVPQPERLDLVYTALKRGLTAYLEVHQQEQEKLQGQIRESKRNSRLGFLYDLDKQVKSIERFLRRLEFHASKIDELYEAYCVQRRLRDGAYNMVRAYTTGSPGSREARDSLAEATRGHREYTESMCLLESELEAQLGEFHLRMKGLAGFARLCVGDQYEAASSYLFPQICMKYGRQRWKLRGRIEGSGKQVWDSEETIFLPLLTEFLSIKVTELKGLANHVVVGSVSCETKDLFAALPQVVAVDINDLGTIKLSLEVTWSPFDKDDQPSAASSVNKASTVTKRFSTYSQSPPDTPSLREQAFYNMLRRQEELENGTAWSLSSESSDDSSSPQLSGTARHSPAPRPLVQQPEPLPIQVAFRRPETPSSGPLDEEGAVAPVLANGHAPYSRTLSHISEASVDAALAEASVEAVGPESLAWGPSPPTHPAPTHGEHPSPVPPALDPGHSATSSTLGTTGSVPTSTDPAPSAHLDSVHKSTDSGPSELPGPTHTTTGSTYSAITTTHSAPSPLTHTTTGSTHKPIISTLTTTGPTLNIIGPVQTTTSPTHTMPSPTHTTASPTHTSTSPTHTPTSPTHKTSMSPPTTTSPTPSGMGLVQTATSPTHPTTSPTHPTTSPILINVSPSTSLELATLSSPSKHSDPTLPGTDSLPCSPPVSNSYTQADPMAPRTPHPSPAHSSRKPLTSPAPDPSESTVQSLSPTPSPPTPAPQHSDLCLAMAVQTPVPTAAGGSGDRSLEEALGALMAALDDYRGQFPELQGLEQEVTRLESLLMQRQGLTRSRASSLSITVEHALESFSFLNEDEDEDNDVPGDRPPSSPEAGAEDSIDSPSARPLSTGCPALDAALVRHLYHCSRLLLKLGTFGPLRCQEAWALERLLREARVLEAVCEFSRRWEIPASSAQEVVQFSASRPGFLTFWDQCTERLSCFLCPVERVLLTFCNQYGARLSLRQPGLAEAVCVKFLEDALGQKLPRRPQPGPGEQLTVFQFWSFVETLDSPTMEAYVTETAEEVLLVRNLNSDDQAVVLKALRLAPEGRLRRDGLRALSSLLVHGNNKVMAAVSTQLRSLSLGPTFRERALLCFLDQLEDEDVQTRVAGCLALGCIKAPEGIEPLVYLCQTDTEAVREAARQSLQQCGEEGQSAHRRLEESLDALPRIFGPGSMASTAF

SEQ ID NO: 740291 - protein, 1275 aa, Homo sapiens
GFTRMWSPARTHSMMSLSVRPQRRLLSARVNRSQSFAGVLGSHERGPRSFPVFSPPGPPRKPPALSRVSRMFSVAHPAAKVPQPERLDLVYTALKRGLTAYLEVHQQEQEKLQGQIRESKRNSRLGFLYDLDKQVKSIERFLRRLEFHASKIDELYEAYCVQRRLRDGAYNMVRAYTTGSPGSREARDSLAEATRGHREYTESMCLLESELEAQLGEFHLRMKGLAGFARLCVGDQYEICMKYGRQRWKLRGRIEGSGKQVWDSEETIFLPLLTEFLSIKVTELKGLANHVVVGSVSCETKDLFAALPQVVAVDINDLGTIKLSLEVTWSPFDKDDQPSAASSVNKASTVTKRFSTYSQSPPDTPSLREQAFYNMLRRQEELENGTAWSLSSESSDDSSSPQLSGTARHSPAPRPLVQQPEPLPIQVAFRRPETPSSGPLDEEGAVAPVLANGHAPYSRTLSHISEASVDAALAEASVEAVGPESLAWGPSPPTHPAPTHGEHPSPVPPALDPGHSATSSTLGTTGSVPTSTDPAPSAHLDSVHKSTDSGPSELPGPTHTTTGSTYSAITTTHSAPSPLTHTTTGSTHKPIISTLTTTGPTLNIIGPVQTTTSPTHTMPSPTHTTASPTHTSTSPTHTPTSPTHKTSMSPPTTTSPTPSGMGLVQTATSPTHPTTSPTHPTTSPILINVSPSTSLELATLSSPSKHSDPTLPGTDSLPCSPPVSNSYTQADPMAPRTPHPSPAHSSRKPLTSPAPDPSESTVQSLSPTPSPPTPAPQHSDLCLAMAVQTPVPTAAGGSGDRSLEEALGALMAALDDYRGQFPELQGLEQEVTRLESLLMQRQGLTRSRASSLSITVEHALESFSFLNEDEDEDNDVPGDRPPSSPEAGAEDSIDSPSARPLSTGCPALDAALVRHLYHCSRLLLKLGTFGPLRCQEAWALERLLREARVLEAVCEFSRRWEIPASSAQEVVQFSASRPGFLTFWDQCTERLSCFLCPVERVLLTFCNQYGARLSLRQPGLAEAVCVKFLEDALGQKLPRRPQPGPGEQLTVFQFWSFVETLDSPTMEAYVTETAEEGEAVALITYGLLGSEDMEDKPSPTSGAPHPATLPTHPPYPLFSVLLVRNLNSDDQAVVLKALRLAPEGRLRRDGLRALSSLLVHGNNKVMAAVSTQLRSLSLGPTFRERALLCFLDQLEDEDVQTRVAGCLALGCIKAPEGIEPLVYLCQTDTEAVREAARQSLQQCGEEGQSAHRRLEESLDALPRIFGPGSMASTAF

SEQ ID NO: 740292 - protein, 549 aa, Homo sapiens
GFTRMWSPARTHSMMSLSVRPQRRLLSARVNRSQSFAGVLGSHERGPRSFPVFSPPGPPRKPPALSRVSRMFSVAHPAAKVPQPERLDLVYTALKRGLTAYLEVHQQEQEKLQGQIRESKRNSRLGFLYDLDKQVKSIERFLRRLEFHASKIDELYEAYCVQRRLRDGAYNMVRAYTTGSPGSREARDSLAEATRGHREYTESMCLLESELEAQLGEFHLRMKGLAGFARLCVGDQYEICMKYGRQRWKLRGRIEGSGKQVWDSEETIFLPLLTEFLSIKVTELKGLANHVVVGSVSCETKDLFAALPQVVAVDINDLGTIKLSLEVTWSPFDKDDQPSAASSVNKASTVTKRFSTYSQSPPDTPSLREQAFYNMLRRQEELENGTAWSLSSESSDDSSSPQLSGTARHSPAPRPLVQQPEPLPIQVAFRRPETPSSGPLDEEGAVAPVLANGHAPYSRTLSHISEASVDAALAEASVEAVGPESLAWGPSPPTHPAPTHGEHPSPVPPALDPGHSATSSTLGTTGSVPTSTDPAPSAHLDSVHKSTDS

SEQ ID NO: 740293 - protein, 90 aa, Homo sapiens
RPRRVGGVKGRQMGLGLGVRSESLGDSCSPLSEDSLSFRSFPVFSPPGPPRKPPALSRVSRMFSVAHPAAKVPQPERLDLVYTALKRGLT

SEQ ID NO: 740294 - protein, 1149 aa, Homo sapiens
MRLESQFILVVAPFLRAYLEVHQQEQEKLQGQIRESKRNSRLGFLYDLDKQVKSIERFLRRLEFHASKIDELYEAYCVQRRLRDGAYNMVRAYTTGSPGSREARDSLAEATRGHREYTESMCLLESELEAQLGEFHLRMKGLAGFARLCVGDQYEICMKYGRQRWKLRGRIEGSGKQVWDSEETIFLPLLTEFLSIKVTELKGLANHVVVGSVSCETKDLFAALPQVVAVDINDLGTIKLSLEVTWSPFDKDDQPSAASSVNKASTVTKRFSTYSQSPPDTPSLREQAFYNMLRRQEELENGTAWSLSSESSDDSSSPQLSGTARHSPAPRPLVQQPEPLPIQVAFRRPETPSSGPLDEEGAVAPVLANGHAPYSRTLSHISEASVDAALAEASVEAVGPESLAWGPSPPTHPAPTHGEHPSPVPPALDPGHSATSSTLGTTGSVPTSTDPAPSAHLDSVHKSTDSGPSELPGPTHTTTGSTYSAITTTHSAPSPLTHTTTGSTHKPIISTLTTTGPTLNIIGPVQTTTSPTHTMPSPTHTTASPTHTSTSPTHTPTSPTHKTSMSPPTTTSPTPSGMGLVQTATSPTHPTTSPTHPTTSPILINVSPSTSLELATLSSPSKHSDPTLPGTDSLPCSPPVSNSYTQADPMAPRTPHPSPAHSSRKPLTSPAPDPSESTVQSLSPTPSPPTPAPQHSDLCLAMAVQTPVPTAAGGSGDRSLEEALGALMAALDDYRGQFPELQGLEQEVTRLESLLMQRQGLTRSRASSLSITVEHALESFSFLNEDEDEDNDVPGDRPPSSPEAGAEDSIDSPSARPLSTGCPALDAALVRHLYHCSRLLLKLGTFGPLRCQEAWALERLLREARVLEAVCEFSRRWEIPASSAQEVVQFSASRPGFLTFWDQCTERLSCFLCPVERVLLTFCNQYGARLSLRQPGLAEAVCVKFLEDALGQKLPRRPQPGPGEQLTVFQFWSFVETLDSPTMEAYVTETAEEVLLVRNLNSDDQAVVLKALRLAPEGRLRRDGLRALSSLLVHGNNKVMAAVSTQLRSLSLGPTFRERALLCFLDQLEDEDVQTRVAGCLALGCIKAPEGIEPLVYLCQTDTEAVREAARQSLQQCGEEGQSAHRRLEESLDALPRIFGPGSMASTAF

SEQ ID NO: 740295 - protein, 1220 aa, Homo sapiens
ALGAMPGAQAGWLEVASAGMVRVGVRAAVSGGLSRTHHEHQEERESPARTHSMMSLSVRPQRRLLSARVNRSQSFAGVLGSHERGPRAYLEVHQQEQEKLQGQIRESKRNSRLGFLYDLDKQVKSIERFLRRLEFHASKIDELYEAYCVQRRLRDGAYNMVRAYTTGSPGSREARDSLAEATRGHREYTESMCLLESELEAQLGEFHLRMKGLAGFARLCVGDQYEICMKYGRQRWKLRGRIEGSGKQVWDSEETIFLPLLTEFLSIKVTELKGLANHVVVGSVSCETKDLFAALPQVVAVDINDLGTIKLSLEVTWSPFDKDDQPSAASSVNKASTVTKRFSTYSQSPPDTPSLREQAFYNMLRRQEELENGTAWSLSSESSDDSSSPQLSGTARHSPAPRPLVQQPEPLPIQVAFRRPETPSSGPLDEEGAVAPVLANGHAPYSRTLSHISEASVDAALAEASVEAVGPESLAWGPSPPTHPAPTHGEHPSPVPPALDPGHSATSSTLGTTGSVPTSTDPAPSAHLDSVHKSTDSGPSELPGPTHTTTGSTYSAITTTHSAPSPLTHTTTGSTHKPIISTLTTTGPTLNIIGPVQTTTSPTHTMPSPTHTTASPTHTSTSPTHTPTSPTHKTSMSPPTTTSPTPSGMGLVQTATSPTHPTTSPTHPTTSPILINVSPSTSLELATLSSPSKHSDPTLPGTDSLPCSPPVSNSYTQADPMAPRTPHPSPAHSSRKPLTSPAPDPSESTVQSLSPTPSPPTPAPQHSDLCLAMAVQTPVPTAAGGSGDRSLEEALGALMAALDDYRGQFPELQGLEQEVTRLESLLMQRQGLTRSRASSLSITVEHALESFSFLNEDEDEDNDVPGDRPPSSPEAGAEDSIDSPSARPLSTGCPALDAALVRHLYHCSRLLLKLGTFGPLRCQEAWALERLLREARVLEAVCEFSRRWEIPASSAQEVVQFSASRPGFLTFWDQCTERLSCFLCPVERVLLTFCNQYGARLSLRQPGLAEAVCVKFLEDALGQKLPRRPQPGPGEQLTVFQFWSFVETLDSPTMEAYVTETAEEVLLVRNLNSDDQAVVLKALRLAPEGRLRRDGLRALSSLLVHGNNKVMAAVSTQLRSLSLGPTFRERALLCFLDQLEDEDVQTRVAGCLALGCIKAPEGIEPLVYLCQTDTEAVREAARQSLQQCGEEGQSAHRRLEESLDALPRIFGPGSMASTAF

SEQ ID NO: 740296 - protein, 1061 aa, Homo sapiens
MVRAYTTGSPGSREARDSLAEATRGHREYTESMCLLESELEAQLGEFHLRMKGLAGFARLCVGDQYEICMKYGRQRWKLRGRIEGSGKQVWDSEETIFLPLLTEFLSIKVTELKGLANHVVVGSVSCETKDLFAALPQVVAVDINDLGTIKLSLEVTWSPFDKDDQPSAASSVNKASTVTKRFSTYSQSPPDTPSLREQAFYNMLRRQEELENGTAWSLSSESSDDSSSPQLSGTARHSPAPRPLVQQPEPLPIQVAFRRPETPSSGPLDEEGAVAPVLANGHAPYSRTLSHISEASVDAALAEASVEAVGPESLAWGPSPPTHPAPTHGEHPSPVPPALDPGHSATSSTLGTTGSVPTSTDPAPSAHLDSVHKSTDSGPSELPGPTHTTTGSTYSAITTTHSAPSPLTHTTTGSTHKPIISTLTTTGPTLNIIGPVQTTTSPTHTMPSPTHTTASPTHTSTSPTHTPTSPTHKTSMSPPTTTSPTPSGMGLVQTATSPTHPTTSPTHPTTSPILINVSPSTSLELATLSSPSKHSDPTLPGTDSLPCSPPVSNSYTQADPMAPRTPHPSPAHSSRKPLTSPAPDPSESTVQSLSPTPSPPTPAPQHSDLCLAMAVQTPVPTAAGGSGDRSLEEALGALMAALDDYRGQFPELQGLEQEVTRLESLLMQRQGLTRSRASSLSITVEHALESFSFLNEDEDEDNDVPGDRPPSSPEAGAEDSIDSPSARPLSTGCPALDAALVRHLYHCSRLLLKLGTFGPLRCQEAWALERLLREARVLEAVCEFSRRWEIPASSAQEVVQFSASRPGFLTFWDQCTERLSCFLCPVERVLLTFCNQYGARLSLRQPGLAEAVCVKFLEDALGQKLPRRPQPGPGEQLTVFQFWSFVETLDSPTMEAYVTETAEEVLLVRNLNSDDQAVVLKALRLAPEGRLRRDGLRALSSLLVHGNNKVMAAVSTQLRSLSLGPTFRERALLCFLDQLEDEDVQTRVAGCLALGCIKAPEGIEPLVYLCQTDTEAVREAARQSLQQCGEEGQSAHRRLEESLDALPRIFGPGSMASTAF

SEQ ID NO: 740297 - protein, 1243 aa, Homo sapiens
RPRRVGGVKGRQMGLGLGVRSESLGDSCSPLSEDSLSFRSFPVFSPPGPPRKPPALSRVSRMFSVAHPAAKVPQPERLDLVYTALKRGLTCSRSFQWGRWDPYRHGQQEILLQWYWAVVLLHGASWEEVRASWRREHFCRGLMGVPLQREPCTRKQRALPSRIDELYEAYCVQRRLRDGAYNMVRAYTTGSPGSREARDSLAEATRGHREYTESMCLLESELEAQLGEFHLRMKGLAGFARLCVGDQYEICMKYGRQRWKLRGRIEGSGKQVWDSEETIFLPLLTEFLSIKVTELKGLANHVVVGSVSCETKDLFAALPQVVAVDINDLGTIKLSLEVTWSPFDKDDQPSAASSVNKASTVTKRFSTYSQSPPDTPSLREQAFYNMLRRQEELENGTAWSLSSESSDDSSSPQLSGTARHSPAPRPLVQQPEPLPIQVAFRRPETPSSGPLDEEGAVAPVLANGHAPYSRTLSHISEASVDAALAEASVEAVGPESLAWGPSPPTHPAPTHGEHPSPVPPALDPGHSATSSTLGTTGSVPTSTDPAPSAHLDSVHKSTDSGPSELPGPTHTTTGSTYSAITTTHSAPSPLTHTTTGSTHKPIISTLTTTGPTLNIIGPVQTTTSPTHTMPSPTHTTASPTHTSTSPTHTPTSPTHKTSMSPPTTTSPTPSGMGLVQTATSPTHPTTSPTHPTTSPILINVSPSTSLELATLSSPSKHSDPTLPGTDSLPCSPPVSNSYTQADPMAPRTPHPSPAHSSRKPLTSPAPDPSESTVQSLSPTPSPPTPAPQHSDLCLAMAVQTPVPTAAGGSGDRSLEEALGALMAALDDYRGQFPELQGLEQEVTRLESLLMQRQGLTRSRASSLSITVEHALESFSFLNEDEDEDNDVPGDRPPSSPEAGAEDSIDSPSARPLSTGCPALDAALVRHLYHCSRLLLKLGTFGPLRCQEAWALERLLREARVLEAVCEFSRRWEIPASSAQEVVQFSASRPGFLTFWDQCTERLSCFLCPVERVLLTFCNQYGARLSLRQPGLAEAVCVKFLEDALGQKLPRRPQPGPGEQLTVFQFWSFVETLDSPTMEAYVTETAEEVLLVRNLNSDDQAVVLKALRLAPEGRLRRDGLRALSSLLVHGNNKVMAAVSTQLRSLSLGPTFRERALLCFLDQLEDEDVQTRVAGCLALGCIKAPEGIEPLVYLCQTDTEAVREAARQSLQQCGEEGQSAHRRLEESLDALPRIFGPGSMASTAF

SEQ ID NO: 740298 - protein, 341 aa, Homo sapiens
LVGLVLNRHEGTGCPALDAALVRHLYHCSRLLLKLGTFGPLRCQEAWALERLLREARVLEAVCEFSRRWEIPASSAQEVVQFSASRPGFLTFWDQCTERLSCFLCPVERVLLTFCNQYGARLSLRQPGLAEAVCVKFLEDALGQKLPRRPQPGPGEQLTVFQFWSFVETLDSPTMEAYVTETAEEVLLVRNLNSDDQAVVLKALRLAPEGRLRRDGLRALSSLLVHGNNKVMAAVSTQLRSLSLGPTFRERALLCFLDQLEDEDVQTRVAGCLALGCIKAPEGIEPLVYLCQTDTEAVREAARQSLQQCGEEGQSAHRRLEESLDALPRIFGPGSMASTAF

SEQ ID NO: 740299 - protein, 36 aa, Homo sapiens
MKYGRQRWKLRGRIEGSGKQVWDSEETIFLPLLTEF

SEQ ID NO: 740300 - protein, 136 aa, Homo sapiens
QLKVKRRLQRQEGSVERCHSHKKKKIRTSPTFRRPKTLRLRRQPKHPRKSAPRRNKLDHYAIIKFPLTTESAMKKIEDNNTLVFIVDVKANKHQIKQAVKKLYDIDVAKVNTLIRPDGEKKAYVRLAIVHLVLFVF

SEQ ID NO: 740301 - protein, 111 aa, Homo sapiens
FLMEHRLDDAERGITKKPSCTHPQESVITFVKLRYYREVGCECQVESAEAFSNHFTLILPTKTCSKTIILVKSTTAFKLGHLKEQAPKLATRTSFLPGFSIQSQQMPARDT

SEQ ID NO: 740302 - protein, 475 aa, Homo sapiens
VTVLTHSKPSLIDYRKPSALKFEVVHMPQDRTEENEIFVDLALNVLPGLSTWQSVIKLNDFFVEIRGTLKMMCESFIYNQTLMKKLQETNYDVMLIDPVIPCGDLMAELLAVPFVLTLRISVGGNMERSCGKLPAPLSYVPVPMTGLTDRMTFLERVKNSMLSVLFHFWIQDYDYHFWEEFYSKALGRPTTLCETVGKAEIWLIRTYWDFEFPQPYQPNFEFVGGLHCKPAKALPKEMENFVQSSGEDGIVVFSLGSLFQNVTEEKANIIASALAQIPQKVLWRYKGKKPSTLGANTRLYDWIPQNDLLGHPKTKAFITHGGMNGIYEAIYHGVPMVGVPIFGDQLDNIAHMKAKGAAVEINFKTMTSEDLLRALRTVITDSSYKENAMRLSRIHHDQPVKPLDRAVFWIEFVMRHKGAKHLRSAAHDLTWFQHYSIDVIGFLLACVATAIFLFTKCFLFSCQKFNKTRKIEKRE

SEQ ID NO: 740303 - protein, 507 aa, Homo sapiens
VTVLTHSKPSLIDYRKPSALKFEVVHMPQDRTEENEIFVDLALNVLPGLSTWQSVIKLNDFFVEIRGTLKMMCESFIYNQTLMKKLQETNYDVMLIDPVIPCGDLMAELLAVPFVLTLRISVGGNMERSCGKLPAPLSYVPVPMTGLTDRMTFLERVKNSMLSVLFHFWIQDYDYHFWEEFYSKALGRPTTLCETVGKAEIWLIRTYWDFEFPQPYQPNFEFVGGLHCKPAKALPKESYTRKPSSLKPWHLYLKRNTEGELTISIILYEMENFVQSSGEDGIVVFSLGSLFQNVTEEKANIIASALAQIPQKVLWRYKGKKPSTLGANTRLYDWIPQNDLLGHPKTKAFITHGGMNGIYEAIYHGVPMVGVPIFGDQLDNIAHMKAKGAAVEINFKTMTSEDLLRALRTVITDSSYKENAMRLSRIHHDQPVKPLDRAVFWIEFVMRHKGAKHLRSAAHDLTWFQHYSIDVIGFLLACVATAIFLFTKCFLFSCQKFNKTRKIEKRE

SEQ ID NO: 740304 - protein, 414 aa, Homo sapiens
QLLPAGRSSAGCAGACPRSAVGNLPGHVGGAWAAPSVSVEARWLWPDWVAGVGAGWGLGEGRGAVGGGRGGMKLLQIFFGGIPAARSLRSARKVSSVPFLGAAGHQQSLPSSWKASCSGPLVMASDSDVKMLLNFVNLASSDIKAALDKSAPCRRSVDHRKYLQKQLKRFSQKYSRLPRGLPGRAAEPYLKRGSEDRPRRLLLDLGPDSSPGGGGGCKEKVLRNPYREECLAKEQLPQRQHPEAAQPGQVPMRKRQLPASFWEEPRPTHSYHVGLEGGLGPREGPPYEGKKNCKGLEPLGPETTLVSMSPRALAEKEPLKMPGVSLVGRVNAWSCCPFQYHGQPIYPGPLGALPQSPVPSLGLWRKSPAFPGELAHLCKDVDGLGQKVCRPVVLKPIPTKPAVPPPIFNVFGYL

SEQ ID NO: 740305 - protein, 292 aa, Homo sapiens
MASDSDVKMLLNFVNLASSDIKAALDKSAPCRRSVDHRKYLQKQLKRFSQKYSRLPRGLPGRAAEPYLKRGSEDRPRRLLLDLGPDSSPGGGGGCKEKVLRNPYREECLAKEQLPQRQHPEAAQPGQVPMRKRQLPASFWEEPRPTHSYHVGLEGGLGPREGPPYEGKKNCKGLEPLGPETTLVSMSPRALAEKEPLKMPGVSLVGRVNAWSCCPFQYHGQPIYPGPLGALPQSPVPSLGLWRKSPAFPGELAHLCKDVDGLGQKVCRPVVLKPIPTKPAVPPPIFNVFGYL

SEQ ID NO: 740306 - protein, 357 aa, Homo sapiens
QLLPAGRSSAGCAGACPRSAVGNLPGHVGGAWAAPSVSSVPFLGAAGHQQSLPSSWKASCSGPLVMASDSDVKMLLNFVNLASSDIKAALDKSAPCRRSVDHRKYLQKQLKRFSQKYSRLPRGLPGRAAEPYLKRGSEDRPRRLLLDLGPDSSPGGGGGCKEKVLRNPYREECLAKEQLPQRQHPEAAQPGQVPMRKRQLPASFWEEPRPTHSYHVGLEGGLGPREGPPYEGKKNCKGLEPLGPETTLVSMSPRALAEKEPLKMPGVSLVGRVNAWSCCPFQYHGQPIYPGPLGALPQSPVPSLGLWRKSPAFPGELAHLCKDVDGLGQKVCRPVVLKPIPTKPAVPPPIFNVFGYL

SEQ ID NO: 740307 - protein, 121 aa, Homo sapiens
TRFLPHIVPKDRLRIYFLKLNIKSQTLKLKKNLQANTTMNLKGVGFLNKMRRTYFIKENVDEFDYLEILNFFMMKGTINMKRQDIGNSVQLVCVQNTSIKEEQFKRNRKFTEEETGIVINK

SEQ ID NO: 740308 - protein, 152 aa, Homo sapiens [sequence omitted]

SEQ ID NO: 740309 - protein, 221 aa, Homo sapiens
MLAPCSGWELGCFRLCLRQVRLWAGAGRWACWACQARPYSSGGSERWPGSETEVPPPGPARRTLKEWTLQVSPFGRLRARLPCHLAVRPLDPLTYPDGDRVLVAVCGVEGGVRGLDGLQVKYDEDLEEMAIVSDTIHPQASVEVNAPLKFGLDIKSSGSGCVKVQSIEGDNCKIETEHGTSILQSVKGQKLHVQTKGGKVICLGTVYGNIDIHASDKSMVC

SEQ ID NO: 740310 - protein, 144 aa, Homo sapiens
MLAPCSGWELGCFRLCLRQVRLWAGAGRWACWACQARPYSSGGSERWPGSETEVPPPGPARRTLKEWTLQVSPFGRLRARLPCHLAVRPLDPLTYPDGDRVLVAVCGVEGGVRGLDGLQVKYDEDLEEMAIVSDTIHPQASVEV

SEQ ID NO: 740311 - protein, 129 aa, Homo sapiens
MGNITLQSKMGNITVDSSSGCLKASTNQGAIDVYVSQLGKVELKSHKGSIIVKVPSSLQAHLQLSGKEVDVNSEVHVQEMAEVRKDDVVTVTGLMNQASKREKWIKADAPKGTVSFRRQSWFQSLKLQD

SEQ ID NO: 740312 - protein, 144 aa, Homo sapiens; identical to SEQ ID NO: 740310

SEQ ID NO: 740313 - protein, 265 aa, Homo sapiens [sequence omitted]

SEQ ID NO: 740314 - protein, 189 aa, Homo sapiens
MLAPCSGWELGCFRLCLRQVRLWAGAGRWACWACQARPYSSGGSERWPGSETEVPPPGPARRTLKEWTLQVSPFGRLRARLPCHLAVRPLDPLTYPDGDRVLVAVCGVEGGVRGLDGLQVKYDEDLEEMAIVSDTIHPQASVEVNAPLKFGLDIKSSGSGCVKVQSIEGDNCKIETEHGTSILQSVKTS

SEQ ID NO: 740315 - protein, 1703 aa, Homo sapiens
MNQEGGGDGQKAPSFQWRNYKLIVDPALDPALRRPSQKVYRYDGVHFSVNDSKYIPVEDLQDPRCHVRSKNRDFSLPVPKFKLDEFYIGQIPLKEVTFARLNDNVRETFLKDMCRKYGEVEEVEILLHPRTRKHLGLARVLFTSTRGAKETVKNLHLTSVMGNIIHAQLDIKGQQRMKYYELIVNGSYTPQTVPTGGKALSEKFQGSGAATETAESRRRSSSDTAAYPAGTTAVGTPGNGTPCSQDTSFSSSRQDTPSSFGQFTPQSSQGTPYTSRGSTPYSQDSAYSSSTTSTSFKPRRSENSYQDAFSRRHFSASSASTTASTAIAATTAATASSSASSSSLSSSSSSSSSSSSSQFRSSDANYPAYYESWNRYQRHTSYPPRRATREEPPGAPFAENTAERFPPSYTPNWPPSPAATTGYGSCSEVTPGAPEPGGGGGGGGPSPEREEVRTSPRPASPARSGSPAPETTNESVPFAQHSSLDSRIEMLLKEQRSKFSFLASDTEEEEENSSMVLGARDTGSEVPSGSGHGPCTPPPAPANFEDVAPTGSGEPGATRESPKANGQNQASPCSSGDDMEISDDDRGGSPPPAPTPPQQPPPPPPPPPPPPPYLASLPLGYPPHQPAYLLPPRPNGPPPPEYPPPPPPPPHIYDFVNSLELMDRLGAQWGGMPMSFQMQTQMLTRLHQLRQGKGLIAASAGPPGGAFGEAFLPFPPPQEAAYGLPYALYAQGQEGRGAYSREAYHLPMPMAAEPLPSSSVSGEEARLPPREEAELAEGKTLPTAGTVGRVLAMLVQEMKSIMQRDLNRKMVENVAFGAFDQWWESKEEKAKPFQNAAKQQAKEEDKEKTKLKEPGLLSLVDWAKSGGTTGIEAFAFGSGLRGALRLPSFKVKRKEPSEISEASEEKRPRPSTPAEEDEDDPEQEKEAGEPGRPGTKPPKRDEERGKTQGKHRKSFALDSEGEEASQESSSEKDEEDDEEDEEDEDREEAVDTTKKETEVSDGEDEESDSSSKCSLYADSDGENDSTSDSESSSSSSSSSSSSSSSSSSSSSSSSESSSEDEEEEERPAALPSASPPPREVPVPTPAPVEVPVPERVAGSPVTPLPEQEASPARPAGPTEESPPSAPLRPPEPPAGPPAPAPRPDERPSSPIPLLPPPKKRRKTVSFSAIEVVPAPEPPPATPPQAKFPGPASRKAPRGVERTIRNLPLDHASLVKSWPEEVSRGGRSRAGGRGRLTEEEEAEPGTEVDLAVLADLALTPARRGLPALPAVEDSEATETSDEAERPRPLLSHILLEHNYALAVKPTPPAPALRPPEPVPAPAALFSSPADEVLEAPEVVVAEAEEPKPQQLQQQREEGEEEGEEEGEEEEEESSDSSSSSDGEGALRRRSLRSHARRRRPPPPPPPPPPRAYEPRSEFEQMTILYDIWNSGLDSEDMSYLRLTYERLLQQTSGADWLNDTHWVHHTITNLTTPKRKRRPQDGPREHQTGSARSEGYYPISKKEKDKYLDVCPVSARQLEGVDTQGTNRVLSERRSEQRRLLSAIGTSAIMDSDLLKLNQLKFRKKKLRFGRSRIHEWGLFAMEPIAADEMVIEYVGQNIRQMVADMREKRYVQEGIGSSYLFRVDHDTIIDATKCGNLARFINHCCTPNCYAKVITIESQKKIVIYSKQPIGVDEEITYDYKFPLEDNKIPCLCGTESCRGSLN

SEQ ID NO: 740316 - protein, 1613 aa, Homo sapiens
MNQEGGGDGQKAPSFQWRNYKLIVDPALDPALRRPSQKVYRYDGVHFSVNDSKYIPVEDLQDPRCHVRSKNRDFSLPVPKFKLDEFYIGQIPLKEVTFARLNDNVRETFLKDMCRKYGEVEEVEILLHPRTRKHLGLARVLFTSTRGAKETVKNLHLTSVMGNIIHAQLDIKGQQRMKYYELIVNGSYTPQTVPTGGKALSEKFQGSGAATETAESRRRSSSDTAAYPAGTTAVGTPGNGTPCSQDTSFSSSRQDTPSSFGQFTPQSSQGTPYTSRGSTPYSQDSAYSSSTTSTSFKPRRSENSYQDAFSRRHFSASSASTTASTAIAATTAATASSSASSSSLSSSSSSSSSSSSSQFRSSDANYPAYYESWNRYQRHTSYPPRRATREEPPGAPFAENTAERFPPSYTPNWPPSPAATTGYGSCSEVTPEPPEPGGGGGGGGPSPEREEVRTSPRPASPARSGSPAPETTNESVPFAQHSSLDSRIEMLLKEQRSKFSFLASDTEEEEENSSMVLGARDTGSEVPSGSGHGPCTPPPAPANFEDVAPTGSGEPGATRESPKANGQNQASPCSSGDDMEISDDDRGGSPPPAPTPPQQPPPPPPPPPPPPPYLASLPLGYPPHQPAYLLPPRPNGPPPPEYPPPPPPPPHIYDFVNSLELMDRLGAQWGGMPMSFQMQTQMLTRLHQLRQGKGLIAASAGPPGGAFGEAFLPFPPPQEAAYGLPYALYAQGQEGRGAYSREAYHLPMPMAAEPLPSSSVSGEEARLPPREEAELAEGKTLPTAGTVGRVLAMLVQEMKSIMQRDLNRKMVENVAFGAFDQWWESKEEKAKPFQNAAKQQAKEEDKEKTKLKEPGLLSLVDWAKSGGTTGIEAFAFGSGLRGALRLPSFKVKRKEPSEISEASEEKRPRPSTPAEEDEDDPEQEKEAGEPGRPGTKPPKRDEERGKTQGKHRKSFALDSEGEEASQESSSEKDEEDDEEDEEDEDREEAVDTTKKETEVSDGEDEESDSSSKCSLYADSDGENDSTSDSESSSSSSSSSSSSSSSSSSSSSSSSESSSEDEEEEERPAALPSASPPPREVPVPTPAPVEVPVPERVAGSPVTPLPEQEASPARPAGPTEESPPSAPLRPPEPPAGPPAPAPRPDERPSSPIPLLPPPKKRRKTVSFSAIEVVPAPEPPPATPPQAKFPGPASRKAPRGVERTIRNLPLDHASLVKSWPEEVSRGGRSRAGGRGRLTEEEEAEPGTEVDLAVLADLALTPARRGLPALPAVEDSEATETSDEAERPRPLLSHILLEHNYALAVKPTPPAPALRPPEPVPAAYEPRSEFEQMTILYDIWNSGLDSEDMSYLRLTYERLLQQTSGADWLNDTHWVHHTITNLTTPKRKRRPQDGPREHQTGSARSEGYYPISKKEKDKYLDVCPVSARQLEGVDTQGTNRVLSERRSEQRRLLSAIGTSAIMDSDLLKLNQLKFRKKKLRFGRSRIHEWGLFAMEPIAADEMVIEYVGQNIRQMVADMREKRYVQEGIGSSYLFRVDHDTIIDATKCGNLARFINHCCTPNCYAKVITIESQKKIVIYSKQPIGVDEEITYDYKFPLEDNKIPCLCGTESCRGSLN

SEQ ID NO: 740317 - protein, 830 aa, Homo sapiens
MRFHTKTQISGLSAVARCNLRLPGSSDSPASASRVAGVTGTRHHAWLIFVFLVELGFHCVGQAGLELLTSGDLPALASQSAGITGVSHRALPECLSSKQAPSFPIPQVKRKEPSEISEASEEKRPRPSTPAEEDEDDPEQEKEAGEPGRPGTKPPKRDEERGKTQGKHRKSFALDSEGEEASQESSSEKDEEDDEEDEEDEDREEAVDTTKKETEVSDGEDEESDSSSKCSLYADSDGENDSTSDSESSSSSSSSSSSSSSSSSSSSSSSSESSSEDEEEEERPAALPSASPPPREVPVPTPAPVEVPVPERVAGSPVTPLPEQEASPARPAGPTEESPPSAPLRPPEPPAGPPAPAPRPDERPSSPIPLLPPPKKRRKTVSFSAIEVVPAPEPPPATPPQAKFPGPASRKAPRGVERTIRNLPLDHASLVKSWPEEVSRGGRSRAGGRGRLTEEEEAEPGTEVDLAVLADLALTPARRGLPALPAVEDSEATETSDEAERPRPLLSHILLEHNYALAVKPTPPAPALRPPEPVPAAYEPRSEFEQMTILYDIWNSGLDSEDMSYLRLTYERLLQQTSGADWLNDTHWVHHTITNLTTPKRKRRPQDGPREHQTGSARSEGYYPISKKEKDKYLDVCPVSARQLEGVDTQGTNRVLSERRSEQRRLLSAIGTSAIMDSDLLKLNQLKFRKKKLRFGRSRIHEWGLFAMEPIAADEMVIEYVGQNIRQMVADMREKRYVQEGIGSSYLFRVDHDTIIDATKCGNLARFINHCCTPNCYAKVITIESQKKIVIYSKQPIGVDEEITYDYKFPLEDNKIPCLCGTESCRGSLN

SEQ ID NO: 740318 - protein, 1613 aa, Homo sapiens; identical to SEQ ID NO: 740316

SEQ ID NO: 740319 - protein, 94 aa, Homo sapiens
PAWAATAVPGTPRRAPESRAVAATGGGRAEESTGPPVQAAESGRPPTGKLRGAGAPGGPLAAGTRGPGLGFPHPGTLLSHNFGILKSEDSTKII

SEQ ID NO: 740320 - protein, 887 aa, Homo sapiens
MPSLPQEGVIQGPSPLDLNTELPYQSTMKRKVRKKKKKGTITANVAGTKFEIVRLVIDEMGFMKTPDEDETSNLIWCDSAVQQEKISELQNYQRINHFPGMGEICRKDFLARNMTKMIKSRPLDYTFVPRTWIFPAEYTQFQNYVKELKKKRKQKTFIVKPANGAMGHGISLIRNGDKLPSQDHLIVQEYIEKPFLMEGYKFDLRIYILVTSCDPLKIFLYHDGLVRMGTEKYIPPNESNLTQLYMHLTNYSVNKHNEHFERDETENKGSKRSIKWFTEFLQANQHDVAKFWSDISELVVKTLIVAEPHVLHAYRMCRPGQPPGSESVCFEVLGFDILLDRKLKPWLLEINRAPSFGTDQKIDYDVKRGVLLNALKLLNIRTSDKRRNLAKQKAEAQRRLYGQNSIKRLLPGSSDWEQQRHQLERRKEELKERLAQVRKQISREEHENRHMGNYRRIYPPEDKALLEKYENLLAVAFQTFLSGRAASFQRELNNPLKRMKEEDILDLLEQCEIDDEKLMGKTTKTRGPKPLCSMPESTEIMKRPKYCSSDSSYDSSSSSSESDENEKEEYQNKKREKQVTYNLKPSNHYKLIQQPSSIRRSVSCPRSISAQSPSSGDTRPFSAQQMISVSRPTSASRSHSLNRASSYMRHLPHSNDACSTNSQVSESLRQLKTKEQEDDLTSQTLFVLKDMKIRFPGKSDAESELLIEDIIDNWKYHKTKVASYWLIKLDSVKQRKVLDIVKTSIRTVLPRIWKVPDVEEVNLYRIFNRVFNRLLWSRGQGLWNCFCDSGSSWESIFNKSPEVVTPLQLQCCQRLVELCKQCLLVVYKYATDKRGSLSGIGPDWGNSRYLLPGSTQFFLRTPTYNLKYNSPGMTRSNVLFTSRYGHL

SEQ ID NO: 740321 - protein, 887 aa, Homo sapiens; identical to SEQ ID NO: 740320

SEQ ID NO: 740322 - protein, 749 aa, Homo sapiens
MPSLPQEGVIQGPSPLDLNTELPYQSTMKRKVRKKKKKGTITANVAGTKFEIVRLVIDEMGFMKTPDEDETSNLIWCDSAVQQEKISELQNYQRINHFPGMGEICRKDFLARNMTKMIKSRPLDYTFVPRTWIFPAEYTQFQNYVKELKKKRKQKTFIVKPANGAMGHGISLIRNGDKLPSQDHLIVQEYIEKPFLMEGYKFDLRIYILVTSCDPLKIFLYHDGLVRMGTEKYIPPNESNLTQLYMHLTNYSVNKHNEHFERDETENKGSKRSIKWFTEFLQANQHDVAKFWSDISELVVKTLIVAEPHVLHAYRMCRPGQPPGSESVCFEVLGFDILLDRKLKPWLLEINRAPSFGTDQKIDYDVKRGVLLNALKLLNIRTSDKRRNLAKQKAEAQRRLYGQNSIKRLLPGSSDWEQQRHQLERRKEELKERLAQVRKQISREEHENRHMGNYRRIYPPEDKALLEKYENLLAVAFQTFLSGRAASFQRELNNPLKRMKEEDILDLLEQCEIDDEKLMGKTTKTRGPKPLCSMPESTEIMKRPKYCSSDSSYDSSSSSSESDENEKEEYQNKKREKQVTYNLKPSNHYKLIQQPSSIRRSVSCPRSISAQSPSSGDTRPFSAQQMISVSRPTSASRSHSLNRASSYMRHLPHSNDACSTNSQVSESLRQLKTKEQEDDLTSQTLFVLKDMKIRFPGKSDAESELLIEDIIDNWKYHKTKVASYWLIKLDSVKQRKMKMFSVCMMMRMI

SEQ ID NO: 740323 - protein, 828 aa, Homo sapiens
MPSLPQEGVIQGPSPLDLNTELPYQSTMKRKVRKKKKKGTITANVAGTKFEIVRLVIDEMGFMKTPDEDETSNLIWCDSAVQQEKISELQNYQRINHFPGMGEICRKDFLARNMTKMIKSRPLDYTFVPRTWIFPAEYTQFQNYVKELKKKRKQKTFIVKPANGAMGHGISLIRNGDKLPSQDHLIVQEYIEKPFLMEGYKFDLRIYILVTSCDPLKIFLYHDGLVRMGTEKYIPPNESNLTQLYMHLTNYSVNKHNEHFERDETENKGSKRSIKWFTEFLQANQHDVAKFWSDISELVVKTLIVAEPHVLHAYRMCRPGQPPGSESVCFEVLGFDILLDRKLKPWLLEINRAPSFGTDQKIDYDVKRGVLLNALKLLNIRTSDKRRNLAKQKAEAQRRLYGQNSIKRLLPGSSDWEQQRHQLERRKEELKERLAQVRKQISREEHENRHMGNYRRIYPPEDKALLEKYENLLAVAFQTFLSGRAASFQRELNNPLKRMKEEDILDLLEQCEIDDEKLMGKTTKTRGPKPLCSMPESTEIMKRPKYCSSDSSYDSSSSSSESDENEKEEYQNKKREKQVTYNLKPSNHYKLIQQPSSIRRSVSCPRSISAQSPSSGDTRPFSAQQMISVSRPTSASRSHSLNRASSYMRHLPHSNDACSTNSQVSESLRQLKTKEQEDDLTSQTLFVLKDMKIRFPGKSDAESELLIEDIIDNWKYHKTKVASYWLIKLDSVKQRKVLDIVKTSIRTVLPRIWKVPDVEEVNLYRIFNRVFNRLLWSRGQGLWNCFCDSGLLPGSTQFFLRTPTYNLKYNSPGMTRSNVLFTSRYGHL

SEQ ID NO: 740324 - protein, 606 aa, Homo sapiens
MPSLPQEGVIQGPSPLDLNTELPYQSTMKRKVRKKKKKGTITANVAGTKFEIVRLVIDEMGFMKTPDEDETSNLIWCDSAVQQEKISELQNYQRINHFPGMGEICRKDFLARNMTKMIKSRPLDYTFVPRTWIFPAEYTQFQNYVKELKKKRKQKTFIVKPANGAMGHGISLIRNGDKLPSQDHLIVQEYIEKPFLMEGYKFDLRIYILVTSCDPLKIFLYHDGLVRMGTEKYIPPNESNLTQLYMHLTNYSVNKHNEHFERDETENKGSKRSIKWFTEFLQANQHDVAKFWSDISELVVKTLIVAEPHVLHAYRMCRPGQPPGSESVCFEVLGFDILLDRKLKPWLLEINRAPSFGTDQKIDYDVKRGVLLNALKLLNIRTSDKRRNLAKQKAEAQRRLYGQNSIKRLLPGSSDWEQQRHQLERRKEELKERLAQVRKQISREEHENRHMGNYRRIYPPEDKALLEKYENLLAVAFQTFLSGRAASFQRELNNPLKRMKEEDILDLLEQCEIDDEKLMGKTTKTRGPKPLCSMPESTEIMKRPKYCSSDSSYDSSSSSSESDENEKEEYQNKKREKQVTYNLKPSNHYKLIQQPSKSISSNLDVI

SEQ ID NO: 740325 - protein, 612 aa, Homo sapiens
PLGQRQLFQALRVEHRSPEPWLPRAVGGRRRAPDHQCRLPSRGGRPRGSCEAREHLGDRLQRGREDPGWAFLTRINRAPSFGTDQKIDYDVKRGVLLNALKLLNIRTSDKRRNLAKQKAEAQRRLYGQNSIKRLLPGSSDWEQQRHQLERRKEELKERLAQVRKQISREEHENRHMGNYRRIYPPEDKALLEKYENLLAVAFQTFLSGRAASFQRELNNPLKRMKEEDILDLLEQCEIDDEKLMGKTTKTRGPKPLCSMPESTEIMKRPKYCSSDSSYDSSSSSSESDENEKEEYQNKKREKQVTYNLKPSNHYKLIQQPSSIRRSVSCPRSISAQSPSSGDTRPFSAQQMISVSRPTSASRSHSLNRASSYMRHLPHSNDACSTNSQVSESLRQLKTKEQEDDLTSQTLFVLKDMKIRFPGKSDAESELLIEDIIDNWKYHKTKVASYWLIKLDSVKQRKVLDIVKTSIRTVLPRIWKVPDVEEVNLYRIFNRVFNRLLWSRGQGLWNCFCDSGSSWESIFNKSPEVVTPLQLQCCQRLVELCKQCLLVVYKYATDKRGSLSGIGPDWGNSRYLLPGSTQFFLRTPTYNLKYNSPGMTRSNVLFTSRYGHL

SEQ ID NO: 740326 - protein, 665 aa, Homo sapiens
PLGQRQLFQALRVEHRSPEPWLPRAVGGRRRAPDHQCRLPSRGGRPRGSCEAREHLGDRLQRGREDPGWAFLTRELVVKTLIVAEPHVLHAYRMCRPGQPPGSESVCFEVLGFDILLDRKLKPWLLEINRAPSFGTDQKIDYDVKRGVLLNALKLLNIRTSDKRRNLAKQKAEAQRRLYGQNSIKRLLPGSSDWEQQRHQLERRKEELKERLAQVRKQISREEHENRHMGNYRRIYPPEDKALLEKYENLLAVAFQTFLSGRAASFQRELNNPLKRMKEEDILDLLEQCEIDDEKLMGKTTKTRGPKPLCSMPESTEIMKRPKYCSSDSSYDSSSSSSESDENEKEEYQNKKREKQVTYNLKPSNHYKLIQQPSSIRRSVSCPRSISAQSPSSGDTRPFSAQQMISVSRPTSASRSHSLNRASSYMRHLPHSNDACSTNSQVSESLRQLKTKEQEDDLTSQTLFVLKDMKIRFPGKSDAESELLIEDIIDNWKYHKTKVASYWLIKLDSVKQRKVLDIVKTSIRTVLPRIWKVPDVEEVNLYRIFNRVFNRLLWSRGQGLWNCFCDSGSSWESIFNKSPEVVTPLQLQCCQRLVELCKQCLLVVYKYATDKRGSLSGIGPDWGNSRYLLPGSTQFFLRTPTYNLKYNSPGMTRSNVLFTSRYGHL

SEQ ID NO: 740327 - protein, 354 aa, Homo sapiens
MPESTEIMKRPKYCSSDSSYDSSSSSSESDENEKEEYQNKKREKQVTYNLKPSNHYKLIQQPSSIRRSVSCPRSISAQSPSSGDTRPFSAQQMISVSRPTSASRSHSLNRASSYMRHLPHSNDACSTNSQVSESLRQLKTKEQEDDLTSQTLFVLKDMKIRFPGKSDAESELLIEDIIDNWKYHKTKVASYWLIKLDSVKQRKVLDIVKTSIRTVLPRIWKVPDVEEVNLYRIFNRVFNRLLWSRGQGLWNCFCDSGSSWESIFNKSPEVVTPLQLQCCQRLVELCKQCLLVVYKYATDKRGSLSGIGPDWGNSRYLLPGSTQFFLRTPTYNLKYNSPGMTRSNVLFTSRYGHL

SEQ ID NO: 740328 - protein, 124 aa, Homo sapiens
QGLEAGGVSWAMDIPTSSPCTLVAHDQGVFISMKKGLQEAVVAVAPNFGAPGWASCLWGHLGGQRSPPHQPILFYPFSVHCFFFFLLKGISRFFETLSGGHFGEDAIFLCHVMLFPHLTLAALS

SEQ ID NO: 740329 - protein, 80 aa, Homo sapiens
PLSLLLFNTILEVLARAIRQEKQIKGIHIGKEEVKLPLFTGNIILYLQNPKDQPKQLLELINYFSNISRCTKISRISTHQ

SEQ ID NO: 740330 - protein, 1082 aa, Homo sapiens
MSAAPAYSEDKGGSAGPGEPEYGHDPASGGIFSSDYKRHDDLKEMLDTNKDSLKLEAMKRIVAMIARGKNASDLFPAVVKNVACKNIEVKKLVYVYLVRYAEEQQDLALLSISTFQRGLKDPNQLIRASALRVLSSIRVPIIVPIMMLAIKEAASDMSPYVRKTAAHAIPKLYSLDSDQKDQLIEVIEKLLADKTTLVAGSVVMAFEEVCPERIDLIHKNYRKLCNLLIDVEEWGQVVIISMLTRYARTQFLSPTQNESLLEENAEKAFYGSEEDEAKGAGSEETAAAAAPSRKPYVMDPDHRLLLRNTKPLLQSRSAAVVMAVAQLYFHLAPKAEVGVIAKALVRLLRSHSEVQYVVLQNVATMSIKRRGMFEPYLKSFYIRSTDPTQIKILKLEVLTNLANETNIPTVLREFQTYIRSMDKDFVAATIQAIGRCATNIGRVRDTCLNGLVQLLSNRDELVVAESVVVIKKLLQMQPAQHGEIIKHLAKLTDNIQVPMARASILWLIGEYCEHVPRIAPDVLRKMAKSFTAEEDIVKLQVINLAAKLYLTNSKQTKLLTQYVLSLAKYDQNYDIRDRARFTRQLIVPSEQGGALSRHAKKLFLAPKPAPVLESSFKDRDHFQLGSLSHLLNAKATGYQELPDWPEEAPDPSVRNVEVPEWTKCSNREKRKEKEKPFYSDSEGESGPTESADSDPESESESDSKSSSESGSGESSSESDNEDQDEDEEKGRGSESEQSEEDGKRKTKKKVPERKGEASSSDEGSDSSSSSSESEMTSESEEEQLEPASWSRKTPPSSKSAPATKEISLLDLEDFTPPSVQPVSPPAIVSTSLAADLEGLTLTDSTLVPSLLSPVSGVGRQELLHRVAGEGLAVDYTFSRQPFSGDPHMVSVHIHFSNSSDTPIKGLHVGTPKLPAGISIQEFPEIESLAPGESATAVMGINFCDSTQAANFQLCTQTRQFYVSIQPPVGELMAPVFMSENEFKKEQGKLMGMNEITEKLMLPDTCRSDHIVVQKVTATANLGRVPCGTSDEYRFAGRTLTGGSLVLLTLDARPAGAAQLTVNSEKMVIGTMLVKDVIQALTQ

SEQ ID NO: 740331 - protein, 1082 aa, Homo sapiens; identical to SEQ ID NO: 740330

SEQ ID NO: 740332 - protein, 1093 aa, Homo sapiens
DSEVYIKGGPRCCPRLPSSMVCTYDHAPGVLSSASYPQETQQSGLCLAGHDDLKEMLDTNKDSLKLEAMKRIVAMIARGKNASDLFPAVVKNVACKNIEVKKLVYVYLVRYAEEQQDLALLSISTFQRGLKDPNQLIRASALRVLSSIRVPIIVPIMMLAIKEAASDMSPYVRKTAAHAIPKLYSLDSDQKDQLIEVIEKLLADKTTLVAGSVVMAFEEVCPERIDLIHKNYRKLCNLLIDVEEWGQVVIISMLTRYARTQFLSPTQNESLLEENAEKAFYGSEEDEAKGAGSEETAAAAAPSRKPYVMDPDHRLLLRNTKPLLQSRSAAVVMAVAQLYFHLAPKAEVGVIAKALVRLLRSHSEVQYVVLQNVATMSIKRRGMFEPYLKSFYIRSTDPTQIKILKLEVLTNLANETNIPTVLREFQTYIRSMDKDFVAATIQAIGRCATNIGRVRDTCLNGLVQLLSNRDELVVAESVVVIKKLLQMQPAQHGEIIKHLAKLTDNIQVPMARASILWLIGEYCEHVPRIAPDVLRKMAKSFTAEEDIVKLQVINLAAKLYLTNSKQTKLLTQYVLSLAKYDQNYDIRDRARFTRQLIVPSEQGGALSRHAKKLFLAPKPAPVLESSFKDRDHFQLGSLSHLLNAKATGYQELPDWPEEAPDPSVRNVEVPEWTKCSNREKRKEKEKPFYSDSEGESGPTESADSDPESESESDSKSSSESGSGESSSESDNEDQDEDEEKGRGSESEQSEEDGKRKTKKKVPERKGEASSSDEGSDSSSSSSESEMTSESEEEQLEPASWSRKTPPSSKSAPATKEISLLDLEDFTPPSVQPVSPPAIVSTSLAADLEGLTLTDSTLVPSLLSPVSGVGRQELLHRVAGEGLAVDYTFSRQPFSGDPHMVSVHIHFSNSSDTPIKGLHVGTPKLPAGISIQEFPEIESLAPGESATAVMGINFCDSTQAANFQLCTQTRQFYVSIQPPVGELMAPVFMSENEFKKEQGKLMGMNEITEKLMLPDTCRSDHIVVQKVTATANLGRVPCGTSDEYRFAGRTLTGGSLVLLTLDARPAGAAQLTVNSEKMVIGTMLVKDVIQALTQ

SEQ ID NO: 740333 - protein, 937 aa, Homo sapiens
MMLAIKEAASDMSPYVRKTAAHAIPKLYSLDSDQKDQLIEVIEKLLADKTTLVAGSVVMAFEEVCPERIDLIHKNYRKLCNLLIDVEEWGQVVIISMLTRYARTQFLSPTQNESLLEENAEKAFYGSEEDEAKGAGSEETAAAAAPSRKPYVMDPDHRLLLRNTKPLLQSRSAAVVMAVAQLYFHLAPKAEVGVIAKALVRLLRSHSEVQYVVLQNVATMSIKRRGMFEPYLKSFYIRSTDPTQIKILKLEVLTNLANETNIPTVLREFQTYIRSMDKDFVAATIQAIGRCATNIGRVRDTCLNGLVQLLSNRDELVVAESVVVIKKLLQMQPAQHGEIIKHLAKLTDNIQVPMARASILWLIGEYCEHVPRIAPDVLRKMAKSFTAEEDIVKLQVINLAAKLYLTNSKQTKLLTQYVLSLAKYDQNYDIRDRARFTRQLIVPSEQGGALSRHAKKLFLAPKPAPVLESSFKDRDHFQLGSLSHLLNAKATGYQELPDWPEEAPDPSVRNVEVPEWTKCSNREKRKEKEKPFYSDSEGESGPTESADSDPESESESDSKSSSESGSGESSSESDNEDQDEDEEKGRGSESEQSEEDGKRKTKKKVPERKGEASSSDEGSDSSSSSSESEMTSESEEEQLEPASWSRKTPPSSKSAPATKEISLLDLEDFTPPSVQPVSPPAIVSTSLAADLEGLTLTDSTLVPSLLSPVSGVGRQELLHRVAGEGLAVDYTFSRQPFSGDPHMVSVHIHFSNSSDTPIKGLHVGTPKLPAGISIQEFPEIESLAPGESATAVMGINFCDSTQAANFQLCTQTRQFYVSIQPPVGELMAPVFMSENEFKKEQGKLMGMNEITEKLMLPDTCRSDHIVVQKVTATANLGRVPCGTSDEYRFAGRTLTGGSLVLLTLDARPAGAAQLTVNSEKMVIGTMLVKDVIQALTQ

SEQ ID NO: 740334 - protein, 1110 aa, Homo sapiens
MSAAPAYSEDKGGSAGPGEPEYGHDPASGGIFSSDYKRHDDLKEMLDTNKDSLKLEAMKRIVAMIARGKNASDLFPAVVKNVACKNIEVKKLVYVYLVRYAEEQQDLALLSISTFQRGLKDPNQLIRASALRVLSSIRVPIIVPIMMLAIKEAASDMSPYVRKTAAHAIPKLYSLDSDQKDQLIEVIEKLLADKTTLVAGSVVMAFEEVCPERIDLIHKNYRKLCNLLIDVEEWGQVVIISMLTRYARTQFLSPTQNTVSGPSPGRAGRSVSRGGAHRPVGLPVQESLLEENAEKAFYGSEEDEAKGAGSEETAAAAAPSRKPYVMDPDHRLLLRNTKPLLQSRSAAVVMAVAQLYFHLAPKAEVGVIAKALVRLLRSHSEVQYVVLQNVATMSIKRRGMFEPYLKSFYIRSTDPTQIKILKLEVLTNLANETNIPTVLREFQTYIRSMDKDFVAATIQAIGRCATNIGRVRDTCLNGLVQLLSNRDELVVAESVVVIKKLLQMQPAQHGEIIKHLAKLTDNIQVPMARASILWLIGEYCEHVPRIAPDVLRKMAKSFTAEEDIVKLQVINLAAKLYLTNSKQTKLLTQYVLSLAKYDQNYDIRDRARFTRQLIVPSEQGGALSRHAKKLFLAPKPAPVLESSFKDRDHFQLGSLSHLLNAKATGYQELPDWPEEAPDPSVRNVEVPEWTKCSNREKRKEKEKPFYSDSEGESGPTESADSDPESESESDSKSSSESGSGESSSESDNEDQDEDEEKGRGSESEQSEEDGKRKTKKKVPERKGEASSSDEGSDSSSSSSESEMTSESEEEQLEPASWSRKTPPSSKSAPATKEISLLDLEDFTPPSVQPVSPPAIVSTSLAADLEGLTLTDSTLVPSLLSPVSGVGRQELLHRVAGEGLAVDYTFSRQPFSGDPHMVSVHIHFSNSSDTPIKGLHVGTPKLPAGISIQEFPEIESLAPGESATAVMGINFCDSTQAANFQLCTQTRQFYVSIQPPVGELMAPVFMSENEFKKEQGKLMGMNEITEKLMLPDTCRSDHIVVQKVTATANLGRVPCGTSDEYRFAGRTLTGGSLVLLTLDARPAGAAQLTVNSEKMVIGTMLVKDVIQALTQ

SEQ ID NO: 740335 - protein, 89 aa, Homo sapiens
PSVQPVSPPAIVSTSLAADLEGLTLTDSTLVPSVSGMEEGTGLGQGHIPVLHPMVWMCVGGGCDGGCDSFESQLLDGPRGQCWDRLSPS

SEQ ID NO: 740336 - protein, 262 aa, Homo sapiens
MSAAPAYSEDKGGSAGPGEPEYGHDPASGGIFSSDYKRHDDLKEMLDTNKDSLKLEAMKRIVAMIARGKNASDLFPAVVKNVACKNIEVKKLVYVYLVRYAEEQQDLALLSISTFQRGLKDPNQLIRASALRVLSSIRVPIIVPIMMLAIKEAASDMSPYVRKTAAHAIPKLYSLDSDQKDQLIEVIEKLLADKTTLVAGSVVMAFEEVCPERIDLIHKNYRKLCNLLIDVEEWGQVVIISMLTRYARTQFLSPTQNISVAI

SEQ ID NO: 740337 - protein, 1191 aa, Homo sapiens
MSAAPAYSEDKGGSAGPGEPEYGHDPASGGIFSSDYKRHDDLKEMLDTNKDSLKLEAMKRIVAMIARGKNASDLFPAVVKNVACKNIEVSTTWGGIACPHLPQDHTQAWGEEGNDFSPWGPDLLRNVSEPGEDTVSMSLNWMWIKVKDPDTLRGALPHWESLSPWTAAGWGDDIPGVGGWAQVPAEKRSAEKRALPKVKKLVYVYLVRYAEEQQDLALLSISTFQRGLKDPNQLIRASALRVLSSIRVPIIVPIMMLAIKEAASDMSPYVRKTAAHAIPKLYSLDSDQKDQLIEVIEKLLADKTTLVAGSVVMAFEEVCPERIDLIHKNYRKLCNLLIDVEEWGQVVIISMLTRYARTQFLSPTQNESLLEENAEKAFYGSEEDEAKGAGSEETAAAAAPSRKPYVMDPDHRLLLRNTKPLLQSRSAAVVMAVAQLYFHLAPKAEVGVIAKALVRLLRSHSEVQYVVLQNVATMSIKRRGMFEPYLKSFYIRSTDPTQIKILKLEVLTNLANETNIPTVLREFQTYIRSMDKDFVAATIQAIGRCATNIGRVRDTCLNGLVQLLSNRDELVVAESVVVIKKLLQMQPAQHGEIIKHLAKLTDNIQVPMARASILWLIGEYCEHVPRIAPDVLRKMAKSFTAEEDIVKLQVINLAAKLYLTNSKQTKLLTQYVLSLAKYDQNYDIRDRARFTRQLIVPSEQGGALSRHAKKLFLAPKPAPVLESSFKDRDHFQLGSLSHLLNAKATGYQELPDWPEEAPDPSVRNVEVPEWTKCSNREKRKEKEKPFYSDSEGESGPTESADSDPESESESDSKSSSESGSGESSSESDNEDQDEDEEKGRGSESEQSEEDGKRKTKKKVPERKGEASSSDEGSDSSSSSSESEMTSESEEEQLEPASWSRKTPPSSKSAPATKEISLLDLEDFTPPSVQPVSPPAIVSTSLAADLEGLTLTDSTLVPSLLSPVSGVGRQELLHRVAGEGLAVDYTFSRQPFSGDPHMVSVHIHFSNSSDTPIKGLHVGTPKLPAGISIQEFPEIESLAPGESATAVMGINFCDSTQAANFQLCTQTRQFYVSIQPPVGELMAPVFMSENEFKKEQGKLMGMNEITEKLMLPDTCRSDHIVVQKVTATANLGRVPCGTSDEYRFAGRTLTGGSLVLLTLDARPAGAAQLTVNSEKMVIGTMLVKDVIQALTQ

SEQ ID NO: 740338 - protein, 1103 aa, Homo sapiens
MSAAPAYSEDKGGSAGPGEPEYGHDPASGGIFSSDYKRHDDLKEMLDTNKDSLKLEAMKRIVAMIARGKNASDLFPAVVKNVACKNIEVKKLVYVYLVRYAEEQQDLALLSISTFQRGLKDPNQLIRASALRVLSSIRVPIIVPIMMLAIKEAASDMSPYVRKTAAHAIPKLYSLDSDQKDQLIEVIEKLLADKTTLVAGSVVMAFEEVCPERIDLIHKNYRKLCNLLIDVEEWGQVVIISMLTRYARTQFLSPTQNESLLEENAEKAFYGSEEDEAKGAGSEETAAAAAPSRKPYVMDPDHRLLLRNTKPLLQSRSAAVVMAVAQLYFHLAPKAEVGVIAKALVRLLRSHSEVQYVVLQNVATMSIKRRGMFEPYLKSFYIRSTDPTQIKILKLEVLTNLANETNIPTVLREFQTYIRSMDKDFVAATIQAIGRCATNIGRVRDTCLNGLVQLLSNRDELVVAESVVVIKKLLQMQPAQHGEIIKHLAKLTDNIQVPMARASILWLIGEYCEHVPRIAPDVLRKMAKSFTAEEDIVKLQVINLAAKLYLTNSKQTKLLTQYVLSLAKYDQNYDIRDRARFTRQLIVPSEQGGALSRHAKKLFLAPKPAPVLESSFKDRDHFQLGSLSHLLNAKATGYQELPDWPEEAPDPSVRNVEVPEWTKCSNREKRKEKEKPFYSDSEGESGPTESADSDPESESESDSKSSSESGSGESSSESDNEDQDEDEEKGRGSESEQSEEDGKRKTKKKVPERKGEASSSDEGSDSSSSSSESEMTSESEEEQLEPASWSRKTPPSSKSAPATKEISLLDLEDCSLLNPSHLHFASSSVLSTPTVTPPSVQPVSPPAIVSTSLAADLEGLTLTDSTLVPSLLSPVSGVGRQELLHRVAGEGLAVDYTFSRQPFSGDPHMVSVHIHFSNSSDTPIKGLHVGTPKLPAGISIQEFPEIESLAPGESATAVMGINFCDSTQAANFQLCTQTRQFYVSIQPPVGELMAPVFMSENEFKKEQGKLMGMNEITEKLMLPDTCRSDHIVVQKVTATANLGRVPCGTSDEYRFAGRTLTGGSLVLLTLDARPAGAAQLTVNSEKMVIGTMLVKDVIQALTQ

SEQ ID NO: 740339 - protein, 689 aa, Homo sapiens
MSAAPAYSEDKGGSAGPGEPEYGHDPASGGIFSSDYKRHDDLKEMLDTNKDSLKLEAMKRIVAMIARGKNASDLFPAVVKNVACKNIEVKKLVYVYLVRYAEEQQDLALLSISTFQRGLKDPNQLIRASALRVLSSIRVPIIVPIMMLAIKEAASDMSPYVRKTAAHAIPKLYSLDSDQKDQLIEVIEKLLADKTTLVAGSVVMAFEEVCPERIDLIHKNYRKLCNLLIDVEEWGQVVIISMLTRYARTQFLSPTQNESLLEENAEKAFYGSEEDEAKGAGSEETAAAAAPSRKPYVMDPDHRLLLRNTKPLLQSRSAAVVMAVAQLYFHLAPKAEVGVIAKALVRLLRSHSEVQYVVLQNVATMSIKRRGMFEPYLKSFYIRSTDPTQIKILKLEVLTNLANETNIPTVLREFQTYIRSMDKDFVAATIQAIGRCATNIGRVRDTCLNGLVQLLSNRDELVVAESVVVIKKLLQMQPAQHGEIIKHLAKLTDNIQVPMARASILWLIGEYCEHVPRIAPDVLRKMAKSFTAEEDIVKLQVINLAAKLYLTNSKQTKLLTQYVLSLAKYDQNYDIRDRARFTRQLIVPSEQGGALSRHAKKLFLAPKPAPVLESSFKDRDHFQLGSLSHLLNAKATGYQELPDWPEEAPDPSVRNVEVPEWTKCSNREKRKEKEKPFYSDSEGETEARG

SEQ ID NO: 740340 - protein, 139 aa, Homo sapiens
AAGLPPFAFTLSSLFFPQLVAGSVVMAFEEVCPERIDLIHKNYRKLCNLLIDVEEWGQVVIISMLTRYARTQFLSPTQNTVSGPSPGRAGRSVSRGGAHRPVGLPVQESLLEENAEKAFYGSEEDEAKGAGSEETAAAA

SEQ ID NO: 740341 - protein, 375 aa, Homo sapiens
MDVTSQARGVGLEMYPGTAQPAAPNTTSPELNLSHPLLGTALANGTGELSEHQQYVIGLFLSCLYTIFLFPIGFVGNILILVVNISFREKMTIPDLYFINLAVADLILVADSLIEVFNLHERYYDIAVLCTFMSLFLQVNMYSSVFFLTWMSFDRYIALARAMRCSLFRTKHHARLSCGLIWMASVSATLVPFTAVHLQHTDEACFCFADVREVQWLEVTLGFIVPFAIIGLCYSLIVRVLVRAHRHRGLRPRRQKALRMILAVVLVFFVCWLPENVFISVHLLQRTQPGAAPCKQSFRHAHPLTGHIVNLAAFSNSCLNPLIYSFLGETFRDKLRLYIEQKTNLPALNRFCHAALKAVIPDSTEQSDVRFSSAV

SEQ ID NO: 740342 - protein, 375 aa, Homo sapiens; identical to SEQ ID NO: 740341

SEQ ID NO: 740343 - protein, 375 aa, Homo sapiens; identical to SEQ ID NO: 740341

SEQ ID NO: 740344 - protein, 375 aa, Homo sapiens; identical to SEQ ID NO: 740341

SEQ ID NO: 740345 - protein, 120 aa, Homo sapiens
MDVTSQARGVGLEMYPGTAQPAAPNTTSPELNLSHPLLGTALANGTGELSEHQQYVIGLFLSCLYTIFLFPIGFVGNILILVVNISFREKMTIRTDFINWGGTQPGRPPARSPDNRIKAP

SEQ ID NO: 740346 - protein, 375 aa, Homo sapiens; identical to SEQ ID NO: 740341

SEQ ID NO: 740347 - protein, 285 aa, Homo sapiens
MTIPDLYFINLAVADLILVADSLIEVFNLHERYYDIAVLCTFMSLFLQVNMYSSVFFLTWMSFDRYIALARAMRCSLFRTKHHARLSCGLIWMASVSATLVPFTAVHLQHTDEACFCFADVREVQWLEVTLGFIVPFAIIGLCYSLIVRVLVRAHRHRGLRPRRQKALRMILAVVLVFFVCWLPENVFISVHLLQRTQPGAAPCKQSFRHAHPLTGHIVNLAAFSNSCLNPLIYSFLGETFRDKLRLYIEQKTNLPALNRFCHAALKAVIPDSTEQSDVRFSSAV

SEQ ID NO: 740348 - protein, 77 aa, Homo sapiens
VAEEWFRSSSGMRENPDPVSKGPQIGQCSPTLVWVGLLYAVYYTNSSANFFQKRPHRHTQKSHLPAIWAPPCPVKLT

SEQ ID NO: 740349 - protein, 120 aa, Homo sapiens
PGAAGTSRNPPHCSLEAAAPSEVAGGRRDGGARQVVQGLRRPQVQAGGQAGRQAAALGRGAALRRAAQGAGAASGLRGGAVGARCRRRAHKPVVVGERLGGRGDCWGDLAARQWQVVSSG

SEQ ID NO: 740350 - protein, 91 aa, Homo sapiens
KEYLVNITEYRASHSTPIEWYPDYEVEAYRRRHHNSSLNFFNWFSDHNFAGSNKIAEILCKDLWRNPLQYYKRMKPPEEGTETSGDSQLLS

SEQ ID NO: 740351 - protein, 655 aa, Homo sapiens
PEKPARPGRRRRAGPAHEAASAAMTAEKALPLGNGKAAEEARESEAPGGGCSSGGAAPARHPRVKRDKAVHERGHWNNKVEFVLSVAGEIIGLGNVWRFPYLCYKNGGGAFLIPYVVFFICCGIPVFFLETALGQFTSEGGITCWRKVCPLFEGIGYATQVIEAHLNVYYIIILAWAIFYLSNCFTTELPWATCGHEWNTENCVEFQKLNVSNYSHVSLQNATSPVMEFWEHRVLAISDGIEHIGNLRWELALCLLAAWTICYFCIWKGTKSTGKVVYVTATFPYIMLLILLIRGVTLPGASEGIKFYLYPDLSRLSDPQVWVDAGTQIFFSYAICLGCLTALGSYNNYNNNCYRDCIMLCCLNSGTSFVAGFAIFSVLGFMAYEQGVPIAEVAESGPGLAFIAYPKAVTMMPLSPLWATLFFMMLIFLGLDSQFVCVESLVTAVVDMYPKVFRRGYRRELLILALSVISYFLGLVMLTEGGMYIFQLFDSYAASGMCLLFVAIFECICIGWVYGSNRFYDNIEDMIGYRPPSLIKWCWMIMTPGICAGIFIFFLIKYKPLKYNNIYTYPAWGYGIGWLMALSSMLCIPLWICITVWKTEGTLPEKLQKLTTPSTDLKMRGKLGVSPRMVTVNDCDAKLKSDGTIAAITEKETHF

SEQ ID NO: 740352 - protein, 188 aa, Homo sapiens
SVSGWRKQTLLAIPLTHVQNFSGVCMFPSDLFRTGSNRFYDNIEDMIGYRPPSLIKWCWMIMTPGICAGIFIFFLIKYKPLKYNNIYTYPAWGYGIGWLMALSSMLCIPLWICITVWKTEGTLPEVRPPQEGWCVWAGFAPWVPVSSSAWCAMTACAHLPQGDAVANSSLANVQYHGCAQGVSVKSFG

SEQ ID NO: 740353 - protein, 90 aa, Homo sapiens
SEGQVLVLGATNRPHALDAALRRPGRFDKEIEIGVPNAQDRLDILQKLLRRVPHLLTEAELLQLANSAHGYVGADLKVLCNEAGECGLLW

SEQ ID NO: 740354 - protein, 305 aa, Homo sapiens
MSRELAPLLLLLLSIHSALAMRICSFNVRSFGESKQEDKNAMDVIVKVIKRCDIILVMEIKDSNNRICPILMEKLNRNSRRGITYNYVISSRLGRNTYKEQYAFLYKEKLVSVKRSYHYHDYQDGDADVFSREPFVVWFQSPHTAVKDFVIIPLHTTPETSVKEIDELVEVYTDVKHRWKAENFIFMGDFNAGCSYVPKKAWKNIRLRTDPRFVWLIGDQEDTTVKKSTNCAYDRIVLRGQEIVSSVVPKSNSVFDFQKAYKLTEEEALDVSDHFPVEFKLQSSRAFTNSKKSVTLRKKTKSKRS

SEQ ID NO: 740355 - protein, 305 aa, Homo sapiens; identical to SEQ ID NO: 740354

SEQ ID NO: 740356 - protein, 222 aa, Homo sapiens
MSRELAPLLLLLLSIHSALAMRICSFNVRSFGESKQEDKNAMDVIVKVIKRCDIILVMEIKDSKKKKKKLETSPLSLSPSGRPEHRAIAFGRIRAARSNTRAARAQPGMMDIGRRLVGDNGLRAGGKGRARGAKIAPRAVFPSNLGGGPRHQRLWMVGPWLQERDPLWGPKEARDKKRLPHPGMYPYCSRVSSTVGSLGAILAHSSIRSGLWPRGPPCCDEA

SEQ ID NO: 740357 - protein, 218 aa, Homo sapiens
MKVVRKGLTQLGGLPFPSYREKLVSVKRSYHYHDYQDGDADVFSREPFVVWFQSPHTAVKDFVIIPLHTTPETSVKEIDELVEVYTDVKHRWKAENFIFMGDFNAGCSYVPKKAWKNIRLRTDPRFVWLIGDQEDTTVKKSTNCAYDRIVLRGQEIVSSVVPKSNSVFDFQKAYKLTEEEALDVSDHFPVEFKLQSSRAFTNSKKSVTLRKKTKSKRS

SEQ ID NO: 740358 - protein, 119 aa, Homo sapiens
MGDFNAGCSYVPKKAWKNIRLRTDPRFVWLIGDQEDTTVKKSTNCAYDRIVLRGQEIVSSVVPKSNSVFDFQKAYKLTEEEALDVSDHFPVEFKLQSSRAFTNSKKSVTLRKKTKSKRS

SEQ ID NO: 740359 - protein, 305 aa, Homo sapiens; identical to SEQ ID NO: 740354

SEQ ID NO: 740360 - protein, 130 aa, Homo sapiens
MSRELAPLLLLLLSIHSALAMRICSFNVRSFGESKQEDKNAMDVIVKVIKRCDIILVMEIKDSNNRICPILMEKLNRNQRRGITHNYAINSRFGRDTYQAQHTFFYKKNRHSRRKNTPTEPIGQRPRQAL

SEQ ID NO: 740361 - protein, 149 aa, Homo sapiens
RCGRYPLRTMADDDVLFEDVYELCEVIGKGPFSVVRRCINRETGQQFAVKIVDVAKFTSSPGLSTEDLKREASICHMLKHPHIVELLETYSSDGMLYMVFEFMDGADLCFEIVKRADAGFVYSEAVASILDKHSWKQLGDHLNTALSSA

SEQ ID NO: 740362 - protein, 252 aa, Homo sapiens
RCGRYPLRTMADDDVLFEDVYELCEVIGKGPFSVVRRCINRETGQQFAVKIVDVAKFTSSPGLSTEDLKREASICHMLKHPHIVELLETYSSDGMLYMVFEFMDGADLCFEIVKRADAGFVYSEAVASHYMRQILEALRYCHDNNIIHRDVKPHCVLLASKENSAPVKLGGFGVAIQLGESGLVAGGRVGTPHFMAPEVVKREPYGKPVDVWGCGVILFILLSGCLPFYGTKERLFEGIIKGKYKVMHHEHF

SEQ ID NO: 740363 - protein, 102 aa, Homo sapiens
RCGRYPLRTMADDDVLFEDVYELCEVIGKGPFSVVRRCINRETGQQFAVKIVDVAKFTSSPGLSTEDLKREASICHMLKHPHIVELLETYSSDGMLYMVFEL

SEQ ID NO: 740364 - protein, 142 aa, Homo sapiens
TLRPLSPPDHGRRRRAVRGCVRAVRGDRKVSLHARERECGKMHFSDAPVFPHPLGACPLPSLLPLFPSRPSHPGVFIDVYLELLPGGGLGVLSGPLRPPSRGWPPRKAWGRLPAFYLTVAQGRGTADFIVASVGVIVTLHVP

SEQ ID NO: 740365 - protein, 929 aa, Homo sapiens
RCGRYPLRTMADDDVLFEDVYELCEVIGKGPFSVVRRCINRETGQQFAVKIVDVAKFTSSPGLSTEDLKREASICHMLKHPHIVELLETYSSDGMLYMVFEFMDGADLCFEIVKRADAGFVYSEAVASHYMRQILEALRYCHDNNIIHRDVKPHCVLLASKENSAPVKLGGFGVAIQLGESGLVAGGRVGTPHFMAPEVVKREPYGKPVDVWGCGVILFILLSGCLPFYGTKERLFEGIIKGKYKMNPRQWSHISESAKDLVRRMLMLDPAERITVYEALNHPWLKERDRYAYKIHLPETVEQLRKFNARRKLKGAVLAAVSSHKFNSFYGDPPEELPDFSEDPTSSGAVSQVLDSLEEIHALTDCSEKDLDFLHSVFQDQHLHTLLDLYDKINTKSSPQIRNPPSDAVQRAKEVLEEISCYPENNDAKELKRILTQPHFMALLQTHDVVAHEVYSDEALRVTPPPTSPYLNGDSPESANGDMDMENVTRVRLVQFQKNTDEPMGITLKMNELNHCIVARIMHGGMIHRQGTLHVGDEIREINGISVANQTVEQLQKMLREMRGSITFKIVPSYRTQSSSCERDSPSTSRQSPANGHSSTNNSVSDLPSTTQPKGRQIYVRAQFEYDPAKDDLIPCKEAGIRFRVGDIIQIISKDDHNWWQGKLENSKNGTAGLIPSPELQEWRVACIAMEKTKQEQQASCTWFGKKKKQYKDKYLAKHNAVFDQLDLVTYEEVVKLPAFKRKTLVLLGAHGVGRRHIKNTLITKHPDRFAYPIPHTTRPPKKDEENGKNYYFVSHDQMMQDISNNEYLEYGSHEDAMYGTKLETIRKIHEQGLIAILDVEPQALKVLRTAEFAPFVVFIAAPTITPGLNEDESLQRLQKESDILQRTYAHYFDLTIINNEIDETIRHLEEAVELVCTAPQWVPVSWVY

SEQ ID NO: 740366 - protein, 831 aa, Homo sapiens
ERLFEGIIKGKYKMNPRQWSHISESAKDLVRRMLMLDPAERITVYEALDHPWLKPHCVLLASKENSAPVKLGGFGVAIQLGESGLVAGGRVGTPHFMAPEVVKREPYGKPVDVWGCGVILFILLSGCLPFYGTKERLFEGIIKGKYKMNPRQWSHISESAKDLVRRMLMLDPAERITVYEALNHPWLKERDRYAYKIHLPETVEQLRKFNARRKLKGAVLAAVSSHKFNSFYGDPPEELPDFSEDPTSSGAVSQVLDSLEEIHALTDCSEKDLDFLHSVFQDQHLHTLLDLYDKINTKSSPQIRNPPSDAVQRAKEVLEEISCYPENNDAKELKRILTQPHFMALLQTHDVVAHEVYSDEALRVTPPPTSPYLNGDSPESANGDMDMENVTRVRLVQFQKNTDEPMGITLKMNELNHCIVARIMHGGMIHRQGTLHVGDEIREINGISVANQTVEQLQKMLREMRGSITFKIVPSYRTQSSSCERDSPSTSRQSPANGHSSTNNSVSDLPSTTQPKGRQIYVRAQFEYDPAKDDLIPCKEAGIRFRVGDIIQIISKDDHNWWQGKLENSKNGTAGLIPSPELQEWRVACIAMEKTKQEQQASCTWFGKKKKQYKDKYLAKHNAVFDQLDLVTYEEVVKLPAFKRKTLVLLGAHGVGRRHIKNTLITKHPDRFAYPIPHTTRPPKKDEENGKNYYFVSHDQMMQDISNNEYLEYGSHEDAMYGTKLETIRKIHEQGLIAILDVEPQALKVLRTAEFAPFVVFIAAPTITPGLNEDESLQRLQKESDILQRTYAHYFDLTIINNEIDETIRHLEEAVELVCTAPQWVPVSWVY

SEQ ID NO: 740367 - protein, 334 aa, Homo sapiens
IHVPLWNRVRKPVWVLCDESVFYVSSPNTMCAYKTSVFLLNAGKFYYFFIGDIIQIISKDDHNWWQGKLENSKNGTAGLIPSPELQEWRVACIAMEKTKQEQQASCTWFGKKKKQYKDKYLAKHNAVFDQLDLVTYEEVVKLPAFKRKTLVLLGAHGVGRRHIKNTLITKHPDRFAYPIPHTTRPPKKDEENGKNYYFVSHDQMMQDISNNEYLEYGSHEDAMYGTKLETIRKIHEQGLIAILDVEPQALKVLRTAEFAPFVVFIAAPTITPGLNEDESLQRLQKESDILQRTYAHYFDLTIINNEIDETIRHLEEAVELVCTAPQWVPVSWVY

SEQ ID NO: 740368 - protein, 906 aa, Homo sapiens
RCGRYPLRTMADDDVLFEDVYELCEVIGKGPFSVVRRCINRETGQQFAVKIVDVAKFTSSPGLSTEDLKREASICHMLKHPHIVELLETYSSDGMLYMVFEFMDGADLCFEIVKRADAGFVYSEAVASHYMRQILEALRYCHDNNIIHRDVKPHCVLLASKENSAPVKLGGFGVAIQLGESGLVAGGRVGTPHFMAPEVVKREPYGKPVDVWGCGVILFILLSGCLPFYGTKERLFEGIIKGKYKMNPRQWSHISESAKDLVRRMLMLDPAERITVYEALNHPWLKERDRYAYKIHLPETVEQLRKFNARRKLKGAVLAAVSSHKFNSFYGDPPEELPDFSEDPTSSGAVSQVLDSLEEIHALTDCSEKDLDFLHSVFQDQHLHTLLDLYDKINTKSSPQIRNPPSDAVQRAKEVLEEISCYPENNDAKELKRILTQPHFMALLQTHDVVAHEVYSDEALRVTPPPTSPYLNGDSPESANGDMDMENVTRVRLVQFQKNTDEPMGITLKMNELNHCIVARIMHGGMIHRQGTLHVGDEIREINGISVANQTVEQLQKMLREMRGSITFKIVPSYRTQSSSCEDLPSTTQPKGRQIYVRAQFEYDPAKDDLIPCKEAGIRFRVGDIIQIISKDDHNWWQGKLENSKNGTAGLIPSPELQEWRVACIAMEKTKQEQQASCTWFGKKKKQYKDKYLAKHNAVFDQLDLVTYEEVVKLPAFKRKTLVLLGAHGVGRRHIKNTLITKHPDRFAYPIPHTTRPPKKDEENGKNYYFVSHDQMMQDISNNEYLEYGSHEDAMYGTKLETIRKIHEQGLIAILDVEPQALKVLRTAEFAPFVVFIAAPTITPGLNEDESLQRLQKESDILQRTYAHYFDLTIINNEIDETIRHLEEAVELVCTAPQWVPVSWVY

SEQ ID NO: 740369 - protein, 303 aa, Homo sapiens
RCGRYPLRTMADDDVLFEDVYELCEVIGKGPFSVVRRCINRETGQQFAVKIVDVAKFTSSPGLSTEDLKREASICHMLKHPHIVELLETYSSDGMLYMVFEFMDGADLCFEIVKRADAGFVYSEAVASHYMRQILEALRYCHDNNIIHRDVKPHCVLLASKENSAPVKLGGFGVAIQLGESGLVAGGRVGTPHFMAPEVVKREPYGKPVDVWGCGVILFILLSGCLPFYGTKERLFEGIIKGKYKMNPRQWSHISESAKDLVRRMLMLDPAERITVYEALNHPWLKVHEHSQVTFYTLSEHFQ

SEQ ID NO: 740370 - protein, 128 aa, Homo sapiens
MNKNVKRERIQLISLFCLLFPPLMPTPTSISSPFRMNLFSVCRRSLTSYREHMHTTSISQLSTMKLMRQSDIWRKLLSSCAQPHSGSLSPGSIRPLPRYLSITGSTSFVEKPLCYRPCVSRSWSLETT

SEQ ID NO: 740371 - protein, 906 aa, Homo sapiens; identical to SEQ ID NO: 740368

SEQ ID NO: 740372 - protein, 929 aa, Homo sapiens; identical to SEQ ID NO: 740365

SEQ ID NO: 740373 - protein, 466 aa, Homo sapiens
MALLQTHDVVAHEVYSDEALRVTPPPTSPYLNGDSPESANGDMDMENVTRVRLVQFQKNTDEPMGITLKMNELNHCIVARIMHGGMIHRQGTLHVGDEIREINGISVANQTVEQLQKMLREMRGSITFKIVPSYRTQSSSCEDLPSTTQPKGRQIYVRAQFEYDPAKDDLIPCKEAGIRFRVGDIIQIISKDDHNWWQGKLENSKNGTAGLIPSPELQEWRVACIAMEKTKQEQQASCTWFGKKKKQYKDKYLAKHNAVFDQLDLVTYEEVVKLPAFKRKTLVLLGAHGVGRRHIKNTLITKHPDRFAYPIPHTTRPPKKDEENGKNYYFVSHDQMMQDISNNEYLEYGSHEDAMYGTKLETIRKIHEQGLIAILDVEPQALKVLRTAEFAPFVVFIAAPTITPGLNEDESLQRLQKESDILQRTYAHYFDLTIINNEIDETIRHLEEAVELVCTAPQWVPVSWVY

SEQ ID NO: 740374 - protein, 917 aa, Homo sapiens
RCGRYPLRTMADDDVLFEDVYELCEVIGKGPFSVVRRCINRETGQQFAVKIVDVAKFTSSPGLSTEDLKREASICHMLKHPHIVELLETYSSDGMLYMVFEFMDGADLCFEIVKRADAGFVYSEAVASHYMRQILEALRYCHDNNIIHRDVKPHCVLLASKENSAPVKLGGFGVAIQLGESGLVAGGRVGTPHFMAPEVVKREPYGKPVDVWGCGVILFILLSGCLPFYGTKERLFEGIIKGKYKMNPRQWSHISESAKDLVRRMLMLDPAERITVYEALNHPWLKERDRYAYKIHLPETVEQLRKFNARRKLKGAVLAAVSSHKFNSFYGDPPEELPDFSEDPTSSGAVSQVLDSLEEIHALTDCSEKDLDFLHSVFQDQHLHTLLDLYDKINTKSSPQIRNPPSDAVQRAKEVLEEISCYPENNDAKELKRILTQPHFMALLQTHDVVAHEVYSDEALRVTPPPTSPYLNGDSPESANGDMDMENVTRVRLVQFQKNTDEPMGITLKMNELNHCIVARIMHGGMIHRQGTLHVGDEIREINGISVANQTVEQLQKMLREMRGSITFKIVPSYRTQSSSCERDSPSTSRQSPANGHSSTNNSVSIYVRAQFEYDPAKDDLIPCKEAGIRFRVGDIIQIISKDDHNWWQGKLENSKNGTAGLIPSPELQEWRVACIAMEKTKQEQQASCTWFGKKKKQYKDKYLAKHNAVFDQLDLVTYEEVVKLPAFKRKTLVLLGAHGVGRRHIKNTLITKHPDRFAYPIPHTTRPPKKDEENGKNYYFVSHDQMMQDISNNEYLEYGSHEDAMYGTKLETIRKIHEQGLIAILDVEPQALKVLRTAEFAPFVVFIAAPTITPGLNEDESLQRLQKESDILQRTYAHYFDLTIINNEIDETIRHLEEAVELVCTAPQWVPVSWVY

SEQ ID NO: 740375 - protein, 740 aa, Homo sapiens
RCGRYPLRTMADDDVLFEDVYELCEVIGKGPFSVVRRCINRETGQQFAVKIVDVAKFTSSPGLSTEDLKREASICHMLKHPHIVELLETYSSDGMLYMVFEFMDGADLCFEIVKRADAGFVYSEAVASHYMRQILEALRYCHDNNIIHRDVKPHCVLLASKENSAPVKLGGFGVAIQLGESGLVAGGRVGTPHFMAPEVVKREPYGKPVDVWGCGVILFILLSGCLPFYGTKERLFEGIIKGKYKMNPRQWSHISESAKDLVRRMLMLDPAERITVYEALNHPWLKERDRYAYKIHLPETVEQLRKFNARRKLKGAVLAAVSSHKFNSFYGDPPEELPDFSEDPTSSGAVSQVLDSLEEIHALTDCSEKDLDFLHSVFQDQHLHTLLDLYDKINTKSSPQIRNPPSDAVQRAKEVLEEISCYPENNDAKELKRILTQPHFMALLQTHDVVAHEVYSDEALRVTPPPTSPYLNGDSPESANGDMDMENVTRVRLVQFQKNTDEPMGITLKMNELNHCIVARIMHGGMIHRQGTLHVGDEIREINGISVANQTVEQLQKMLREMRGSITFKIVPSYRTQSSSCEDLPSTTQPKGRQIYVRAQFEYDPAKDDLIPCKEAGIRFRVGDIIQIISKDDHNWWQGKLENSKNGTAGLIPSPELQEWRVACIAMEKTKQEQQASCTWFGKKKKQYKDKYLAKHNAVFDQLDLVTYEEVVKLPAFKRTLITKHPDRFAYPIPRKQCLN

SEQ ID NO: 740376 - protein, 676 aa, Homo sapiens
RCGRYPLRTMADDDVLFEDVYELCEVIGKGPFSVVRRCINRETGQQFAVKIVDVAKFTSSPGLSTEDLKREASICHMLKHPHIVELLETYSSDGMLYMVFEFMDGADLCFEIVKRADAGFVYSEAVASHYMRQILEALRYCHDNNIIHRDVKPHCVLLASKENSAPVKLGGFGVAIQLGESGLVAGGRVGTPHFMAPEVVKREPYGKPVDVWGCGVILFILLSGCLPFYGTKERLFEGIIKGKYKMNPRQWSHISESAKDLVRRMLMLDPAERITVYEALNHPWLKERDRYAYKIHLPETVEQLRKFNARRKLKGAVLAAVSSHKFNSFYGDPPEELPDFSEDPTSSGAVSQVLDSLEEIHALTDCSEKDLDFLHSVFQDQHLHTLLDLYDKINTKSSPQIRNPPSDAVQRAKEVLEEISCYPENNDAKELKRILTQPHFMALLQTHDVVAHEVYSDEALRVTPPPTSPYLNGDSPESANGDMDMENVTRVRLVQFQKNTDEPMGITLKMNELNHCIVARIMHGGMIHRQGTLHVGDEIREINGISVANQTVEQLQKMLREMRGSITFKIVPSYRTQSSSCEDLPSTTQPKGRQIYVRAQFEYDPAKDDLIPCKEAGIRFRVGDIIQIISKDDHNWWQGKLENSKNGTAGLIPSPELQECYPMFPQKIVLNLECWS

SEQ ID NO: 740377 - protein, 126 aa, Homo sapiens
MGKQGTVSRLPMAVSRPPLWARSRVELLGHSTPHGKPRPWFSPGFCGRNPAPLKRQPESSEISRPPHTHRSPKPRLEIGQNLRKLPPQGLRAEISGPHSPPRRLTSLGPALITGGVGCEVLKVPLR

SEQ ID NO: 740378 - protein, 126 aa, Homo sapiens; identical to SEQ ID NO: 740377

SEQ ID NO: 740379 - protein, 102 aa, Homo sapiens
MESGRPLQSDQASQGPMHGPGHCPKDFVHSPSVLSQDNPTEAATVITSLVQKSMLTPRGFSYFRNHVASSPGLFALTLCCPYTKIKPWGCAVVVKTMGLPQP

SEQ ID NO: 740380 - protein, 115 aa, Homo sapiens
SDTGHSFCSDSGTEMQSNKCQDCGTKIPTSRRACRKEPTKEFHYRYNTPGQNYSNHSKRGAFVQPHSLDESKNSSPSLASPFCCPGLVHSPDTSKSSPTSGWQEAELGLENMKSQ

SEQ ID NO: 740381 - protein, 54 aa, Homo sapiens
DDDSYNSVDGMELTSQGAGTYWYLPPECFVVGKEPPKISNKVDVWSVGVIFYQC

SEQ ID NO: 740382 - protein, 313 aa, Homo sapiens
MDFDERGPCSSNMYLPSCTYYVSGPDFSSLPSFLPQTPSSRPMTYSYSSNLPQVQPVREVTFREYAIEPATKWHPRGNLAHCYSAEELVHRDCLQAPSAAGVPGDVLAKSSANVYHHPTPAVSSNFYSTVGRNGVLPQAFDQFFETAYGTPENLASSDYPGDKSAEKGPPAATATSAAAAAAATGAPATSSSDSGGGGGCRETAAAAEEKERRRRPESSSSPESSSGHTEDKAGGSSGQRTRKKRCPYTKYQIRELEREFFFSVYINKEKRLQLSRMLNLTDRQVKIWFQNRRMKEKKINRDRLQYYSANPLL

SEQ ID NO: 740383 - protein, 279 aa, Homo sapiens
KEAAAVENHVKLGYCGEPKVQPVREVTFREYAIEPATKWHPRGNLAHCYSAEELVHRDCLQAPSAAGVPGDVLAKSSANVYHHPTPAVSSNFYSTVGRNGVLPQAFDQFFETAYGTPENLASSDYPGDKSAEKGPPAATATSAAAAAAATGAPATSSSDSGGGGGCRETAAAAEEKERRRRPESSSSPESSSGHTEDKAGGSSGQRTRKKRCPYTKYQIRELEREFFFSVYINKEKRLQLSRMLNLTDRQVKIWFQNRRMKEKKINRDRLQYYSANPLL

SEQ ID NO: 740384 - protein, 313 aa, Homo sapiens; identical to SEQ ID NO: 740382

SEQ ID NO: 740385 - protein, 225 aa, Homo sapiens [sequence omitted]

SEQ ID NO: 740386 - protein, 225 aa, Homo sapiens [sequence omitted]

SEQ ID NO: 740387 - protein, 243 aa, Homo sapiens
GRVGRPTRRLRRCMCGNNMSTPLPAIVPAARKATAAVIFLHGLGDTGHGWAEAFAGIRSSHIKYICPHAPVRPVTLNMNVAMPSWFDIIGLSPDSQEDESGIKQAAENIKALIDQEVKNGIPSNRIILGGFSQGGALSLYTALTTQQKLAGVTALSCWLPLRASFPQGPIGGANRDISILQCHGDCDPLVPLMFGSLTVEKLKTLVNPANVTFKTYEGMMHSSCQQEMMDVKQFIDKLLPPID

SEQ ID NO: 740388 - protein, 225 aa, Homo sapiens [sequence omitted]

SEQ ID NO: 740389 - protein, 187 aa, Homo sapiens
MDWEILGTDGQKPLQVSEVHISNISARMRFDIIGLSPDSQEDESGIKQAAENIKALIDQEVKNGIPSNRIILGGFSQGGALSLYTALTTQQKLAGVTALSCWLPLRASFPQGPIGGANRDISILQCHGDCDPLVPLMFGSLTVEKLKTLVNPANVTFKTYEGMMHSSCQQEMMDVKQFIDKLLPPID

SEQ ID NO: 740390 - protein, 166 aa, Homo sapiens
MNVAMPSWFDIIGLSPDSQEDESGIKQAAENIKALIDQEVKNGIPSNRIILGGFSQGGALSLYTALTTQQKLAGVTALSCWLPLRASFPQGPIGGANRDISILQCHGDCDPLVPLMFGSLTVEKLKTLVNPANVTFKTYEGMMHSSCQQEMMDVKQFIDKLLPPID

SEQ ID NO: 740391 - protein, 166 aa, Homo sapiens; identical to SEQ ID NO: 740390

SEQ ID NO: 740392 - protein, 100 aa, Homo sapiens
  misc_feature (15)..(15): Xaa can be any naturally occurring amino acid
  misc_feature (21)..(21): Xaa can be any naturally occurring amino acid
  misc_feature (23)..(23): Xaa can be any naturally occurring amino acid
TLEFGHYGRALDLVXGWSRRXLXQGPIGGANRDISILQCHGDCDPLVPLMFGSLTVEKLKTLVNPANVTFKTYEGMMHSSCQQEMMDVKQFIDKLLPPID

SEQ ID NO: 740393 - protein, 211 aa, Homo sapiens
MSTPLPAIVPAARKATAAVIFLHGLGDTGHGWAEAFAGIRSSHIKYICPHAPVRPVTLNMNVAMPSWFDIIGLSPDSQEDESGIKQAAENIKALIDQEVKNGIPSNRIILGGFSQGGALSLYTALTTQQKLAGVTALSCWLPLRASFPQCHGDCDPLVPLMFGSLTVEKLKTLVNPANVTFKTYEGMMHSSCQQEMMDVKQFIDKLLPPID

SEQ ID NO: 740394 - protein, 152 aa, Homo sapiens
KDFALFYRFDIIGLSPDSQEDESGIKQAAENIKALIDQEVKNGIPSNRIILGGFSQGGALSLYTALTTQQKLAGVTALSCWLPLRASFPQCHGDCDPLVPLMFGSLTVEKLKTLVNPANVTFKTYEGMMHSSCQQEMMDVKQFIDKLLPPID

SEQ ID NO: 740395 - protein, 225 aa, Homo sapiens [sequence omitted]

SEQ ID NO: 740396 - protein, 225 aa, Homo sapiens [sequence omitted]

SEQ ID NO: 740397 - protein, 189 aa, Homo sapiens
MSTPLPAIVPAARKATAAVIFLHGLGDTGHGWAEAFAGIRSSHIKYICPHAPVRPVTLNMNVAMPSWFDIIGLSPDSQEDESGIKQAAENIKALIDQEVKNGIPSNRIILGGFSQVSHTESDWWSSNPISTVPGENITAWDVKGSRVLMCCSNPWGMVRVMGLLDAGRSTASRMWDVVSWVGRYSEGVC

SEQ ID NO: 740398 - protein, 225 aa, Homo sapiens [sequence omitted]

SEQ ID NO: 740399 - protein, 181 aa, Homo sapiens
MGRSLCRPVRPVTLNMNVAMPSWFDIIGLSPDSQEDESGIKQAAENIKALIDQEVKNGIPSNRIILGGFSQGGALSLYTALTTQQKLAGVTALSCWLPLRASFPQGPIGGANRDISILQCHGDCDPLVPLMFGSLTVEKLKTLVNPANVTFKTYEGMMHSSCQQEMMDVKQFIDKLLPPID

SEQ ID NO: 740400 - protein, 166 aa, Homo sapiens; identical to SEQ ID NO: 740390

SEQ ID NO: 740401 - protein, 191 aa, Homo sapiens
MSTPLPAIVPAARKATAAVIFLHGLGDTGHGWAEAFAGIRSSHIKYICPHAPVRPVTLNMNVAMPSWFDIIGLSPDSQEDESGIKQAAENIKALIDQEVKNGIPSNRIILGGFSQGPIGGANRDISILQCHGDCDPLVPLMFGSLTVEKLKTLVNPANVTFKTYEGMMHSSCQQEMMDVKQFIDKLLPPID

SEQ ID NO: 740402 - protein, 167 aa, Homo sapiens
GPEGHRCGDFPAWIGRYWARMGRSLCRPVRPVTLNMNVAMPSWFDIIGLSPDSQEDESGIKQAAENIKALIDQEVKNGIPSNRIILGGFSQGPIGGANRDISILQCHGDCDPLVPLMFGSLTVEKLKTLVNPANVTFKTYEGMMHSSCQQEMMDVKQFIDKLLPPID

SEQ ID NO: 740403 - protein, 127 aa, Homo sapiens
MDWEILVKALIDQEVKNGIPSNRIILGGFSQGGALSLYTALTTQQKLAGVTALSCWLPLRASFPQCHGDCDPLVPLMFGSLTVEKLKTLVNPANVTFKTYEGMMHSSCQQEMMDVKQFIDKLLPPID

SEQ ID NO: 740404 - protein, 502 aa, Homo sapiens
VSSRSHVTAVLTVFHGRCFLPGFGVVTTFPSPSPAGAMEEEDEEARALLAGGPDEADRGAPAAPGALPALCDPSRLAHRLLVLLLMCFLGFGSYFCYDNPAALQTQVKRDMQVNTTKFMLLYAWYSWPNVVLCFFGGFLIDRVFGIRWGTIIFSCFVCIGQVVFALGGIFNAFWLMEFGRFVFGIGGESLAVAQNTYAVSWFKGKELNLVFGLQLSMARIGSTVNMNLMGWLYSKIEALLGSAGHTTLGITLMIGGVTCILSLICALALAYLDQRAERILHKEQGKTGEVIKLTDVKDFSLPLWLIFIICVCYYVAVFPFIGLGKVFFTEKFGFSSQAASAINSVVYVISAPMSPVFGLLVDKTGKNIIWVLCAVAATLVSHMMLAFTMWNPWIAMCLLGLSYSLLACALWPMVAFVVPEHQLGTAYGFMQSIQNLGLAIISIIAGMILDSRGYLFLEVFFIACVSLSLLSVVLLYLVNRAQGGNLNYSARQREEIKFSHTE

SEQ ID NO: 740405 - protein, 367 aa, Homo sapiens
DPQAVIRLKLNEWGTIIFSCFVCIGQVVFALGGIFNAFWLMEFGRFVFGIGGESLAVAQNTYAVSWFKGKELNLVFGLQLSMARIGSTVNMNLMGWLYSKIEALLGSAGHTTLGITLMIGGVTCILSLICALALAYLDQRAERILHKEQGKTGEVIKLTDVKDFSLPLWLIFIICVCYYVAVFPFIGLGKVFFTEKFGFSSQAASAINSVVYVISAPMSPVFGLLVDKTGKNIIWVLCAVAATLVSHMMLAFTMWNPWIAMCLLGLSYSLLACALWPMVAFVVPEHQLGTAYGFMQSIQNLGLAIISIIAGMILDSRGYLFLEVFFIACVSLSLLSVVLLYLVNRAQGGNLNYSARQREEIKFSHTE

SEQ ID NO: 740406 - protein, 228 aa, Homo sapiens
LIAILHEVNKEETGEVIKLTDVKDFSLPLWLIFIICVCYYVAVFPFIGLGKVFFTEKFGFSSQAASAINSVVYVISAPMSPVFGLLVDKTGKNIIWVLCAVAATLVSHMMLAFTMWNPWIAMCLLGLSYSLLACALWPMVAFVVPEHQLGTAYGFMQSIQNLGLAIISIIAGMILDSRGYLFLEVFFIACVSLSLLSVVLLYLVNRAQGGNLNYSARQREEIKFSHTE

SEQ ID NO: 740407 - protein, 502 aa, Homo sapiens; identical to SEQ ID NO: 740404

SEQ ID NO: 740408 - protein, 117 aa, Homo sapiens
AAHMGVALRDLPGRHVSSRSHVTAVLTVFHGRCFLPGFGVVTTFPSPSPAGAMEEEDEEARALLAGGPDEADRGAPAAPGALPALCDPSRLAHRLLVLLLMCFLGFGEPAGWVGADL

SEQ ID NO: 740409 - protein, 115 aa, Homo sapiens
VSSRSHVTAVLTVFHGRCFLPGFGVVTTFPSPSPAGAMEEEDEEARALLAGGPDEADRGAPAAPGALPALCDPSRLAHRLLVLLLMCFLGFGSYFCYDNPAALQTQVKRMGHNHF

SEQ ID NO: 740410 - protein, 465 aa, Homo sapiens
MEEEDEEARALLAGGPDEADRGAPAAPGALPALCDPSRLAHRLLVLLLMCFLGFGSYFCYDNPAALQTQVKRDMQVNTTKFMLLYAWYSWPNVVLCFFGGFLIDRVFGIRWGTIIFSCFVCIGQVVFALGGIFNAFWLMEFGRFVFGIGGESLAVAQNTYAVSWFKGKELNLVFGLQLSMARIGSTVNMNLMGWLYSKIEALLGSAGHTTLGITLMIGGVTCILSLICALALAYLDQRAERILHKEQGKTGEVIKLTDVKDFSLPLWLIFIICVCYYVAVFPFIGLGKVFFTEKFGFSSQAASAINSVVYVISAPMSPVFGLLVDKTGKNIIWVLCAVAATLVSHMMLAFTMWNPWIAMCLLGLSYSLLACALWPMVAFVVPEHQLGTAYGFMQSIQNLGLAIISIIAGMILDSRGYLFLEVFFIACVSLSLLSVVLLYLVNRAQGGNLNYSARQREEIKFSHTE

SEQ ID NO: 740411 - protein, 392 aa, Homo sapiens [sequence omitted]

SEQ ID NO: 740412 - protein, 368 aa, Homo sapiens
MIILLPFRLKLNEWGTIIFSCFVCIGQVVFALGGIFNAFWLMEFGRFVFGIGGESLAVAQNTYAVSWFKGKELNLVFGLQLSMARIGSTVNMNLMGWLYSKIEALLGSAGHTTLGITLMIGGVTCILSLICALALAYLDQRAERILHKEQGKTGEVIKLTDVKDFSLPLWLIFIICVCYYVAVFPFIGLGKVFFTEKFGFSSQAASAINSVVYVISAPMSPVFGLLVDKTGKNIIWVLCAVAATLVSHMMLAFTMWNPWIAMCLLGLSYSLLACALWPMVAFVVPEHQLGTAYGFMQSIQNLGLAIISIIAGMILDSRGYLFLEVFFIACVSLSLLSVVLLYLVNRAQGGNLNYSARQREEIKFSHTE

SEQ ID NO: 740413 - protein, 502 aa, Homo sapiens; identical to SEQ ID NO: 740404

SEQ ID NO: 740414 - protein, 375 aa, Homo sapiens
VSSRSHVTAVLTVFHGRCFLPGFGVVTTFPSPSPAGAMEEEDEEARALLAGGPDEADRGAPAAPGALPALCDPSRLAHRLLVLLLMCFLGFGSYFCYDNPAALQTQVKRDMQVNTTKFMLLYAWYSWPNVVLCFFGGFLIDRVFGIRWGTIIFSCFVCIGQVVFALGGIFNAFWLMEFGRFVFGIGGESLAVAQNTYAVSWFKGKELNLVFGLQLSMARIGSTVNMNLMGWLYSKIEALLGSAGHTTLGITLMIGGVTCILSLICALALAYLDQRAERILHKEQGKTGEVIKLTDVKDFSLPLWLIFIICVCYYVAVFPFIGLGKSFSLPRTLDFLPTAQVPFTVLVCLSVPFPVLGPVLSRAKPLWVCRTSCSR

SEQ ID NO: 740415 - protein, 115 aa, Homo sapiens
PYKPPRVTQGPSTVTSGEKRNAVLCAMLEVNEENVSWGLLTNCSPHPNPPDGQGCVRGSGHKAPLAGQQLAHETALSAPPLNGSSMGSSEEHRRLLCVTSPLISRAAEIHYRTQN

SEQ ID NO: 740416 - protein, 81 aa, Homo sapiens
GGVCPGPLPVRSAAPDSSGSLKRDQRRPHLGTSTHRPLLLQRQQPSAPSLAPCSEAQELASPRRLNQPNFRDSSRLRGRFI

SEQ ID NO: 740417 - protein, 176 aa, Homo sapiens
MDLDGDGALSMFELEYFYEEQCRRLDSMAIEALPFQDCLCQMLDLVKPRTEGKITLQDLKRCKLANVFFDTFFNIEKYLDHEQKEQISLLRDGDSGGPELSDWEKYAAEEYDILVAEETAGEPWEDGFEAELSPVEQKLSALRSPLAQRPFFEAPSPLGAVDLYEYACGDEDLEPL

SEQ ID NO: 740418 - protein, 638 aa, Homo sapiens
DRAPSSVPAPRESAQFPRRGPCSLRRAPSAGRARITEVVRGGPKPPGRGGARASGGAAGPAPAMPPGKVLQPVLKMKVDELFLYWLSEASTQRMLQDCLRRIKAPGRDQPTPGDGEQPGAWPTARSLPPAQRARTPREPPGRALTLPLGAASSPRNAPHVRGTRRSAGTRVVQTRKEEPLPPATSQSIPTFYFPRGRPQDSVNVDAVISKIESTFARFPHERATMDDMGLVAKACGCPLYWKGPLFYGAGGERTGSVSVHKFVAMWRKILQNCHDDAAKFVHLLMSPGCNYLVQEDFVPFLQDVVNTHPGLSFLKEASEFHSRYITTVIQRIFYAVNRSWSGRITCAELRRSSFLQNVALLEEEADINQLTEFFSYEHFYVIYCKFWELDTDHDLLIDADDLARHNDHALSTKMIDRIFSGAVTRGRKVQKEGKISYADFVWFLISEEDKKTPTSIEYWFRCMDLDGDGALSMFELEYFYEEQCRRLDSMAIEALPFQDCLCQMLDLVKPRTEGKITLQDLKRCKLANVFFDTFFNIEKYLDHEQKEQISLLRDGDSGGPELSDWEKYAAEEYDILVAEETAGEPWEDGFEAELSPVEQKLSALRSPLAQRPFFEAPSPLGAVDLYEYACGDEDLEPL

SEQ ID NO: 740419 - protein, 544 aa, Homo sapiens
RRRGEQRREQPGLHSRGSGERGARPGPRRALRAGGMRLRERSLRQDPDLRQELASLARGCDFVLPSRFKKRLKAFQQVQTRKEEPLPPATSQSIPTFYFPRGRPQDSVNVDAVISKIESTFARFPHERATMDDMGLVAKACGCPLYWKGPLFYGAGGERTGSVSVHKFVAMWRKILQNCHDDAAKFVHLLMSPGCNYLVQEDFVPFLQDVVNTHPGLSFLKEASEFHSRYITTVIQRIFYAVNRSWSGRITCAELRRSSFLQNVALLEEEADINQLTEFFSYEHFYVIYCKFWELDTDHDLLIDADDLARHNDHALSTKMIDRIFSGAVTRGRKVQKEGKISYADFVWFLISEEDKKTPTSIEYWFRCMDLDGDGALSMFELEYFYEEQCRRLDSMAIEALPFQDCLCQMLDLVKPRTEGKITLQDLKRCKLANVFFDTFFNIEKYLDHEQKEQISLLRDGDSGGPELSDWEKYAAEEYDILVAEETAGEPWEDGFEAELSPVEQKLSALRSPLAQRPFFEAPSPLGAVDLYEYACGDEDLEPL

SEQ ID NO: 740420 - protein, 482 aa, Homo sapiens
YQLGPYSAEIRRTRVVQTRKEEPLPPATSQSIPTFYFPRGRPQDSVNVDAVISKIESTFARFPHERATMDDMGLVAKACGCPLYWKGPLFYGAGGERTGSVSVHKFVAMWRKILQNCHDDAAKFVHLLMSPGCNYLVQEDFVPFLQDVVNTHPGLSFLKEASEFHSRYITTVIQRIFYAVNRSWSGRITCAELRRSSFLQNVALLEEEADINQLTEFFSYEHFYVIYCKFWELDTDHDLLIDADDLARHNDHALSTKMIDRIFSGAVTRGRKVQKEGKISYADFVWFLISEEDKKTPTSIEYWFRCMDLDGDGALSMFELEYFYEEQCRRLDSMAIEALPFQDCLCQMLDLVKPRTEGKITLQDLKRCKLANVFFDTFFNIEKYLDHEQKEQISLLRDGDSGGPELSDWEKYAAEEYDILVAEETAGEPWEDGFEAELSPVEQKLSALRSPLAQRPFFEAPSPLGAVDLYEYACGDEDLEPL

SEQ ID NO: 740421 - protein, 395 aa, Homo sapiens
GVAAPPSHLSWARVAPGRPRPDPPRFPRPGAAPPAGPFPLPPPVPWRPRAAETKGAPLSRLPVSVRGEAPGGLCAPTALTAPPQVIQRIFYAVNRSWSGRITCAELRRSSFLQNVALLEEEADINQLTEFFSYEHFYVIYCKFWELDTDHDLLIDADDLARHNDHALSTKMIDRIFSGAVTRGRKVQKEGKISYADFVWFLISEEDKKTPTSIEYWFRCMDLDGDGALSMFELEYFYEEQCRRLDSMAIEALPFQDCLCQMLDLVKPRTEGKITLQDLKRCKLANVFFDTFFNIEKYLDHEQKEQISLLRDGDSGGPELSDWEKYAAEEYDILVAEETAGEPWEDGFEAELSPVEQKLSALRSPLAQRPFFEAPSPLGAVDLYEYACGDEDLEPL

SEQ ID NO: 740422 - protein, 446 aa, Homo sapiens
QLVTSKTFTVHRSAGWKISVWQSGAWFIDGAFPLRPHGVEGACGCPLYWKGPLFYGAGGERTGSVSVHKFVAMWRKILQNCHDDAAKFVHLLMSPGCNYLVQEDFVPFLQDVVNTHPGLSFLKEASEFHSRYITTVIQRIFYAVNRSWSGRITCAELRRSSFLQNVALLEEEADINQLTEFFSYEHFYVIYCKFWELDTDHDLLIDADDLARHNDHALSTKMIDRIFSGAVTRGRKVQKEGKISYADFVWFLISEEDKKTPTSIEYWFRCMDLDGDGALSMFELEYFYEEQCRRLDSMAIEALPFQDCLCQMLDLVKPRTEGKITLQDLKRCKLANVFFDTFFNIEKYLDHEQKEQISLLRDGDSGGPELSDWEKYAAEEYDILVAEETAGEPWEDGFEAELSPVEQKLSALRSPLAQRPFFEAPSPLGAVDLYEYACGDEDLEPL

SEQ ID NO: 740423 - protein, 453 aa, Homo sapiens
DARTGRAERAVSFCSRGSLGGVGQARGTQQERRRPGPADCPLLPSLPQACGCPLYWKGPLFYGAGGERTGSVSVHKFVAMWRKILQNCHDDAAKFVHLLMSPGCNYLVQEDFVPFLQDVVNTHPGLSFLKEASEFHSRYITTVIQRIFYAVNRSWSGRITCAELRRSSFLQNVALLEEEADINQLTEFFSYEHFYVIYCKFWELDTDHDLLIDADDLARHNDHALSTKMIDRIFSGAVTRGRKVQKEGKISYADFVWFLISEEDKKTPTSIEYWFRCMDLDGDGALSMFELEYFYEEQCRRLDSMAIEALPFQDCLCQMLDLVKPRTEGKITLQDLKRCKLANVFFDTFFNIEKYLDHEQKEQISLLRDGDSGGPELSDWEKYAAEEYDILVAEETAGEPWEDGFEAELSPVEQKLSALRSPLAQRPFFEAPSPLGAVDLYEYACGDEDLEPL

SEQ ID NO: 740424 - protein, 740 aa, Homo sapiens
TAPPPRSPRPASPRSSRGAGPVPCAAPPQRAVLASPRSVRGGPKPPGRGGARASGGAAGPAPAMPPGKVLQPVLKMKVDELFLYWLSEASTQRMLQDCLRRIKAPGRDQPTPGDGEQPGAWPTARSLPPAQRARTPREPPGRALTLPLGAASSPRNAPHVRGTRRSAGTRVVQTRKEEPLPPATSQSIPTFYFPRGRPQDSVNVDAVISKIESTFARFPHERATMDDMGLVAKACGCPLYWKGPLFYGAGGERTGSVSVHKFVAMWRKILQNCHDDAAKFVHLLMSPGCNYLVQEDFVPFLQDVVNTHPGLSFLKEASEFHSRYITTVIQRIFYAVNRSWSGRITCAELRRSSFLQNVALLEEEADINQLTEFFSYEHFYVIYCKFWELDTDHDLLIDADDLARHNDHGLFLRLKAVPLRPEYSALYKSVLEPRSALRSVDFMLDLALLDGKAWWAPRMGRAGASGPRGSPRPRRPLSFSVPTASSLGSGGWCRRGRGTVRAAHQPHSFPALSTKMIDRIFSGAVTRGRKVQKEGKISYADFVWFLISEEDKKTPTSIEYWFRCMDLDGDGALSMFELEYFYEEQCRRLDSMAIEALPFQDCLCQMLDLVKPRTEGKITLQDLKRCKLANVFFDTFFNIEKYLDHEQKEQISLLRDGDSGGPELSDWEKYAAEEYDILVAEETAGEPWEDGFEAELSPVEQKLSALRSPLAQRPFFEAPSPLGAVDLYEYACGDEDLEPL

SEQ ID NO: 740425 - protein, 135 aa, Homo sapiens
MLFYFFETESHFVAQCGERRCKLANVFFDTFFNIEKYLDHEQKEQISLLRDGDSGGPELSDWEKYAAEEYDILVAEETAGEPWEDGFEAELSPVEQKLSALRSPLAQRPFFEAPSPLGAVDLYEYACGDEDLEPL

SEQ ID NO: 740426 - protein, 680 aa, Homo sapiens
TAPPPRSPRPASPRSSRGAGPVPCAAPPQRAVLASPRSVRGGPKPPGRGGARASGGAAGPAPAMPPGKVLQPVLKMKVDELFLYWLSEASTQRMLQDCLRRIKAPGRDQPTPGDGEQPGAWPTARSLPPAQRARTPREPPGRALTLPLGAASSPRNAPHVRGTRRSAGTRVVQTRKEEPLPPATSQSIPTFYFPRGRPQDSVNVDAVISKIESTFARFPHERATMDDMGLVAKACGCPLYWKGPLFYGAGGERTGSVSVHKFVAMWRKILQNCHDDAAKFVHLLMSPGCNYLVQEDFVPFLQDVVNTHPGLSFLKEASEFHSRYITTVIQRIFYAVNRSWSGRITCAELRRSSFLQNVALLEEEADINQLTEFFSYEHFYVIYCKFWELDTDHDLLIDADDLARHNDHGLFLRLKAVPLRPEYSALYKSVLEPRSALRSVDFMLDLALLDGKAWWAPRMGRAGASGPRGSPRPRRPLSFSVPTASSLGSGGWCRRGRGTVRAAHQPHSFPALSTKMIDRIFSGAVTRGRKVQKEGKISYADFVWFLISEEDKKTPTSIEYWFRCMDLDGDGALSMFELEYFYEEQCRRLDSMAIEALPFQDCLCQMLDLVKPRTEGKITLQDLKRCKLANVFFDTFFNIEKYLDHEQKEQISLLRDGDSGGPELSDWEKYACGDEDLEPL

SEQ ID NO: 740427 - protein, 348 aa, Homo sapiens
DRAPSSVPAPRESAQFPRRGPCSLRRAPSAGRARITEVVRGGPKPPGRGGARASGGAAGPAPAMPPGKVLQPVLKMKVDELFLYWLSEASTQRMLQDCLRRIKAPGRDQPTPGDGEQPGAWPTARSLPPAQRARTPREPPGRALTLPLGAASSPRNAPHVRGTRRSAGTRVVQTRKEEPLPPATSQSIPTFYFPRGRPQDSVNVDAVISKIESTFARFPHERATMDDMGLVAKACGCPLYWKGPLFYGAGGERTGSVSVHKFVAMWRKILQNCHDDAAKFVHLLMSPGCNYLVQEDFVPFLQDVVNTHPGLSFLKEASEFHSRYITTVGPQRRGRRFQRGARVFLQQP

SEQ ID NO: 740428 - protein, 497 aa, Homo sapiens
DRAPSSVPAPRESAQFPRRGPCSLRRAPSAGRARITEVVRGGPKPPGRGGARASGGAAGPAPAMPPGKVLQPVLKMKVDELFLYWLSEASTQRMLQDCLRRIKAPGRDQPTPGDGEQPGAWPTARSLPPAQRARTPREPPGRALTLPLGAASSPRNAPHVRGTRRSAGTRVVQTRKEEPLPPATSQSIPTFYFPRGRPQDSVNVDAVISKIESTFARFPHERATMDDMGLVAKACGCPLYWKGPLFYGAGGERTGSVSVHKFVAMWRKILQNCHDDAAKFVHLLMSPGCNYLVQEDFVPFLQDVVNTHPGLSFLKEASEFHSRYITTVIQRIFYAVNRSWSGRITCAELRRSSFLQNVALLEEEADINQLTEFFSYEHFYVIYCKFWELDTDHDLLIDADDLARHNDHALSTKMIDRIFSGAVTRGRKVQQQGRISMPMVGSTLEEKKNTASLSNGPGVDRRGRALASSSRVFYKEGGRCHKDGGAPTGARKVPGTR

SEQ ID NO: 740429 - protein, 166 aa, Homo sapiens
RPPPPPAPCALLSLRNARGAGPGPRAPGGRRMERAEPGPRLQRPAGPGPALPRERGARPGPRRALRAGGMRLRERSLRQDPDLRQELASLARGCDFVLPSRFKKRLKAFQQVSPARPAAARHRARPPGPASPALPAPRGPPLAAAGRAPVVAWRGPNARFTGPVVG

SEQ ID NO: 740430 - protein, 110 aa, Homo sapiens
MGASGSKARGLWPFASAAGGGGSEAAGAEQALVRPRGRAVPPFVFTRRGSMFYDEDGDLAHEFYEETIVTKNGQKRAKLRRVHKNLIPQGIVKLDHPRIHVDFPVILYEV

SEQ ID NO: 740431 - protein, 110 aa, Homo sapiens; identical to SEQ ID NO: 740430

SEQ ID NO: 740432 - protein, 110 aa, Homo sapiens; identical to SEQ ID NO: 740430

SEQ ID NO: 740433 - protein, 110 aa, Homo sapiens; identical to SEQ ID NO: 740430

SEQ ID NO: 740434 - protein, 171 aa, Homo sapiens
MGASGSKARGLWPFASAAGGGGSEAAGAEQALVRPRGRAVPPFVFTRRGLLLFQSLTLGQQHLLECDQHAQATTLPTLEVLGERQSPDIRMAALAEQIKDENWPWWLPGCSMFYDEDGDLAHEFYEETIVTKNGQKRAKLRRVHKNLIPQGIVKLDHPRIHVDFPVILYEV

SEQ ID NO: 740435 - protein, 894 aa, Homo sapiens
LGTPVIVLADGALQKPSNEGVIEIKATKVCDQRTKCKSRCNEMLPGTSTGNNQSTITLSVASQNLTFTSSSSPPNGDSINKDPKLCTKSPRKRLSSTLQETQVPPVKKPIVEQLSAATIEGQKQGSVKKDQKVPHSGKTEGSTAGAQIPSKVSVNVSSHIGANQPLNSSALVISDSALEQQTTPSSSPDIKVKLEGSVFLLDSDSKSVGSFNPNGWQQITKDSEFISASCEQQQDISVMTIPEHSDINDLEKSVWELEGMPQDTYSQQLHSQIQESSLNQIQAHSSDQLPLQSELKEFEPSVSQTNESYFPFDDELTQDSIVEELVLMEQQMSMNNSHSYGNCLGMTLQSQSVTPGAPMSSHTSSTHFYHPIHSNGTPIHTPTPTPTPTPTPTPTPTPTSEMIAGSQSLSRESPCSRLAQTTPVDSALGSSRHTPIGTPHSNCSSSVPPSPVECRNPFAFTPISSSMAYHDASIVSSSPVKPMQRPMATHPDKTKLEWMNNGYSGVGNSSVSGHGILPSYQELVEDRFRKPHAFAVPGQSYQSQSRHHDTHFGRLTPVSPVQHQGATVNNTNKQEGFAVPAPLDNKGTNSSASSNFRCRSVSPAVHRQRNLSGSTLYPVSNIPRSNVTPFGSPVTPEVHVFTNVHTDACANNIAQRSQSVPLTVMMQTAFPNALQKQANSKKITNVLLSKLDSDNDDAVRGLGMNNLPSNYTARMNLTQILEPSTVFPSANPQNMIDSSTSVYEFQTPSYLTKSNSTGQINFSPGDNQAQSEIGEQQLDFNSTVKDLLSGDSLQTNQQLVGQGASDLTNTASDFSSDIRLSSELSGSINDLNTLDPNLLFDPGRQQGQDDEATLEELKNDPLFQQICSESMNSMTSSGFEWIESKDHPTVEMLG

SEQ ID NO: 740436 - protein, 876 aa, Homo sapiens
LGTPVIVLADGALQKPSNEGVIEIKATKVCDQRTKCKSRCNEMLPGTSTGNNQSTITLSVASQNLTFTSSSSPPNGDSINKDPKLCTKSPRKRLSSTLQETQVPPVKKPIVEQLSAATIEGQKQGSVKKDQKVPHSGKTEGSTAGAQIPSKVSVNVSSHIGANQPLNSSALVISDSALEQQTTPSSSPDIKVKLEGSVFLLDSDSKSVGSFNPNGWQQITKDSEFISASCEQQQDISVMTIPEHSDINDLEKSVWELEGMPQDTYSQQLHSQIQESSLNQIQAHSSDQLPLQSELKEFEPSVSQTNESYFPFDDELTQDSIVEELVLMEQQMSMNNSHSYGNCLGMTLQSQSVTPGAPMSSHTSSTHFYHPIHSNGTPIHTPTPTPTPTPTPTPTPTPTSEMIAGSQSLSRESPCSRLAQTTPVDSALGSSRHTPIGTPHSNCSSSVPPSPVECRNPFAFTPISSSMAYHDASIVSSSPVKPMQRPMATHPDISGHGILPSYQELVEDRFRKPHAFAVPGQSYQSQSRHHDTHFGRLTPVSPVQHQGATVNNTNKQEGFAVPAPLDNKGTNSSASSNFRCRSVSPAVHRQRNLSGSTLYPVSNIPRSNVTPFGSPVTPEVHVFTNVHTDACANNIAQRSQSVPLTVMMQTAFPNALQKQANSKKITNVLLSKLDSDNDDAVRGLGMNNLPSNYTARMNLTQILEPSTVFPSANPQNMIDSSTSVYEFQTPSYLTKSNSTGQINFSPGDNQAQSEIGEQQLDFNSTVKDLLSGDSLQTNQQLVGQGASDLTNTASDFSSDIRLSSELSGSINDLNTLDPNLLFDPGRQQGQDDEATLEELKNDPLFQQICSESMNSMTSSGFEWIESKDHPTVEMLG

SEQ ID NO: 740437 - protein, 789 aa, Homo sapiens
LGTPVIVLADGALQKPSNEGVIEIKATKVCDQRTKCKSRCNEMLPGTSTGNNQSTITLSVASQNLTFTSSSSPPNGDSINKDPKLCTKSPRKRLSSTLQETQVPPVKKPIVEQLSAATIEGQKQGSVKKDQKVPHSGKTEGSTAGAQIPSKVSVNVSSHIGANQPLNSSALVISDSALEQQTTPSSSPDIKVKLEGSVFLLDSDSKSVGSFNPNGWQQITKDSEFISASCEQQQDISVMTIPEHSDINDLEKSVWELEGMPQDTYSQQLHSQIQESSLNQIQAHSSDQLPLQSELKEFEPSVSQTNESYFPFDDELTQDSIVEELVLMEQQMSMNNSHSYGNCLGMTLQSQSVTPGAPMSSHTSSTHFYHPIHSNGTPIHTPTPTPTPTPTPTPTPTPTSEMIAGSQSLSRESPCSRLAQTTPVDSALGSSRHTPIGTPHSNCSSSVPPSPVECRNPFAFTPISSSMAYHDASIVSSSPVKPMQRPMATHPDISGHGILPSYQELVEDRFRKPHAFAVPGQSYQSQSRHHDTHFGRLTPVSPVQHQGATVNNTNKQEGFAVPAPLDNKGTNSSASSNFRCRSVSPAVHRQRNLSGSTLYPVSNIPRSNVTPFGSPVTPEVHVFTNVHTDACANNIAQRSQSVPLTVMMQTAFPNALQKQANSKKITNVLLSKLDSDNDDAVRGLGMNNLPSNYTARMNLTQILEPSTVFPSANPQNMIDSSTSVYEFQTPSYLTKSNSTGQINFSPGDNQAQSEIGEQQLDFNSTVKDLLSGDSLQTNQQLKYPDVLGE

SEQ ID NO: 740438 - protein, 794 aa, Homo sapiens
LGTPVIVLADGALQKPSNEGVIEIKATKVCDQRTKCKSRCNEMLPGTSTGNNQSTITLSVASQNLTFTSSSSPPNGDSINKDPKLCTKSPRKRLSSTLQETQVPPVKKPIVEQLSAATIEGQKQGSVKKDQKVPHSGKTEGSTAGAQIPSKVSVNVSSHIGANQPLNSSALVISDSALEQQTTPSSSPDIKVKLEGSVFLLDSDSKSVGSFNPNGWQQITKDSEFISASCEQQQDISVMTIPEHSDINDLEKSVWELEGMPQDTYSQQLHSQIQESSLNQIQAHSSDQLPLQSELKEFEPSVSQTNESYFPFDDELTQDSIVEELVLMEQQMSMNNSHSYGNCLGMTLQSQSVTPGAPMSSHTSSTHFYHPIHSNGTPIHTPTPTPTPTPTPTPTPTPTSEMIAGSQSLSRESPCSRLAQTTPVDSALGSSRHTPIGTPHSNCSSSVPPSPVECRNPFAFTPISSSMAYHDASIVSSSPVKPMQRPMATHPDISGHGILPSYQELVEDRFRKPHAFAVPGQSYQSQSRHHDTHFGRLTPVSPVQHQGATVNNTNKQEGFAVPAPLDNKGTNSSASSNFRCRSVSPAVHRQRNLSGSTLYPVSNIPRSNVTPFGSPVTPEVHVFTNVHTDACANNIAQRSQSVPLTVMMQTAFPNALQKQANSKKITNVLLSKLDSDNDDAVRGLGMNNLPSNYTARMNLTQILEPSTVFPSANPQNMIDSSTSVYEFQTPSYLTKSNSTGQINFSPGDNQAQSEIGEQQLDFNSTVKDLLSGDSLQTNQQLCSCPSSLLAGMQM

SEQ ID NO: 740439 - protein, 789 aa, Homo sapiens; identical to SEQ ID NO: 740437

SEQ ID NO: 740440 - protein, 571 aa, Homo sapiens
LGTPVIVLADGALQKPSNEGVIEIKATKVCDQRTKCKSRCNEMLPGTSTGNNQSTITLSVASQNLTFTSSSSPPNGDSINKDPKLCTKSPRKRLSSTLQETQVPPVKKPIVEQLSAATIEGQKQGSVKKDQKVPHSGKTEGSTAGAQIPSKVSVNVSSHIGANQPLNSSALVISDSALEQQTTPSSSPDIKVKLEGSVFLLDSDSKSVGSFNPNGWQQITKDSEFISASCEQQQDISVMTIPEHSDINDLEKSVWELEGMPQDTYSQQLHSQIQESSLNQIQAHSSDQLPLQSELKEFEPSVSQTNESYFPFDDELTQDSIVEELVLMEQQMSMNNSHSYGNCLGMTLQSQSVTPGAPMSSHTSSTHFYHPIHSNGTPIHTPTPTPTPTPTPTPTPTPTSEMIAGSQSLSRESPCSRLAQTTPVDSALGSSRHTPIGTPHSNCSSSVPPSPVECRNPFAFTPISSSMAYHDASIVSSSPVKPMQRPMATHPDKTKLEWMNNGYSGVGNSSVSGHGILPTRAPDAVYTELQPTSPDPNLACCCNTTTPDPDPSNWKVRMACSDTCIQTGILW

SEQ ID NO: 740441 - protein, 223 aa, Homo sapiens
KTPQNVPASPGGDRSARHRYPQILPKPANTSALTIRSPTTVLFTSSPIKTAVVPASHMSSLNVVKMTTISLTPSNSNTPLKHSASVSSATGTTEESRSVPQIKNGSVVSLQSPGSRSSSAGGTSAVEVKVEPETSSDEHPVQCQENSDEAKAPQTPSALLGQKSNTDGALQKPSNEGVIEIKATKVCDQRTKCKSRCNEMLPGTSTGNNQSTITLSVASQNLT

SEQ ID NO: 740442 - protein, 78 aa, Homo sapiens
LGGLVAPRRCARPTGPLNQKRDVWQGALESFHFGLVISCRLFLVFVTAHSEHFSSAVYTMSGISNMFLEVVSAVLYEA

SEQ ID NO: 740443 - protein, 401 aa, Homo sapiens
MEPRRAAPGVPGWGSREAAGSASAAELVYHLAGALGTELQDLARRFGPEAAAGLVPLVVRALELLEQAAVGPAPDSLQVSAQPAEQELRRLREENERLRRELRAGPQEERALLRQLKEVTDRQRDELRAHNRDLRQRGQETEALQEQLQRLLLVNAELRHKLAAMQTQLRAAQDRERERQQPGEAATPQAKERARGQAGRPGHQHGQEPEWATAGAGAPGNPEDPAEAAQQLGRPSEAGQCRFSREEFEQILQERNELKAKVFLLKEELAYFQRELLTDHRVPGLLLEAMKVAVRKQRKKIKAKMLGTPEEAESSEDEAGPWILLSDDKGDHPPPPESKIQSFFGLWYRGKAESSEDETSSPAPSKLGGEEEAQPQSPAPDPPCSALHEHLCLGASAAPEA

SEQ ID NO: 740444 - protein, 133 aa, Homo sapiens
EGSTQVTTCSPEPQLLDPPGWKLAVLFPVTLGVERTEPRRPRALSPYPTPSPFLVPPYPYRFYPAHTALNGFLGRNCFAFPRPSGGWGGGVAALSLWETWSPGGRRPGCLAGGLGRPRGRHRPRSLSSLWGQI

SEQ ID NO: 740445 - protein, 373 aa, Homo sapiens
MEPRRAAPGVPGWGSREAAGSASAAELVYHLAGALGTELQDLARRFGPEAAAGLVPLVVRALELLEQAAVGPAPDSLQVSAQPAEQELRRLREENERLRRELRAGPQEERALLRQLKEVTDRQRDELRAHNRDLRQRGQETEALQEQLQRLLLVNAELRHKLAAMQTQLRAAQDRERERQQPGEAATPQAKERARGQAGRPGHQHGQEPEWATAGAGAPGNPEDPAEAAQQLGRPSEAGQCRFSREEFEQILQERNELKAKVFLLKEELAYFQRELLTDHRVPGLLLEAMKVAVRKQRKKIKAKMLGTPEEAESSFGLWYRGKAESSEDETSSPAPSKLGGEEEAQPQSPAPDPPCSALHEHLCLGASAAPEA

SEQ ID NO: 740446 - protein, 398 aa, Homo sapiens
MEPRRAAPGVPGWGSREAAGSASAAELVYHLAGALGTELQDLARRFGPEAAAGLVPLVVRALELLEQAAVGPAPDSLQVSAQPAEQELRRLREENERLRRELRAGPQEERALLRQLKEVTDRQRDELRAHNRDLRQRGQETEALQEQLQRLLLVNAELRHKLAAMQTQLRAAQDRERERQQPGEAATPQAKERARGQAGRPGHQHGQEPEWATAGAGAPGNPEDPAEAAQQLGRPSEAGQCRFSREEFEQILQERNELKAKVFLLKEELAYFQRELLTDHRVPGLLLEAMKVAVRKQRKKIKAKMLGTPEEAESSEDEAGPWILLSDDKGDHPPPPESKIQSFFGLWYRGKAESSEDETSSPAPSKLGGEEEAQPQSPAPDPPCSALHEHLSSLWGQI

SEQ ID NO: 740447 - protein, 228 aa, Homo sapiens
MEISRLAQSKRNIISLNMDLERDTQRIDEANQKLLLKIQEREDKIQRLESEIIQTRGLVEDEEWEKENRTTMERERALQELEEETARLERKNKTLVHSITELQQKLTRKSQKITNCEQSSPDGALEETKVKLQQLEASYACQEKELLKVMKEYAFVTQLCEDQALYIKKYQETLKKIEEELEALFLEREVSKLVSMNPVEKEHTSQNNEGTPTQKTARLFSKKWASSF

SEQ ID NO: 740448 - protein, 228 aa, Homo sapiens; identical to SEQ ID NO: 740447

SEQ ID NO: 740449 - protein, 114 aa, Homo sapiens
TTKIAAASTVYIRCYVKVLQRPLKKVNGDSGLLPTTGSSSRTSLIVSVLYNLSFEQRVLRLKTEDYGWAQWLMPTDRGGWIMMRSGVRDQPGQHGEAPSLLGIQKLAERGGRCL

SEQ ID NO: 740450 - protein, 1204 aa, Homo sapiens
MKDQQTVIMTECTSLQFVSPFAFEAMQKVDVVCLASLSDPELRLLLPCLVRMALCAPADQSQSWAQDKKLILRLLSGVEAVNSIVALLSVDFHALEQDASKEQQLRHKLGGGSGESILVSQLQHGLTLEFEHSDSPRRLRLVLSELLAIMNKVSESNGEFFFKSSELFESPVYLEEAADVLCILQAELPSLLPIVDVAEALLHVRNGAWFLCLLVANVPDSFNEVCRGLIKNGERQDEESLGGRRRTDALRFLCKMNPSQALKVRGMVVEECHLPGLGVALTLDHTKNEACEDGVSDLVCFVSGLLLGTNAKVRTWFGTFIRNGQQRKRETSSSVLWQMRRQLLLELMGILPTVRSTRIVEEADVDMEPNVSVYSGLKEEHVVKASALLRLYCALMGIAGLKPTEEEAEQLLQLMTSRPPATPAGVRFVSLSFCMLLAFSTLVSTPEQEQLMVVWLSWMIKEEAYFESTSGVSASFGEMLLLVAMYFHSNQLSAIIDLVCSTLGMKIVIKPSSLSRMKTIFTQEIFTEQVVTAHAVRVPVTSNLSANITGFLPIHCIYQLLRSRSFTKHKVSIKDWIYRQLCETSTPLHPQLLPLIDVYINSILTPASKSNPEATNQPVTEQEILNIFQGVIGGDNIRLNQRFSITAQLLVLYYILSYEEALLANTKTLAAMQRKPKSYSSSLMDQIPIKFLIRQAQGLQQELGGLHSALLRLLATNYPHLCIVDDWICEEEITGTDALLRRMLLTNNAKNHSPKQLQEAFSAVPVNHTQVMQIIEHLTLLSASELIPYAEVLTSNMSQLLNSGVPRRILQTVNKLWMVLNTVMPRRLWVMTVNALQPSIKFVRQQKYTQNDLMIDPLIVLRCDQRVHRCPPLMDITLHMLNGYLLASKAYLSAHLKETEQDRPSQNNTIGLVGQTDAPEVTREELKNALLAAQDSAAVQILLEICLPTEEEKANGVNPDSLLRNVQSVITTSAPNKGMEEGEDNLLCNLREVQCLICCLLHQMYIADPNIAKLVHFQGYPCELLPLTVAGIPSMHICLDFIPELIAQPELEKQIFAIQLLSHLCIQYALPKSLSVARLAVNVMGTLLTVLTQAKRYAFFMPTLPSLVSFCRAFPPLYEDIMSLLIQIGQVCASDVATQTRDIDPIITRLQQIKEKPSGWSQICKDSSYKNGSRDTGSMDPDVQLCHCIERTVIEIINMSVSGI

SEQ ID NO: 740451 - protein, 1196 aa, Homo sapiens
MTECTSLQFVSPFAFEAMQKVDVVCLASLSDPELRLLLPCLVRMALCAPADQSQSWAQDKKLILRLLSGVEAVNSIVALLSVDFHALEQDASKEQQLRHKLGGGSGESILVSQLQHGLTLEFEHSDSPRRLRLVLSELLAIMNKVSESNGEFFFKSSELFESPVYLEEAADVLCILQAELPSLLPIVDVAEALLHVRNGAWFLCLLVANVPDSFNEVCRGLIKNGERQDEESLGGRRRTDALRFLCKMNPSQALKVRGMVVEECHLPGLGVALTLDHTKNEACEDGVSDLVCFVSGLLLGTNAKVRTWFGTFIRNGQQRKRETSSSVLWQMRRQLLLELMGILPTVRSTRIVEEADVDMEPNVSVYSGLKEEHVVKASALLRLYCALMGIAGLKPTEEEAEQLLQLMTSRPPATPAGVRFVSLSFCMLLAFSTLVSTPEQEQLMVVWLSWMIKEEAYFESTSGVSASFGEMLLLVAMYFHSNQLSAIIDLVCSTLGMKIVIKPSSLSRMKTIFTQEIFTEQVVTAHAVRVPVTSNLSANITGFLPIHCIYQLLRSRSFTKHKVSIKDWIYRQLCETSTPLHPQLLPLIDVYINSILTPASKSNPEATNQPVTEQEILNIFQGVIGGDNIRLNQRFSITAQLLVLYYILSYEEALLANTKTLAAMQRKPKSYSSSLMDQIPIKFLIRQAQGLQQELGGLHSALLRLLATNYPHLCIVDDWICEEEITGTDALLRRMLLTNNAKNHSPKQLQEAFSAVPVNHTQVMQIIEHLTLLSASELIPYAEVLTSNMSQLLNSGVPRRILQTVNKLWMVLNTVMPRRLWVMTVNALQPSIKFVRQQKYTQNDLMIDPLIVLRCDQRVHRCPPLMDITLHMLNGYLLASKAYLSAHLKETEQDRPSQNNTIGLVGQTDAPEVTREELKNALLAAQDSAAVQILLEICLPTEEEKANGVNPDSLLRNVQSVITTSAPNKGMEEGEDNLLCNLREVQCLICCLLHQMYIADPNIAKLVHFQGYPCELLPLTVAGIPSMHICLDFIPELIAQPELEKQIFAIQLLSHLCIQYALPKSLSVARLAVNVMGTLLTVLTQAKRYAFFMPTLPSLVSFCRAFPPLYEDIMSLLIQIGQVCASDVATQTRDIDPIITRLQQIKEKPSGWSQICKDSSYKNGSRDTGSMDPDVQLCHCIERTVIEIINMSVSGI

SEQ ID NO: 740452 - protein, 1196 aa, Homo sapiens; identical to SEQ ID NO: 740451

SEQ ID NO: 740453 - protein, 533 aa, Homo sapiens
MQRKPKSYSSSLMDQIPIKFLIRQAQGLQQELGGLHSALLRLLATNYPHLCIVDDWICEEEITGTDALLRRMLLTNNAKNHSPKQLQEAFSAVPVNHTQVMQIIEHLTLLSASELIPYAEVLTSNMSQLLNSGVPRRILQTVNKLWMVLNTVMPRRLWVMTVNALQPSIKFVRQQKYTQNDLMIDPLIVLRCDQRVHRCPPLMDITLHMLNGYLLASKAYLSAHLKETEQDRPSQNNTIGLVGQTDAPEVTREELKNALLAAQDSAAVQILLEICLPTEEEKANGVNPDSLLRNVQSVITTSAPNKGMEEGEDNLLCNLREVQCLICCLLHQMYIADPNIAKLVHFQGYPCELLPLTVAGIPSMHICLDFIPELIAQPELEKQIFAIQLLSHLCIQYALPKSLSVARLAVNVMGTLLTVLTQAKRYAFFMPTLPSLVSFCRAFPPLYEDIMSLLIQIGQVCASDVATQTRDIDPIITRLQQIKEKPSGWSQICKDSSYKNGSRDTGSMDPDVQLCHCIERTVIEIINMSVSGI

SEQ ID NO: 740454 - protein, 161 aa, Homo sapiens
MDQETVGNVVLLAIVTLISVVQNGFFAHKVEHESRTQNGRSFQRTGTLAFERVYTANQNCVDAYPTFLAVLWSAGLLCSQVPAAFAGLMYLFVRQKYFVGYLGERTQSTPGYIFGKRIILFLFLMSVAGIFNYYLIFFFGSDFENYIKTISTTISPLLLIP

SEQ ID NO: 740455 - protein, 161 aa, Homo sapiens; identical to SEQ ID NO: 740454

SEQ ID NO: 740456 - protein, 149 aa, Homo sapiens
MDQETVGNVVLLAIVTLISVVQNGFFAHKVEHESRTQNGRSFQRTGTLAFERVYTANQNCVDAYPTFLAVLWSAGLLCSQVPAAFAGLMYLFVRQKYFVGYLGERTQSTPGYIFGKRIILFLFLMSVAGIFNYYLIFFFGSDFEPNLFW

SEQ ID NO: 740457 - protein, 161 aa, Homo sapiens; identical to SEQ ID NO: 740454

SEQ ID NO: 740458 - protein, 155 aa, Homo sapiens
MDQETVGNVVLLAIVTLISVVQNGFFAHKVEHESRTQNGRSFQRTGTLAFERVYTANQNCVDAYPTFLAVLWSAGLLCSQVPAAFAGLMYLFVRQKYFVGYLGERTQSTPGYIFGKRIILFLFLMSVAGIFNYYLIFFFGSDFELSAEYGVGVLI

SEQ ID NO: 740459 - protein, 133 aa, Homo sapiens
MDQETVGNVVLLAIVTLISVVQNGFFAHKVEHESRTQNGRSFQRTGTLAFERVYTANQNCVDAYPTFLAVLWSAGLLCSQVPAAFAGLMYLFVRPPLATYLGNASYSSCSSCPLLAYSTITSSSFSEVTLKTT

SEQ ID NO: 740460 - protein, 207 aa, Homo sapiens
MQPSGWAAAREAAGRDMLAADLRCSLFASALQSYKRDSVLRPFPASYARGDCKDFEALTSLFGEGTYLTSDLSLALIYSPHGHGWQHSLLGPILSCVAVCEVIDHPDVKCQTKKKDSKEIDRRRARIKHSEGGDIPPKYFVVTNNQLLRVKYLLVYSQKPPKRASSQLSWFSSHWFTVMISLYLLLLLIVSVINSSAFQHFWNRAKR

SEQ ID NO: 740461 - protein, 322 aa, Homo sapiens
MQPSGWAAAREAAGRDMLAADLRCSLFASALQSYKRDSVLRPFPASYARGDCKDFEALLADASKLPNLKELLQSSGDNHKRAWDLVSWILSSKVLTIHSAGKAEFEKIQKLTGAPHTPVPAPDFLFEIEYFDPANAKFYETKGERDLIYAFHGSRLENFHSIIHNGLHCHLNKTSLFGEGTYLTSDLSLALIYSPHGHGWQHSLLGPILSCVAVCEVIDHPDVKCQTKKKDSKEIDRRRARIKHSEGGDIPPKYFVVTNNQLLRVKYLLVYSQKPPKRASSQLSWFSSHWFTVMISLYLLLLLIVSVINSSAFQHFWNRAKR

SEQ ID NO: 740462 - protein, 322 aa, Homo sapiens; identical to SEQ ID NO: 740461

SEQ ID NO: 740463 - protein, 322 aa, Homo sapiens; identical to SEQ ID NO: 740461

SEQ ID NO: 740464 - protein, 310 aa, Homo sapiens
MQPSGWAAAREAAGRDMLAADLRCSLFASALQSYKRDSVLRPFPASYARGDCKDFEALLADASKLPNLKELLQSSGDNHKRAWDLVSWILSSKVLTIHSAGKAEFEKIQKLTGAPHTPVPAPDFLFEIEYFDPANAKFYETKGERDLIYAFHGSRLENFHSIIHNGLHCHLNKTSLFGEGTYLTSDLSLALIYSPHGHGWQHSLLGPILSCVAVCEVIDHPDVKCQTKKKDSKEIDRRRARIKHSEGGDIPPKYFVVTNNQLLRVKYLLVYSQKPPKRASSQLSWFSSHWFTVMISLYLLLLLIDPPAML

SEQ ID NO: 740465 - protein, 103 aa, Homo sapiens
AAREAAGRDMLAADLRCSLFASALQSYKRDSVLRPFPASYARGDCKDFEALVSVLCPGAAHCVLDQVPCGTTGRGSSIRISKHDSRQTFHSQLGLALPWGRFP

SEQ ID NO: 740466 - protein, 938 aa, Homo sapiens
MAEKRPLRTLGPVMYGKLPRLETDSGLEHSLPHSVGNQDPCTYKGSYFSCPMAGTPKAESEQLASWTPYPPLYSTGMAGPPLQADNLLTNCLFYRSPAEGPEKMQDSSPVELLPFSPQAHSYPGPPLAAPKPVYRNPLCYGLSTCLGEGAVKRPLDVDWTLATGPLLPSADPPCSLAPAPSKGQTLDGTFLRGVPAEGSSKDSSGSFSPCQPFLEKYQTIHSTGFLASRYTGPYPRNSKQAMSEGPSSPWTQLAQPLGPPCQDTGPTHYPPPHHPPPHPPQALPCPPACRHPEKQGSYSPALPLQPLGGHKGTGYQAGGLGSPYLRQQAAQAPYIPPLGLDAYPYPSAPLPAPSPGLKLEPPLTPRCPLDFAPQTLSFPYARDDLSLYGASPGLGGTPPSQNNVRAVPQPGAFQRACQPLPASQPCSEPVRPAQEAEEKTWLPSCRKEKLQPRLSEHSGPPIVIRDSPVPCTPPALPPCARECQSLPQKEDARPPSSPPMPVIDNVFSLAPYRDYLDVPAPEATTEPDSATAEPDSAPATSEGQDKGCRGTLPAQEGPSGSKPLRGSLKEEVALDLSVRKPTAEASPVKASRSVEHAKPTAAMDVPDVGNMVSDLPGLKKIDTEAPGLPGVPVTTDAMPRTNFHSSVAFMFRKFKILRPAPLPAAVVPSTPTSAPAPTQPAPTPTSGPIGLRILAQQPLSVTCFSLALPSPPAVAVASPAPAPAPSPAPARAQAPASARDPAPAPAPVAGPAPASTSAPGDSLEQHFTGLHASLCDAISGSVAHSPPEKLREWLETAGPWGQAAWQDCQGVQGLLAKLLSQLQRFDRTHRCPFPHVVRAGAIFVPIHLVKERLFPRLPPASVDHVLQEHRVELRPTTLSEERALRELALPGCTSRMLKLLALRQLPDIYPDLLGLQWRDCVRRQLGEHGAAPVATGAV

SEQ ID NO: 740467 - protein, 938 aa, Homo sapiens; identical to SEQ ID NO: 740466

SEQ ID NO: 740468 - protein, 815 aa, Homo sapiens
MAEKRPLRTLGPVMYGKLPRLETDSGLEHSLPHSVGNQDPCTYKGSYFSCPMAGTPKAESEQLASWTPYPPLYSTGMAGPPLQADNLLTNCLFYRSPAEGPEKMQDSSPVELLPFSPQAHSYPGPPLAAPKPVYRNPLCYGLSTCLGEGAVKRPLDVDWTLATGPLLPSADPPCSLAPAPSKGQTLDGTFLRGVPAEGSSKDSSGSFSPCQPFLEKYQTIHSTGFLASSTLSSLKLEPPLTPRCPLDFAPQTLSFPYARDDLSLYGASPGLGGTPPSQNNVRAVPQPGAFQRACQPLPASQPCSEPVRPAQEAEEKTWLPSCRKEKLQPRLSEHSGPPIVIRDSPVPCTPPALPPCARECQSLPQKEDARPPSSPPMPVIDNVFSLAPYRDYLDVPAPEATTEPDSATAEPDSAPATSEGQDKGCRGTLPAQEGPSGSKPLRGSLKEEVALDLSVRKPTAEASPVKASRSVEHAKPTAAMDVPDVGNMVSDLPGLKKIDTEAPGLPGVPVTTDAMPRTNFHSSVAFMFRKFKILRPAPLPAAVVPSTPTSAPAPTQPAPTPTSGPIGLRILAQQPLSVTCFSLALPSPPAVAVASPAPAPAPSPAPARAQAPASARDPAPAPAPVAGPAPASTSAPGDSLEQHFTGLHASLCDAISGSVAHSPPEKLREWLETAGPWGQAAWQDCQGVQGLLAKLLSQLQRFDRTHRCPFPHVVRAGAIFVPIHLVKERLFPRLPPASVDHVLQEHRVELRPTTLSEERALRELALPGCTSRMLKLLALRQLPDIYPDLLGLQWRDCVRRQLGEHGAAPVATGAV

SEQ ID NO: 740469 - protein, 749 aa, Homo sapiens
MAEKRPLRTLGPVMYGKLPRLETDSGLEHSLPHSVGNQDPCTYKGSYFSCPMAGTPKAESEQLASWTPYPPLYSTGMAGPPLQADNLLTNCLFYRSPAEGPEKMQDSSPVELLPFSPQAHSYPGPPLAAPKPVYRNPLCYGLSTCLGEGAVKRPLDVDWTLATGPLLPSADPPCSLAPAPSKGQTLDGTFLRGVPAEGSSKDSSGSFSPCQPFLEKYQTIHSTGFLASRYTGPYPRNSKQAMSEGPSSPWTQLAQPLGPPCQDTGPTHYPPPHHPPPHPPQALPCPPACRHPEKQGSYSPALPLQPLGGHKGTGYQAGGLGSPYLRQQAAQAPYIPPLGLDAYPYPSAPLPAPSPGLKLEPPLTPRCPLDFAPQTLSFPYARDDLSLYGASPGLGGTPPSQNNVRAVPQPGAFQRACQPLPASQPCSEPVRPAQEAEEKTWLPSCRKEKLQPRLSEHSGPPIVIRDSPVPCTPPALPPCARECQSLPQKEDARPPSSPPMPVIDNVFSLAPYRDYLDVPAPEATTEPDSATAEPDSAPATSEGQDKGCRGTLPAQEGPSGSKPLRGSLKEEVALDLSVRKPTAEASPVKASRSVEHAKPTAAMDVPDVGNMVSDLPGLKKIDTEAPGLPGVPVTTDAMPRTNFHSSVAFMFRKFKILRPAPLPAAVVPSTPTSAPAPTQPAPTPTSGPIGLRILAQQPLSVTRLRGRTARVCRGCWPSCCLSCSASIAPTGAPSPMWCELAPSSCPFTW

SEQ ID NO: 740470 - protein, 1047 aa, Homo sapiens
MAEKRPLRTLGPVMYGKLPRLETDSGLEHSLPHSVGNQDPCTYKGSYFSCPMAGTPKAESEQLASWTPYPPLYSTGMAGPPLQADNLLTNCLFYRSPAEGPEKMQDSSPVELLPFSPQAHSYPGPPLAAPKPVYRNPLCYGLSTCLGEGAVKRPLDVDWTLATGPLLPSADPPCSLAPAPSKGQTLDGTFLRGVPAEGSSKDSSGSFSPCQPFLEKYQTIHSTGFLASRYTGPYPRNSKQAMSEGPSSPWTQLAQPLGPPCQDTGPTHYPPPHHPPPHPPQALPCPPACRHPEKQGSYSPALPLQPLGGHKGTGYQAGGLGSPYLRQQAAQAPYIPPLGLDAYPYPSAPLPAPSPGLKLEPPLTPRCPLDFAPQTLSFPYARDDLSLYGASPGLGGTPPSQNNVRAVPQPGAFQRACQPLPASQPCSEPVRPAQEAEEKTWLPSCRKEKLQPRLSEHSGPPIVIRDSPVPCTPPALPPCARECQSLPQKEDARPPSSPPMPVIDNVFSLAPYRDYLDVPAPEATTEPDSATAEPDSAPATSEGQDKGCRGTLPAQEGPSGSKPLRGSLKEEVALDLSVRKPTAEASPVKASRSVEHAKPTAAMDVPDVGNMVSDLPGLKKIDTEAPGLPGVPVTTDAMPRTNFHSSVAFMFRKFKILRPAPLPAAVVPSTPTSAPAPTQPAPTPTSGPIGLRILAQQPLSVTCFSLALPSPPAVAVASPAPAPAPSPAPARAQAPASARDPAPAPAPVAGPAPASTSAPGDSLEQHFTGLHASLCDAISGSVAHSPPEKLREWLETAGPWGQAAWQDCQGVQGLLAKLLSQLQRFDRTHRCPFPHVVRAGAIFVPIHLVKERLFPRLPPASVDHVLQEHRVELRPTTLSEERALRELALPGCTSRMLKLLALRQLPDIYPDLLGLQWRDCVRRQLGDFDTEAGAVSSSEPTVARDEPESLALAQKSPAPKVRKPGRKPPTPGPEKAEAAAGEESCGASPTPATSASPPGPTLKARFRSLLETAWLNGLALPTWGHKSSRPDQPSPCPQLLDSQSHHL

SEQ ID NO: 740471 - protein, 145 aa, Homo sapiens
PAVTAPELQAAWQDCQGVQGLLAKLLSQLQRFDRTHRCPFPHVVRAGAIFVPIHLVKERLFPRLPPASVDHVLQEHRVELRPTTLSEERALRELALPGCTSRMLKLLALRQLPDIYPDLLGLQWRDCVRRQLGEHGAAPVATGAV

SEQ ID NO: 740472 - protein, 938 aa, Homo sapiens; identical to SEQ ID NO: 740466

SEQ ID NO: 740473 - protein, 938 aa, Homo sapiens; identical to SEQ ID NO: 740466

SEQ ID NO: 740474 - protein, 938 aa, Homo sapiens; identical to SEQ ID NO: 740466

SEQ ID NO: 740475 - protein, 648 aa, Homo sapiens
MAEKRPLRTLGPVMYGKLPRLETDSGLEHSLPHSVGNQDPCTYKGSYFSCPMAGTPKAESEQLASWTPYPPLYSTGMAGPPLQADNLLTNCLFYRSPAEGPEKMQDSSPVELLPFSPQAHSYPGPPLAAPKPVYRNPLCYGLSTCLGEGAVKRPLDVDWTLATGPLLPSADPPCSLAPAPSKGQTLDGTFLRGVPAEGSSKDSSGSFSPCQPFLEKYQTIHSTGFLASRYTGPYPRNSKQAMSEGPSSPWTQLAQPLGPPCQDTGPTHYPPPHHPPPHPPQALPCPPACRHPEKQGSYSPALPLQPLGGHKGTGYQAGGLGSPYLRQQAAQAPYIPPLGLDAYPYPSAPLPAPSPGLKLEPPLTPRCPLDFAPQTLSFPYARDDLSLYGASPGLGGTPPSQNNVRAVPQPGAFQRACQPLPASQPCSEPVRPAQEAEEKTWLPSCRKEKLQPRLSEHSGPPIVIRDSPVPCTPPALPPCARECQSLPQKEDARPPSSPPMPVIDNVFSLAPYRDYLDVPAPEATTEPDSATAEPDSAPATSEGQDKGCRGTLPAQEGPSGSKPLRGSLKEEVALDLSVRKPTAEASPVKASRSVEHAKPTAAMDVPDVGNMVSDLPGLKKIDTEAPGLPGVPVTTDAMPRTNFHSLPF

SEQ ID NO: 740476 - protein, 119 aa, Homo sapiens
ASCRGLLNLGKSVSVNVCKCACEREHPFPTSRNKIPFGALSLCVPREASSQEPSVGIVSFVTLPIPSQFLIDSCRLLGSRIWVGYGMLFQCLASVFIHPPAQHCQPRAYSADTTYCSSS

SEQ ID NO: 740477 - protein, 119 aa, Homo sapiens; identical to SEQ ID NO: 740476

SEQ ID NO: 740478 - protein, 441 aa, Homo sapiens
MALQVRFWGFLLFLFLVSDADAVAAQILSLLPLKFFPIIVIGIIALILALAIGLGIHFDCSGKYRCRSSFKCIELIARCDGVSDCKDGEDEYRCVRVGGQNAVLQVFTAASWKTMCSDDWKGHYANVACAQLGFPSYVSSDNLRVSSLEGQFREEFVSIDHLLPDDKVTALHHSVYVREGCASGHVVTLQCTACGHRRGYSSRIVGGNMSLLSQWPWQASLQFQGYHLCGGSVITPLWIITAAHCVYDLYLPKSWTIQVGLVSLLDNPAPSHLVEKIVYHSKYKPKRLGNDIALMKLAGPLTFNEMIQPVCLPNSEENFPDGKVCWTSGWGATEDGAGDASPVLNHAAVPLISNKICNHRDVYGGIISPSMLCAGYLTGGVDSCQGDSGGPLVCQERRLWKLVGATSFGIGCAEVNKPGVYTRVTSFLDWIHEQMERDLKT

SEQ ID NO: 740479 - protein, 327 aa, Homo sapiens
MCSDDWKGHYANVACAQLGFPSYVSSDNLRVSSLEGQFREEFVSIDHLLPDDKVTALHHSVYVREGCASGHVVTLQCTACGHRRGYSSRIVGGNMSLLSQWPWQASLQFQGYHLCGGSVITPLWIITAAHCVYDLYLPKSWTIQVGLVSLLDNPAPSHLVEKIVYHSKYKPKRLGNDIALMKLAGPLTFNEMIQPVCLPNSEENFPDGKVCWTSGWGATEDGAGDASPVLNHAAVPLISNKICNHRDVYGGIISPSMLCAGYLTGGVDSCQGDSGGPLVCQERRLWKLVGATSFGIGCAEVNKPGVYTRVTSFLDWIHEQMERDLKT

SEQ ID NO: 740480 - protein, 522 aa, Homo sapiens
PLPTLLCGGRTGHRTARVLSFLIRSCPCEPGKGCVYGKPVTLWPTISSVVPSTFLGLGNYEVEVEAEPDVRGPEIVTMGENDPPAVEAPFSFRSLFGLDDLKISPVAPDADAVAAQILSLLPLKFFPIIVIGIIALILALAIGLGIHFDCSGKYRCRSSFKCIELIARCDGVSDCKDGEDEYRCVRVGGQNAVLQVFTAASWKTMCSDDWKGHYANVACAQLGFPSYVSSDNLRVSSLEGQFREEFVSIDHLLPDDKVTALHHSVYVREGCASGHVVTLQCTACGHRRGYSSRIVGGNMSLLSQWPWQASLQFQGYHLCGGSVITPLWIITAAHCVYDLYLPKSWTIQVGLVSLLDNPAPSHLVEKIVYHSKYKPKRLGNDIALMKLAGPLTFNEMIQPVCLPNSEENFPDGKVCWTSGWGATEDGAGDASPVLNHAAVPLISNKICNHRDVYGGIISPSMLCAGYLTGGVDSCQGDSGGPLVCQERRLWKLVGATSFGIGCAEVNKPGVYTRVTSFLSDLH

SEQ ID NO: 740481 - protein, 531 aa, Homo sapiens
PLPTLLCGGRTGHRTARVLSFLIRSCPCEPGKGCVYGKPVTLWPTISSVVPSTFLGLGNYEVEVEAEPDVRGPEIVTMGENDPPAVEAPFSFRSLFGLDDLKISPVAPDADAVAAQILSLLPLKFFPIIVIGIIALILALAIGLGIHFDCSGKYRCRSSFKCIELIARCDGVSDCKDGEDEYRCVRVGGQNAVLQVFTAASWKTMCSDDWKGHYANVACAQLGFPSYVSSDNLRVSSLEGQFREEFVSIDHLLPDDKVTALHHSVYVREGCASGHVVTLQCTACGHRRGYSSRIVGGNMSLLSQWPWQASLQFQGYHLCGGSVITPLWIITAAHCVYDLYLPKSWTIQVGLVSLLDNPAPSHLVEKIVYHSKYKPKRLGNDIALMKLAGPLTFNEMIQPVCLPNSEENFPDGKVCWTSGWGATEDGAGDASPVLNHAAVPLISNKICNHRDVYGGIISPSMLCAGYLTGGVDSCQGDSGGPLVCQERRLWKLVGATSFGIGCAEVNKPGVYTRVTSFLDWIHEQMERDLKT

SEQ ID NO: 740482 - protein, 421 aa, Homo sapiens
PLPTLLCGGRTGHRTARVLSFLIRSCPCEPGKGCVYGKPVTLWPTISSVVPSTFLGLGNYEVEVEAEPDVRGPEIVTMGENDPPAVEAPFSFRSLFGLDDLKISPVAPDADAVAAQILSLLPLKFFPIIVIGIIALILALAIGLGIHFDCSGKYRCRSSFKCIELIARCDGVSDCKDGEDEYRCVRVGGQNAVLQVFTAASWKTMCSDDWKGHYANVACAQLGFPSYVSSDNLRVSSLEGQFREEFVSIDHLLPDDKVTALHHSVYVREGCASGHVVTLQCTACGHRRGYSSRIVGGNMSLLSQWPWQASLQFQGYHLCGGSVITPLWIITAAHCVYDLYLPKSWTIQVGLVSLLDNPAPSHLVEKIVYHSKYKPKRLGNDIALMKLAGPLTFNGTSGSLCGSAALPLFQEDLQLLIEAFL

SEQ ID NO: 740483 - protein, 178 aa, Homo sapiens
MCGSSTPTHVHTWVCMSCWWLTRDPACVSCWWLTRDPACVSCWWLTRDPACVSSGWLTRDPACVSCWWLTRDPACVSCGWLTRDPACVSCGWLTRDPACVSCGWLTRDPACVSCWWLTRDLACVSCGWVTCDPTSMSCSRAHRLPVHRPLPAHLAESCLDALASPASVRFASLLGFHF

SEQ ID NO: 740484 - protein, 290 aa, Homo sapiens
PHTNNCTYFLTGLDAYNMPAWIFVNRSLALGKIRCFGFDMDYTLAAYKSPAYEALTFELLLERLVCIGYPHEILRYTYDPTFPTRRLVFDELYGNLLKVDAHGNVLLGAYGFTFLSEAEIWSFYPSKFIQRDDLQCFYILNMLFNLPETYLYACLVDFFSGCSRYTNCDTGYQHGNLFMSFRSLFQDVTDAMNNIHQSGCLKKTLEDLEKYVKKDPRLPILLGKMKEVGKVFLATNSSYNYTNAIMTYLFSISEAEASGRPWRSYFDLIVVDTQKPHFFAEGLVLRQVNT

SEQ ID NO: 740485 - protein, 251 aa, Homo sapiens
MDYTLAAYKSPAYEALTFELLLERLVCIGYPHEILRYTYDPTFPTRRLVFDELYGNLLKVDAHGNVLLGAYGFTFLSEAEIWSFYPSKFIQRDDLQCFYILNMLFNLPETYLYACLVDFFSGCSRYTNCDTGYQHGNLFMSFRSLFQDVTDAMNNIHQSGCLKKTLEDLEKYVKKDPRLPILLGKMKEVGKVFLATNSSYNYTNAIMTYLFSISEAEASGRPWRSYFDLIVVDTQKPHFFAEGLVLRQVNT

SEQ ID NO: 740486 - protein, 119 aa, Homo sapiens
  misc_feature (33)..(33): Xaa can be any naturally occurring amino acid
MIACSHVLTPSLGLFRPAIGERPESPSTAASQXEVPGPHQTSTQAAPGAAEEGGPTRTEIIILATRTQNVLGEKGRRVGELTAAVEKRFGFPEGSVELYADKVAARGLCHCPGRVSALQ

SEQ ID NO: 740487 - protein, 144 aa, Homo sapiens
RQLQQASIRPGAAAHTCNPSNLGGQGRRIACAVAHTYNPSTLGGQGRRIACAVAHTCNPSTLGGQGKRIACAAARTCNPSTLGGQGRRIARGQEFQTSLGNIARPPPLQKILKISQRWGCTPVVPATQEAEAGGSLEPRYLRLQ

SEQ ID NO: 740488 - protein, 164 aa, Homo sapiens
MGDLPGLVRLSIALRIQPNDGPVFYKVDGQRFGQNRTIKLLTGSSYKVEVKIKPSTLQVENISIGGVLVPLELKSKEPDGDRVVYTGTYDTEGVTPTKSGERQPIQITMPFTDIGTFETVWQVKFYNYHKRDHCQWGSPFSVIEYECKPNETRSLMWVNKESFL

SEQ ID NO: 740489 - protein, 135 aa, Homo sapiens
MTARSFTRWTGSASARTAPSSCSPAPPTRLRNISIGGVLVPLELKSKEPDGDRVVYTGTYDTEGVTPTKSGERQPIQITMPFTDIGTFETVWQVKFYNYHKRDHCQWGSPFSVIEYECKPNETRSLMWVNKESFL

SEQ ID NO: 740490 - protein, 128 aa, Homo sapiens
MGDLPGLVRLSIALRIQPNDGPVFYKVDGQRFGQNRTIKLLTGSSYKVEVKIKPSTLQVENISIGGVLVPLELKSKEPDGDRVVYTGTYDTEGVTPTKSGERQPIQITMPECLEQRPQEISLTYECEE

SEQ ID NO: 740491 - protein, 1012 aa, Homo sapiens
MLLKSIFIVYIFFYSISELSLDSTLHAVNLHCNNISKIEAIDHIWNLQHLDLSSNQISRIEGLNTLTKLCTLNLSCNLITKVEGLEELINLTRLNVSYNHIDDLSGLIPLHGIKHKLRYIDLHSNRIDSIHHLLQCMVGLHFLTNLILEKDGDDNPVCRLPGYRAVILQTLPQLRILDCKNIFGEPVNLTEINSSQLQCLEGLLDNLVSSDSPLNISEDEIIDRMPVITAPIDELVPLEQFASTPSDAVLTSFMSVCQSSEPEKNNHENDLQNEIKLQKLDDQILQLLNETSNSIDNVLEKDPRPKRDTDITSESDYGNRKECNRKVPRRSKIPYDAKTIQTIKHHNKNYNSFVSCNRKMKPPYLKELYVSSSLANCPMLQESEKPKTEIIKVDQSHSEDNTYQSLVEQLDQEREKRWRAEQAENKLMDYIDELHKHANEKEDIHSLALLTTDRLKEIIFRERNSKGQLEVMVHKLQNEIKKLTVELMKAKDQQEDHLKHLRTLEKTLEKMERQKRQQQAAQIRLIQEVELKASAADREIYLLRTSLHREREQAQQLHQLLALKEQEHRKELETREFFTDADFQDALAKEIAKEEKKHEQMIKEYQEKIDVLSQQYMDLENEFRIALTVEARRFQDVKDGFENVATELAKSKHALIWAQRKENESSSLIKDLTCMVKEQKTKLAEVSKLKQETAANLQNQINTLEILIEDDKQKSIQIELLKHEKVQLISELAAKESLIFGLRTERKVWGHELAQQGSSLAQNRGKLEAQIESLSRENECLRKTNESDSDALRIKCKIIDDQTETIRKLKDCLQEKDEHIKRLQEKITEIEKCTQEQLDEKSSQLDEVLEKLERHNERKEKLKQQLKGKEVELEEIRKAYSTLNRKWHDKGELLCHLETQVKEVKEKFENKEKKLKAERDKSIELQKNAMEKLHSMDDAFKRQVDAIVEAHQAEIAQLANEKQKCIDSANLKVHQIEKEMRELLEETCKNKKTMEAKIKQLAFALNEIQQDM

SEQ ID NO: 740492 - protein, 159 aa, Homo sapiens
MICFQGYRAVILQTLPQLRILDCKNIFGEPVNLTEINSSQLQCLEGLLDNLVSSDSPLNISEDEIIDRMPVITAPIDELVPLEQFASTPSDAVLTSFMSVCQSSEPEKNNHENDLQNEIKLQKLDDQILQLLNETSNSIDNVLEKDPRPKKPSGQFLAL

SEQ ID NO: 740493 - protein, 96 aa, Homo sapiens
SFKGIIHYYEVNAMEKLHSMDDAFKRQVDAIVEAHQAEIAQLANEKQKCIDSANLKVHQIEKEMRELLEETCKNKKTMEAKIKQLAFALNEIQQDM

SEQ ID NO: 740494 - protein, 856 aa, Homo sapiens [sequence omitted]

SEQ ID NO: 740495 - protein, 1027 aa, Homo sapiens
TVGTRIPVLRHRQGGKVPGCRLEGGSSPRPAPSGRPSALPGGLSQAHGPLAGCRLRPRSPSPVLWRRRRRWWRQRRKWKTKTATAAAGMYASWTKACRGLEELINLTRLNVSYNHIDDLSGLIPLHGIKHKLRYIDLHSNRIDSIHHLLQCMVGLHFLTNLILEKDGDDNPVCRLPGYRAVILQTLPQLRILDCKNIFGEPVNLTEINSSQLQCLEGLLDNLVSSDSPLNISEDEIIDRMPVITAPIDELVPLEQFASTPSDAVLTSFMSVCQSSEPEKNNHENDLQNEIKLQKLDDQILQLLNETSNSIDNVLEKDPRPKRDTDITSESDYGNRKECNRKVPRRSKIPYDAKTIQTIKHHNKNYNSFVSCNRKMKPPYLKELYVSSSLANCPMLQESEKPKTEIIKVDQSHSEDNTYQSLVEQLDQEREKRWRAEQAENKLMDYIDELHKHANEKEDIHSLALLTTDRLKEIIFRERNSKGQLEVMVHKLQNEIKKLTVELMKAKDQQEDHLKHLRTLEKTLEKMERQKRQQQAAQIRLIQEVELKASAADREIYLLRTSLHREREQAQQLHQLLALKEQEHRKELETREFFTDADFQDALAKEIAKEEKKHEQMIKEYQEKIDVLSQQYMDLENEFRIALTVEARRFQDVKDGFENVATELAKSKHALIWAQRKENESSSLIKDLTCMVKEQKTKLAEVSKLKQETAANLQNQINTLEILIEDDKQKSIQIELLKHEKVQLISELAAKESLIFGLRTERKVWGHELAQQGSSLAQNRGKLEAQIESLSRENECLRKTNESDSDALRIKCKIIDDQTETIRKLKDCLQEKDEHIKRLQEKITEIEKCTQEQLDEKSSQLDEVLEKLERHNERKEKLKQQLKGKEVELEEIRKAYSTLNRKWHDKGELLCHLETQVKEVKEKFENKEKKLKAERDKSIELQKNAMEKLHSMDDAFKRQVDAIVEAHQAEIAQLANEKQKCIDSANLKVHQIEKEMRELLEETCKNKKTMEAKIKQLAFALNEIQQDM

SEQ ID NO: 740496 - protein, 1095 aa, Homo sapiens
SWDEDSSFASPSRRESSRLSVGGWVLAPPRPLGPPFRASGRLVPSSRTPRWVPVKTPLPVASAMEAAAAVVAAEAEVENEDGDSSCGDVCFMDKGLQSISELSLDSTLHAVNLHCNNISKIEAIDHIWNLQHLDLSSNQISRIEGLNTLTKLCTLNLSCNLITKVEGLEELINLTRLNVSYNHIDDLSGLIPLHGIKHKLRYIDLHSNRIDSIHHLLQCMVGLHFLTNLILEKDGDDNPVCRLPGYRAVILQTLPQLRILDCKNIFGEPVNLTEINSSQLQCLEGLLDNLVSSDSPLNISEDEIIDRMPVITAPIDELVPLEQFASTPSDAVLTSFMSVCQSSEPEKNNHENDLQNEIKLQKLDDQILQLLNETSNSIDNVLEKDPRPKRDTDITSESDYGNRKECNRKVPRRSKIPYDAKTIQTIKHHNKNYNSFVSCNRKMKPPYLKELYVSSSLANCPMLQESEKPKTEIIKVDQSHSEDNTYQSLVEQLDQEREKRWRAEQAENKLMDYIDELHKHANEKEDIHSLALLTTDRLKEIIFRERNSKGQLEVMVHKLQNEIKKLTVELMKAKDQQEDHLKHLRTLEKTLEKMERQKRQQQAAQIRLIQEVELKASAADREIYLLRTSLHREREQAQQLHQLLALKEQEHRKELETREFFTDADFQDALAKEIAKEEKKHEQMIKEYQEKIDVLSQQYMDLENEFRIALTVEARRFQDVKDGFENVATELAKSKHALIWAQRKENESSSLIKDLTCMVKEQKTKLAEVSKLKQETAANLQNQINTLEILIEDDKQKSIQIELLKHEKVQLISELAAKESLIFGLRTERKVWGHELAQQGSSLAQNRGKLEAQIESLSRENECLRKTNESDSDALRIKCKIIDDQTETIRKLKDCLQEKDEHIKRLQEKITEIEKCTQEQLDEKSSQLDEVLEKLERHNERKEKLKQQLKGKEVELEEIRKAYSTLNRKWHDKGELLCHLETQVKEVKEKFENKEKKLKAERDKSIELQKNAMEKLHSMDDAFKRQVDAIVEAHQAEIAQLANEKQKCIDSANLKVHQIEKEMRELLEETCKNKKTMEAKIKQLAFALNEIQQDM

SEQ ID NO: 740497 - protein, 270 aa, Homo sapiens
GNFLSLGDKELAQQGSSLAQNRGKLEAQIESLSRENECLRKTNESDSDALRIKCKIIDDQTETIRKLKDCLQEKDEHIKRLQEKITEIEKCTQEQLDEKSSQLDEVLEKLERHNERKEKLKQQLKGKEVELEEIRKAYSTLNRKWHDKGELLCHLETQVKEVKEKFENKEKKLKAERDKSIELQKNAMEKLHSMDDAFKRQVDAIVEAHQAEIAQLANEKQKCIDSANLKVHQIEKEMRELLEETCKNKKTMEAKIKQLAFALNEIQQDM

SEQ ID NO: 740498 - protein, 681 aa, Homo sapiens
MICFQGYRAVILQTLPQLRILDCKNIFGEPVNLTEINSSQLQCLEGLLDNLVSSDSPLNISEDEIIDRMPVITAPIDELVPLEQFASTPSDAVLTSFMSVCQSSEPEKNNHENDLQNEIKLQKLDDQILQLLNETSNSIDNVLEKDPRPKRDTDITSESDYGNRKECNRKVPRRSKIPYDAKTIQTIKHHNKNYNSFVSCNRKMKPPYLKELYVSSSLANCPMLQESEKPKTEIIKVDQSHSEDNTYQSLVEQLDQEREKRWRAEQAENKLMDYIDELHKHANEKEDIHSLALLTTDRLKEIIFRERNSKGQLEVMVHKLQNEIKKLTVELMKAKDQQEDHLKHLRTLEKTLEKMERQKRQQQAAQIRLIQEVELKASAADREIYLLRTSLHREREQAQQLHQLLALKEQEHRKELETREFFTDADFQDALAKEIAKEEKKHEQMIKEYQEKIDVLSQQYMDLENEFRIALTVEARRFQDVKDGFENVATELAKSKHALIWAQRKENESSSLIKDLTCMVKEQKTKLAEVSKLKQETAANLQNQINTLEILIEDDKQKSIQIELLKHEKVQLISELAAKESLIFGLRTERKVWGHELAQQGSSLAQNRGKLEAQIESLSRENECLRKTNESDSDALRIKCKIIDDQTETIRKLKDVQKKMTLQDSKRSKKKKKKFGGGRKF

SEQ ID NO: 740499 - protein, 215 aa, Homo sapiens
MICFQGYRAVILQTLPQLRILDCKNIFGEPVNLTEINSSQLQCLEGLLDNLVSSDSPLNISEDEIIDRMPVITAPIDELVPLEQFASTPSDAVLTSFMSVCQSSEPEKNNHENDLQNEIKLQKLDDQILQLLNETSNSIDNVLEKDPRPKRDTDITSESDYGNRKECNRKVPRRSKIPYDAKTIQTIKHHNKNYNSFVRWFHFTITTYKRVVVFI

SEQ ID NO: 740500 - protein, 141 aa, Homo sapiens
EPCHRLIRGVLQQIPTERYGIDCIMNDEWMQGVPYPTPLEPFQLDPKHLSETSTLKEEENEVKSTLEHLGITEEHIRNNQGRDARSSITGVYRIILHRVQRKKALESVPVMMLPDPKERDLKKGSRVYRGIRHTSKFCSIL

SEQ ID NO: 740501 - protein, 69 aa, Homo sapiens
LDVGGGGGWLAAGVAERAGRLSLFGPTFLPAPALVHRLFIYLDLARINPQLPASAESPGGRVGSGGLKY

SEQ ID NO: 740502 - protein, 148 aa, Homo sapiens
SFRPGFPAPTAHPRVQELPALGRDRGAGRMSPHGKRADGQAQGQLRLPPSTPRAPDRGGCEPRAPRSQELRSWAQPAGGRAPGCAAPWVPQCHPLPPGQSSAERYRALCPALPPSSAPSGAEAPRSPPLRLQRYTTAAAAPALQQRRA

SEQ ID NO: 740503 - protein, 181 aa, Homo sapiens
NLAVHRRAHTGEKPYGCQVCGKRFSKGERLVRHQRIHTGEKPYHCPACGRSFNQRSILNRHQKTQHRQEPLVQLSIAGGRQHHHSSFSLQGLAGCKVMAAGKHWSHRLPTHSPTRERQGLAYLELPESIAASISYPSGAKQFFFQCLREAVSCGSVQAEIFSFSGLSVSPCRTKLGVKAKP

SEQ ID NO: 740504 - protein, 181 aa, Homo sapiens; identical to SEQ ID NO: 740503

SEQ ID NO: 740505 - protein, 32 aa, Homo sapiens
MCSEEEMTRSQVQELVEYLDFGTAVFQGSSKF

SEQ ID NO: 740506 - protein, 123 aa, Homo sapiens
  misc_feature (4)..(4): Xaa can be any naturally occurring amino acid
  misc_feature (7)..(8): Xaa can be any naturally occurring amino acid
SCDXGSXXGWLGGGRPFCDQNTLVIFFILPYFPMAEPCCDTSSFSVDVVLASHQLKRSYALLLVHIYIHNVFPFLILSFCLGSASCTPSLTQLLPSHLLSSDHFMFCFCYCLDEALLSIFSGP

SEQ ID NO: 740507 - protein, 115 aa, Homo sapiens [sequence omitted]

SEQ ID NO: 740508 - protein, 115 aa, Homo sapiens [sequence omitted]

SEQ ID NO: 740509 - protein, 115 aa, Homo sapiens [sequence omitted]

SEQ ID NO: 740510 - protein, 32 aa, Homo sapiens; identical to SEQ ID NO: 740505

SEQ ID NO: 740511 - protein, 303 aa, Homo sapiens
MSVIFFACVVRVRDGLPLSASTDFYHTQDFLEWRRRLKSLALRLAQYPGRGSAEGCDFSIHFSSFGDVACMAICSCQCPAAMAFCFLETLWWEFTASYDTTCIGLASRPYAFLEFDSIIQKVKWHFNYVSSSQMECSLEKIQEELKLQPPAVLTLEDTDVANGVMNGHTPMHLEPAPNFRMEPVTALGILSLILNIMCAALNLIRGVHLAEHSLQVAHEEIGNILAFLVPFVACIFQCYLYLFYSPARTMKVVLMLLFICLGNMYLHGLRNLWQILFHIGVAFLSSYQILTRQLQEKQSDCGV

SEQ ID NO: 740512 - protein, 250 aa, Homo sapiens
MSVIFFACVVRVRDGLPLSASTDFYHTQDFLEWRRRLKSLALRLAQYPGRGSAEGCDFSIHFSSFGDVACMAICSCQCPAAMAFCFLETLWWEFTASYDTTCIGLASRPYAFLEFDSIIQKVKWHFNYVSSSQMECSLEKIQEELKLQPPAVLTLEDTDVANGVMNGHTPMHLEPAPNFRMEPVTALGILSLILNIMCAALNLIRGVHLAEHSLQVAHEEIGNILAFLVPFVACIFQDPRSWFCWLDQTS

SEQ ID NO: 740513 - protein, 250 aa, Homo sapiens; identical to SEQ ID NO: 740512

SEQ ID NO: 740514 - protein, 250 aa, Homo sapiens; identical to SEQ ID NO: 740512

SEQ ID NO: 740515 - protein, 180 aa, Homo sapiens
MAICSCQCPAAMAFCFLETLWWEFTASYDTTCIGLASRPYAFLEFDSIIQKVKWHFNYVSSSQMECSLEKIQEELKLQPPAVLTLEDTDVANGVMNGHTPMHLEPAPNFRMEPVTALGILSLILNIMCAALNLIRGVHLAEHSLQVAHEEIGNILAFLVPFVACIFQDPRSWFCWLDQTS

SEQ ID NO: 740516 - protein, 180 aa, Homo sapiens; identical to SEQ ID NO: 740515

SEQ ID NO: 740517 - protein, 303 aa, Homo sapiens; identical to SEQ ID NO: 740511

SEQ ID NO: 740518 - protein, 105 aa, Homo sapiens [sequence omitted]

SEQ ID NO: 740519 - protein, 105 aa, Homo sapiens [sequence omitted]

SEQ ID NO: 740520 - protein, 105 aa, Homo sapiens [sequence omitted]

SEQ ID NO: 740521 - protein, 250 aa, Homo sapiens; identical to SEQ ID NO: 740512

SEQ ID NO: 740522 - protein, 257 aa, Homo sapiens
MLAHRGTMSVIFFACVVRVRDGLPLSASTDFYHTQDFLEWRRRLKSLALRLAQYPGRGSAEGCDFSIHFSSFGDVACMAICSCQCPAAMAFCFLETLWWEFTASYDTTCIGLASRPYAFLEFDSIIQKVKWHFNYVSSSQMECSLEKIQEELKLQPPAVLTLEDTDVANGVMNGHTPMHLEPAPNFRMEPVTALGILSLILNIMCAALNLIRGVHLAEHSLQVAHEEIGNILAFLVPFVACIFQDPRSWFCWLDQTS

SEQ ID NO: 740523 - protein, 250 aa, Homo sapiens; identical to SEQ ID NO: 740512

SEQ ID NO: 740524 - protein, 250 aa, Homo sapiens; identical to SEQ ID NO: 740512

SEQ ID NO: 740525 - protein, 180 aa, Homo sapiens; identical to SEQ ID NO: 740515

SEQ ID NO: 740526 - protein, 180 aa, Homo sapiens; identical to SEQ ID NO: 740515

SEQ ID NO: 740527 - protein, 180 aa, Homo sapiens; identical to SEQ ID NO: 740515

SEQ ID NO: 740528 - protein, 119 aa, Homo sapiens
MEDAKHLEKIQEELKLQPPAVLTLEDTDVANGVMNGHTPMHLEPAPNFRMEPVTALGILSLILNIMCAALNLIRGVHLAEHSLQVAHEEIGNILAFLVPFVACIFQDPRSWFCWLDQTS

SEQ ID NO: 740529 - protein, 237 aa, Homo sapiens
MAICSCQCPAAMAFCFLETLWWEFTASYDTTCIGLASRPYAFLEFDSIIQKVKWHFNYVSSSQMECSLEKIQEELKLQPPAVLTLEDTDVANGVMNGHTPMHLEPGPNFRMEPVKGPRIPCPNVQPQVCGPRFKREGPPGTHLLRGAAEKGDQAGIKSPGEREFHITGKAARCAHTVGTPGRREENSPRREGKTRGRTHQRAEEEQKMRREPTAESNSRSINTARPTTLASELTSKT

SEQ ID NO: 740530 - protein, 959 aa, Homo sapiens
MEEMYFAWLENPQSVHKSWDSFFREASEEAFSGSAQPRPPSVVHESRSAVSSRTKTSKLVEDHLAVQSLIRAYQIRGHHVAQLDPLGILDADLDSFVPSDLITTIDKLAFYDLQEADLDKEFQLPTTTFIGGSENTLSLREIIRRLENTYCQHIGLEFMFINDVEQCQWIRQKFETPGVMQFSSEEKRTLLARLVRSMRFEDFLARKWSSEKRFGLEGCEVMIPALKTIIDKSSEMGIENVILGMPHRGRLNVLANVIRKDLEQIFCQFDPKLEAADEGSGDVKYHLGMYHERINRVTNRNITLSLVANPSHLEAVDPVVQGKTKAEQFYRGDAQGKKVMSILVHGDAAFAGQGVVYETFHLSDLPSYTTNGTVHVVVNNQIGFTTDPRMARSSPYPTDVARVVNAPIFHVNADDPEAVIYVCSVAAEWRNTFNKDVVVDLVCYRRRGHNEMDEPMFTQPLMYKQIHRQVPVLKKYADKLIAEGTVTLQEFEEEIAKYDRICEEAYGRSKDKKILHIKHWLDSPWPGFFNVDGEPKSMTCPATGIPEDMLTHIGSVASSVPLEDFKIHTGLSRILRGRADMTKNRTVDWALAEYMAFGSLLKEGIHVRLSGQDVERGTFSHRHHVLHDQEVDRRTCVPMNHLWPDQAPYTVCNSSLSEYGVLGFELGYAMASPNALVLWEAQFGDFHNTAQCIIDQFISTGQAKWVRHNGIVLLLPHGMEGMGPEHSSARPERFLQMSNDDSDAYPAFTKDFEVSQLYDCNWIVVNCSTPANYFHVLRRQILLPFRKPLIIFTPKSLLRHPEAKSSFDQMVSGTSFQRVIPEDGAAARAPEQVQRLIFCTGKVYYDLVKERSSQDLEEKVAITRLEQISPFPFDLIKQEAEKYPGAELAWCQEEHKNMGYYDYISPRFMTILRRARPIWYVGRDPAAAPATGNRNTHLVSLKKFLDTAFNLQAFEGKTF

SEQ ID NO: 740531 - protein, 112 aa, Homo sapiens
PAHRARTTRLVQGPAQRSGCSRMSQLRLLPSRLGVQAARLLAAHDVPVFGWRSRSSGPPATFPSSKGGGGSSYMEEMYFACVCGRSHPGSPGCCSPHPRLSVDSKRCSLLCS

SEQ ID NO: 740532 - protein, 129 aa, Homo sapiens
MSQLRLLPSRLGVQAARLLAAHDVPVFGWRSRSSGPPATFPSSKGGGGSSYMEEMYFAWLENPQSVHKSWDSFFREASEEAFSGSAQPRPPSVVHESRSAVSSRTKTSKLVEDHLAVQSLIRAYQVRGS

SEQ ID NO: 740533 - protein, 876 aa, Homo sapiens
MSQLRLLPSRLGVQAARLLAAHDVPVFGWRSRSSGPPATFPSSKGGGGSSYMEEMYFAWLENPQSVHKSWDSFFREASEEAFSGSAQPRPPSVVHESRSAVSSRTKTSKLVEDHLAVQSLIRAYQIRGHHVAQLDPLGILDADLDSFVPSDLITTIDKLAFYDLQEADLDKEFQLPTTTFIGGSENTLSLREIIRRLENTYCQHIGLEFMFINDVEQCQWIRQKFETPGVMQFSSEEKRTLLARLVRSMRFEDFLARKWSSEKRFGLEGCEVMIPALKTIIDKSSEMGIENVILGMPHRGRLNVLANVIRKDLEQIFCQFDPKLEAADEGSGDVKYHLGMYHERINRVTNRNITLSLVANPSHLEAVDPVVQGKTKAEQFYRGDAQGKKVMSILVHGDAAFAGQGVVYETFHLSDLPSYTTNGTVHVVVNNQIGFTTDPRMARSSPYPTDVARVVNAPIFHVNADDPEAVIYVCSVAAEWRNTFNKDVVVDLVCYRRRGHNEMDEPMFTQPLMYKQIHRQVPVLKKYADKLIAEGTVTLQEFEEEIAKYDRICEEAYGRSKDKKILHIKHWLDSPWPGFFNVDGEPKSMTCPATGIPEDMLTHIGSVASSVPLEDFKIHTGLSRILRGRADMTKNRTVDWALAEYMAFGSLLKEGIHVRLSGQDVERGTFQEVDRRTCVPMNHLWPDQAPYTVCNSSLSEYGVLGFELGYAMASPNALVLWEAQFGDFHNTAQCIIDQFISTGQAKWVRHNGIVLLLPHGMEGMGPEHSSARPERFLQMSNDDSDAYPAFTKDFEVSQLYDCNWIVVNCSTPANYFHVLRRQILLPFRKPLIIFTPKSLLRHPEAKSSFDQMVSGMLAGTQRLHQPQETGTLTWCH

SEQ ID NO: 740534 - protein, 305 aa, Homo sapiens
MSQLRLLPSRLGVQAARLLAAHDVPVFGWRSRSSGPPATFPSSKGGGGSSYMEEMYFAWLENPQSVHKSWDSFFREASEEAFSGSAQPRPPSVVHESRSAVSSRTKTSKLVEDHLAVQSLIRAYQIRGHHVAQLDPLGILDADLDSFVPSDLITTIDKLAFYDLQEADLDKEFQLPTTTFIGGSENTLSLREIIRRLENTYCQHIGLEFMFINDVEQCQWIRQKFETPGVMQFSSEEKRTLLARLVRSMRFEDFLARKWSSEKRFGLEGCEVMIPALKTIIDKSSEMGIENVILGMPHRWVPLPA

SEQ ID NO: 740535 - protein, 1010 aa, Homo sapiens
MSQLRLLPSRLGVQAARLLAAHDVPVFGWRSRSSGPPATFPSSKGGGGSSYMEEMYFAWLENPQSVHKSWDSFFREASEEAFSGSAQPRPPSVVHESRSAVSSRTKTSKLVEDHLAVQSLIRAYQIRGHHVAQLDPLGILDADLDSFVPSDLITTIDKLAFYDLQEADLDKEFQLPTTTFIGGSENTLSLREIIRRLENTYCQHIGLEFMFINDVEQCQWIRQKFETPGVMQFSSEEKRTLLARLVRSMRFEDFLARKWSSEKRFGLEGCEVMIPALKTIIDKSSEMGIENVILGMPHRGRLNVLANVIRKDLEQIFCQFDPKLEAADEGSGDVKYHLGMYHERINRVTNRNITLSLVANPSHLEAVDPVVQGKTKAEQFYRGDAQGKKVMSILVHGDAAFAGQGVVYETFHLSDLPSYTTNGTVHVVVNNQIGFTTDPRMARSSPYPTDVARVVNAPIFHVNADDPEAVIYVCSVAAEWRNTFNKDVVVDLVCYRRRGHNEMDEPMFTQPLMYKQIHRQVPVLKKYADKLIAEGTVTLQEFEEEIAKYDRICEEAYGRSKDKKILHIKHWLDSPWPGFFNVDGEPKSMTCPATGIPEDMLTHIGSVASSVPLEDFKIHTGLSRILRGRADMTKNRTVDWALAEYMAFGSLLKEGIHVRLSGQDVERGTFSHRHHVLHDQEVDRRTCVPMNHLWPDQAPYTVCNSSLSEYGVLGFELGYAMASPNALVLWEAQFGDFHNTAQCIIDQFISTGQAKWVRHNGIVLLLPHGMEGMGPEHSSARPERFLQMSNDDSDAYPAFTKDFEVSQLYDCNWIVVNCSTPANYFHVLRRQILLPFRKPLIIFTPKSLLRHPEAKSSFDQMVSGTSFQRVIPEDGAAARAPEQVQRLIFCTGKVYYDLVKERSSQDLEEKVAITRLEQISPFPFDLIKQEAEKYPGAELAWCQEEHKNMGYYDYISPRFMTILRRARPIWYVGRDPAAAPATGNRNTHLVSLKKFLDTAFNLQAFEGKTF

SEQ ID NO: 740536 - protein, 1001 aa, Homo sapiens
MSQLRLLPSRLGVQAARLLAAHDVPVFGWRSRSSGPPATFPSSKGGGGSSYMEEMYFAWLENPQSVHKSWDSFFREASEEAFSGSAQPRPPSVVHESRSAVSSRTKTSKLVEDHLAVQSLIRAYQIRGHHVAQLDPLGILDADLDSFVPSDLITTIDKLAFYDLQEADLDKEFQLPTTTFIGGSENTLSLREIIRRLENTYCQHIGLEFMFINDVEQCQWIRQKFETPGVMQFSSEEKRTLLARLVRSMRFEDFLARKWSSEKRFGLEGCEVMIPALKTIIDKSSEMGIENVILGMPHRGRLNVLANVIRKDLEQIFCQFDPKLEAADEGSGDVKYHLGMYHERINRVTNRNITLSLVANPSHLEAVDPVVQGKTKAEQFYRGDAQGKKVMSILVHGDAAFAGQGVVYETFHLSDLPSYTTNGTVHVVVNNQIGFTTDPRMARSSPYPTDVARVVNAPIFHVNADDPEAVIYVCSVAAEWRNTFNKDVVVDLVCYRRRGHNEMDEPMFTQPLMYKQIHRQVPVLKKYADKLIAEGTVTLQEFEEEIAKYDRICEEAYGRSKDKKILHIKHWLDSPWPGFFNVDGEPKSMTCPATGIPEDMLTHIGSVASSVPLEDFKIHTGLSRILRGRADMTKNRTVDWALAEYMAFGSLLKEGIHVRLSGQDVERGTFQEVDRRTCVPMNHLWPDQAPYTVCNSSLSEYGVLGFELGYAMASPNALVLWEAQFGDFHNTAQCIIDQFISTGQAKWVRHNGIVLLLPHGMEGMGPEHSSARPERFLQMSNDDSDAYPAFTKDFEVSQLYDCNWIVVNCSTPANYFHVLRRQILLPFRKPLIIFTPKSLLRHPEAKSSFDQMVSGTSFQRVIPEDGAAARAPEQVQRLIFCTGKVYYDLVKERSSQDLEEKVAITRLEQISPFPFDLIKQEAEKYPGAELAWCQEEHKNMGYYDYISPRFMTILRRARPIWYVGRDPAAAPATGNRNTHLVSLKKFLDTAFNLQAFEGKTF

SEQ ID NO: 740537 - protein, 915 aa, Homo sapiens
MARRARTPSAQPPDLQPPDLAAARTRPARPIRGHHVAQLDPLGILDADLDSFVPSDLITTIDKLAFYDLQEADLDKEFQLPTTTFIGGSENTLSLREIIRRLENTYCQHIGLEFMFINDVEQCQWIRQKFETPGVMQFSSEEKRTLLARLVRSMRFEDFLARKWSSEKRFGLEGCEVMIPALKTIIDKSSEMGIENVILGMPHRGRLNVLANVIRKDLEQIFCQFDPKLEAADEGSGDVKYHLGMYHERINRVTNRNITLSLVANPSHLEAVDPVVQGKTKAEQFYRGDAQGKKVMSILVHGDAAFAGQGVVYETFHLSDLPSYTTNGTVHVVVNNQIGFTTDPRMARSSPYPTDVARVVNAPIFHVNADDPEAVIYVCSVAAEWRNTFNKDVVVDLVCYRRRGHNEMDEPMFTQPLMYKQIHRQVPVLKKYADKLIAEGTVTLQEFEEEIAKYDRICEEAYGRSKDKKILHIKHWLDSPWPGFFNVDGEPKSMTCPATGIPEDMLTHIGSVASSVPLEDFKIHTGLSRILRGRADMTKNRTVDWALAEYMAFGSLLKEGIHVRLSGQDVERGTFSHRHHVLHDQEVDRRTCVPMNHLWPDQAPYTVCNSSLSEYGVLGFELGYAMASPNALVLWEAQFGDFHNTAQCIIDQFISTGQAKWVRHNGIVLLLPHGMEGMGPEHSSARPERFLQMSNDDSDAYPAFTKDFEVSQLYDCNWIVVNCSTPANYFHVLRRQILLPFRKPLIIFTPKSLLRHPEAKSSFDQMVSGTSFQRVIPEDGAAARAPEQVQRLIFCTGKVYYDLVKERSSQDLEEKVAITRLEQISPFPFDLIKQEAEKYPGAELAWCQEEHKNMGYYDYISPRFMTILRRARPIWYVGRDPAAAPATGNRNTHLVSLKKFLDTAFNLQAFEGKTF

SEQ ID NO: 740538 - protein, 2701 aa, Homo sapiens
MTEKMSSFLYIGDIVSLYAEGSVNGFISTLGLVDDRCVVHPEAGDLANPPKKFRDCLFKVCPMNRYSAQKQYWKAKQAKQGNHTEAALLKKLQHAAELEQKQNESENKKLLGEIVKYSNVIQLLHIKSNKYLTVNKRLPALLEKNAMRVSLDAAGNEGSWFYIHPFWKLRSEGDNIVVGDKVVLMPVNAGQPLHASNIELLDNPGCKEVNAVNCNTSWKITLFMKYSSYREDVLKGGDVVRLFHAEQEKFLTCDEYEKKQHIFLRTTLRQSATSATSSKALWEIEVVHHDPCRGGAGQWNSLFRFKHLATGNYLAAELNPDYRDAQNEGKNVRDGVPPTSKKKRQAGEKIMYTLVSVPHGNDIASLFELDATTLQRADCLVPRNSYVRLRHLCTNTWVTSTSIPIDTDEERPVMLKIGTCQTKEDKEAFAIVSVPLSEVRDLDFANDANKVLATTVKKLENGTITQNERRFVTKLLEDLIFFVADVPNNGQEVLDVVITKPNRERQKLMREQNILAQVFGILKAPFKEKAGEGSMLRLEDLGDQRYAPYKYMLRLCYRVLRHSQQDYRKNQEYIAKNFCVMQSQIGYDILAEDTITALLHNNRKLLEKHITAKEIETFVSLLRRNREPRFLDYLSDLCVSNTTAIPVTQELICKFMLSPGNADILIQTKVVSMQADNPMESSILSDDIDDEEVWLYWIDSNKEPHGKAIRHLAQEAKEGTKADLEVLTYYRYQLNLFARMCLDRQYLAINQISTQLSVDLILRCVSDESLPFDLRASFCRLMLHMHVDRDPQESVVPVRYARLWTEIPTKITIHEYDSITDSSRNDMKRKFALTMEFVEEYLKEVVNQPFPFGDKEKNKLTFEVVHLARNLIYFGFYSFSELLRLTRTLLAILDIVQAPMSSYFERLSKFQDGGNNVMRTIHGVGEMMTQMVLSRGSIFPMSVPDVPPSIHPSKQGSPTEHEDVTVMDTKLKIIEILQFILSVRLDYRISYMLSIYKKEFGEDNDNAETSASGSPDTLLPSAIVPDIDEIAAQAETMFAGRKEKNPVQLDDEGGRTFLRVLIHLIMHDYPPLLSGALQLLFKHFSQRAEVLQAFKQVQLLVSNQDVDNYKQIKADLDQLRLTVEKSELWVEKSSNYENGEIGESQVKGGEEPIEESNILSPVQDGTKKPQIDSNKSNNYRIVKEILIRLSKLCVQNKKCRNQHQRLLKNMGAHSVVLDLLQIPYEKNDEKMNEVMNLAHTFLQNFCRGNPQNQVLLHKHLNLFLTPGLLEAETMRHIFMNNYHLCNEISERVVQHFVHCIETHGRHVEYLRFLQTIVKADGKYVKKCQDMVMTELINGGEDVLIFYNDRASFPILLHMMCSERDRGDESGPLAYHITLVELLAACTEGKNVYTEIKCNSLLPLDDIVRVVTHDDCIPEVKIAYVNFVNHCYVDTEVEMKEIYTSNHIWKLFENFLVDMARVCNTTTDRKHADIFLEKCVTESIMNIVSGFFNSPFSDNSTSLQTHQPVFIQLLQSAFRIYNCTWPNPAQKASVESCIRTLAEVAKNRGIAIPVDLDSQVNTLFMKSHSNMVQRAAMGWRLSARSGPRFKEALGGPAWDYRNIIEKLQDVVASLEHQFSPMMQAEFSVLVDVLYSPELLFPEGSDARIRCGAFMSKLINHTKKLMEKEEKLCIKILQTLREMLEKKDSFVEEGNTLRKILLNRYFKGDYSIGVNGHLSGAYSKTAQVGGSFSGQDSDKMGISMSDIQCLLDKEGASELVIDVIVNTKNDRIFSEGIFLGIALLEGGNTQTQYSFYQQLHEQKKSEKFFKVLYDRMKAAQKEIRSTVTVNTIDLGNKKRDDDNELMTSGPRMRVRDSTLHLKEGMKGQLTEASSATSKAYCVYRREMDPEIDIMCTGPEAGNTEEKSAEEVTMSPAIAIMQPILRFLQLLCENHNRELQNFLRNQNNKTNYNLVCETLQFLDCICGSTTGGLGLLGLYINEKNVALVNQNLESLTEYCQGPCHENQTCIATHESNGIDIIIALILNDINPLGKYRMDLVLQLKNNASKLLLAIMESRHDSENAERILFNMRPRELVDVMKNAYNQGLECDHGDDEGGDDGVSPKDVGHNIYILAHQLARHNKLLQQMLKPGSDPDEGDEALKYYANHTAQIEIVRHDRTMEQIVFPVPNICEYLTRESKCRVFNTTERDEQGSKVNDFFQQTEDLYNEMKWQKKIRNNPALFWFSRHISLWGSISFNLAVFINLAVALFYPFGDDGDEGTLSPLFSVLLWIAVAICTSMLFFFSKPVGIRPFLVSIMLRSIYTIGLGPTLILLGAANLCNKIVFLVSFVGNRGTFTRGYRAVILDMAFLYHVAYVLVCMLGLFVHEFFYSFLLFDLVYREETLLNVIKSVTRNGRSIILTAVLALILVYLFSIIGFLFLKDDFTMEVDRLKNRTPVTGSHQVPTMTLTTMMEACAKENCSPTIPASNTADEEYEDGIERTCDTLLMCIVTVLNQGLRNGGGVGDVLRRPSKDEPLFAARVVYDLLFYFIVIIIVLNLIFGVIIDTFADLRSEKQKKEEILKTTCFICGLERDKFDNKTVSFEEHIKSEHNMWHYLYFIVLVKVKDPTEYTGPESYVAQMIVEKNLDWFPRMRAMSLVSNEGDSEQNEIRSLQEKLESTMSLVKQLSGQLAELKEQMTEQRKNKQRLGFLGSNTPHVNHHMPPH

SEQ ID NO: 740539 - protein, 2701 aa, Homo sapiens; identical to SEQ ID NO: 740538

SEQ ID NO: 740540 - protein, 2701 aa, Homo sapiens; identical to SEQ ID NO: 740538

SEQ ID NO: 740541 - protein, 2701 aa, Homo sapiens; identical to SEQ ID NO: 740538

SEQ ID NO: 740542 - protein, 2701 aa, Homo sapiens; identical to SEQ ID NO: 740538

SEQ ID NO: 740543 - protein, 2701 aa, Homo sapiens; identical to SEQ ID NO: 740538

SEQ ID NO: 740544 - protein, 2626 aa, Homo sapiens
MTEKMSSFLYIGDIVSLYAEGSVNGFISTLGLVDDRCVVHPEAGDLANPPKKFRDCLFKVCPMNRYSAQKQYWKAKQAKQGNHTEAALLKKLQHAAELEQKQNESENKKLLGEIVKYSNVIQLLHIKSNKYLTVNKRLPALLEKNAMRVSLDAAGNEGSWFYIHPFWKLRSEGDNIVVGDKVVLMPVNAGQPLHASNIELLDNPGCKEVNAVNCNTSWKITLFMKYSSYREDVLKGGDVVRLFHAEQEKFLTCDEYEKKQHIFLRTTLRQSATSATSSKALWEIEVVHHDPCRGGAGQWNSLFRFKHLATGNYLAAELNPDYRDAQNEGKNVRDGVPPTSKKKRQAGEKIMYTLVSVPHGNDIASLFELDATTLQRADCLVPRNSYVRLRHLCTNTWVTSTSIPIDTDEERPVMLKIGTCQTKEDKEAFAIVSVPLSEVRDLDFANDANKVLATTVKKLENGTITQNERRFVTKLLEDLIFFVADVPNNGQEVLDVVITKPNRERQKLMREQNILAQVFGILKAPFKEKAGEGSMLRLEDLGDQRYAPYKYMLRLCYRVLRHSQQDYRKNQEYIAKNFCVMQSQIGYDILAEDISGTLLKRQKKAPKLTSEVLTYYRYQLNLFARMCLDRQYLAINQISTQLSVDLILRCVSDESLPFDLRASFCRLMLHMHVDRDPQESVVPVRYARLWTEIPTKITIHEYDSITDSSRNDMKRKFALTMEFVEEYLKEVVNQPFPFGDKEKNKLTFEVVHLARNLIYFGFYSFSELLRLTRTLLAILDIVQAPMSSYFERLSKFQDGGNNVMRTIHGVGEMMTQMVLSRGSIFPMSVPDVPPSIHPSKQGSPTEHEDVTVMDTKLKIIEILQFILSVRLDYRISYMLSIYKKEFGEDNDNAETSASGSPDTLLPSAIVPDIDEIAAQAETMFAGRKEKNPVQLDDEGGRTFLRVLIHLIMHDYPPLLSGALQLLFKHFSQRAEVLQAFKQVQLLVSNQDVDNYKQIKADLDQLRLTVEKSELWVEKSSNYENGEIGESQVKGGEEPIEESNILSPVQDGTKKPQIDSNKSNNYRIVKEILIRLSKLCVQNKKCRNQHQRLLKNMGAHSVVLDLLQIPYEKNDEKMNEVMNLAHTFLQNFCRGNPQNQVLLHKHLNLFLTPGLLEAETMRHIFMNNYHLCNEISERVVQHFVHCIETHGRHVEYLRFLQTIVKADGKYVKKCQDMVMTELINGGEDVLIFYNDRASFPILLHMMCSERDRGDESGPLAYHITLVELLAACTEGKNVYTEIKCNSLLPLDDIVRVVTHDDCIPEVKIAYVNFVNHCYVDTEVEMKEIYTSNHIWKLFENFLVDMARVCNTTTDRKHADIFLEKCVTESIMNIVSGFFNSPFSDNSTSLQTHQPVFIQLLQSAFRIYNCTWPNPAQKASVESCIRTLAEVAKNRGIAIPVDLDSQVNTLFMKSHSNMVQRAAMGWRLSARSGPRFKEALGGPAWDYRNIIEKLQDVVASLEHQFSPMMQAEFSVLVDVLYSPELLFPEGSDARIRCGAFMSKLINHTKKLMEKEEKLCIKILQTLREMLEKKDSFVEEGNTLRKILLNRYFKGDYSIGVNGHLSGAYSKTAQVGGSFSGQDSDKMGISMSDIQCLLDKEGASELVIDVIVNTKNDRIFSEGIFLGIALLEGGNTQTQYSFYQQLHEQKKSEKFFKVLYDRMKAAQKEIRSTVTVNTIDLGNKKRDDDNELMTSGPRMREFWSWGDPKTALQDYNLNETNQCKATNGMKDVGFHCGMHVRDSTLHLKEGMKGQLTEASSATSKAYCVYRREMDPEIDIMCTGPEAGNTEEKSAEEVTMSPAIAIMQPILRFLQLLCENHNRELQNFLRNQNNKTNYNLVCETLQFLDCICGSTTGGLGLLGLYINEKNVALVNQNLESLTEYCQGPCHENQTCIATHESNGIDIIIALILNDINPLGKYRMDLVLQLKNNASKLLLAIMESRHDSENAERILFNMRPRELVDVMKNAYNQGLECDHGDDEGGDDGVSPKDVGHNIYILAHQLARHNKLLQQMLKPGSDPDEGDEALKYYANHTAQIEIVRHDRTMEQIVFPVPNICEYLTRESKCRVFNTTERDEQGSKVNDFFQQTEDLYNEMKWQKKIRNNPALFWFSRHISLWGSISFNLAVFINLAVALFYPFGDDGDEGTLSPLFSVLLWIAVAICTSMLFFFSKPVGIRPFLVSIMLRSIYTIGLGPTLILLGAANLCNKIVFLVSFVGNRGTFTRGYRAVILDMAFLYHVAYVLVCMLGLFVHEFFYSFLLFDLVYREETLLNVIKSVTRNGRSIILTAVLALILVYLFSIIGFLFLKDDFTMEVDRLKNRTPVTGSHQVPTMTLTTMMEACAKENCSPTIPASNTADEEYEDGIERTCDTLLMCIVTVLNQGLRNGGGVGDVLRRPSKDEPLFAARVVYDLLFYFIVIIIVLNLIFGVIIDTFADLRSEKQKKEEILKTTCFICGLERDKFDNKTVSFEEHIKSEHNMWHYLYFIVLVKVKDPTEYTGPESYVAQMIVEKNLDWFPRMRAMSLVSNEGDSEQNEIRSLQEKLESTMSLVKQLSGQLAELKEQMTEQRKNKQRLGFLGSNTPHVNHHMPPH

SEQ ID NO: 740545 - protein, 1139 aa, Homo sapiens
KWMAWRYGATAARTLDIQGRGHEFSVLVDVLYSPELLFPEGSDARIRCGAFMSKLINHTKKLMEKEEKLCIKILQTLREMLEKKDSFVEEGNTLRKILLNRYFKGDYSIGVNGHLSGAYSKTAQVGGSFSGQDSDKMGISMSDIQCLLDKEGASELVIDVIVNTKNDRIFSEGIFLGIALLEGGNTQTQYSFYQQLHEQKKSEKFFKVLYDRMKAAQKEIRSTVTVNTIDLGNKKRDDDNELMTSGPRMREFWSWGDPKTALQDYNLNETNQCKATNGMKDVGFHCGMHVRDSTLHLKEGMKGQLTEASSATSKAYCVYRREMDPEIDIMCTGPEAGNTEEKSAEEVTMSPAIAIMQPILRFLQLLCENHNRELQNFLRNQNNKTNYNLVCETLQFLDCICGSTTGGLGLLGLYINEKNVALVNQNLESLTEYCQGPCHENQTCIATHESNGIDIIIALILNDINPLGKYRMDLVLQLKNNASKLLLAIMESRHDSENAERILFNMRPRELVDVMKNAYNQGLECDHGDDEGGDDGVSPKDVGHNIYILAHQLARHNKLLQQMLKPGSDPDEGDEALKYYANHTAQIEIVRHDRTMEQIVFPVPNICEYLTRESKCRVFNTTERDEQGSKVNDFFQQTEDLYNEMKWQKKIRNNPALFWFSRHISLWGSISFNLAVFINLAVALFYPFGDDGDEGTLSPLFSVLLWIAVAICTSMLFFFSKPVGIRPFLVSIMLRSIYTIGLGPTLILLGAANLCNKIVFLVSFVGNRGTFTRGYRAVILDMAFLYHVAYVLVCMLGLFVHEFFYSFLLFDLVYREETLLNVIKSVTRNGRSIILTAVLALILVYLFSIIGFLFLKDDFTMEVDRLKNRTPVTGSHQVPTMTLTTMMEACAKENCSPTIPASNTADEEYEDGIERTCDTLLMCIVTVLNQGLRNGGGVGDVLRRPSKDEPLFAARVVYDLLFYFIVIIIVLNLIFGVIIDTFADLRSEKQKKEEILKTTCFICGLERDKFDNKTVSFEEHIKSEHNMWHYLYFIVLVKVKDPTEYTGPESYVAQMIVEKNLDWFPRMRAMSLVSNEGDSEQNEIRSLQEKLESTMSLVKQLSGQLAELKEQMTEQRKNKQRLGFLGSNTPHVNHHMPPH

SEQ ID NO: 740546 - protein, 322 aa, Homo sapiens
MTEKMSSFLYIGDIVSLYAEGSVNGFISTLGLVDDRCVVHPEAGDLANPPKKFRDCLFKVCPMNRYSAQKQYWKAKQAKQGNHTEAALLKKLQHAAELEQKQNESENKKLLGEIVKYSNVIQLLHIKSNKYLTVNKRLPALLEKNAMRVSLDAAGNEGSWFYIHPFWKLRSEGDNIVVGDKVVLMPVNAGQPLHASNIELLDNPGCKEVNAVNCNTSWKITLFMKYSSYREDVLKGGDVVRLFHAEQEKFLTCDEYEKKQHIFLRTTLRQSATSATSSKALWEIEVVHHDPCRGGAGQWNSLFRFKHLATGNYLAAEAYQSQ

SEQ ID NO: 740547 - protein, 181 aa, Homo sapiens
MTEKMSSFLYIGDIVSLYAEGSVNGFISTLGLVDDRCVVHPEAGDLANPPKKFRDCLFKVCPMNRYSAQKQYWKAKQAKQGNHTEAALLKKLQHAAELEQKQNESENKKLLGEIVKYSNVIQLLHIKSNKYLTVNKRLPALLEKNAMRVSLDAAGNEGSWFYIHPFWKLRSEGDNDASFWI

SEQ ID NO: 740548 - protein, 2701 aa, Homo sapiens; identical to SEQ ID NO: 740538

SEQ ID NO: 740549 - protein, 2740 aa, Homo sapiens
MTEKMSSFLYIGDIVSLYAEGSVNGFISTLGLVDDRCVVHPEAGDLANPPKKFRDCLFKVCPMNRYSAQKQYWKAKQAKQGNHTEAALLKKLQHAAELEQKQNESENKKLLGEIVKYSNVIQLLHIKSNKYLTVNKRLPALLEKNAMRVSLDAAGNEGSWFYIHPFWKLRSEGDNIVVGDKVVLMPVNAGQPLHASNIELLDNPGCKEVNAVNCNTSWKITLFMKYSSYREDVLKGGDVVRLFHAEQEKFLTCDEYEKKQHIFLRTTLRQSATSATSSKALWEIEVVHHDPCRGGAGQWNSLFRFKHLATGNYLAAELNPDYRDAQNEGKNVRDGVPPTSKKKRQAGEKIMYTLVSVPHGNDIASLFELDATTLQRADCLVPRNSYVRLRHLCTNTWVTSTSIPIDTDEERPVMLKIGTCQTKEDKEAFAIVSVPLSEVRDLDFANDANKVLATTVKKLENGTITQNERRFVTKLLEDLIFFVADVPNNGQEVLDVVITKPNRERQKLMREQNILAQVFGILKAPFKEKAGEGSMLRLEDLGDQRYAPYKYMLRLCYRVLRHSQQDYRKNQEYIAKNFCVMQSQIGYDILAEDTITALLHNNRKLLEKHITAKEIETFVSLLRRNREPRFLDYLSDLCVSNTTAIPVTQELICKFMLSPGNADILIQTKVVSMQADNPMESSILSDDIDDEEVWLYWIDSNKEPHGKAIRHLAQEAKEGTKADLEVLTYYRYQLNLFARMCLDRQYLAINQISTQLSVDLILRCVSDESLPFDLRASFCRLMLHMHVDRDPQESVVPVRYARLWTEIPTKITIHEYDSITDSSRNDMKRKFALTMEFVEEYLKEVVNQPFPFGDKEKNKLTFEVVHLARNLIYFGFYSFSELLRLTRTLLAILDIVQAPMSSYFERLSKFQDGGNNVMRTIHGVGEMMTQMVLSRGSIFPMSVPDVPPSIHPSKQGSPTEHEDVTVMDTKLKIIEILQFILSVRLDYRISYMLSIYKKEFGEDNDNAETSASGSPDTLLPSAIVPDIDEIAAQAETMFAGRKEKNPVQLDDEGGRTFLRVLIHLIMHDYPPLLSGALQLLFKHFSQRAEVLQAFKQVQLLVSNQDVDNYKQIKADLDQLRLTVEKSELWVEKSSNYENGEIGESQVKGGEEPIEESNILSPVQDGTKKPQIDSNKSNNYRIVKEILIRLSKLCVQNKKCRNQHQRLLKNMGAHSVVLDLLQIPYEKNDEKMNEVMNLAHTFLQNFCRGNPQNQVLLHKHLNLFLTPGLLEAETMRHIFMNNYHLCNEISERVVQHFVHCIETHGRHVEYLRFLQTIVKADGKYVKKCQDMVMTELINGGEDVLIFYNDRASFPILLHMMCSERDRGDESGPLAYHITLVELLAACTEGKNVYTEIKCNSLLPLDDIVRVVTHDDCIPEVKIAYVNFVNHCYVDTEVEMKEIYTSNHIWKLFENFLVDMARVCNTTTDRKHADIFLEKCVTESIMNIVSGFFNSPFSDNSTSLQTHQPVFIQLLQSAFRIYNCTWPNPAQKASVESCIRTLAEVAKNRGIAIPVDLDSQVNTLFMKSHSNMVQRAAMGWRLSARSGPRFKEALGGPAWDYRNIIEKLQDVVASLEHQFSPMMQAEFSVLVDVLYSPELLFPEGSDARIRCGAFMSKLINHTKKLMEKEEKLCIKILQTLREMLEKKDSFVEEGNTLRKILLNRYFKGDYSIGVNGHLSGAYSKTAQVGGSFSGQDSDKMGISMSDIQCLLDKEGASELVIDVIVNTKNDRIFSEGIFLGIALLEGGNTQTQYSFYQQLHEQKKSEKFFKVLYDRMKAAQKEIRSTVTVNTIDLGNKKRDDDNELMTSGPRMREFWSWGDPKTALQDYNLNETNQCKATNGMKDVGFHCGMHVRDSTLHLKEGMKGQLTEASSATSKAYCVYRREMDPEIDIMCTGPEAGNTEEKSAEEVTMSPAIAIMQPILRFLQLLCENHNRELQNFLRNQNNKTNYNLVCETLQFLDCICGSTTGGLGLLGLYINEKNVALVNQNLESLTEYCQGPCHENQTCIATHESNGIDIIIALILNDINPLGKYRMDLVLQLKNNASKLLLAIMESRHDSENAERILFNMRPRELVDVMKNAYNQGLECDHGDDEGGDDGVSPKDVGHNIYILAHQLARHNKLLQQMLKPGSDPDEGDEALKYYANHTAQIEIVRHDRTMEQIVFPVPNICEYLTRESKCRVFNTTERDEQGSKVNDFFQQTEDLYNEMKWQKKIRNNPALFWFSRHISLWGSISFNLAVFINLAVALFYPFGDDGDEGTLSPLFSVLLWIAVAICTSMLFFFSKPVGIRPFLVSIMLRSIYTIGLGPTLILLGAANLCNKIVFLVSFVGNRGTFTRGYRAVILDMAFLYHVAYVLVCMLGLFVHEFFYSFLLFDLVYREETLLNVIKSVTRNGRSIILTAVLALILVYLFSIIGFLFLKDDFTMEVDRLKNRTPVTGSHQVPTMTLTTMMEACAKENCSPTIPASNTADEEYEDGIERTCDTLLMCIVTVLNQGLRNGGGVGDVLRRPSKDEPLFAARVVYDLLFYFIVIIIVLNLIFGVIIDTFADLRSEKQKKEEILKTTCFICGLERDKFDNKTVSFEEHIKSEHNMWHYLYFIVLVKVKDPTEYTGPESYVAQMIVEKNLDWFPRMRAMSLVSNEGDSEQNEIRSLQEKLESTMSLVKQLSGQLAELKEQMTEQRKNKQRLGFLGSNTPHVNHHMPPH

SEQ ID NO: 740550 - protein, 2740 aa, Homo sapiens; identical to SEQ ID NO: 740549

SEQ ID NO: 740551 - protein, 1826 aa, Homo sapiens
MTEKMSSFLYIGDIVSLYAEGSVNGFISTLGLVDDRCVVHPEAGDLANPPKKFRDCLFKVCPMNRYSAQKQYWKAKQAKQGNHTEAALLKKLQHAAELEQKQNESENKKLLGEIVKYSNVIQLLHIKSNKYLTVNKRLPALLEKNAMRVSLDAAGNEGSWFYIHPFWKLRSEGDNIVVGDKVVLMPVNAGQPLHASNIELLDNPGCKEVNAVNCNTSWKITLFMKYSSYREDVLKGGDVVRLFHAEQEKFLTCDEYEKKQHIFLRTTLRQSATSATSSKALWEIEVVHHDPCRGGAGQWNSLFRFKHLATGNYLAAELNPDYRDAQNEGKNVRDGVPPTSKKKRQAGEKIMYTLVSVPHGNDIASLFELDATTLQRADCLVPRNSYVRLRHLCTNTWVTSTSIPIDTDEERPVMLKIGTCQTKEDKEAFAIVSVPLSEVRDLDFANDANKVLATTVKKLENGTITQNERRFVTKLLEDLIFFVADVPNNGQEVLDVVITKPNRERQKLMREQNILAQVFGILKAPFKEKAGEGSMLRLEDLGDQRYAPYKYMLRLCYRVLRHSQQDYRKNQEYIAKNFCVMQSQIGYDILAEDTITALLHNNRKLLEKHITAKEIETFVSLLRRNREPRFLDYLSDLCVSNTTAIPVTQELICKFMLSPGNADILIQTKVVSMQADNPMESSILSDDIDDEEVWLYWIDSNKEPHGKAIRHLAQEAKEGTKADLEVLTYYRYQLNLFARMCLDRQYLAINQISTQLSVDLILRCVSDESLPFDLRASFCRLMLHMHVDRDPQESVVPVRYARLWTEIPTKITIHEYDSITDSSRNDMKRKFALTMEFVEEYLKEVVNQPFPFGDKEKNKLTFEVVHLARNLIYFGFYSFSELLRLTRTLLAILDIVQAPMSSYFERLSKFQDGGNNVMRTIHGVGEMMTQMVLSRGSIFPMSVPDVPPSIHPSKQGSPTEHEDVTVMDTKLKIIEILQFILSVRLDYRISYMLSIYKKEFGEDNDNAETSASGSPDTLLPSAIVPDIDEIAAQAETMFAGRKEKNPVQLDDEGGRTFLRVLIHLIMHDYPPLLSGALQLLFKHFSQRAEVLQAFKQVQLLVSNQDVDNYKQIKADLDQLRLTVEKSELWVEKSSNYENGEIGESQVKGGEEPIEESNILSPVQDGTKKPQIDSNKSNNYRIVKEILIRLSKLCVQNKKCRNQHQRLLKNMGAHSVVLDLLQIPYEKNDEKMNEVMNLAHTFLQNFCRGNPQNQVLLHKHLNLFLTPGLLEAETMRHIFMNNYHLCNEISERVVQHFVHCIETHGRHVEYLRFLQTIVKADGKYVKKCQDMVMTELINGGEDVLIFYNDRASFPILLHMMCSERDRGDESGPLAYHITLVELLAACTEGKNVYTEIKCNSLLPLDDIVRVVTHDDCIPEVKIAYVNFVNHCYVDTEVEMKEIYTSNHIWKLFENFLVDMARVCNTTTDRKHADIFLEKCVTESIMNIVSGFFNSPFSDNSTSLQTHQPVFIQLLQSAFRIYNCTWPNPAQKASVESCIRTLAEVAKNRGIAIPVDLDSQVNTLFMKSHSNMVQRAAMGWRLSARSGPRFKEALGGPAWDYRNIIEKLQDVVASLEHQFSPMMQAEFSVLVDVLYSPELLFPEGSDARIRCGAFMSKLINHTKKLMEKEEKLCIKILQTLREMLEKKDSFVEEGNTLRKILLNRYFKGDYSIGVNGHLSGAYSKTAQVGGSFSGQDSDKMGISMSDIQCLLDKEGASELVIDVIVNTKNDRIFSEGIFLGIALLEGGNTQTQVLVHQSWGLHLLLVFLVYLSQKPRKSNVFLLALITI

SEQ ID NO: 740552 - protein, 127 aa, Homo sapiens
LTVCLRRERERGEGDRQDRSGSRGSHGLYLNNLPFSFQASVHILLTFGTSVRQGASFLSLQEDSWGTWPLAASSWVSTCWASSWFIVHQWERTWVLLTCESFFTEGFRKVCSWPVDLDSKGDEKNRN

SEQ ID NO: 740553 - protein, 188 aa, Homo sapiens
LTVCLRRERERGEGDRQDRSGSRGSHGLYLNNLPFSFQASVHILLTFGTSVRQGASFLSLQEDSWGTWPLAASSWVSTCWASSWFIVHQWERTWVLLTCESFFTEGFRKVCSWPVDLDSKGDERTRLSCVAFLRQSTGKWPHFLCLSCPAPPLSCAGPRPSLSQSAELQTPNILSYPQNLQLPSMDVG

SEQ ID NO: 740554 - protein, 575 aa, Homo sapiens
MASWLRRKLRGKRRPVIAFCLLMILSAMAVTRFPPQRPSAGPDPGPMEPQGVTGAPATHIRQALSSSRRQRARNMGFWRSRALPRNSILVCAEEQGHRARVDRSRESPGGDLRHPGRVRRDITLSGHPRLSTQHVVLLREDEVGDPGTKDLGHPQHGSPIQETQSEVVTLVSPLPGSDMAALPAWRATSGLTLWPHTAEGRDLLGAENRALTGGQQAEDPTLASGAYQWPGSVEKLQGSVWCDAETLLSSSRTGGQAPPWLTDHDVQMLRLLAQGEVVDKARVPAHGQVLQVGFSTEAALQDLSSPRLSQLCSQGLCGLIKRPGDLPEVLSFHVDRVLGLRRSLPAVARRFHSPLLPYRYTDGGARPVIWWAPDVQHLSDPDEDQNSLALGWLQYQALLAHSCNWPGQAPCPGIHHTEWARLALFDFLLQVHDRLDRYCCGFEPEPSDPCVEERLREKCQNPAELRLVHILVRSSDPSHLVYIDNAGNLQHPEDKLNFRLLEGIDGFPESAVKVLASGCLQNMLLKSLQMDPVFWESQGGAQGLKQVLQTLEQRGQVLLGHIQKHNLTLFRDEDP

SEQ ID NO: 740555 - protein, 575 aa, Homo sapiens; identical to SEQ ID NO: 740554

SEQ ID NO: 740556 - protein, 187 aa, Homo sapiens
LVLDELVLSQEEPTQLLPSRHSSIQGRCGFQSRIPLTHRPGTMSKFYLSLNLTLASRTLGGSAEKLDLVPILARECEPMSHWRGTVRTNTTGQRSGPQELGPRETGLLRGDSVQAEACGPSQFDTGDDQESLSFSQNELRGPSFHYSDQDLHLRGAHWKFAEIPNQHAPDFRSCHPPLHFNTKSTTS

SEQ ID NO: 740557 - protein, 432 aa, Homo sapiens
LRWEPGGRAAAAAGGAPVRGAEARTGSCPWAGPGVPARREPADMPQTLSASDMVTPGSLSPPPTEPTDGEQAGQPLLDGAPSSASLETLIQHLVPTADYYPEKAYIFTFLLSSRLFIEPRELLARVCHLCIEQQQLDKPVLDKARVRKFGPKLLQLLAEWTETFPRDFQEESTIGHLKDVVGRIAPCDEAYRKRMHQLLQALHQKLAALRQGPEGLVGADKPISYRTKPPASIHRELLGVCSDPYTLAQQLTHVELERLRHIGPEEFVQAFVNKDPLASTKPCFSDKTSNLEAYVKWFNRLCYLVATEICMPAKKKQRAQVIEFFIDVARECFNIGNFNSLMAIISGMNMSPVSRLKKTWAKVRTAKFFILEHQMDPTGNFCNYRTALRGAAHRSLTAHSSREKIVIPFFSLLIKDIYFLNEGCANRLPNGH

SEQ ID NO: 740558 - protein, 312 aa, Homo sapiens
TRSEAHVPTRRPSRARCPSLAREARVRKFGPKLLQLLAEWTETFPRDFQEESTIGHLKDVVGRIAPCDEAYRKRMHQLLQALHQKLAALRQGPEGLVGADKPISYRTKPPASIHRELLGVCSDPYTLAQQLTHVELERLRHIGPEEFVQAFVNKDPLASTKPCFSDKTSNLEAYVKWFNRLCYLVATEICMPAKKKQRAQVIEFFIDVARECFNIGNFNSLMAIISGMNMSPVSRLKKTWAKVRTAKFFILEHQMDPTGNFCNYRTALRGAAHRSLTAHSSREKIVIPFFSLLIKDIYFLNEGCANRLPNGH

SEQ ID NO: 740559 - protein, 294 aa, Homo sapiens
MALLSTVRGATWGRLVTRHFSHAARHGERPGGEELSRLLLDDLVPTSRLELLFGMTPCLLALQAARRSVARLLLQAGKAGLQGKRAELLRMAEARDIPVLRPRRQKLDTMCRYQVHQVSAWSCPLTPVVSKSSAGAMEVMDVFSTDDLTGFLQTKAQQGWLVAGTVGCPSTEDPQSSEIPIMSCLEFLWERPTLLVLGNEGSGLSQEVQASCQLLLTILPRRQLPPGLESLNVSVAAGILLHSICSQRKGFPTEGERRQLLQDPQEPSARSEGLSMAQHPGLSSGPEKERQNEG

SEQ ID NO: 740560 - protein, 353 aa, Homo sapiens
MALLSTVRGATWGRLVTRHFSHAARHGERPGGEELSRLLLDDLVPTSRLELLFGMTPCLLALQAARRSVARLLLQAGKAGLQGKRAELLRMAEARDIPVLRPRRQKLDTMCRYQVHQGVCMEVSPLRPRPWREAGEASPGDDPQQLWLVLDGIQDPRNFGAVLRSAHFLGVDKVITSRRNSCPLTPVVSKSSAGAMEVMDVFSTDDLTGFLQTKAQQGWLVAGTVGCPSTEDPQSSEIPIMSCLEFLWERPTLLVLGNEGSGLSQEVQASCQLLLTILPRRQLPPGLESLNVSVAAGILLHSICSQRKGFPTEGERRQLLQDPQEPSARSEGLSMAQHPGLSSGPEKERQNEG

SEQ ID NO: 740561 - protein, 102 aa, Homo sapiens
GQCLIYDTHFIISSSIDNIMINTKHSSTHTEYSCITLGFFSFVCVCVCVCVCVCVCYETRSGSVTQAAVQCCSLGPCPTAASGIAVCRPGTVAQACRLSTLG

SEQ ID NO: 740562 - protein, 470 aa, Homo sapiens
AEREPSRGQLRRAGGALERSAAQPHQSAKRTELEVERCRGRRAMGAGATGRAMDGPRLLLLLLLGVSLGGAKEACPTGLYTHSGECCKACNLGEGVAQPCGANQTVCEPCLDSVTFSDVVSATEPCKPCTECVGLQSMSAPCVEADDAVCRCAYGYYQDETTGRCEACRVCEAGSGLVFSCQDKQNTVCEECPDGTYSDEANHVDPCLPCTVCEDTERQLRECTRWADAECEEIPGRWITRSTPPEGSDSTAPSTQEPEAPPEQDLIASTVAGVVTTVMGSSQPVVTRGTTDNLIPVYCSILAAVVVGLVAYIAFKRWNSCKQNKQGANSRPVNQTPPPEGEKLHSDSGISVDSQSLHDQQPHTQTASGQALKGDGGLYSSLPPAKREEVEKLLNGSAGDTWRHLAGELGYQPEHIDSFTHEACPVRALLASWATQDSATLDALLAALRRIQRADLVESLCSESTATSPV

SEQ ID NO: 740563 - protein, 563 aa, Homo sapiens
SLGLRAAPHLAARPERSAHRAPWAPAPRRVGIRSEPLLALGASRWAPNETGAPGRLGFCSAVSRATDSAKVGGSSGWSDEIVRCGLLYGHEPNALEGLATEEASSLSPPASFIRALRPKFRLYRYGDCGSESLNDLAKISQQVGPESWLDSSDLIPSSVSLGGAKEACPTGLYTHSGECCKACNLGEGVAQPCGANQTVCEPCLDSVTFSDVVSATEPCKPCTECVGLQSMSAPCVEADDAVCRCAYGYYQDETTGRCEACRVCEAGSGLVFSCQDKQNTVCEECPDGTYSDEANHVDPCLPCTVCEDTERQLRECTRWADAECEEIPGRWITRSTPPEGSDSTAPSTQEPEAPPEQDLIASTVAGVVTTVMGSSQPVVTRGTTDNLIPVYCSILAAVVVGLVAYIAFKRWNSCKQNKQGANSRPVNQTPPPEGEKLHSDSGISVDSQSLHDQQPHTQTASGQALKGDGGLYSSLPPAKREEVEKLLNGSAGDTWRHLAGELGYQPEHIDSFTHEACPVRALLASWATQDSATLDALLAALRRIQRADLVESLCSESTATSPV

SEQ ID NO: 740564 - protein, 470 aa, Homo sapiens; identical to SEQ ID NO: 740562

SEQ ID NO: 740565 - protein, 470 aa, Homo sapiens; identical to SEQ ID NO: 740562

SEQ ID NO: 740566 - protein, 470 aa, Homo sapiens; identical to SEQ ID NO: 740562

SEQ ID NO: 740567 - protein, 960 aa, Homo sapiens [sequence omitted]

SEQ ID NO: 740568 - protein, 960 aa, Homo sapiens [sequence omitted]

SEQ ID NO: 740569 - protein, 960 aa, Homo sapiens [sequence omitted]

SEQ ID NO: 740570 - protein, 960 aa, Homo sapiens [sequence omitted]

SEQ ID NO: 740571 - protein, 960 aa, Homo sapiens [sequence omitted]

SEQ ID NO: 740572 - protein, 960 aa, Homo sapiens [sequence omitted]

SEQ ID NO: 740573 - protein, 960 aa, Homo sapiens [sequence omitted]

SEQ ID NO: 740574 - protein, 845 aa, Homo sapiens
GESGTRGQLEKLKEDTEFQEFLSVHQRRAQAATWANDGLDAEPSKGKSKPASDYLNFDSDSGQESEEEGAGEDLEEEASLEPKAAVQKELSDMDYLKSKMVKAGSSSSSEEEESEDEAVHCDEGSEAEEEDSSATPVLQERDSKGAGQEQGMPAGKKRPPEARAETEKPANQKEPTTCHTVKLRGAPFNVTEKNVMEFLAPLKPVAIRIVRNAHGNKTGYIFVDFSNEEEVKQALKCNREYMGGRYIEVFREKNVPTTKGAPKNTTKSWQGRILGENEEEEDLAESGRLFVRNLPYTSTEEDLEKLFSKYGPLSELHYPIDSLTKKPKGFAFITFMFPEHAVKAYSEVDGQVFQGRMLHVLPSTIKKEASEDASALGSSSYKKKKEAQDKANSASSHNWNTLFMGPNAVADAIAQKYNATKSQVFDHETKGSVAVRVALGETQLVQEVRRFLIDNGVSLDSFSQAAAERSKTVILVKNLPAGTLAAELQETFGHFGSLGRVLLPEGGITAIVEFLEPLEARKAFRHLAYSKFHHVPLYLEWAPVGVFSSTAPQKKKLQDTPSEPMEKDPAEPETVPDGETPEDENPTEEGADNSSAKMEEEEEEEEEEEESLPGCTLFIKNLNFDTTEEKLKEVFSKVGTVKSCSISKKKNKAGVLLSMGFGFVEYRKPEQAQKALKQLQGHVVDGHKLEVRISERATKPAVTLARKKQVPRKQTTSKILVRNIPFQAHSREIRELFSTFGELKTVRLPKKMTGTGTHRGFGFVDFLTKQDAKRAFNALCHSTHLYGRRLVLEWADSEVTLQALRRKTAAHFHEPPKKKRSVVLDEILEQLEGSDSDSEEQTLQL

SEQ ID NO: 740575 - protein, 338 aa, Homo sapiens
QDFLSVSRVAEAQHKLGITVPLPATARRGRTPLPSGLFAVGPRALVGLTLFHGFDVFVFVFDFDGGSVPDGETPEDENPTEEGADNSSAKMEEEEEEEEEEEESLPGCTLFIKNLNFDTTEEKLKEVFSKVGTVKSCSISKKKNKAGVLLSMGFGFVEYRKPEQAQKALKQLQGHVVDGHKLEVRISERATKPAVTLARKKQVPRKQTTSKILVRNIPFQAHSREIRELFSTFGELKTVRLPKKMTGTGTHRGFGFVDFLTKQDAKRAFNALCHSTHLYGRRLVLEWADSEVTLQALRRKTAAHFHEPPKKKRSVVLDEILEQLEGSDSDSEEQTLQL

SEQ ID NO: 740576 - protein, 563 aa, Homo sapiens
MSRLIVKNLPNGMKEERFRQLFAAFGTLTDCSLKFTKDGKFRKFGFIGFKSEEEAQKAQKHFNKSFIDTSRITVEFCKSFGDPAKPRAWSKHAQKPSQPKQPPKDSTTPEIKKDEKKKKVAGQLEKLKEDTEFQEFLSVHQRRAQAATWANDGLDAEPSKGKSKPASDYLNFDSDSGQESEEEGAGEDLEEEASLEPKAAVQKELSDMDYLKSKMVKAGSSSSSEEEESEDEAVHCDEGSEAEEEDSSATPVLQERDSKGAGQEQGMPAGKKRPPEARAETEKPANQKEPTTCHTVKLRGAPFNVTEKNVMEFLAPLKPVAIRIVRNAHGNKTGYIFVDFSNEEEVKQALKCNREYMGGRYIEVFREKNVPTTKGAPKNTTKSWQGRILGENEEEEDLAESGRLFVRNLPYTSTEEDLEKLFSKYGPLSELHYPIDSLTKKPKGFAFITFMFPEHAVKAYSEVDGQVFQGRMLHVLPSTIKKEASEDASALGSSSYKKKKEAQDKANSASSHNWNTLFMGPNAVADAIAQKYNATKSQVFDHETKGSVAVRVALGETHLPLAS

SEQ ID NO: 740577 - protein, 239 aa, Homo sapiens
MSRLIVKNLPNGMKEERFRQLFAAFGTLTDCSLKFTKDGKFRKFGFIGFKSEEEAQKAQKHFNKSFIDTSRITVEFCKSFGDPAKPRAWSKHAQKPSQPKQPPKDSTTPEIKKDEKKKKVAGQLEKLKEDTEFQEFLSVHQRRAQAATWANDGLDAEPSKGKSKPASDYLNFDSDSGQESEEEGAGEDLEEEASLEPKAAVQKELSDMDYLKSKMVKASGHCPAAQASWVSPVTRSSRH

SEQ ID NO: 740578 - protein, 3602 aa, Homo sapiens
MAKRGELELQRQKRSINLQQPRMATERGNLVFLTGSAQNIEFRTGSLGKIKLNDEDLSECLHQIQKNKEDIIELKGSAIGLPQNISSQIYQLNSKLVDLERKFQGLQQTVDKKVCSSNPCQNGGTCLNLHDSFFCICPPQWKGPLCSADVNECEIYSGTPLSCQNGGTCVNTMGSYSCHCPPETYGPQCASKYDDCEGGSVARCVHGICEDLMREQAGEPKYSCVCDAGWMSSPNSPACTLDRDECSFQPGPCSTLVQCFNTQGSFYCGACPTGWQGNGYICEDINECEINNGGCSVAPPVECVNTPGSSHCQACPPGYQGDGRVCTLTDICSVSNGGCHPDASCSSTLGSLPLCTCLPGYTGNGYGPNGCVQLSNICLSHPCLNGQCIDTVSGYFCKCDSGWTGVNCTENINECLSNPCLNGGTCVDGVDSFSCECTRLWTGALCQVPQQVCGESLSGINGSFSYRSPDVGYVHDVNCFWVIKTEMGKVLRITFTFFRLESMDNCPHEFLQVYDGDSSSAFQLGRFCGSSLPHELLSSDNALYFHLYSEHLRNGRGFTVRWETQQPECGGILTGPYGSIKSPGYPGNYPPGRDCVWIVVTSPDLLVTFTFGTLSLEHHDDCNKDYLEIRDGPLYQDPLLGKFCTTFSVPPLQTTGPFARIHFHSDSQISDQGFHITYLTSPSDLRCGGNYTDPEGELFLPELSGPFTHTRQCVYMMKQPQGEQIQINFTHVELQCQSDSSQNYIEVRDGETLLGKVCGNGTISHIKSITNSVWIRFKIDASVEKASFRAVYQVACGDELTGEGVIRSPFFPNVYPGERTCRWTIHQPQSQVILLNFTVFEIGSSAHCETDYVEIGSSSILGSPENKKYCGTDIPSFITSVYNFLYVTFVKSSSTENHGFMAKFSAEDLACGEILTESTGTIQSPGHPNVYPHGINCTWHILVQPNHLIHLMFETFHLEFHYNCTNDYLEVYDTDSETSLGRYCGKSIPPSLTSSGNSLMLVFVTDSDLAYEGFLINYEAISAATACLQDYTDDLGTFTSPNFPNNYPNNWECIYRITVRTGQLIAVHFTNFSLEEAIGNYYTDFLEIRDGGYEKSPLLGIFYGSNLPPTIISHSNKLWLKFKSDQIDTRSGFSAYWDGSSTGCGGNLTTSSGTFISPNYPMPYYHSSECYWWLKSSHGSAFELEFKDFHLEHHPNCTLDYLAVYDGPSSNSHLLTQLCGDEKPPLIRSSGDSMFIKLRTDEGQQGRGFKAEYRQTCENVVIVNQTYGILESIGYPNPYSENQHCNWTIRATTGNTVNYTFLAFDLEHHINCSTDYLELYDGPRQMGRYCGVDLPPPGSTTSSKLQVLLLTDGVGRREKGFQMQWFVYGCGGELSGATGSFSSPGFPNRYPPNKECIWYIRTDPGSSIQLTIHDFDVEYHSRCNFDVLEIYGGPDFHSPRIAQLCTQRSPENPMQVSSTGNELAIRFKTDLSINGRGFNASWQAVTGGCGGIFQAPSGEIHSPNYPSPYRSNTDCSWVIRVDRNHRVLLNFTDFDLEPQDSCIMAYDGLSSTMSRLARTCGREQLANPIVSSGNSLFLRFQSGPSRQNRGFRAQFRQACGGHILTSSFDTVSSPRFPANYPNNQNCSWIIQAQPPLNHITLSFTHFELERSTTCARDFVEILDGGHEDAPLRGRYCGTDMPHPITSFSSALTLRFVSDSSISAGGFHTTVTASVSACGGTFYMAEGIFNSPGYPDIYPPNVECVWNIISSPGNRLQLSFISFQLEDSQDCSRDFVEIREGNATGHLVGRYCGNSFPLNYSSIVGHTLWVRFISDGSGSGTGFQATFMKIFGNDNIVGTHGKVASPFWPENYPHNSNYQWTVNVNASHVVHGRILEMDIEEIQNCYYDKLRIYDGPSIHARLIGAYCGTQTESFSSTGNSLTFHFYSDSSISGKGFLLEWFAVDAPDGVLPTIAPGACGGFLRTGDAPVFLFSPGWPDSYSNRVDCTWLIQAPDSTVELNILSLDIESHRTCAYDSLVIRDGDNNLAQQLAVLCGREIPGPIRSTGEYMFIRFTSDSSVTRAGFNASFHKSCGGYLHADRGIITSPKYPETYPSNLNCSWHVLVQSGLTIAVHFEQPFQIPNGDSSCNQGDYLVLRNGPDIYSPPLGPPGGNGHFCGSHASSTLFTSDNQMFVQFISDHSNEGQGFKIKYEAKSLACGGNVYIHDADSAGYVTSPNHPHNYPPHADCIWILAAPPETRIQLQFEDRFDIEVTPNCTSNYLELRDGVDSDAPILSKFCGTSLPSSQWSSGEVMYLRFRSDNSPTHVGFKAKYSIAQCGGRVPGQSGVVESIGHPTLPYRDNLFCEWHLQGLSGHYLTISFEDFNLQNSSGCEKDFVEIWDNHTSGNILGRYCGNTIPDSIDTSSNTAVVRFVTDGSVTASGFRLRFESSMEECGGDLQGSIGTFTSPNYPNPNPHGRICEWRITAPEGRRITLMFNNLRLATHPSCNNEHVIVFNGIRSNSPQLEKLCSSVNVSNEIKSSGNTMKVIFFTDGSRPYGGFTASYTSSEDAVCGGSLPNTPEGNFTSPGYDGVRNYSRNLNCEWTLSNPNQGNSSISIHFEDFYLESHQDCQFDVLEFRVGDADGPLMWRLCGPSKPTLPLVIPYSQVWIHFVTNERVEHIGFHAKYSFTDCGGIQIGDSGVITSPNYPNAYDSLTHCSWLLEAPQGHTITLTFSDFDIEPHTTCAWDSVTVRNGGSPESPIIGQYCGNSNPRTIQSGSNQLVVTFNSDHSLQGGGFYATWNTQTLGCGGIFHSDNGTIRSPHWPQNFPENSRCSWTAITHKSKHLEISFDNNFLIPSGDGQCQNSFVKVWAGTEEVDKALLATGCGNVAPGPVITPSNTFTAVFQSQEAPAQGFSASFVSRCGSNFTGPSGYIISPNYPKQYDNNMNCTYVIEANPLSVVLLTFVSFHLEARSAVTGSCVNDGVHIIRGYSVMSTPFATVCGDEMPAPLTIAGPVLLNFYSNEQITDFGFKFSYRIISCGGVFNFSSGIITSPAYSYADYPNDMHCLYTITVSDDKVIELKFSDFDVVPSTSCSHDYLAIYDGANTSDPLLGKFCGSKRPPNVKSSNNSMLLVFKTDSFQTAKGWKMSFRQTLGPQQGCGGYLTGSNNTFASPDSDSNGMYDKNLNCVWIIIAPVNKVIHLTFNTFALEAASTRQRCLYDYVKLYDGDSENANLAGTFCGSTVPAPFISSGNFLTVQFISDLTLEREGFNATYTIMDMPCGGTYNATWTPQNISSPNSSDPDVPFSICTWVIDSPPHQQVKITVWALQLTSQDCTQNYLQLQDSPQGHGNSRFQFCGRNASAVPVFYSSMSTAMVIFKSGVVNRNSRMSFTYQIADCNRDYHKAFGNLRSPGWPDNYDNDKDCTVTLTAPQNHTISLFFHSLGIENSVECRNDFLEVRNGSNSNSPLLGKYCGTLLPNPVFSQNNELYLRFKSDSVTSDRGYEIIWTSSPSGCGGTLYGDRGSFTSPGYPGTYPNNTYCEWVLVAPAGRLVTINFYFISIDDPGDCVQNYLTLYDGPNASSPSSGPYCGGDTSIAPFVASSNQVFIKFHADYARRPSAFRLTWDS

SEQ ID NO: 740579 - protein, 149 aa, Homo sapiens
MAKRGELELQRQKRSINLQQPRMATERGNLVFLTGSAQNIEFRTGSLGKIKLNDEDLSECLHQIQKNKEDIIELKGSAIGLPQNISSQIYQLNSKLVDLERKFQGLQQTVDKKVCSSNPCQNGGTCLNLHDSFFCICPPQWKVSHLLFG

SEQ ID NO: 740580 - protein, 1136 aa, Homo sapiens
SGSPPRKYAVRWIVCLKVKLFFQQVFNGIRSNSPQLEKLCSSVNVSNEIKSSGNTMKVIFFTDGSRPYGGFTASYTSSEDAVCGGSLPNTPEGNFTSPGYDGVRNYSRNLNCEWTLSNPNQGNSSISIHFEDFYLESHQDCQFDVLEFRVGDADGPLMWRLCGPSKPTLPLVIPYSQVWIHFVTNERVEHIGFHAKYSFTDCGGIQIGDSGVITSPNYPNAYDSLTHCSWLLEAPQGHTITLTFSDFDIEPHTTCAWDSVTVRNGGSPESPIIGQYCGNSNPRTIQSGSNQLVVTFNSDHSLQGGGFYATWNTQTLGCGGIFHSDNGTIRSPHWPQNFPENSRCSWTAITHKSKHLEISFDNNFLIPSGDGQCQNSFVKVWAGTEEVDKALLATGCGNVAPGPVITPSNTFTAVFQSQEAPAQGFSASFVSRCGSNFTGPSGYIISPNYPKQYDNNMNCTYVIEANPLSVVLLTFVSFHLEARSAVTGSCVNDGVHIIRGYSVMSTPFATVCGDEMPAPLTIAGPVLLNFYSNEQITDFGFKFSYRIISCGGVFNFSSGIITSPAYSYADYPNDMHCLYTITVSDDKVIELKFSDFDVVPSTSCSHDYLAIYDGANTSDPLLGKFCGSKRPPNVKSSNNSMLLVFKTDSFQTAKGWKMSFRQTLGPQQGCGGYLTGSNNTFASPDSDSNGMYDKNLNCVWIIIAPVNKVIHLTFNTFALEAASTRQRCLYDYVKLYDGDSENANLAGTFCGSTVPAPFISSGNFLTVQFISDLTLEREGFNATYTIMDMPCGGTYNATWTPQNISSPNSSDPDVPFSICTWVIDSPPHQQVKITVWALQLTSQDCTQNYLQLQDSPQGHGNSRFQFCGRNASAVPVFYSSMSTAMVIFKSGVVNRNSRMSFTYQIADCNRDYHKAFGNLRSPGWPDNYDNDKDCTVTLTAPQNHTISLFFHSLGIENSVECRNDFLEVRNGSNSNSPLLGKYCGTLLPNPVFSQNNELYLRFKSDSVTSDRGYEIIWTSSPSGCGGTLYGDRGSFTSPGYPGTYPNNTYCEWVLVAPAGRLVTINFYFISIDDPGDCVQNYLTLYDGPNASSPSSGPYCGGDTSIAPFVASSNQVFIKFHADYARRPSAFRLTWDS

SEQ ID NO: 740581 - protein, 197 aa, Homo sapiens
MAKRGELELQRQKRSINLQQPRMATERGNLVFLTGSAQNIEFRTGSLGKIKLNDEDLSECLHQIQKNKEDIIELKGSAIGLPQNISSQIYQLNSKLVDLERKFQGLQQTVDKKVCSSNPCQNGGTCLNLHDSFFCICPPQWKGPLCSADVNECEIYSGTPLSCQNGGTCVNTMGSYRNPCSNIPKEPEEGSRDWHRE

SEQ ID NO: 740582 - protein, 1545 aa, Homo sapiens
MAKRGELELQRQKRSINLQQPRMATERGNLVFLTGSAQNIEFRTGSLGKIKLNDEDLSECLHQIQKNKEDIIELKGSAIGLPQNISSQIYQLNSKLVDLERKFQGLQQTVDKKVCSSNPCQNGGTCLNLHDSFFCICPPQWKGPLCSADVNECEIYSGTPLSCQNGGTCVNTMGSYSCHCPPETYGPQCASKYDDCEGGSVARCVHGICEDLMREQAGEPKYSCVCDAGWMSSPNSPACTLDRDECSFQPGPCSTLVQCFNTQGSFYCGACPTGWQGNGYICEDINECEINNGGCSVAPPVECVNTPGSSHCQACPPGYQGDGRVCTLTDICSVSNGGCHPDASCSSTLGSLPLCTCLPGYTGNGYGPNGCVQLSNICLSHPCLNGQCIDTVSGYFCKCDSGWTGVNCTENINECLSNPCLNGGTCVDGVDSFSCECTRLWTGALCQVPQQVCGESLSGINGSFSYRSPDVGYVHDVNCFWVIKTEMGKVLRITFTFFRLESMDNCPHEFLQVYDGDSSSAFQLGRFCGSSLPHELLSSDNALYFHLYSEHLRNGRGFTVRWETQQPECGGILTGPYGSIKSPGYPGNYPPGRDCVWIVVTSPDLLVTFTFGTLSLEHHDDCNKDYLEIRDGPLYQDPLLGKFCTTFSVPPLQTTGPFARIHFHSDSQISDQGFHITYLTSPSDLRCGGNYTDPEGELFLPELSGPFTHTRQCVYMMKQPQGEQIQINFTHVELQCQSDSSQNYIEVRDGETLLGKVCGNGTISHIKSITNSVWIRFKIDASVEKASFRAVYQVACGDELTGEGVIRSPFFPNVYPGERTCRWTIHQPQSQVILLNFTVFEIGSSAHCETDYVEIGSSSILGSPENKKYCGTDIPSFITSVYNFLYVTFVKSSSTENHGFMAKFSAEDLACGEILTESTGTIQSPGHPNVYPHGINCTWHILVQPNHLIHLMFETFHLEFHYNCTNDYLEVYDTDSETSLGRYCGKSIPPSLTSSGNSLMLVFVTDSDLAYEGFLINYEAISAATACLQDYTDDLGTFTSPNFPNNYPNNWECIYRITVRTGQLIAVHFTNFSLEEAIGNYYTDFLEIRDGGYEKSPLLGIFYGSNLPPTIISHSNKLWLKFKSDQIDTRSGFSAYWDGSSTGCGGNLTTSSGTFISPNYPMPYYHSSECYWWLKSSHGSAFELEFKDFHLEHHPNCTLDYLAVYDGPSSNSHLLTQLCGDEKPPLIRSSGDSMFIKLRTDEGQQGRGFKAEYRQTCENVVIVNQTYGILESIGYPNPYSENQHCNWTIRATTGNTVNYTFLAFDLEHHINCSTDYLELYDGPRQMGRYCGVDLPPPGSTTSSKLQVLLLTDGVGRREKGFQMQWFVYGCGGELSGATGSFSSPGFPNRYPPNKECIWYIRTDPGSSIQLTIHDFDVEYHSRCNFDVLEIYGGPDFHSPRIAQLCTQRSPENPMQVSSTGNELAIRFKTDLSINGRGFNASWQAVTGGCGGIFQAPSGEIHSPNYPSPYRSNTDCSWVIRVDRNHRVLLNFTDFDLEPQDSCIMV

SEQ ID NO: 740583 - protein, 189 aa, Homo sapiens
MEMTREAIGPRCHLEDPSWGALFPGQAPPSSRSPSVAWNSSVSDPASTEWPRAGSVTSQSPRSCSPSLNLQFPSLGGLVTSGAKTCGQHFTVEEGPSHTKPDCKWLQRSPSSVVPKHGCVSKLPGDVVPNPDNWTVPDLQHQSLLSRGICIINSNQGRVSWLTPVIPALWEAEAGGSPEVRSLRPVWPK

SEQ ID NO: 740584 - protein, 189 aa, Homo sapiens; identical to SEQ ID NO: 740583

SEQ ID NO: 740585 - protein, 189 aa, Homo sapiens; identical to SEQ ID NO: 740583

SEQ ID NO: 740586 - protein, 991 aa, Homo sapiens
MDYRGGDGTSMDYRGREAPHMNYRDRDAHAVDFRGRDAPPSDFRGRGTYDLDFRGRDGSHADFRGRDLSDLDFRAREQSRSDFRNRDVSDLDFRDKDGTQVDFRGRGSGTTDLDFRDRDTPHSDFRGRHRSRTDQDFRGREMGSCMEFKDREMPPVDPNILDYIQPSTQDREHSGMNVNRREESTHDHTIERPAFGIQKGEFEHSETREGETQGVAFEHESPADFQNSQSPVQDQDKSQLSGREEQSSDAGLFKEEGGLDFLGRQDTDYRSMEYRDVDHRLPGSQMFGYGQSKSFPEGKTARDAQRDLQDQDYRTGPSEEKPSRLIRLSGVPEDATKEEILNAFRTPDGMPVKNLQLKEYNTGYDYGYVCVEFSLLEDAIGCMEANQGTLMIQDKEVTLEYVSSLDFWYCKRCKANIGGHRSSCSFCKNPREVTEAKQELITYPQPQKTSIPAPLEKQPNQPLRPADKEPEPRKREEGQESRLGHQKREAERYLPPSRREGPTFRRDRERESWSGETRQDGESKTIMLKRIYRSTPPEVIVEVLEPYVRLTTANVRIIKNRTGPMGHTYGFIDLDSHAEALRVVKILQNLDPPFSIDGKMVAVNLATGKRRNDSGDHSDHMHYYQGKKYFRDRRGGGRNSDWSSDTNRQGQQSSSDCYIYDSATGYYYDPLAGTYYDPNTQQEVYVPQDPGLPEEEEIKEKKPTSQGKSSSKKEMSKRDGKEKKDRGVTRFQENASEGKAPAEDVFKKPLPPTVKKEESPPPPKVVNPLIGLLGEYGGDSDYEEEEEEEQTPPPQPRTAQPQKREEQTKKENEEDKLTDWNKLACLLCRRQFPNKEVLIKHQQLSDLHKQNLEIHRKIKQSEQELAYLERREREGKFKGRGNDRREKLQSFDSPERKRIKYSRETDSDRKLVDKEDIDTSSKGGCVQQATGWRKGTGLGYGHPGLASSEEAEGRMRGPSVGASGRTSKRQSNETYRDAVRRVMFARYKELD

SEQ ID NO: 740587 - protein, 991 aa, Homo sapiens; identical to SEQ ID NO: 740586

SEQ ID NO: 740588 - protein, 1135 aa, Homo sapiens
MWGDSRPANRTGPFRGSQEERFAPGWNRDYPPPPLKSHAQERHSGNFPGRDSLPFDFQGHSGPPFANVEEHSFSYGARDGPHGDYRGGEGPGHDFRGGDFSSSDFQSRDSSQLDFRGRDIHSGDFRDREGPPMDYRGGDGTSMDYRGREAPHMNYRDRDAHAVDFRGRDAPPSDFRGRGTYDLDFRGRDGSHADFRGRDLSDLDFRAREQSRSDFRNRDVSDLDFRDKDGTQVDFRGRGSGTTDLDFRDRDTPHSDFRGRHRSRTDQDFRGREMGSCMEFKDREMPPVDPNILDYIQPSTQDREHSGMNVNRREESTHDHTIERPAFGIQKGEFEHSETREGETQGVAFEHESPADFQNSQSPVQDQDKSQLSGREEQSSDAGLFKEEGGLDFLGRQDTDYRSMEYRDVDHRLPGSQMFGYGQSKSFPEGKTARDAQRDLQDQDYRTGPSEEKPSRLIRLSGVPEDATKEEILNAFRTPDGMPVKNLQLKEYNTGYDYGYVCVEFSLLEDAIGCMEANQGTLMIQDKEVTLEYVSSLDFWYCKRCKANIGGHRSSCSFCKNPREVTEAKQELITYPQPQKTSIPAPLEKQPNQPLRPADKEPEPRKREEGQESRLGHQKREAERYLPPSRREGPTFRRDRERESWSGETRQDGESKTIMLKRIYRSTPPEVIVEVLEPYVRLTTANVRIIKNRTGPMGHTYGFIDLDSHAEALRVVKILQNLDPPFSIDGKMVAVNLATGKRRSVWTTQPAVLSRNDSGDHSDHMHYYQGKKYFRDRRGGGRNSDWSSDTNRQGQQSSSDCYIYDSATGYYYDPLAGTYYDPNTQQEVYVPQDPGLPEEEEIKEKKPTSQGKSSSKKEMSKRDGKEKKDRGVTRFQENASEGKAPAEDVFKKPLPPTVKKEESPPPPKVVNPLIGLLGEYGGDSDYEEEEEEEQTPPPQPRTAQPQKREEQTKKENEEDKLTDWNKLACLLCRRQFPNKEVLIKHQQLSDLHKQNLEIHRKIKQSEQELAYLERREREGKFKGRGNDRREKLQSFDSPERKRIKYSRETDSDRKLVDKEDIDTSSKGGCVQQATGWRKGTGLGYGHPGLASSEEAEGRMRGPSVGASGRTSKRQSNETYRDAVRRVMFARYKELD

SEQ ID NO: 740589 - protein, 1179 aa, Homo sapiens
MWGDSRPANRTGPFRGSQEERFAPGWNRDYPPPPLKSHAQERHSGNFPGRDSLPFDFQGHSGPPFANVEEHSFSYGARDGPHGDYRGGEGPGHDFRGGDFSSSDFQSRDSSQLDFRGRDIHSGDFRDREGPPMDYRGGDGTSMDYRGREAPHMNYRDRDAHAVDFRGRDAPPSDFRGRGTYDLDFRGRDGSHADFRGRDLSDLDFRAREQSRSDFRNRDVSDLDFRDKDGTQVDFRGRGSGTTDLDFRDRDTPHSDFRGRHRSRTDQDFRGREMGSCMEFKDREMPPVDPNILDYIQPSTQDREHSGMNVNRREESTHDHTIERPAFGIQKGEFEHSETREGETQGVAFEHESPADFQNSQSPVQDQDKSQLSGREEQSSDAGLFKEEGGLDFLGRQDTDYRSMEYRDVDHRLPGSQMFGYGQSKSFPEGKTARDAQRDLQDQDYRTGPSEEKPSRLIRLSGVPEDATKEEILNAFRTPDGMPVKNLQLKEYNTGYDYGYVCVEFSLLEDAIGCMEANQRGKALFDRCMDSSKKLRSNCKEMACITQSPVCGNTEDPRGLENEHSAGASSRVAFSGTLMIQDKEVTLEYVSSLDFWYCKRCKANIGGHRSSCSFCKNPREVTEAKQELITYPQPQKTSIPAPLEKQPNQPLRPADKEPEPRKREEGQESRLGHQKREAERYLPPSRREGPTFRRDRERESWSGETRQDGESKTIMLKRIYRSTPPEVIVEVLEPYVRLTTANVRIIKNRTGPMGHTYGFIDLDSHAEALRVVKILQNLDPPFSIDGKMVAVNLATGKRRNDSGDHSDHMHYYQGKKYFRDRRGGGRNSDWSSDTNRQGQQSSSDCYIYDSATGYYYDPLAGTYYDPNTQQEVYVPQDPGLPEEEEIKEKKPTSQGKSSSKKEMSKRDGKEKKDRGVTRFQENASEGKAPAEDVFKKPLPPTVKKEESPPPPKVVNPLIGLLGEYGGDSDYEEEEEEEQTPPPQPRTAQPQKREEQTKKENEEDKLTDWNKLACLLCRRQFPNKEVLIKHQQLSDLHKQNLEIHRKIKQSEQELAYLERREREGKFKGRGNDRREKLQSFDSPERKRIKYSRETDSDRKLVDKEDIDTSSKGGCVQQATGWRKGTGLGYGHPGLASSEEAEGRMRGPSVGASGRTSKRQSNETYRDAVRRVMFARYKELD

SEQ ID NO: 740590 - protein, 1255 aa, Homo sapiens
MWGDSRPANRTGPFRGSQEERFAPGWNRDYPPPPLKSHAQERHSGNFPGRDSLPFDFQGHSGPPFANVEEHSFSYGARDGPHGDYRGGEGPGHDFRGGDFSSSDFQSRDSSQLDFRGRDIHSGDFRDREGPPMDYRGGDGTSMDYRGREAPHMNYRDRDAHAVDFRGRDAPPSDFRGRGTYDLDFRGRDGSHADFRGRDLSDLDFRAREQSRSDFRNRDVSDLDFRDKDGTQVDFRGRGSGTTDLDFRDRDTPHSDFRGRHRSRTDQDFRGREMGSCMEFKDREMPPVDPNILDYIQPSTQDREHSGMNVNRREESTHDHTIERPAFGIQKGEFEHSETREGETQGVAFEHESPADFQNSQSPVQDQDKSQLSGREEQSSDAGLFKEEGGLDFLGRQDTDYRSMEYRDVDHRLPGSQMFGYGQSKSFPEGKTARDAQRDLQDQDYRTGPSEEKPSRLIRLSGVPEDATKEEILNAFRTPDGMPVKNLQLKEYNTGYDYGYVCVEFSLLEDAIGCMEANQGTLMIQDKEVTLEYVSSLDFWYCKRCKANIGGHRSSCSFCKNPREVTEAKQELITYPQPQKTSIPAPLEKQPNQPLRPADKEPEPRKREEGQESRLGHQKREAERYLPPSRREGPTFRRDRERESWSGETRQDGESKSKVVCQGTYQTVIITMEQDGQCYVRELSAFQYPERSVHDLMTEAIAVCGPPVLLKGIYALQIVNCYMNAVRHDFRFLSIGEEKYAVFICLAFFYRTSLASSIYSKNDSQILGTSKIYLSLPCVALLPFMVDSAIMLKRIYRSTPPEVIVEVLEPYVRLTTANVRIIKNRTGPMGHTYGFIDLDSHAEALRVVKILQNLDPPFSIDGKMVAVNLATGKRRNDSGDHSDHMHYYQGKKYFRDRRGGGRNSDWSSDTNRQGQQSSSDCYIYDSATGYYYDPLAGTYYDPNTQQEVYVPQDPGLPEEEEIKEKKPTSQGKSSSKKEMSKRDGKEKKDRGVTRFQENASEGKAPAEDVFKKPLPPTVKKEESPPPPKVVNPLIGLLGEYGGDSDYEEEEEEEQTPPPQPRTAQPQKREEQTKKENEEDKLTDWNKLACLLCRRQFPNKEVLIKHQQLSDLHKQNLEIHRKIKQSEQELAYLERREREGKFKGRGNDRREKLQSFDSPERKRIKYSRETDSDRKLVDKEDIDTSSKGGCVQQATGWRKGTGLGYGHPGLASSEEAEGRMRGPSVGASGRTSKRQSNETYRDAVRRVMFARYKELD

SEQ ID NO: 740591 - protein, 601 aa, Homo sapiens
MIQDKEVTLEYVSSLDFWYCKRCKANIGGHRSSCSFCKNPREVTEAKQELITYPQPQKTSIPAPLEKQPNQPLRPADKEPEPRKREEGQESRLGHQKREAERYLPPSRREGPTFRRDRERESWSGETRQDGESKTIMLKRIYRSTPPEVIVEVLEPYVRLTTANVRIIKNRTGPMGHTYGFIDLDSHAEALRVVKILQNLDPPFSIDGKMVAVNLATGKRRNDSGDHSDHMHYYQGKKYFRDRRGGGRNSDWSSDTNRQGQQSSSDCYIYDSATGYYYDPLAGTYYDPNTQQEVYVPQDPGLPEEEEIKEKKPTSQGKSSSKKEMSKRDGKEKKDRGVTRFQENASEGKAPAEDVFKKPLPPTVKKEESPPPPKVVNPLIGLLGEYGGDSDYEEEEEEEQTPPPQPRTAQPQKREEQTKKENEEDKLTDWNKLACLLCRRQFPNKEVLIKHQQLSDLHKQNLEIHRKIKQSEQELAYLERREREGKFKGRGNDRREKLQSFDSPERKRIKYSRETDSDRKLVDKEDIDTSSKGGCVQQATGWRKGTGLGYGHPGLASSEEAEGRMRGPSVGASGRTSKRQSNETYRDAVRRVMFARYKELD

SEQ ID NO: 740592 - protein, 601 aa, Homo sapiens; identical to SEQ ID NO: 740591

SEQ ID NO: 740593 - protein, 553 aa, Homo sapiens
MGKAMTGRRDPPGRPADKEPEPRKREEGQESRLGHQKREAERYLPPSRREGPTFRRDRERESWSGETRQDGESKTIMLKRIYRSTPPEVIVEVLEPYVRLTTANVRIIKNRTGPMGHTYGFIDLDSHAEALRVVKILQNLDPPFSIDGKMVAVNLATGKRRSVWTTQPAVLSRNDSGDHSDHMHYYQGKKYFRDRRGGGRNSDWSSDTNRQGQQSSSDCYIYDSATGYYYDPLAGTYYDPNTQQEVYVPQDPGLPEEEEIKEKKPTSQGKSSSKKEMSKRDGKEKKDRGVTRFQENASEGKAPAEDVFKKPLPPTVKKEESPPPPKVVNPLIGLLGEYGGDSDYEEEEEEEQTPPPQPRTAQPQKREEQTKKENEEDKLTDWNKLACLLCRRQFPNKEVLIKHQQLSDLHKQNLEIHRKIKQSEQELAYLERREREGKFKGRGNDRREKLQSFDSPERKRIKYSRETDSDRKLVDKEDIDTSSKGGCVQQATGWRKGTGLGYGHPGLASSEEAEGRMRGPSVGASGRTSKRQSNETYRDAVRRVMFARYKELD

SEQ ID NO: 740594 - protein, 277 aa, Homo sapiens [sequence omitted]

SEQ ID NO: 740595 - protein, 1102 aa, Homo sapiens
MWGDSRPANRTGPFRGSQEERFAPGWNRDYPPPPLKSHAQERHSGNFPGRDSLPFDFQGHSGPPFANVEEHSFSYGARDGPHGDYRGGEGPGHDFRGGDFSSSDFQSRDSSQLDFRGRDIHSGDFRDREGPPMDYRGGDGTSMDYRGREAPHMNYRDRDAHAVDFRGRDAPPSDFRGRGTYDLDFRGRDGSHADFRGRDLSDLDFRAREQSRSDFRNRDVSDLDFRDKDGTQVDFRGRGSGTTDLDFRDRDTPHSDFRGRHRSRTDQDFRGREMGSCMEFKDREMPPVDPNILDYIQPSTQDREHSGMNVNRREESTHDHTIERPAFGIQKGEFEHSETREGETQGVAFEHESPADFQNSQSPVQDQDKSQLSGREEQSSDAGLFKEEGGLDFLGRQDTDYRSMEYRDVDHRLPGSQMFGYGQSKSFPEGKTARDAQRDLQDQDYRTGPSEEKPSRLIRLSGVPEDATKEEILNAFRTPDGMPVKNLQLKEYNTGYDYGYVCVEFSLLEDAIGCMEANQGTLMIQDKEVTLEYVSSLDFWYCKRCKANIGGHRSSCSFCKNPREVTEAKQELITYPQPQKTSIPAPLEKQPNQPLRPADKEPEPRKREEGQESRLGHQKREAERYLPPSRREGPTFRRDRERESWSGETRQDGESKTIMLKRIYRSTPPEVIVEVLEPYVRLTTANVRIIKNRTGPMGHTYGFIDLDSHAEALRVVKILQNLDPPFSIDGKMVAVNLATGKRRNDSGDHSDHMHYYQGKKYFRDRRGGGRNSDWSSDTNRQGQQSSSDCYIYDSATGYYYDPLAGTYYDPNTQQEVYVPQDPGLPEEEEIKEKKPTSQGKSSSKKEMSKRDGKEKKDRGVTRFQENASEGKAPAEDVFKKPLPPTVKKEESPPPPKVVNPLIGLLGEYGGDSDYEEEEEEEQTPPPQPRTAQPQKREEQTKKENEEDKLTDWNKLACLLCRRQFPNKEVLIKHQQLSDLHKQNLEIHRKIKQSEQELAYLERREREGKFKGRGNDRRDDRKLVDKEDIDTSSKGGCVQQATGWRKGTGLGYGHPGLASSEEAEGRMRGPSVGASGRTSKRQSNETYRDAVRRVMFARYKELD

SEQ ID NO: 740596 - protein, 981 aa, Homo sapiens
MWGDSRPANRTGPFRGSQEERFAPGWNRDYPPPPLKSHAQERHSGNFPGRDSLPFDFQGHSGPPFANVEEHSFSYGARDGPHGDYRGGEGPGHDFRGGDFSSSDFQSRDSSQLDFRGRDIHSGDFRDREGPPMDYRGGDGTSMDYRGREAPHMNYRDRDAHAVDFRGRDAPPSDFRGRGTYDLDFRGRDGSHADFRGRDLSDLDFRAREQSRSDFRNRDVSDLDFRDKDGTQVDFRGRGSGTTDLDFRDRDTPHSDFRGRHRSRTDQDFRGREMGSCMEFKDREMPPVDPNILDYIQPSTQDREHSGMNVNRREESTHDHTIERPAFGIQKGEFEHSETREGETQGVAFEHESPADFQNSQSPVQDQDKSQLSGREEQSSDAGLFKEEGGLDFLGRQDTDYRSMEYRDVDHRLPGSQMFGYGQSKSFPEGKTARDAQRDLQDQDYRTGPSEEKPSRLIRLSGVPEDATKEEILNAFRTPDGMPVKNLQLKEYNTGYDYGYVCVEFSLLEDAIGCMEANQGTLMIQDKEVTLEYVSSLDFWYCKRCKANIGGHRSSCSFCKNPREVTEAKQELITYPQPQKTSIPAPLEKQPNQPLRPADKEPEPRKREEGQESRLGHQKREAERYLPPSRREGPTFRRDRERESWSGETRQDGESKTIMLKRIYRSTPPEVIVEVLEPYVRLTTANVRIIKNRTGPMGHTYGFIDLDSHAEALRVVKILQNLDPPFSIDGKMVAVNLATGKRRNDSGDHSDHMHYYQGKKYFRDRRGGGRNSDWSSDTNRQGQQSSSDCYIYDSATGYYYDPLAGTYYDPNTQQEVYVPQDPGLPEEEEIKEKKPTSQGKSSSKKEMSKRDGKEKKDRGVTRFQENASEGKAPAEDVFKKPLPPTVKKEESPPPPKVVNPLIGLLGEYGGDSDYEEEEEEEQTPPPQPRTAQPQKREEQTKKENEEDKLTDWNKLACLLCRRQFPNKEVLIKHQQLSDLHK

SEQ ID NO: 740597 - protein, 719 aa, Homo sapiens
MWGDSRPANRTGPFRGSQEERFAPGWNRDYPPPPLKSHAQERHSGNFPGRDSLPFDFQGHSGPPFANVEEHSFSYGARDGPHGDYRGGEGPGHDFRGGDFSSSDFQSRDSSQLDFRGRDIHSGDFRDREGPPMDYRGGDGTSMDYRGREAPHMNYRDRDAHAVDFRGRDAPPSDFRGRGTYDLDFRGRDGSHADFRGRDLSDLDFRAREQSRSDFRNRDVSDLDFRDKDGTQVDFRGRGSGTTDLDFRDRDTPHSDFRGRHRSRTDQDFRGREMGSCMEFKDREMPPVDPNILDYIQPSTQDREHSGMNVNRREESTHDHTIERPAFGIQKGEFEHSETREGETQGVAFEHESPADFQNSQSPVQDQDKSQLSGREEQSSDAGLFKEEGGLDFLGRQDTDYRSMEYRDVDHRLPGSQMFGYGQSKSFPEGKTARDAQRDLQDQDYRTGPSEEKPSRLIRLSGVPEDATKEEILNAFRTPDGMPVKNLQLKEYNTGYDYGYVCVEFSLLEDAIGCMEANQGTLMIQDKEVTLEYVSSLDFWYCKRCKANIGGHRSSCSFCKNPREVTEAKQELITYPQPQKTSIPAPLEKQPNQPLRPADKEPEPRKREEGQESRLGHQKREAERYLPPSRREGPTFRRDRERESWSGETRQDGESKTIMLKRIYRSTPPEVIVEVLEPYVRLTTANVRIIKNRTGPMGHTYGFIDLDSHAVSFLHLGLA

SEQ ID NO: 740598 - protein, 658 aa, Homo sapiens
MWGDSRPANRTGPFRGSQEERFAPGWNRDYPPPPLKSHAQERHSGNFPGRDSLPFDFQGHSGPPFANVEEHSFSYGARDGPHGDYRGGEGPGHDFRGGDFSSSDFQSRDSSQLDFRGRDIHSGDFRDREGPPMDYRGGDGTSMDYRGREAPHMNYRDRDAHAVDFRGRDAPPSDFRGRGTYDLDFRGRDGSHADFRGRDLSDLDFRAREQSRSDFRNRDVSDLDFRDKDGTQVDFRGRGSGTTDLDFRDRDTPHSDFRGRHRSRTDQDFRGREMGSCMEFKDREMPPVDPNILDYIQPSTQDREHSGMNVNRREESTHDHTIERPAFGIQKGEFEHSETREGETQGVAFEHESPADFQNSQSPVQDQDKSQLSGREEQSSDAGLFKEEGGLDFLGRQDTDYRSMEYRDVDHRLPGSQMFGYGQSKSFPEGKTARDAQRDLQDQDYRTGPSEEKPSRLIRLSGVPEDATKEEILNAFRTPDGMPVKNLQLKEYNTGYDYGYVCVEFSLLEDAIGCMEANQGTLMIQDKEVTLEYVSSLDFWYCKRCKANIGGHRSSCSFCKNPREVTEAKQELITYPQPQKTSIPAPLEKQPNQPLRPADKEPEPRKREEGQESRLGHQKREAERYLPPSRREGPTFRRDRERESWSGETRQDGESKSK

SEQ ID NO: 740599 - protein, 1123 aa, Homo sapiens
MWGDSRPANRTGPFRGSQEERFAPGWNRDYPPPPLKSHAQERHSGNFPGRDSLPFDFQGHSGPPFANVEEHSFSYGARDGPHGDYRGGEGPGHDFRGGDFSSSDFQSRDSSQLDFRGRDIHSGDFRDREGPPMDYRGGDGTSMDYRGREAPHMNYRDRDAHAVDFRGRDAPPSDFRGRGTYDLDFRGRDGSHADFRGRDLSDLDFRAREQSRSDFRNRDVSDLDFRDKDGTQVDFRGRGSGTTDLDFRDRDTPHSDFRGRHRSRTDQDFRGREMGSCMEFKDREMPPVDPNILDYIQPSTQDREHSGMNVNRREESTHDHTIERPAFGIQKGEFEHSETREGETQGVAFEHESPADFQNSQSPVQDQDKSQLSGREEQSSDAGLFKEEGGLDFLGRQDTDYRSMEYRDVDHRLPGSQMFGYGQSKSFPEGKTARDAQRDLQDQDYRTGPSEEKPSRLIRLSGVPEDATKEEILNAFRTPDGMPVKNLQLKEYNTGYDYGYVCVEFSLLEDAIGCMEANQGTLMIQDKEVTLEYVSSLDFWYCKRCKANIGGHRSSCSFCKNPREVTEAKQELITYPQPQKTSIPAPLEKQPNQPLRPADKEPEPRKREEGQESRLGHQKREAERYLPPSRREGPTFRRDRERESWSGETRQDGESKTIMLKRIYRSTPPEVIVEVLEPYVRLTTANVRIIKNRTGPMGHTYGFIDLDSHAEALRVVKILQNLDPPFSIDGKMVAVNLATGKRRNDSGDHSDHMHYYQGKKYFRDRRGGGRNSDWSSDTNRQGQQSSSDCYIYDSATGYYYDPLAGTYYDPNTQQEVYVPQDPGLPEEEEIKEKKPTSQGKSSSKKEMSKRDGKEKKDRGVTRFQENASEGKAPAEDVFKKPLPPTVKKEESPPPPKVVNPLIGLLGEYGGDSDYEEEEEEEQTPPPQPRTAQPQKREEQTKKENEEDKLTDWNKLACLLCRRQFPNKEVLIKHQQLSDLHKQNLEIHRKIKQSEQELAYLERREREGKFKGRGNDRREKLQSFDSPERKRIKYSRETDSDRKLVDKEDIDTSSKGGCVQQATGWRKGTGLGYGHPGLASSEEAEGRMRGPSVGASGRTSKRQSNETYRDAVRRVMFARYKELD

SEQ ID NO: 740600 - protein, 991 aa, Homo sapiens; identical to SEQ ID NO: 740586

SEQ ID NO: 740601 - protein, 971 aa, Homo sapiens [sequence omitted]

SEQ ID NO: 740602 - protein, 601 aa, Homo sapiens; identical to SEQ ID NO: 740591

SEQ ID NO: 740603 - protein, 277 aa, Homo sapiens [sequence omitted]

SEQ ID NO: 740604 - protein, 471 aa, Homo sapiens
MVDSAIMLKRIYRSTPPEVIVEVLEPYVRLTTANVRIIKNRTGPMGHTYGFIDLDSHAEALRVVKILQNLDPPFSIDGKMVAVNLATGKRRNDSGDHSDHMHYYQGKKYFRDRRGGGRNSDWSSDTNRQGQQSSSDCYIYDSATGYYYDPLAGTYYDPNTQQEVYVPQDPGLPEEEEIKEKKPTSQGKSSSKKEMSKRDGKEKKDRGVTRFQENASEGKAPAEDVFKKPLPPTVKKEESPPPPKVVNPLIGLLGEYGGDSDYEEEEEEEQTPPPQPRTAQPQKREEQTKKENEEDKLTDWNKLACLLCRRQFPNKEVLIKHQQLSDLHKQNLEIHRKIKQSEQELAYLERREREGKFKGRGNDRREKLQSFDSPERKRIKYSRETDSDRKLVDKEDIDTSSKGGCVQQATGWRKGTGLGYGHPGLASSEEAEGRMRGPSVGASGRTSKRQSNETYRDAVRRVMFARYKELD

SEQ ID NO: 740605 - protein, 392 aa, Homo sapiens
LEDPCTGEIARRNDSGDHSDHMHYYQGKKYFRDRRGGGRNSDWSSDTNRQGQQSSSDCYIYDSATGYYYDPLAGTYYDPNTQQEVYVPQDPGLPEEEEIKEKKPTSQGKSSSKKEMSKRDGKEKKDRGVTRFQENASEGKAPAEDVFKKPLPPTVKKEESPPPPKVVNPLIGLLGEYGGDSDYEEEEEEEQTPPPQPRTAQPQKREEQTKKENEEDKLTDWNKLACLLCRRQFPNKEVLIKHQQLSDLHKQNLEIHRKIKQSEQELAYLERREREGKFKGRGNDRREKLQSFDSPERKRIKYSRETDSDRKLVDKEDIDTSSKGGCVQQATGWRKGTGLGYGHPGLASSEEAEGRMRGPSVGASGRTSKRQSNETYRDAVRRVMFARYKELD

SEQ ID NO: 740606 - protein, 1132 aa, Homo sapiens
MWGDSRPANRTGPFRGSQEERFAPGWNRDYPPPPLKSHAQERHSGNFPGRDSLPFDFQGHSGPPFANVEEHSFSYGARDGPHGDYRGGEGPGHDFRGGDFSSSDFQSRDSSQLDFRGRDIHSGDFRDREGPPMDYRGGDGTSMDYRGREAPHMNYRDRDAHAVDFRGRDAPPSDFRGRGTYDLDFRGRDGSHADFRGRDLSDLDFRAREQSRSDFRNRDVSDLDFRDKDGTQVDFRGRGSGTTDLDFRDRDTPHSDFRGRHRSRTDQDFRGREMGSCMEFKDREMPPVDPNILDYIQPSTQDREHSGMNVNRREESTHDHTIERPAFGIQKGEFEHSETREGETQGVAFEHESPADFQNSQSPVQDQDKSQLSGREEQSSDAGLFKEEGGLDFLGRQDTDYRSMEYRDVDHRLPGSQMFGYGQSKSFPEGKTARDAQRDLQDQDYRTGPSEEKPSRLIRLSGVPEDATKEEILNAFRTPDGMPVKNLQLKEYNTGYDYGYVCVEFSLLEDAIGCMEANQGTLMIQDKEVTLEYVSSLDFWYCKRCKANIGGHRSSCSFCKNPREVTEAKQELITYPQPQKTSIPAPLEKQPNQPLRPADKEPEPRKREEGQESRLGHQKREAERYLPPSRREGPTFRRDRERESWSGETRQDGESKTIMLKRIYRSTPPEVIVEVLEPYVRLTTANVRIIKNRTGPMGHTYGFIDLDSHAEALRVVKILQNLDPPFSIDGKMVAVNLATGKRRNDSGDHSDHMHYYQGKKYFRDRRGGGRNSDWSSDTNRQGQQSSSDCYIYDSATGYYYDPLAGTYYDPNTQQEVYVPQDPGLPEEEEIKEKKPTSQGKSSSKKEMSKRDGKEKKDRGVTRFQENASEGKAPAEDVFKKPLPPTVKKEESPPPPKVVNPLIGLLGEYGGDSDYEEEEEEEQTPPPQPRTAQPQKREEQTKKENEEDKLTDWNKLACLLCRRQFPNKEVLIKHQQLSDLHKQNLEIHRKIKQSEQELAYLERREREGKFKGRGNDRREKLQSFDSPERKRIKYSRETDRKLMVSASFADRKLVDKEDIDTSSKGGCVQQATGWRKGTGLGYGHPGLASSEEAEGRMRGPSVGASGRTSKRQSNETYRDAVRRVMFARYKELD

SEQ ID NO: 740607 - protein, 1017 aa, Homo sapiens
MWGDSRPANRTGPFRGSQEERFAPGWNRDYPPPPLKSHAQERHSGNFPGRDSLPFDFQGHSGPPFANVEEHSFSYGARDGPHGDYRGGEGPGHDFRGGDFSSSDFQSRDSSQLDFRGRDIHSGDFRDREGPPMDYRGGDGTSMDYRGREAPHMNYRDRDAHAVDFRGRDAPPSDFRGRGTYDLDFRGRDGSHADFRGRDLSDLDFRAREQSRSDFRNRDVSDLDFRDKDGTQVDFRGRGSGTTDLDFRDRDTPHSDFRGRHRSRTDQDFRGREMGSCMEFKDREMPPVDPNILDYIQPSTQDREHSGMNVNRREESTHDHTIERPAFGIQKGEFEHSETREGETQGVAFEHESPADFQNSQSPVQDQDKSQLSGREEQSSDAGLFKEEGGLDFLGRQDTDYRSMEYRDVDHRLPGSQMFGYGQSKSFPEGKTARDAQRDLQDQDYRTGPSEEKPSRLIRLSGVPEDATKEEILNAFRTPDGMPVKNLQLKEYNTGYDYGYVCVEFSLLEDAIGCMEANQGTLMIQDKEVTLEYVSSLDFWYCKRCKANIGGHRSSCSFCKNPREVTEAKQELITYPQPQKTSIPAPLEKQPNQPLRPADKEPEPRKREEGQESRLGHQKREAERYLPPSRREGPTFRRDRERESWSGETRQDGESKTIMLKRIYRSTPPEVIVEVLEPYVRLTTANVRIIKNRTGPMGHTYGFIDLDSHAEALRVVKILQNLDPPFSIDGKMVAVNLATGKRRNDSGDHSDHMHYYQGKKYFRDRRGGGRNSDWSSDTNRQGQQSSSDCYIYDSATGYYYDPLAGTYYDPNTQQEVYVPQDPGLPEEEEIKEKKPTSQGKSSSKKEMSKRDGKEKKDRGVTRFQENASEGKAPAEDVFKKPLPPTVKKEESPPPPKVVNPLIGLLGEYGGDSDYEEEEEEEQTPPPQPRTAQPQKREEQTKKENEEDKLTDWNKLACLLCRRQFPNKEVLIKHQQLSDLHKQNLEIHRKIKQSEQELAYLERREREEVNMRDRYSLD

SEQ ID NO: 740608 - protein, 695 aa, Homo sapiens
MWGDSRPANRTGPFRGSQEERFAPGWNRDYPPPPLKSHAQERHSGNFPGRDSLPFDFQGHSGPPFANVEEHSFSYGARDGPHGDYRGGEGPGHDFRGGDFSSSDFQSRDSSQLDFRGRDIHSGDFRDREGPPMDYRGGDGTSMDYRGREAPHMNYRDRDAHAVDFRGRDAPPSDFRGRGTYDLDFRGRDGSHADFRGRDLSDLDFRAREQSRSDFRNRDVSDLDFRDKDGTQVDFRGRGSGTTDLDFRDRDTPHSDFRGRHRSRTDQDFRGREMGSCMEFKDREMPPVDPNILDYIQPSTQDREHSGMNVNRREESTHDHTIERPAFGIQKGEFEHSETREGETQGVAFEHESPADFQNSQSPVQDQDKSQLSGREEQSSDAGLFKEEGGLDFLGRQDTDYRSMEYRDVDHRLPGSQMFGYGQSKSFPEGKTARDAQRDLQDQDYRTGPSEEKPSRLIRLSGVPEDATKEEILNAFRTPDGMPVKNLQLKEYNTGYDYGYVCVEFSLLEDAIGCMEANQGTLMIQDKEVTLEYVSSLDFWYCKRCKANIGGHRSSCSFCKNPREVTEAKQELITYPQPQKTSIPAPLEKQPNQPLRPADKEPEPRKREEGQESRLGHQKREAERYLPPSRREGPTFRRDRERESWSGETRQDGESKTIMLKRIYRSTPPEVIVEVLEPYVRLTTANLLTGDPYES

SEQ ID NO: 740609 - protein, 504 aa, Homo sapiens
CGGAKFEASGGAGARLRSRTCSSFFGCLGPLSPAIMPIRALCTICSDFFDHSRDVAAIHCGHTFHLQCLIQWFETAPSRTCPQCRIQVGKRTIINKLFFDLAQEEENVLDAEFLKNELDNVRAQLSQKDKEKRDSQVIIDTLRDTLEERNATVVSLQQALGKAEMLCSTLKKQMKYLEQQQDETKQAQEEARRLRSKMKTMEQIELLLQSQRPEVEEMIRDMGVGQSAVEQLAVYCVSLKKEYENLKEARKASGEVADKLRKDLFSSRSKLQTVYSELDQAKLELKSAQKDLQSADKEIMSLKKKLTMLQETLNLPPVASETVDRLVLESPAPVEVNLKLRRPSFRDDIDLNATFDVDTPPARPSSSQHGYYEKLCLEKSHSPIQDVPKKICKGPRKESQLSLGGQSCAGEPDEELVGAFPIFVRNAILGQKQPKRPRSESSCSKDVVRTGFDGLGGRTKFIQPTDTVMIRPLPVKPKTKVKQRVRVKTVPSLFQAKLDTFLWS

SEQ ID NO: 740610 - protein, 314 aa, Homo sapiens
CGGAKFEASGGAGARLRSRTCSSFFGCLGPLSPAIMPIRALCTICSDFFDHSRDVAAIHCGHTFHLQCLIQWFETAPSRTCPQCRIQVGKRTIINKLFFDLAQEEENVLDAEFLKLQTVYSELDQAKLELKSAQKDLQSADKEIMSLKKKLTMLQETLNLPPVASETVDRLVLESPAPVEVNLKLRRPSFRDDIDLNATFDVDTPPARPSSSQHGYYEKLCLEKSHSPIQDVPKKICKGPRKESQLSLGGQSCAGEPDEELVGAFPIFVRNAILGQKQPKRPRSESSCSKDVVRTGFDGLGGRTKFIQPVSFFC

SEQ ID NO: 740611 - protein, 498 aa, Homo sapiens
PGKKFPDGRLRSRTCSSFFGCLGPLSPAIMPIRALCTICSDFFDHSRDVAAIHCGHTFHLQCLIQWFETAPSRTCPQCRIQVGKRTIINKLFFDLAQEEENVLDAEFLKNELDNVRAQLSQKDKEKRDSQVIIDTLRDTLEERNATVVSLQQALGKAEMLCSTLKKQMKYLEQQQDETKQAQEEARRLRSKMKTMEQIELLLQSQRPEVEEMIRDMGVGQSAVEQLAVYCVSLKKEYENLKEARKASGEVADKLRKDLFSSRSKLQTVYSELDQAKLELKSAQKDLQSADKEIMSLKKKLTMLQETLNLPPVASETVDRLVLESPAPVEVNLKLRRPSFRDDIDLNATFDVDTPPARPSSSQHGYYEKLCLEKSHSPIQDVPKKICKGPRKESQLSLGGQSCAGEPDEELVGAFPIFVRNAILGQKQPKRPRSESSCSKDVVRTGFDGLGGRTKFIQPTDTVMIRPLPVKPKTKVKQRVRVKTVPSLFQAKLDTFLWS

SEQ ID NO: 740612 - protein, 482 aa, Homo sapiens
PGKKFPDGRLRSRTCSSFFGCLGPLSPAIMPIRALCTICSDFFDHSRDVAAIHCGHTFHLQCLIQWFETAPSRTCPQCRIQEEENVLDAEFLKNELDNVRAQLSQKDKEKRDSQVIIDTLRDTLEERNATVVSLQQALGKAEMLCSTLKKQMKYLEQQQDETKQAQEEARRLRSKMKTMEQIELLLQSQRPEVEEMIRDMGVGQSAVEQLAVYCVSLKKEYENLKEARKASGEVADKLRKDLFSSRSKLQTVYSELDQAKLELKSAQKDLQSADKEIMSLKKKLTMLQETLNLPPVASETVDRLVLESPAPVEVNLKLRRPSFRDDIDLNATFDVDTPPARPSSSQHGYYEKLCLEKSHSPIQDVPKKICKGPRKESQLSLGGQSCAGEPDEELVGAFPIFVRNAILGQKQPKRPRSESSCSKDVVRTGFDGLGGRTKFIQPTDTVMIRPLPVKPKTKVKQRVRVKTVPSLFQAKLDTFLWS

SEQ ID NO: 740613 - protein, 534 aa, Homo sapiens
CGGAKFEASGGAGARLRSRTCSSFFGCLGPLSPAIMPIRALCTICSDFFDHSRDVAAIHCGHTFHLQCLIQWFETAPSRTCPQCRIQVGKRTIINKLFFDLAQEEENVLDAEFLKNELDNVRAQLSQKEDEALNPRAQVLLLMDGQAFPFPPPSTPAPDKEKRDSQVIIDTLRDTLEERNATVVSLQQALGKAEMLCSTLKKQMKYLEQQQDETKQAQEEARRLRSKMKTMEQIELLLQSQRPEVEEMIRDMGVGQSAVEQLAVYCVSLKKEYENLKEARKASGEVADKLRKDLFSSRSKLQTVYSELDQAKLELKSAQKDLQSADKEIMSLKKKLTMLQETLNLPPVASETVDRLVLESPAPVEVNLKLRRPSFRDDIDLNATFDVDTPPARPSSSQHGYYEKLCLEKSHSPIQDVPKKICKGPRKESQLSLGGQSCAGEPDEELVGAFPIFVRNAILGQKQPKRPRSESSCSKDVVRTGFDGLGGRTKFIQPTDTVMIRPLPVKPKTKVKQRVRVKTVPSLFQAKLDTFLWS

SEQ ID NO: 740614 - protein, 337 aa, Homo sapiens
PGSGGVERSLAGVGTQAPPRRPGGEMAAGQNGHEEWVGSAYLFVESSLDKVVLSDAYAHPQQKVAVYRALQAALAESGGSPDVLQMLKIHRSDPQLIVQLRFCGRQPCGRFLRAYREGALRAALQRSLAAALAQHSVPLQLELRAGAERLDALLADEERCLSCILAQQPDRLRDEELAELEDALRNLKCGSGARGGDGEVASAPLQPPVPSLSEVKPPPPPPPAQTFLFQGQPVVNRPLSLKDQQTFARSVGLKWRKVGRSLQRGCRALRDPALDSLAYEYEREGLYEQAFQLLRRFVQAEGRRATLQRLVEALEENELTSLAEDLLGLTDPNGGLA

SEQ ID NO: 740615 - protein, 252 aa, Homo sapiens
MLKIHRSDPQLIVQLRFCGRQPCGRFLRAYREGALRAALQRSLAAALAQHSVPLQLELRAGAERLDALLADEERCLSCILAQQPDRLRDEELAELEDALRNLKCGSGARGGDGEVASAPLQPPVPSLSEVKPPPPPPPAQTFLFQGQPVVNRPLSLKDQQTFARSVGLKWRKVGRSLQRGCRALRDPALDSLAYEYEREGLYEQAFQLLRRFVQAEGRRATLQRLVEALEENELTSLAEDLLGLTDPNGGLA

SEQ ID NO: 740616 - protein, 342 aa, Homo sapiens
  misc_feature (8)..(8): Xaa can be any naturally occurring amino acid
MLSEAGVXLARELEPGFLWNPVPAEAAGGEMAAGQNGHEEWVGSAYLFVESSLDKVVLSDAYAHPQQKVAVYRALQAALAESGGSPDVLQMLKIHRSDPQLIVQLRFCGRQPCGRFLRAYREGALRAALQRSLAAALAQHSVPLQLELRAGAERLDALLADEERCLSCILAQQPDRLRDEELAELEDALRNLKCGSGARGGDGEVASAPLQPPVPSLSEVKPPPPPPPAQTFLFQGQPVVNRPLSLKDQQTFARSVGLKWRKVGRSLQRGCRALRDPALDSLAYEYEREGLYEQAFQLLRRFVQAEGRRATLQRLVEALEENELTSLAEDLLGLTDPNGGLA

SEQ ID NO: 740617 - protein, 129 aa, Homo sapiens
MAQGGALTAARLPGAAGPGAGLAGLRVRARGTVRAGLPAAAALRAGRGPPRHAAAPGGGTRGERAHQPGRGLAGPDRSQWRPGLDQGCSQLLENLDGLRVPSAAIAEPLSIHGTLKLHLAYLLDLLGQS

SEQ ID NO: 740618 - protein, 129 aa, Homo sapiens; identical to SEQ ID NO: 740617

SEQ ID NO: 740619 - protein, 385 aa, Homo sapiens
  misc_feature (361)..(361): Xaa can be any naturally occurring amino acid
  misc_feature (380)..(380): Xaa can be any naturally occurring amino acid
RLLTFNPTYCALKELNDEERKIKNVHMRGLDKETCLIPAVQEPKFPQNYNLVTENLALTEYTLYLGFHRLHDQMVKINQNLHRLQVAWRDAQQSSSPAADNLREQFERLMTIYLSTKTAMTEPQMLQNCLNLQVSMAVLLVQLAIGNEGSQPIELTFPLPDGYSSLAYVPEFFADNLGDFLIFLRRFADDILETSADSLEHVLHFITIFTGSIERMKNPHLRAKLAEVLEAVMPHLDQTPNPLVSSVFHRKRVFCNFQYAPQLAEALIKVFVDIEFTGDPHQFEQKFNYRRPMYPILRYMWGTDTYRESIKDLADYASKNLEAMNPPLFLRFLNLLMNDAIFLLDEAIQVFEQDKRFSKLXRIEVNGIVCLQKPAEKRRXGLQMF

SEQ ID NO: 740620 - protein, 101 aa, Homo sapiens
RQLCAVGTINIITPTLKWKKPRQEVVGSGAEPCRSASGPVGLLFLANSEQITRQSQATVNVMQTQAGRHHCLHWSLPCWASLSSLTRGSVVPPSSWGLRVS

SEQ ID NO: 740621 - protein, 146 aa, Homo sapiens
SWVKFTRRLLKCLLRGNLCLSLSLSLSLSLSLSLSLSLSLSLSQCISLLSFTFPFFLSKNNVLVEALVTLINQNLPFPVSLFLRPFHPHYLLLPRNMTDHQDAARREDLSQKPTSKMGGRCGLRSSAMHPKPLTFPLWEVHWDDRN

SEQ ID NO: 740622 - protein, 95 aa, Homo sapiens
MEIIWVYGTVCGWPYWVVFLHCLRDRWRGTAAHGPRLWGFWKVPRRAGAMPGGVQQMPGPAPCANLAWEAQAQLFQGSFISFLVHFKVSVSCSEQ

SEQ ID NO: 740623 - protein, 141 aa, Homo sapiens
HPQLLTEELSQIPWGWKGQCDTVHPHLLTEELSDSVGLERVSVIPCTHTYSPRSSRIPWGWKGQCDTVHPHLLTEELLDSVFSSLPMCRKSTASMRTAGTHPPTRTPKHTRMHVHVHTHTLVHAHVHAHTHRATSCSSHLF

SEQ ID NO: 740624 - protein, 112 aa, Homo sapiens [sequence omitted]

SEQ ID NO: 740625 - protein, 129 aa, Homo sapiens
LFPASLSPSSLLGNSPPSWLRHNSESKVSAVSSPSATKTLSTGIGKLDPGHKEMAEESELLKNKMQAPPLSRCPESQKCQHQLRLHHWKPSVRHQVKRCSPAVLRSAMPPADCPAVLEATTATREETVM

SEQ ID NO: 740626 - protein, 126 aa, Homo sapiens
LESSQGQAVPVGLALTLGAWPGSQRSLPRMAASAPALWSPMLGEEGKAERMAEEDLRGPGRMQTSLPPARISLLGSLWATAFCKVVLRLHLRSGRGRVQWLMPVIPALWEAEAGGSPEVKSLRPAW

SEQ ID NO: 740627 - protein, 577 aa, Homo sapiens
MCKEQKATKKSKVGFLDPLATDNQKECEAWPDLRTSEEDSKSCSGALSTALEELAKVSEELCSFQEEIRKRSNHRRMKSDSFLQEMPNVTNIPHGDPMINNDQCILPISLEKEKQKNRKNLSCTNVLQSNSTKKCGIDTIDLKRNETPPVPPPRSTSRNFPSSDSEQAYERWKERLDHNSWVPHEGRSKRNYNPHFPLRQQEMSMLYPNEGKTSKDGIIFSSLVPEVKIDSKPPSNEDVGLSMWSCDIGIGAKRSPSTSWFQKTCSTPSNPKYEMVIPDHPAKSHPDLHVSNDCSSSVAESSSPLRNFSCGFERTTRNEKLAAKTDEFNRTVFRTDRNCQAIQQNHSCSKSSEDLKPCDTSSTHTGSISQSNDVSGIWKTNAHMPVPMENVPDNPTKKSTTGLVRQMQGHLSPRSYRNMLHEHDWRPSNLSGRPRSADPRSNYGVVEKLLKTYETATESALQNSKCFQDNWTKCNSDVSGGATLSQHLEMLQMEQQFQQKTAVWGGQEVKQGIDPKKITEESMSVNASHGKGFSRPARPANRRLPSRWASRSPSAPPALRRTTHNYTISLRSEALMV

SEQ ID NO: 740628 - protein, 261 aa, Homo sapiens
SGGHDSARHHDNAKTEALQEELKAARLQINELSGKVMQLQYENRVLMSNMQRYDLASHLGIRGSPRDSDAESDAGKKESDDDSRPPHRKREGPIGGESDSEEVRNIRCLTPTRSFYPAPGPWPKSFSDRQQMKDIRSEAERLGKTIDRLIADTSTIITEARIYVANGDLFGLMDEEDDGSRIREHELLYRINAQMKAFRKELQTFIDRLEVPKSADDRGAEEPISVSQVQFCLLRATAVARLARGAASLGGVSAPGLPRPA

SEQ ID NO: 740629 - protein, 1066 aa, Homo sapiens
SGGHDSARHHDNAKTEALQEELKAARLQINELSGKVMQLQYENRVLMSNMQRYDLASHLGIRGSPRDSDAESDAGKKESDDDSRPPHRKREGPIGGESDSEEVRNIRCLTPTRSFYPAPGPWPKSFSDRQQMKDIRSEAERLGKTIDRLIADTSTIITEARIYVANGDLFGLMDEEDDGSRIREHELLYRINAQMKAFRKELQTFIDRLEVPKSADDRGAEEPISVSQMFQPIILLILILVLFSSLSYTTIFKLVFLFTLFFVLKIFHHLPFIVVFSVCLFCSPFKTRSKRSIISVVTNAIKTLKTAYFFKKIQLILPRPNSIRSPNTKIFQALFQRQVRLLQIKQLQASKKQLRGGREEQKHFFADTYTVAMDLHKQWENTETNWHKEKMELLDQFDNERKEWESQWKIMQKKIEELCREVKLWRKININERAKIIDLYHEKTIPEKVIESSPNYPDLGQSEFIRTNHKDGLRKENKREQSLVSGGNQMCKEQKATKKSKVGFLDPLATDNQKECEAWPDLRTSEEDSKSCSGALSTALEELAKVSEELCSFQEEIRKRSNHRRMKSDSFLQEMPNVTNIPHGDPMINNDQCILPISLEKEKQKNRKNLSCTNVLQSNSTKKCGIDTIDLKRNETPPVPPPRSTSRNFPSSDSEQAYERWKERLDHNSWVPHEGRSKRNYNPHFPLRQQEMSMLYPNEGKTSKDGIIFSSLVPEVKIDSKPPSNEDVGLSMWSCDIGIGAKRSPSTSWFQKTCSTPSNPKYEMVIPDHPAKSHPDLHVSNDCSSSVAESSSPLRNFSCGFERTTRNEKLAAKTDEFNRTVFRTDRNCQAIQQNHSCSKSSEDLKPCDTSSTHTGSISQSNDVSGIWKTNAHMPVPMENVPDNPTKKSTTGLVRQMQGHLSPRSYRNMLHEHDWRPSNLSGRPRSADPRSNYGVVEKLLKTYETATESALQNSKCFQDNWTKCNSDVSGGATLSQHLEMLQMEQQFQQKTAVWGGQEVKQGIDPKKITEESMSVNASHGKGFSRPARPANRRLPSRWASRSPSAPPALRRTTHNYTISLRSEALMV

SEQ ID NO: 740630 - protein, 1008 aa, Homo sapiens
SGGHDSARHHDNAKTEALQEELKAARLQINELSGKVMQLQYENRVLMSNMQRYDLASHLGIRGSPRDSDAESDAGKKESDDDSRPPHRKREGPIGGESDSEEVRNIRCLTPTRSFYPAPGPWPKSFSDRQQMKDIRSEAERLGKTIDRLIADTSTIITEARIYVANGDLFGLMDEEDDGSRIREHELLYRINAQMKAFRKELQTFIDRLEVPKSADDRGAEEPISVSQTRSKRSIISVVTNAIKTLKTAYFFKKIQLILPRPNSIRSPNTKIFQALFYRQVRLLQIKQLQASKKQLRGGREEQKHFFADTYTVAMDLHKQWENTETNWHKEKMELLDQFDNERKEWESQWKIMQKKIEELCREVKLWRKININERAKIIDLYHEKTIPEKVIESSPNYPDLGQSEFIRTNHKDGLRKENKREQSLVSGGNQMCKEQKATKKSKVGFLDPLATDNQKECEAWPDLRTSEEDSKSCSGALSTALEELAKVSEELCSFQEEIRKRSNHRRMKSDSFLQEMPNVTNIPHGDPMINNDQCILPISLEKEKQKNRKNLSCTNVLQSNSTKKCGIDTIDLKRNETPPVPPPRSTSRNFPSSDSEQAYERWKERLDHNSWVPHEGRSKRNYNPHFPLRQQEMSMLYPNEGKTSKDGIIFSSLVPEVKIDSKPPSNEDVGLSMWSCDIGIGAKRSPSTSWFQKTCSTPSNPKYEMVIPDHPAKSHPDLHVSNDCSSSVAESSSPLRNFSCGFERTTRNEKLAAKTDEFNRTVFRTDRNCQAIQQNHSCSKSSEDLKPCDTSSTHTGSISQSNDVSGIWKTNAHMPVPMENVPDNPTKKSTTGLVRQMQGHLSPRSYRNMLHEHDWRPSNLSGRPRSADPRSNYGVVEKLLKTYETATESALQNSKCFQDNWTKCNSDVSGGATLSQHLEMLQMEQQFQQKTAVWGGQEVKQGIDPKKITEESMSVNASHGKGFSRPARPANRRLPSRWASRSPSAPPALRRTTHNYTISLRSEALMV

SEQ ID NO: 740631 - protein, 706 aa, Homo sapiens
MDLHKQWENTETNWHKEKMELLDQFDNERKEWESQWKIMQKKIEEASTLVLLSTELSLCREVKLWRKININERAKIIDLYHEKTIPEKVIESSPNYPDLGQSEFIRTNHKDGLRKENKREQSLVSGGNQMCKEQKATKKSKVGFLDPLATDNQKECEAWPDLRTSEEDSKSCSGALSTALEELAKVSEELCSFQEEIRKRSNHRRMKSDSFLQEMPNVTNIPHGDPMINNDQCILPISLEKEKQKNRKNLSCTNVLQSNSTKKCGIDTIDLKRNETPPVPPPRSTSRNFPSSDSEQAYERWKERLDHNSWVPHEGRSKRNYNPHFPLRQQEMSMLYPNEGKTSKDGIIFSSLVPEVKIDSKPPSNEDVGLSMWSCDIGIGAKRSPSTSWFQKTCSTPSNPKYEMVIPDHPAKSHPDLHVSNDCSSSVAESSSPLRNFSCGFERTTRNEKLAAKTDEFNRTVFRTDRNCQAIQQNHSCSKSSEDLKPCDTSSTHTGSISQSNDVSGIWKTNAHMPVPMENVPDNPTKKSTTGLVRQMQGHLSPRSYRNMLHEHDWRPSNLSGRPRSADPRSNYGVVEKLLKTYETATESALQNSKCFQDNWTKCNSDVSGGATLSQHLEMLQMEQQFQQKTAVWGGQEVKQGIDPKKITEESMSVNASHGKGFSRPARPANRRLPSRWASRSPSAPPALRRTTHNYTISLRSEALMV

SEQ ID NO: 740632 - protein, 694 aa, Homo sapiens [sequence omitted]

SEQ ID NO: 740633 - protein, 871 aa, Homo sapiens
SGGHDSARHHDNAKTEALQEELKAARLQINELSGKVMQLQYENRVLMSNMQRYDLASHLGIRGSPRDSDAESDAGKKESDDDSRPPHRKREGPIGGESDSEEVRNIRCLTPTRSFYPAPGPWPKSFSDRQQMKDIRSEAERLGKTIDRLIADTSTIITEARIYVANGDLFGLMDEEDDGSRIREHELLYRINAQMKAFRKELQTFIDRLEVPKSADDRGAEEPISVSQMFQPIILLILILVLFSSLSYTTIFKLVFLFTLFFVLKIFHHLPFIVVFSVCLFCSPFKTRSKRSIISVVTNAIKTLKTAYFFKKIQLILPRPNSIRSPNTKIFQALFQRQVRLLQIKQLQASKKQLRGGREEQKHFFADTYTVAMDLHKQWENTETNWHKEKMELLDQFDNERKEWESQWKIMQKKIEELCREVKLWRKININERAKIIDLYHEKTIPEKVIESSPNYPDLGQSEFIRTNHKDGLRKENKREQSLVSGGNQMCKEQKATKKSKVGFLDPLATDNQKECEAWPDLRTSEEDSKSCSGALSTALEELAKVSEELCSFQEEIRKRSNHRRMKSDSFLQEMPNVTNIPHGDPMINNDQCILPISLEKEKQKNRKNLSCTNVLQSNSTKKCGIDTIDLKRNETPPVPPPRSTSRNFPSSDSEQAYERWKERLDHNSWVPHEGRSKRNYNPHFPLRQQEMSMLYPNEGKTSKDGIIFSSLVPEVKIDSKPPSNEDVGLSMWSCDIGIGAKRSPSTSWFQKTCSTPSNPKYEMVIPDHPAKSHPDLHVSNDCSSSVAESSSPLRNFSCGFERTTRNEKLAAKTDEFNRTVFRTDRNCQAIQQNHSCSKSSEDLKPCDTSSTHTGIHVSERLTWKRIFPTC

SEQ ID NO: 740634 - protein, 1066 aa, Homo sapiens; identical to SEQ ID NO: 740629

SEQ ID NO: 740635 - protein, 871 aa, Homo sapiens; identical to SEQ ID NO: 740633

SEQ ID NO: 740636 - protein, 264 aa, Homo sapiens
SGGHDSARHHDNAKTEALQEELKAARLQINELSGKVMQLQYENRVLMSNMQRYDLASHLGIRGSPRDSDAESDAGKKESDDDSRPPHRKREGPIGGESDSEEVRNIRCLTPTRSFYPAPGPWPKSFSDRQQMKDIRSEAERLGKTIDRLIADTSTIITEARIYVANGDLFGLMDEEDDGSRIREHELLYRINAQMKAFRKELQTFIDRLEVPKSADDRGAEEPISVSQMFQPIILLILILVLFSSLSYTTIFKLVFLFTLFFVL

SEQ ID NO: 740637 - protein, 224 aa, Homo sapiens
MVEDELALFDKSINEFWNKFKSTDTSCQMAGLRDTYKDSIKAFAEKLSVKLKEEERMVEMFLEYQNQISRQNKLIQEKKDNLLKLIAEVKGKKQELEVLTANIQDLKEEYSRKKETISTANKANAERLKRLQKSADLYKDRLGLEIRKIYGEKLQFIFTNIDPKNPESPFMFSLHLNEARDYEVSDSAPHLEGLAEFQENVRKTNNFSAFLANVRKAFTATVYN

SEQ ID NO: 740638 - protein, 224 aa, Homo sapiens; identical to SEQ ID NO: 740637

SEQ ID NO: 740639 - protein, 244 aa, Homo sapiens
MVEDELALFDKSINEFWNKFKSTDTSCQMAGLRDTYKDSIKAFAEKLSVKLKEEERMVEMFLEYQNRTVLNALHSPPPSVLMIVLQEISRQNKLIQEKKDNLLKLIAEVKGKKQELEVLTANIQDLKEEYSRKKETISTANKANAERLKRLQKSADLYKDRLGLEIRKIYGEKLQFIFTNIDPKNPESPFMFSLHLNEARDYEVSDSAPHLEGLAEFQENVRKTNNFSAFLANVRKAFTATVYN

SEQ ID NO: 740640 - protein, 151 aa, Homo sapiens
MVEDELALFDKSINEFWNKFKSTDTSCQMAGLRDTYKDSIKAFAEKLSVKLKEEERMVEMFLEYQNQISRQNKLIQEKKDNLLKLIAEVKGKKQELEVLTANIQDLKEEYSRKKETISTANKANAERLKRLQKSADLYKDRLGLEIRKIYA

SEQ ID NO: 740641 - protein, 109 aa, Homo sapiens
MVEDELALFDKSINEFWNKFKSTDTSCQMAGLRDTYKDSIKAFAEKLSVKLKEEERMVEMFLEYQNQISRQNKLIQEKKDNLLKLIAEVKGKKQELELFLLLIKRMQRG

SEQ ID NO: 740642 - protein, 140 aa, Homo sapiens
  misc_feature (139)..(139): Xaa can be any naturally occurring amino acid
RELELAELDQWPQERESDQHVVPTAPDTEADNCIVHELTGQSSLLRRPVRPKRAEPREASPLHSLGHLIMDQSYVCALIAMMVWSITYHSWLTFVLLLWACLIWTVRSATNLAMLCSPCILLYGMTLCCLRYVWAMDLXP

SEQ ID NO: 740643 - protein, 67 aa, Homo sapiens
SAAEAVAAGSWEEPRFTLGKASCELSGAGRVPAAVVVRQGRRGPNPSSDSCLLPNRAFHPTGPQGLR

SEQ ID NO: 740644 - protein, 67 aa, Homo sapiens; identical to SEQ ID NO: 740643

SEQ ID NO: 740645 - protein, 74 aa, Homo sapiens
LLKQLRVSSAWWPAMFGFAMKYGTSRWKPSYSILWEALQQVLSHTTAPRTAFSSTQKLYYQQVLPAQHLSKFLH

SEQ ID NO: 740646 - protein, 115 aa, Homo sapiens
MAFLGDSSLPSFSCRYNQGKESPLQCSGLVESGQPCRWAQVPGGQALGIPPWISPILPSFLFSLPSCFPNDCPPLLFSGHLLSTGAADPLDKGPARSWGNSASGWSRWRLGQLGP

SEQ ID NO: 740647 - protein, 615 aa, Homo sapiens
MMQESATETISNSSMNQNGMSTLSSQLDAGSRDGRSSGDTSSEVSTVELLHLQQQQALQAARQLLLQQQTSGLKSPKSSDKQRPLQVPVSVAMMTPQVITPQQMQQILQQQVLSPQQLQALLQQQQAVMLQQQQLQEFYKKQQEQLHLQLLQQQQQQQQQQQQQQQQQQQQQQQQQQQQQQQQQQQQQQQQHPGKQAKEQQQQQQQQQQLAAQQLVFQQQLLQMQQLQQQQHLLSLQRQGLISIPPGQAALPVQSLPQAGLSPAEIQQLWKEVTGVHSMEDNGIKHGGLDLTTNNSSSTTSSNTSKASPPITHHSIVNGQSSVLSARRDSSSHEETGASHTLYGHGVCKWPGCESICEDFGQFLKHLNNEHALDDRSTAQCRVQMQVVQQLEIQLSKERERLQAMMTHLHMRPSEPKPSPKPLNLVSSVTMSKNMLETSPQSLPQTPTTPTAPVTPITQGPSVITPASVPNVGAIRRRHSDKYNIPMSSEIAPNYEFYKNADVRPPFTYATLIRQAIMESSDRQLTLNEIYSWFTRTFAYFRRNAATWKNAVRHNLSLHKCFVRVENVKGAVWTVDEVEYQKRRSQKITGSPTLVKNIPTSLGYGAALNASLQVH

SEQ ID NO: 740648 - protein, 304 aa, Homo sapiens
MMQESATETISNSSMNQNGMSTLSSQLDAGSRDGRSSGDTSSEVSTVELLHLQQQQALQAARQLLLQQQTSGLKSPKSSDKQRPLQVPVSVAMMTPQVITPQQMQQILQQQVLSPQQLQALLQQQQAVMLQQQQLQEFYKKQQEQLHLQLLQQQQQQQQQQQQQQQQQQQQQQQQQQQQQQQQQQQQQQQQHPGKQAKEQQQQQQQQQQLAAQQLVFQQQLLQMQQLQQQQHLLSLQRQGLISIPPGQAALPVQSLPQAGLSPAEIQQLWKEVTGVHSMEDNGIKHGGLEEFPVQGPAAVCAGL

SEQ ID NO: 740649 - protein, 203 aa, Homo sapiens
FSCPSLGPLQLNLVSSVTMSKNMLETSPQSLPQTPTTPTAPVTPITQGPSVITPASVPNVGAIRRRHSDKYNIPMSSEIAPNYEFYKNADVRPPFTYATLIRQAIMESSDRQLTLNEIYSWFTRTFAYFRRNAATWKNAVRHNLSLHKCFVRVENVKGAVWTVDEVEYQKRRSQKITGSPTLVKNIPTSLGYGAALNASLQVH

SEQ ID NO: 740650 - protein, 303 aa, Homo sapiens
MVQLHLQLLQQQQQQQQQQQQQQQQQQQQQQQQQQQQQQQQQQQQQQQQHPGKQAKEQQQQQQQQQQLAAQQLVFQQQLLQMQQLQQQQHLLSLQRQGLISIPPGQAALPVQSLPQAGLSPAEIQQLWKEVTGVHSMEDNGIKHGGLDLTTNNSSSTTSSNTSKASPPITHHSIVNGQSSVLSARRDSSSHEETGASHTLYGHGVCKWPGCESICEDFGQFLKHLNNEHALDDRSTAQCRVQMQVVQQLEIQLSKERERLQAMMTHLHMRPSEPKPSPKPKLPQTMNFIKMQMSDLHLLMQLS

SEQ ID NO: 740651 - protein, 143 aa, Homo sapiens
MMQESATETISNSSMNQNGMSTLSSQLDAGSRDGRSSGDTSSEVSTVELLHLQQQQALQAARQLLLQQQTSGLKSPKSSDKQRPLQVPVSVAMMTPQVITPQQMQQILQQQVLSPQQLQALLQQQQAVMLQQVMWVTCFGVLA

SEQ ID NO: 740652 - protein, 466 aa, Homo sapiens
MGILDIEVWGKDNKKHEERLGTCKVDISALPLKQANCLELPLDSCLGALLMLVTLTPCAGVSVSDLCVCPLADLSERKQITQRYCLQNSLKDVKDVGILQVKVLKAADLLAADFSGKSDPFCLLELGNDRLQTHTVYKNLNPEWNKVFTFPIKDIHDVLEVTVFDEDGDKPPDFLGKVAIPLLSIRDGQPNCYVLKNKDLEQAFKGVIYLEMDLIYNPVKASIRTFTPREKRFVEDSRKLSKKILSRDVDRVKRITMAIWNTMQFLKSCFQWESTLRSTIAFAVFLITVWNFELYMIPLALLLIFVYNFIRPVKGKVSSIQDSQESTDIDDEEDEDDKESEKKGLIERIYMVQDIVSTVQNVLEEIASFGERIKNTFNWTVPFLSSLACLILAAATIILYFIPLRYIILIWGINKFTKKLRNPYSIDNNELLDFLSRVPSDVQKVQYAELKLCSSHSPLRKKRSAL

SEQ ID NO: 740653 - protein, 425 aa, Homo sapiens
MGILDIEVWGKDNKKHEERLGTCKVDISALPLKQANCLELPLDSCLGALLMLVTLTPCAGVSVSDLCVCPLADLSERKQITQRYCLQNSLKDVKDVGILQVKVLKAADLLAADFSGKSDPFCLLELGNDRLQTHTVYKNLNPEWNKVFTFPIKDIHDVLEVTVFDEDGDKPPDFLGKVAIPLLSIRDGQPNCYVLKNKDLEQAFKGVIYLEMDLIYNPVKASIRTFTPREKRFVEDSRKLSKKILSRDVDRVKRITMAIWNTMQFLKSCFQWESTLRSTIAFAESTDIDDEEDEDDKESEKKGLIERIYMVQDIVSTVQNVLEEIASFGERIKNTFNWTVPFLSSLACLILAAATIILYFIPLRYIILIWGINKFTKKLRNPYSIDNNELLDFLSRVPSDVQKVQYAELKLCSSHSPLRKKRSAL

SEQ ID NO: 740654 - protein, 466 aa, Homo sapiens; identical to SEQ ID NO: 740652

SEQ ID NO: 740655 - protein, 108 aa, Homo sapiens
MSFEWSSVIPKKEMLLVVLGPGIGLQLSLVEEVLILAQRRAMQLSLGDVVHVVVSECVLRFLDGLQFPMQIQCIFCFFASTTWNLYVQDGAISAMTTENVPLSREEEG

SEQ ID NO: 740656 - protein, 112 aa, Homo sapiens
GRRHRPGFGAGASGEVPVGALERPLFLQGPRWRALRRPPYSAPSGRQYPPEAGYPLWARIPALGPEHPRRCPPRAPQRLRWRGGGPGSARRGGSEGWRTRATGLRGVWPGWD

SEQ ID NO: 740657 - protein, 88 aa, Homo sapiens
AIRDLILQLDYPYTQGSQDSALLQLLEIRDRVNKLSPPGQRRLDLFSCLLRHRLKLSTSEVVRIQSALQAFNAKLPNTMDYDTTKLCS

SEQ ID NO: 740658 - protein, 1000 aa, Homo sapiens
MKLTTGLDSRWLSCRGREESELDEDPAAEPAEAGVGTTVAPLPPAPAPSSQPVPAGMTVPPPPAAAPPLPRALAKPAVFIPVNRSPEMQEERLKLPILSEEQVIMEAVAEHPIVIVCGETGSGKTTQVPQFLYEAGFSSEDSIIGVTEPRRVAAVAMSQRVAKEMNLSQRVVSYQIRYEGNVTEETRIKFMTDGVLLKEIQKDFLLLRYKVVIIDEAHERSVYTDILIGLLSRIVTLRAKRNLPLKLLIMSATLRVEDFTQNPRLFAKPPPVIKVESRQFPVTVHFNKRTPLEDYSGECFRKVCKIHRMLPAGGILVFLTGQAEVHALCRRLRKAFPPSRARPQEKDDDQKDSVEEMRKFKKSRARAKKARAEVLPQINLDHYSVLPAGEGDEDREAEVDEEEGALDSDLDLDLGDGGQDGGEQPDASLPLHVLPLYSLLAPEKQAQVFKPPPEGTRLCVVATNVAETSLTIPGIKYVVDCGKVKKRYYDRVTGVSSFRVTWVSQASADQRAGRAGRTEPGHCYRLYSSAVFGDFEQFPPPEITRRPVEDLILQMKALNVEKVINFPFPTPPSVEALLAAEELLIALGALQPPQKAERVKQLQENRLSCPITALGRTMATFPVAPRYAKMLALSRQHGCLPYAITIVASMTVRELFEELDRPAASDEELTRLKSKRARVAQMKRTWAGQGASLKLGDLMVLLGAVGACEYASCTPQFCEANGLRYKAMMEIRRLRGQLTTAVNAVCPEAELFVDPKMQPPTESQVTYLRQIVTAGLGDHLARRVQSEEMLEDKWRNAYKTPLLDDPVFIHPSSVLFKELPEFVVYQEIVETTKMYMKGVSSVEVQWIPALLPSYCQFDKPLEEPAPTYCPERGRVLCHRASVFYRVGWPLPAIEVDFPEGIDRYKHFARFLLEGQVFRKLASYRSCLLSSPGTMLKTWARLQPRTESLLRALVAEKADCHEALLAAWKKNPKYLLAEYCEWLPQAMHPDIEKAWPPTTVH

SEQ ID NO: 740659 - protein, 801 aa, Homo sapiens
MPPFHEPLSVTGSSHGEAHERSVYTDILIGLLSRIVTLRAKRNLPLKLLIMSATLRVEDFTQNPRLFAKPPPVIKVESRQFPVTVHFNKRTPLEDYSGECFRKVCKIHRMLPAGGILVFLTGQAEVHALCRRLRKAFPPSRARPQEKDDDQKDSVEEMRKFKKSRARAKKARAEVLPQINLDHYSVLPAGEGDEDREAEVDEEEGALDSDLDLDLGDGGQDGGEQPDASLPLHVLPLYSLLAPEKQAQVFKPPPEGTRLCVVATNVAETSLTIPGIKYVVDCGKVKKRYYDRVTGVSSFRVTWVSQASADQRAGRAGRTEPGHCYRLYSSAVFGDFEQFPPPEITRRPVEDLILQMKALNVEKVINFPFPTPPSVEALLAAEELLIALGALQPPQKAERVKQLQENRLSCPITALGRTMATFPVAPRYAKMLALSRQHGCLPYAITIVASMTVRELFEELDRPAASDEELTRLKSKRARVAQMKRTWAGQGASLKLGDLMVLLGAVGACEYASCTPQFCEANGLRYKAMMEIRRLRGQLTTAVNAVCPEAELFVDPKMQPPTESQVTYLRQIVTAGLGDHLARRVQSEEMLEDKWRNAYKTPLLDDPVFIHPSSVLFKELPEFVVYQEIVETTKMYMKGVSSVEVQWIPALLPSYCQFDKPLEEPAPTYCPERGRVLCHRASVFYRVGWPLPAIEVDFPEGIDRYKHFARFLLEGQVFRKLASYRSCLLSSPGTMLKTWARLQPRTESLLRALVAEKADCHEALLAAWKKNPKYLLAEYCEWLPQAMHPDIEKAWPPTTVH

SEQ ID NO: 740660 - protein, 1000 aa, Homo sapiens; identical to SEQ ID NO: 740658

SEQ ID NO: 740661 - protein, 1000 aa, Homo sapiens; identical to SEQ ID NO: 740658

SEQ ID NO: 740662 - protein, 744 aa, Homo sapiens
  misc_feature (2)..(2): Xaa can be any naturally occurring amino acid
GXALLVRPLEAHPGLVAMGKLRLRYNIKGRQQAGPGPSKGPPEPPPVQLELEDKDTLKGVDASNALVLPGKKKKKTKAPPLSKKEKKPLTKKEKKVLQKILEQKEKKSQRAEMLQKLSEVQASEAEMRLFYTTSKLGTGNRMYHTKEKADEVVAPGQEKISSLSGAHRKRRRWPSAEEEEEEEEESESELEEESELDEDPAAEPAEAGVGTTVAPLPPAPAPSSQPVPAGMTVPPPPAAAPPLPRALAKPAVFIPVNRSPEMQEERLKLPILSEEQVIMEAVAEHPIVIVCGETGSGKTTQVPQFLYEAGFSSEDSIIGVTEPRRVAAVAMSQRVAKEMNLSQRVVSYQIRYEGNVTEETRIKFMTDGVLLKEIQKDFLLLRYKVVIIDEAHERSVYTDILIGLLSRIVTLRAKRNLPLKLLIMSATLRVEDFTQNPRLFAKPPPVIKVESRQFPVTVHFNKRTPLEDYSGECFRKVCKIHRMLPAGGILVFLTGQAEVHALCRRLRKAFPPSRARPQEKDDDQKDSVEEMRKFKKSRARAKKARAEVLPQINLDHYSVLPAGEGDEDREAEVDEEEGALDSDLDLDLGDGGQDGGEQPDASLPLHVLPLYSLLAPEKQAQVFKPPPEGTRLCVVATNVAETSLTIPGIKYVVDCGKVKKRYYDRVTGVSSFRVTWVSQASADQRAGRAGRTEPGHCYSSWPALRKWVKPWEPSSMRARSRMKGAAARAIWPGGDFLNCLLYGG

SEQ ID NO: 740663 - protein, 261 aa, Homo sapiens
MRGWVAEKDDDQKDSVEEMRKFKKSRARAKKARAEVLPQINLDHYSVLPAGEGDEDREAEVDEEEGALDSDLDLDLGDGGQDGGEQPDASLPLHVLPLYSLLAPEKQAQVFKPPPEGTRLCVVATNVAETSLTIPGIKYVVDCGKVKKRYYDRVTGVSSFRVTWVSQASADQRAGRAGRTEPGHCYRLYSSAVFGDFEQFPPPEITRRPVEDLILQMKALNVEKSSIPLPDAPSGKPSGARSVDAWWPERPEGKVAWGTWC

SEQ ID NO: 740664 - protein, 1192 aa, Homo sapiens
  misc_feature (2)..(2): Xaa can be any naturally occurring amino acid
GXALLVRPLEAHPGLVAMGKLRLRYNIKGRQQAGPGPSKGPPEPPPVQLELEDKDTLKGVDASNALVLPGKKKKKTKAPPLSKKEKKPLTKKEKKVLQKILEQKEKKSQRAEMLQKLSEVQASEAEMRLFYTTSKLGTGNRMYHTKEKADEVVAPGQEKISSLSGAHRKRRRWPSAEEEEEEEEESESELEEESELDEDPAAEPAEAGVGTTVAPLPPAPAPSSQPVPAGMTVPPPPAAAPPLPRALAKPAVFIPVNRSPEMQEERLKLPILSEEQVIMEAVAEHPIVIVCGETGSGKTTQVPQFLYEAGFSSEDSIIGVTEPRRVAAVAMSQRVAKEMNLSQRVVSYQIRYEGNVTEETRIKFMTDGVLLKEIQKDFLLLRYKVVIIDEAHERSVYTDILIGLLSRIVTLRAKRNLPLKLLIMSATLRVEDFTQNPRLFAKPPPVIKVESRQFPVTVHFNKRTPLEDYSGECFRKVCKIHRMLPAGGILVFLTGQAEVHALCRRLRKAFPPSRARPQEKDDDQKDSVEEMRKFKKSRARAKKARAEVLPQINLDHYSVLPAGEGDEDREAEVDEEEGALDSDLDLDLGDGGQDGGEQPDASLPLHVLPLYSLLAPEKQAQVFKPPPEGTRLCVVATNVAETSLTIPGIKYVVDCGKVKKRYYDRVTGVSSFRVTWVSQASADQRAGRAGRTEPGHCYRLYSSAVFGDFEQFPPPEITRRPVEDLILQMKALNVEKVINFPFPTPPSVEALLAAEELLIALGALQPPQKAERVKQLQENRLSCPITALGRTMATFPVAPRYAKMLALSRQHGCLPYAITIVASMTVRELFEELDRPAASDEELTRLKSKRARVAQMKRTWAGQGASLKLGDLMVLLGAVGACEYASCTPQFCEANGLRYKAMMEIRRLRGQLTTAVNAVCPEAELFVDPKMQPPTESQVTYLRQIVTAGLGDHLARRVQSEEMLEDKWRNAYKTPLLDDPVFIHPSSVLFKELPEFVVYQEIVETTKMYMKGVSSVEVQWIPALLPSYCQFDKPLEEPAPTYCPERGRVLCHRASVFYRVGWPLPAIEVDFPEGIDRYKHFARFLLEGQVFRKLASYRSCLLSSPGTMLKTWARLQPRTESLLRALVAEKADCHEALLAAWKKNPKCEFDQGQGVGVDRMGSLRQGLCALCTVSPGLAEGSGPTAAGQLFAT

SEQ ID NO: 740665 - protein, 669 aa, Homo sapiens
STITGVCSEAWVAEKDDDQKDSVEEMRKFKKSRARAKKARAEVLPQINLDHYSVLPAGEGDEDREAEVDEEEGALDSDLDLDLGDGGQDGGEQPDASLPLHVLPLYSLLAPEKQAQVFKPPPEGTRLCVVATNVAETSLTIPGIKYVVDCGKVKKRYYDRVTGVSSFRVTWVSQASADQRAGRAGRTEPGHCYRLYSSAVFGDFEQFPPPEITRRPVEDLILQMKALNVEKVINFPFPTPPSVEALLAAEELLIALGALQPPQKAERVKQLQENRLSCPITALGRTMATFPVAPRYAKMLALSRQHGCLPYAITIVASMTVRELFEELDRPAASDEELTRLKSKRARVAQMKRTWAGQGASLKLGDLMVLLGAVGACEYASCTPQFCEANGLRYKAMMEIRRLRGQLTTAVNAVCPEAELFVDPKMQPPTESQVTYLRQIVTAGLGDHLARRVQSEEMLEDKWRNAYKTPLLDDPVFIHPSSVLFKELPEFVVYQEIVETTKMYMKGVSSVEVQWIPALLPSYCQFDKPLEEPAPTYCPERGRVLCHRASVFYRVGWPLPAIEVDFPEGIDRYKHFARFLLEGQVFRKLASYRSCLLSSPGTMLKTWARLQPRTESLLRALVAEKADCHEALLAAWKKNPKYLLAEYCEWLPQAMHPDIEKAWPPTTVH

SEQ ID NO: 740666 - protein, 104 aa, Homo sapiens
MPSQLFTLLGGAGGVVMPALLSGPQQQPVCALAACHQRAFLPHRLQPRTESLLRALVAEKADCHEALLAAWKKNPKYLLAEYCEWLPQAMHPDIEKAWPPTTVH

SEQ ID NO: 740667 - protein, 223 aa, Homo sapiens
MKLHYVAVLTLAILMFLTWLPESLSCNKALCASDVSKCLIQELCQCRPGEGNCSCCKECMLCLGALWDECCDCVGMCNPRNYSDTPPTSKSTVEELHEPIPSLFRALTEGDTQLNWNIVSFPVAEELSHHENLVSFLETVNQPHHQNVSVPSNNVHAPYSSDKEHMCTVVYFDDCMSIHQCKISCESMGASKYRWFHNACCECIGPECIDYGSKTVKCMNCMF

SEQ ID NO: 740668 - protein, 223 aa, Homo sapiens; identical to SEQ ID NO: 740667

SEQ ID NO: 740669 - protein, 223 aa, Homo sapiens; identical to SEQ ID NO: 740667

SEQ ID NO: 740670 - protein, 223 aa, Homo sapiens; identical to SEQ ID NO: 740667

SEQ ID NO: 740671 - protein, 184 aa, Homo sapiens
MKLHYVAVLTLAILMFLTWLPESLSCNKALCASDVSKCLIQELCQCRPGEGNCSCCKECMLCLGALWDECCDCVGMCNPRNYSDTPPTSKSTVEELHEPIPSLFRALTEGDTQLNWNIVSFPVAEELSHHENLVSFLETVNQPHHQNVSVPSNNVHAPYSSDKGNCQQLTFSIPPPHVVCPCNL

SEQ ID NO: 740672 - protein, 148 aa, Homo sapiens
MCNPRNYSDTPPTSKSTVEELHEPIPSLFRALTEGDTQLNWNIVSFPVAEELSHHENLVSFLETVNQPHHQNVSVPSNNVHAPYSSDKEHMCTVVYFDDCMSIHQCKISCESMGASKYRWFHNACCECIGPECIDYGSKTVKCMNCMF

SEQ ID NO: 740673 - protein, 223 aa, Homo sapiens; identical to SEQ ID NO: 740667

SEQ ID NO: 740674 - protein, 184 aa, Homo sapiens; identical to SEQ ID NO: 740671

SEQ ID NO: 740675 - protein, 251 aa, Homo sapiens [sequence omitted]

SEQ ID NO: 740676 - protein, 252 aa, Homo sapiens
KETSKQGEAQRALRTHAPVGSAGSQALQCYSFEHTYFGPFDLRAMKLPSISCPHECFEAILSLDTGYRAPVTLVRKGCWTGPPAGQTQSNPDALPPDYSVVRGCTTDKCNAHLMTHDALPNLSQAPDPPTLSGAECYACIGVHQDDCAIGRSRRVQCHQDQTACFQGNGRMTVGNFSVPVYIRTCHRPSCTTEGTTSPWTAIDLQGSCCEGYLCNRKSMTQPFTSASATTPPRALQVLALLLPVLLLVGLSA

SEQ ID NO: 740677 - protein, 251 aa, Homo sapiens [sequence omitted]

SEQ ID NO: 740678 - protein, 163 aa, Homo sapiens
MENEPDHENVEQSLCAKTSEEELNKSFNLEASLSKFSYIDMDKELEFKNDLIDDKEFDIPQVDTPPTLESILNETDDEDESFILEDPTLLNIDTIDSHSYDTSSVASSDSGDRTNLKRKKKLPDSFSLHGSVMRHSLLKGISAQIVSAADQVDAGCLQTLYSI

SEQ ID NO: 740679 - protein, 167 aa, Homo sapiens
MHLRRVRTMPRHSQSLTMAPYSSVSLVEQLEDRILCHEKTTAALVEHAFRIKDDIVNSLQKMQNKGGGDRLARLFLEEHIRNITAIVKQLNRDIEVLQEQIRARDNISYGTNSALKTLEMRQLSGLGDLRGRVARCDASIARLSAEHKTTYEGLQHLNKEQQAAKLI

SEQ ID NO: 740680 - protein, 135 aa, Homo sapiens
MHLRRVRTMPRHSQSLTMAPYSSVSLVEQLEDRILCHEKTTAALVEHAFRIKDDIVNSLQKMQNKGGGDRLARLFLEEHIRNITAIVKQLNRDIEVLQEQIRARDNISYGTNSALKTLEMRQLSGLGDLRGRVAR

SEQ ID NO: 740681 - protein, 145 aa, Homo sapiens [sequence omitted]

SEQ ID NO: 740682 - protein, 173 aa, Homo sapiens
MHLRRVRTMPRHSQSLTMAPYSSVSLVEQLEDRILCHEKTTAALVEHAFRIKDDIVNSLQKMQNKGGGDRLARLFLEEHIRNITAIVKQLNRDIEVLQEQIRARDNISYGTNSALKTLEMRQLSGLGDLRGRVARMNSSLLSVILGDDTLLTPSSLSTLALYLSAVINFFVSP

SEQ ID NO: 740683 - protein, 200 aa, Homo sapiens
RSGIPGSRGEARRGAQAAAATATYSRQWWRRRRRRPRAGITQVTCTGNQFAEINQRFLKLKKSCSLYRRFQPWQEECGPSWNPSGHTLLASSRKDAAAQREAQEGDLQGQEGAEASHAGGPAADHYSGTAHAGRGRALDRGVCVRGHAPHHHRVSPAAGRGPHRQGEEAREGDANKKWLSYSEMFMLLSCKQEHPVFSGL

SEQ ID NO: 740684 - protein, 195 aa, Homo sapiens
RSGIPGSRGEARRGAQAAAATATYSRQWWRRRRRRPRAGITQVTCTGNQFAEINQRFLKLKKRRFQPWQEECGPSWNPSGHTLLASSRKDAAAQREAQEGDLQGQEGAEASHAGGPAADHYSGTAHAGRGRALDRGVCVRGHAPHHHRVSPAAGRGPHRQGEEAREGDANKKWLSYSEMFMLLSCKQEHPVFSGL

SEQ ID NO: 740685 - protein, 139 aa, Homo sapiens [sequence omitted]

SEQ ID NO: 740686 - protein, 146 aa, Homo sapiens
PALCQALSYTASYSILTTVPRRRFQPWQEECGPSWNPSRKDAAAQREAQEGDLQGQEGAEASHAGGPAADHYSGTAHAGRGRALDRGVCVRGHAPHHHRVSPAAGRGPHRQGEEAREGDANKKWLSYSEMFMLLSCKQEHPVFSGL

SEQ ID NO: 740687 - protein, 195 aa, Homo sapiens; identical to SEQ ID NO: 740684

SEQ ID NO: 740688 - protein, 174 aa, Homo sapiens
VSPLQRPNQRLVGITQVTCTGNQFAEINQRFLKLKKSCSLYRRFQPWQEECGPSWNPSGHTLLASSRKDAAAQREAQEGDLQGQEGAEASHAGGPAADHYSGTAHAGRGRALDRGVCVRGHAPHHHRVSPAAGRGPHRQGEEAREGDANKKWLSYSEMFMLLSCKQEHPVFSGL

SEQ ID NO: 740689 - protein, 314 aa, Homo sapiens
QSWGRGHFGSMLRGSASSTSMEKAKGKEWTSTEKSREEDQQASNQPNSIALPGTSAKRTKEKMSVKGSKVLCPKKKAEHTDNPRPQKKIPIPPLPSKLPPVNLIHRDILRAWCQQLKLSSKGQKLDAYKRLCAFAYPNQKDFPSTAKEAKIRKSLQKKLKVEKGETSLQSSETHPPEVALPPVGEPPALENSTALLEGVNTVVVTTSAPEALLASWARISARARTPEAVESPQEASGVRWCVVHGKSLPADTDGWVHLQFHAGQAWVPEKQEGRVSALFLLPASNFPPPHLEDNMLCPKCVHRNKVLIKSLQWE

SEQ ID NO: 740690 - protein, 314 aa, Homo sapiens; identical to SEQ ID NO: 740689

SEQ ID NO: 740691 - protein, 314 aa, Homo sapiens; identical to SEQ ID NO: 740689

SEQ ID NO: 740692 - protein, 314 aa, Homo sapiens; identical to SEQ ID NO: 740689

SEQ ID NO: 740693 - protein, 201 aa, Homo sapiens
MEYLIGIQGPDYVLVASDRVAASNIVQMKDDHDKMFKMSEKILLLCVGEAGDTVQFAEYIQKNVQLYKMRNGYELSPTAAANFTRRNLADCLRSRTPYHVNLLLAGYDEHEGPALYYMDYLAALAKAPFAAHGYGAFLTLSILDRYYTPTISRERAVELLRKCLEELQKRFILNLPTFSVRIIDKNGIHDLDNISFPKQGS

SEQ ID NO: 740694 - protein, 205 aa, Homo sapiens
MEYLIGIQGPDYVLVASDRVAASNIVQMKDDHDKMFKMSEKILLLCVGEAGDTVQFAEYIQKNVQLYKMRNGYELSPTAAANFTRRNLADCLRSRTPYHVNLLLAGYDEHEGPALYYMDYLAALAKAPFAAHGYGAFLTLSILDRYYTPTISRERAVELLRKCLEELQKRFILNLPTFSVRIIDKNGIHDLDNISFPGKWEGGHD

SEQ ID NO: 740695 - protein, 182 aa, Homo sapiens
FRSVVVITFASHHDKMFKMSEKILLLCVGEAGDTVQFAEYIQKNVQLYKMRNGYELSPTAAANFTRRNLADCLRSRTPYHVNLLLAGYDEHEGPALYYMDYLAALAKAPFAAHGYGAFLTLSILDRYYTPTISRERAVELLRKCLEELQKRFILNLPTFSVRIIDKNGIHDLDNISFPKQGS

SEQ ID NO: 740696 - protein, 201 aa, Homo sapiens; identical to SEQ ID NO: 740693

SEQ ID NO: 740697 - protein, 201 aa, Homo sapiens; identical to SEQ ID NO: 740693

SEQ ID NO: 740698 - protein, 201 aa, Homo sapiens; identical to SEQ ID NO: 740693

SEQ ID NO: 740699 - protein, 201 aa, Homo sapiens; identical to SEQ ID NO: 740693

SEQ ID NO: 740700 - protein, 167 aa, Homo sapiens
MFKMSEKILLLCVGEAGDTVQFAEYIQKNVQLYKMRNGYELSPTAAANFTRRNLADCLRSRTPYHVNLLLAGYDEHEGPALYYMDYLAALAKAPFAAHGYGAFLTLSILDRYYTPTISRERAVELLRKCLEELQKRFILNLPTFSVRIIDKNGIHDLDNISFPKQGS

SEQ ID NO: 740701 - protein, 201 aa, Homo sapiens; identical to SEQ ID NO: 740693

SEQ ID NO: 740702 - protein, 160 aa, Homo sapiens
MEYLIGIQGPDYVLVASDRVAASNIVQMKDGYELSPTAAANFTRRNLADCLRSRTPYHVNLLLAGYDEHEGPALYYMDYLAALAKAPFAAHGYGAFLTLSILDRYYTPTISRERAVELLRKCLEELQKRFILNLPTFSVRIIDKNGIHDLDNISFPKQGS

SEQ ID NO: 740703 - protein, 219 aa, Homo sapiens
MEYLIGIQGPDYVLVASDRVAASNIVQMKDDHDKMFKMSEKILLLCVGEAGDTVQFAEYIQKNVQLYKMRNGYELSPTAAANFTRRRSIVKVSLHPAVMSKSESPKEPEQLRKLFIGGLSFETTDESLRSHFEQWGTLTDCVVMRDPNTKRSRGFGFVTYATVEEVDAAMNARPHKVDGRVVEPKRAVSREDSQRPGAHFNCEKDICWWHLKKTLKNIT

SEQ ID NO: 740704 - protein, 143 aa, Homo sapiens
MEYLIDHDKMFKMSEKILLLCVGEAGDTVQFAEYIQTANFTRRNLADCLRSRTPYHVNLLLAGYDEHEGPALYYMDYLAALAKAPFAAHGYGAFLTLSILDRYYTPIILRVRAAVPLSKCLFAAPIFVSSLILTTLQMAPTLT

SEQ ID NO: 740705 - protein, 201 aa, Homo sapiens; identical to SEQ ID NO: 740693

SEQ ID NO: 740706 - protein, 233 aa, Homo sapiens
  misc_feature (43)..(43): Xaa can be any naturally occurring amino acid
VQTEGRDRKGLIIDQVFRMVGCGGFPGPTTDMSYMEYLRNRMXCTSVTSDRVAASNIVQMKDDHDKMFKMSEKILLLCVGEAGDTVQFAEYIQKNVQLYKMRNGYELSPTAAANFTRRNLADCLRSRTPYHVNLLLAGYDEHEGPALYYMDYLAALAKAPFAAHGYGAFLTLSILDRYYTPTISRERAVELLRKCLEELQKRFILNLPTFSVRIIDKNGIHDLDNISFPKQGS

SEQ ID NO: 740707 - protein, 117 aa, Homo sapiens
PSTSPGRTSRHRRAQTGFSAWILGWVAPVSGLAPLCLPAVGPLSVGLNCQGLRPFLFGGMEGASGPISRERAVELLRKCLEELQKRFILNLPTFSVRIIDKNGIHDLDNISFPKQGS

SEQ ID NO: 740708 - protein, 201 aa, Homo sapiens; identical to SEQ ID NO: 740693

SEQ ID NO: 740709 - protein, 201 aa, Homo sapiens; identical to SEQ ID NO: 740693

SEQ ID NO: 740710 - protein, 201 aa, Homo sapiens; identical to SEQ ID NO: 740693

SEQ ID NO: 740711 - protein, 268 aa, Homo sapiens
DELGLRSKQQAAVRGEDGKESWSQCDLVKEARKKEGALNDLVVKLGKRIPGRSKCNLVMKVAGGLAWQPHGGGEQALCERILLLATRVASNIVQMKDDHDKMFKMSEKILLLCVGEAGDTVQFAEYIQKNVQLYKMRNGYELSPTAAANFTRRNLADCLRSRTPYHVNLLLAGYDEHEGPALYYMDYLAALAKAPFAAHGYGAFLTLSILDRYYTPTISRERAVELLRKCLEELQKRFILNLPTFSVRIIDKNGIHDLDNISFPKQGS

SEQ ID NO: 740712 - protein, 201 aa, Homo sapiens; identical to SEQ ID NO: 740693

SEQ ID NO: 740713 - protein, 183 aa, Homo sapiens
MEYLIGIQGPDYVLVASDRVAASNIVQMKDDHDKMFKMSEKILLLCVGEAGDTVQFAEYIQTANFTRRNLADCLRSRTPYHVNLLLAGYDEHEGPALYYMDYLAALAKAPFAAHGYGAFLTLSILDRYYTPTISRERAVELLRKCLEELQKRFILNLPTFSVRIIDKNGIHDLDNISFPKQGS

SEQ ID NO: 740714 - protein, 115 aa, Homo sapiens
MEYLIGIQGPDYVLVASDRVAASNIVQMKDDHDKMFKMSEKILLLCVGEAGDTVQFAEYIQKNVQLYKMRNGYELSPTAAANFTRRNLADCLRSRILAHCNLRLPGPSDPPISAS

SEQ ID NO: 740715 - protein, 704 aa, Homo sapiens
MWKKRGGVHTLLSTAAQDLIHAELKMLFTKCFLSSGFKLGRKMIQKESVREEVGNQNIVETSMMQEPNYQQELSKPQTWKDVIGGSQHSSHEDTNKNINSEQDIVEMVSLAAEESSLMNDLFAQEIEYSPVELESLSNEENIETERWNGRILQMLNRLRVADQGQAAAAATAEALRQAGPEWCEPAGLRRASGLSPRDTAHPTPYSDPQPMAMSLPGSRRTSAGSRRRTSPPVSVRDAYGTSSLSSSSNSGSYKGSDSSPTPRRSMKYTLCSDNHGIKPPTPEQYLTPLQQKEVCIRHLKARLKDTQDRLQDRDTEIDDLKTQLSRMQEDWIEEECHRVEAQLALKEARKEIKQLKQVIDTVKNNLIDKDKGLQKYFVDINIQNKKLETLLHSMEVAQNGMAKEDGTGESAGGSPARSLTRSSTYTKLSDPAVCGDRQPGDPSSGSAEDGADSGFAAADDTLSRTDALEASSLLSSGVDCGTEETSLHSSFGLGPRFPASNTYEKLLCGMEAGVQASCMQERAIQTDFVQYQPDLDTILEKVTQAQVCGTDPESGDRCPELDAHPSGPRDPNSAVVVTVGDELEAPEPITRGPTPQRPGANPNPGQSVSVVCPMEEEEEAAVAEKEPKSYWSRHYIVDLLAVVVPAVPTVAWLCRSQRRQGQPIYNISSLLRGCCTVALHSIRRISCRSLSQPSPSPAGGGSQL

SEQ ID NO: 740716 - protein, 538 aa, Homo sapiens
MPGSGPSERMTWPGPALSAGPPTRPLSSAPGIPPIPPLTRTHSLMAMSLPGSRRTSAGSRRRTSPPVSVRDAYGTSSLSSSSNSGSYKGSDSSPTPRRSMKYTLCSDNHGIKPPTPEQYLTPLQQKEVCIRHLKARLKDTQDRLQDRDTEIDDLKTQLSRMQEDWIEEECHRVEAQLALKEARKEIKQLKQVIDTVKNNLIDKDKGLQKYFVDINIQNKKLETLLHSMEVAQNGMAKEDGTGESAGGSPARSLTRSSTYTKLSDPAVCGDRQPGDPSSGSAEDGADSGFAAADDTLSRTDALEASSLLSSGVDCGTEETSLHSSFGLGPRFPASNTYEKLLCGMEAGVQASCMQERAIQTDFVQYQPDLDTILEKVTQAQVCGTDPESGDRCPELDAHPSGPRDPNSAVVVTVGDELEAPEPITRGPTPQRPGANPNPGQSVSVVCPMEEEEEAAVAEKEPKSYWSRHYIVDLLAVVVPAVPTVAWLCRSQRRQGQPIYNISSLLRGCCTVALHSIRRISCRSLSQPSPSPAGGGSQL

SEQ ID NO: 740717 - protein, 663 aa, Homo sapiens
MQSWRRRKSLWLALSASWLLLVLLGGFSLLRLALPPRPRPGASQGWPRWLDAELLQSFSQPGELPEDAVSPPQAPHGGSCNWESCFDTSKCRGDGLKVFVYPAVGTISETHRRILASIEGSRFYTFSPAGACLLLLLSLDAQTGECSSMPLQWNRGRNHLVLRLHPAPCPRTFQLGQAMVAEASPTVDSFRPGFDVALPFLPEAHPLRGGAPGQLRQHSPQPGVALLALEEERGGWRTADTGSSACPWDGRCEQDPGPGQTQRQETLPNATFCLISGHRPEAASRFLQALQAGCIPVLLSPRWELPFSEVIDWTKAAIVADERLPLQVLAALQEMSPARVLALRQQTQFLWDAYFSSVEKVIHTTLEVIQDRIFGTSAHPSLLWNSPPGALLALSTFSTSPQDFPFYYLQQGSRPEGRFSALIWVGPPGQPPLKLIQAVAGSQHCAQILVLWSNERPLPSRWPETAVPLTVIDGHRKVSDRFYPYSTIRTDAILSLDARSSLSTSEVDFAFLVWQSFPERMVGFLTSSHFWDEAHGGWGYTAERTNEFSMVLTTAAFYHRYYHTLFTHSLPKALRTLADEAPTCVDVLMNFIVAAVTKLPPIKAPGGPGPRPKPPAPAPDCINQIAAAFGHMPLLSSRLRLDPVLFKDPVSVQRKKYRSLEKP

SEQ ID NO: 740718 - protein, 156 aa, Homo sapiens
MVGFLTSSHFWDEAHGGWGYTAERTNEFSMVLTTAAFYHRYYHTLFTHSLPKALRTLADEAPTCVDVLMNFIVAAVTKLPPIKVPYGKQRQEAAPLAPGGPGPRPKPPAPAPDCINQIAAAFGHMPLLSSRLRLDPVLFKDPVSVQRKKYRSLEKP

SEQ ID NO: 740719 - protein, 676 aa, Homo sapiens
MQSWRRRKSLWLALSASWLLLVLLGGFSLLRLALPPRPRPGASQGWPRWLDAELLQSFSQPGELPEDAVSPPQAPHGGSCNWESCFDTSKCRGDGLKVFVYPAVGTISETHRRILASIEGSRFYTFSPAGACLLLLLSLDAQTGECSSMPLQWNRGRNHLVLRLHPAPCPRTFQLGQAMVAEASPTVDSFRPGFDVALPFLPEAHPLRGGAPGQLRQHSPQPGVALLALEEERGGWRTADTGSSACPWDGRCEQDPGPGQTQRQETLPNATFCLISGHRPEAASRFLQALQAGCIPVLLSPRWELPFSEVIDWTKAAIVADERLPLQVLAALQEMSPARVLALRQQTQFLWDAYFSSVEKVIHTTLEVIQDRIFGTSAHPSLLWNSPPGALLALSTFSTSPQDFPFYYLQQGSRPEGRFSALIWVGPPGQPPLKLIQAVAGSQHCAQILVLWSNERPLPSRWPETAVPLTVIDGHRKVSDRFYPYSTIRTDAILSLDARSSLSTSEVDFAFLVWQSFPERMVGFLTSSHFWDEAHGGWGYTAERTNEFSMVLTTAAFYHRYYHTLFTHSLPKALRTLADEAPTCVDVLMNFIVAAVTKLPPIKVPYGKQRQEAAPLAPGGPGPRPKPPAPAPDCINQIAAAFGHMPLLSSRLRLDPVLFKDPVSVQRKKYRSLEKP

SEQ ID NO: 740720 - protein, 137 aa, Homo sapiens
MARLPKLAVFDLDYTLWPFWVDTHVDPPFHKSSDGTVRDRRGQDVRLYPEVPEVLKRLQSLGVPGAAASRTSEIEGANQLLELFDLFRYFVHREIYPGSKITHFERLQQKTGIPFSQMIFFDDERRNIVDVSKLGTE

SEQ ID NO: 740721 - protein, 122 aa, Homo sapiens
MARLPKLAVFDLDYTLWPFWVDTHVDPPFHKSSDGTVRDRRGQDVRLYPEVPEVLKRLQSLGVPGAAASRTSEIEGANQLLELFDLFRCYLHSHPEWNESSNSKSRVRDICEGPNWAFEVQP

SEQ ID NO: 740722 - protein, 59 aa, Homo sapiens
MIFFDDERRNIVDVSKLGVTCIHIQNGMNLQTLSQGLETFAKAQTGPLRSSLEESPFEA

SEQ ID NO: 740723 - protein, 176 aa, Homo sapiens
MARLPKLAVFDLDYTLWPFWVDTHVDPPFHKSSDGTVRDRRGQDVRLYPEVPEVLKRLQSLGVPGAAASRTSEIEGANQLLELFDLFRYFVHREIYPGSKITHFERLQQKTGIPFSQMIFFDDERRNIVDVSKLGVTCIHIQNGMNLQTLSQGLETFAKAQTGPLRSSLEESPFEA

SEQ ID NO: 740724 - protein, 176 aa, Homo sapiens
AGPRRPTVSYSSITALMERRVYVRVDPERPESSDGTVRDRRGQDVRLYPEVPEVLKRLQSLGVPGAAASRTSEIEGANQLLELFDLFRYFVHREIYPGSKITHFERLQQKTGIPFSQMIFFDDERRNIVDVSKLGVTCIHIQNGMNLQTLSQGLETFAKAQTGPLRSSLEESPFEA

SEQ ID NO: 740725 - protein, 59 aa, Homo sapiens; identical to SEQ ID NO: 740722

SEQ ID NO: 740726 - protein, 128 aa, Homo sapiens
MRQETAKASFRRESTAPGVFIYENLFFVHFLCNDLLSLRFCLPAILLLGWWFLFSSKFLPPNKYYVKNSYQINENTGKEYIGTFCYICNFLLLKGTEGRPGAVAHAQHFGRLRWEDPLGPGVQGYSEL

SEQ ID NO: 740727 - protein, 485 aa, Homo sapiens
MLERLKAPWSAALQRKYFDLGIWTAPISPMALTMLNGLLIKDSSPPMLLHQVNKTAQLDTFNYQSCFMQSVFDHFPEILFIHRTYNPRGKVLYTFLVDGPRVQLEGHLARAVYFAIPAKEDTEGLAQMFQVFKKFNPAWERVCTILVDPHFLPLPILAMEFPTAEVLLSAFHICKFLQAKFYQLSLERPVERLLLTSLQSTMCSATAGNLRKLYTLLSNCIPPAKLPELHSHWLLNDRIWLAHRWRSRAESSHYFQSLEVTTHILSQFFGTTPSEKQGMASLFRYMQQNSADKANFNQGLCAQNNHAPSDTIPESPKLEQLVESHIQHSLNAICTGPAAQLCLGELAVVQKSTHLIGSGSEKMNIQILEDTHKVQPQPPASCSCYFNQAFHLPCRHILAMLSARRQVLQPDMLPAQWTAGCATSLDSILGSKWSETLDKHLAVTHLTEEVGQLLQHCTKEEFERRYSTLRELADSWIGPYEQVQL

SEQ ID NO: 740728 - protein, 485 aa, Homo sapiens; identical to SEQ ID NO: 740727

SEQ ID NO: 740729 - protein, 236 aa, Homo sapiens
MLERLKAPWSAALQRKYFDLGIWTAPISPMALTMLNGLLIKDSSPPMLLHQVNKTAQLDTFNYQSCFMQSVFDHFPEILFIHRTYNPRGKVLYTFLVDGPRVQLEGHLARAVYFAIPAKEDTEGLAQMFQVFKKFNPAWERVCTILVDPHFLPLPILAMEFPTAEVLLSAFHICKFLQAKFYQLSLERPVERLLLTSLQSTMCSATAGNLRKLYTLLSNCIPPEPGRVRLHLKKIK

SEQ ID NO: 740730 - protein, 485 aa, Homo sapiens; identical to SEQ ID NO: 740727

SEQ ID NO: 740731 - protein, 262 aa, Homo sapiens
MLERLKAPWSAALQRKYFDLGIWTAPISPMALTMLNGLLIKDSSPPMLLHQVNKTAQLDTFNYQSCFMQSVFDHFPEILFIHRTYNPRGKVLYTFLVDGPRVQLEGHLARAVYFAIPAKEDTEGLAQMFQVFKKFNPAWERVCTILVDPHFLPLPILAMEFPTAEVLLSAFHICKFLQAKFYQLSLERPVERLLLTSLQSTMCSATAGNLRKLYTLLSNCIPPAKLPELHSHWLLNDRIWLAHRWRSRAESSHYFQSLEVTT

SEQ ID NO: 740732 - protein, 152 aa, Homo sapiens
MLERLKAPWSAALQRKYFDLGIWTAPISPMALTMLNGLLIKDSSPPMLLHQVNKTAQLDTFNYQSCFMQSVFDHFPEILFIHRTYNPRGKVLYTFLVDGPRVQLEGHLARAVYFAIPAKEDTEGLAQMFQVFKKFNPAWERVCTILVDPHFL

SEQ ID NO: 740733 - protein, 439 aa, Homo sapiens
THGRTHTAAGPGTTLSAAAPEVRGAQPGPLEGAAGRPAPPLEAAGPGAQWATNFRSASPPRQRADSGSARLCAAPDGCDRWPGARAAGTHGPRARVPAPLSPSPRADLGIQRPAARALPARPTAARSVRSLRCASARLPPPGLRPFAALTTPWPGAPTARPVEAKDISPIVKAARRDGELLLSAQLDSEERDPGVPRPSPYAPYILVYANDLAISEPNSVAVTLQRYDPFPAGDPEPRAAPNNSADPRVRRAAQATGPLQDNELPGLDERPPRAHAQHFHKHQLWPSPFRALKPRPGRKDRRKKGQEVFMAASQVLDFDEKTMQKARRKQWDEPRVCSRRYLKVDFADIGWNEWIISPKSFDAYYCAGACEFPMPKIVRPSNHATIQSIVRAVGIIPGIPEPCCVPDKMNSLGVLFLDENRNVVLKVYPNMSVDTCACR

SEQ ID NO: 740734 - protein, 173 aa, Homo sapiens
MAHVPARTSPGPGPQLLLLLLPLFLLLLRDVAGSHRAPAWSALPAAADGLQGDRDLQRHPGDAAATLGPSAQDMVAVHMHRLYEKYSRQGARPGGGNTVRSFRARLEVVDQKAVYFFNLTSMQDSEMILTATFHFYSEPPRWPRALEVLCKPRAKNASGRPLPLGPPTRHLST

SEQ ID NO: 740735 - protein, 478 aa, Homo sapiens
MAHVPARTSPGPGPQLLLLLLPLFLLLLRDVAGSHRAPAWSALPAAADGLQGDRDLQRHPGDAAATLGPSAQDMVAVHMHRLYEKYSRQGARPGGGNTVRSFRARLEVVDQKAVYFFNLTSMQDSEMILTATFHFYSEPPRWPRALEVLCKPRAKNASGRPLPLGPPTRQHLLFRSLSQNTATQGLLRGAMALAPPPRGLWQAKDISPIVKAARRDGELLLSAQLDSEERDPGVPRPSPYAPYILVYANDLAISEPNSVAVTLQRYDPFPAGDPEPRAAPNNSADPRVRRAAQATGPLQDNELPGLDERPPRAHAQHFHKHQLWPSPFRALKPRPGRKDRRKKGQEVFMAASQVLDFDEKTMQKARRKQWDEPRVCSRRYLKVDFADIGWNEWIISPKSFDAYYCAGACEFPMPKIVRPSNHATIQSIVRAVGIIPGIPEPCCVPDKMNSLGVLFLDENRNVVLKVYPNMSVDTCACR

SEQ ID NO: 740736 - protein, 161 aa, Homo sapiens
MAHVPARTSPGPGPQLLLLLLPLFLLLLRDVAGSHRAPAWSALPAAADGLQGDRDLQRHPGDAAATLGPSAQDMVAVHMHRLYEKYSRQGARPGGGNTVRSFRARLEVVDQKAVYFFNLTSMQDSEMILTATFHFYSEAFIHMVCTCSQYWFLFLNIYILF

SEQ ID NO: 740737 - protein, 68 aa, Homo sapiens
GRRAARICTPDASGAACAGPAACGLGDAQTEAAPLPPLHSAAWPVERGFPAQPASGPIPSPLIISVKG

SEQ ID NO: 740738 - protein, 46 aa, Homo sapiens
MALFCNPTSETQFSFLPQSQHAALISQRQPPGALMKSTLWVRHQVP

SEQ ID NO: 740739 - protein, 277 aa, Homo sapiens
MEYIGSQNASRGRRQRRMHPNVSQGCQGGCATCSDYNGCLSCKPRLFFALERIGMKQIGVCLSSCPSGYYGTRYPDINKCTKCKADCDTCFNKNFCTKCKSGFYLHLGKCLDNCPEGLEANNHTMECVSIVHCEVSEWNPWSPCTKKGKTCGFKRGTETRVREIIQHPSAKGNLCPPTNETRKCTVQRKKCQKGERGKKGRERKRKKPNKGESKEAIPDSKSLESSKEIPEQRENKQQQKKRKVQDKQKSGIEVTLAEGLTSVSQRTQPTPCRRRYL

SEQ ID NO: 740740 - protein, 257 aa, Homo sapiens [sequence omitted]

SEQ ID NO: 740741 - protein, 213 aa, Homo sapiens
MEYIGSQNASRGRRQRRMHPNVSQGCQGGCATCSDYNGCLSCKPRLFFALERIGMKQIGVCLSSCPSGYYGTRYPDINKCTKCKADCDTCFNKNFCTKCKSGFYLHLGKCLDNCPEGLEANNHTMECVSIVHCEVSEWNPWSPCTKKGKTCGFKRGTETRVREIIQHPSAKGNLCPPTNETRKCTVQRKKCQKGERGKNKGRCCAVSLLILYN

SEQ ID NO: 740742 - protein, 287 aa, Homo sapiens
RPHPRHAPAEPKGARGDGVRVSARLQSCRTSPARGLKTAKPQLWGAGVHPNVSQGCQGGCATCSDYNGCLSCKPRLFFALERIGMKQIGVCLSSCPSGYYGTRYPDINKCTKCKADCDTCFNKNFCTKCKSGFYLHLGKCLDNCPEGLEANNHTMECVSIVHCEVSEWNPWSPCTKKGKTCGFKRGTETRVREIIQHPSAKGNLCPPTNETRKCTVQRKKCQKGERGKKGRERKRKKPNKGESKEAIPDSKSLESSKEIPEQRENKQQQKKRKVQDKQKSVSVSTVH

SEQ ID NO: 740743 - protein, 68 aa, Homo sapiens
MMTLCTQKTAPTAKPPTDTELLGRGARGERRVSTPHRASHRAWHLTGTQSQMDADGSQTGHELSRLFS

SEQ ID NO: 740744 - protein, 488 aa, Homo sapiens
MPPGGGGPMKDCEYSQISTHSSSPMESPHKKKKIAARRKWEVFPGRNKFFCNGRIMMARQTGVFYLTLVLILVTSGLFFAFDCPYLAVKITPAIPAVAGILFFFVMGTLLRTSFSDPGVLPRATPDEAADLERQIDIANGTSSGGYRPPPRTKEVIINGQTVKLKYCFTCKIFRPPRASHCSLCDNCVERFDHHCPWVGNCVGKRNYRFFYMFILSLSFLTVFIFAFVITHVILRSQQTGFLNALKDSPASVLEAVVCFFSVWSIVGLSGFHTYLISSNQTTNEDIKGSWSNKRGKENYNPYSYGNIFTNCCVALCGPISPSLIDRRGYIQPDTPQPAAPSNGITMYGATQSQSDMCDQDQCIQSTKFVLQAAATPLLQSEPSLTSDELHLPGKPGLGTPCASLTLGPPTPPASMPNLAEATLADVMPRKDEHMGHQFLTPDEAPSPPRLLAAGSPLAHSRTMHVLGLASQDSLHEDSVRGLVKLSSV

SEQ ID NO: 740745 - protein, 371 aa, Homo sapiens
QSRGPCTCATKEAGVPAEDIANGTSSGGYRPPPRTKEVIINGQTVKLKYCFTCKIFRPPRASHCSLCDNCVERFDHHCPWVGNCVGKRNYRFFYMFILSLSFLTVFIFAFVITHVILRSQQTGFLNALKDSPASVLEAVVCFFSVWSIVGLSGFHTYLISSNQTTNEDIKGSWSNKRGKENYNPYSYGNIFTNCCVALCGPISPSLIDRRGYIQPDTPQPAAPSNGITMYGATQSQSDMCDQDQCIQSTKFVLQAAATPLLQSEPSLTSDELHLPGKPGLGTPCASLTLGPPTPPASMPNLAEATLADVMPRKDEHMGHQFLTPDEAPSPPRLLAAGSPLAHSRTMHVLGLASQDSLHEDSVRGLVKLSSV

SEQ ID NO: 740746 - protein, 356 aa, Homo sapiens [sequence omitted]

SEQ ID NO: 740747 - protein, 365 aa, Homo sapiens
MPPGGGGPMKDCEYSQISTHSSSPMESPHKKKKIAARRKWEVFPGRNKFFCNGRIMMARQTGVFYLTLVLILVTSGLFFAFDCPYLAVKITPAIPAVAGILFFFVMGTLLRTSFSDPGVLPRATPDEAADLERQIDIANGTSSGGYRPPPRTKEVIINGQTVKLKYCFTCKIFRPPRASHCSLCDNCVERFDHHCPWVGNCVGKRNYRFFYMFILSLSFLTVFIFAFVITHVILRSQQTGFLNALKDSPASVLEAVVCFFSVWSIVGLSGFHTYLISSNQTTNEDIKGSWSNKRGKENYNPYSYGNIFTNCCVALCGPISPSLIDRRGYIQPDTPQPAAPSNGITMYGATQSQSDMVGVGATAPC

SEQ ID NO: 740748 - protein, 69 aa, Homo sapiens
QEAKKKSMSTCVFTFQDQAEAVDYLENLGRPLSGHGDPSDLRGDKVCIFAPKFAKGVARDIFLEEARTK

SEQ ID NO: 740749 - protein, 149 aa, Homo sapiens
MQHSTDTSSADNRDDGNSKETSRRSKSSKQQNESDTAADGQSKRKQTRKRIDQTHAGPGDNDTVRKADQSKKDRATSGHTERRNHSRESGGSDWRRAEEERTAGHNRESEHRRERMNKRQGRREQRRTKTQREETREQQIAREQNKRRR

SEQ ID NO: 740750 - protein, 129 aa, Homo sapiens
MEEATGCAGFNLIHLVATGISCFLGSGLLTLAVYLSCQHCQRQSQESTLVHPATPNHLHYKGGGTPKNEKYTPMEFKTLNKNNLIPDDRANFYPLQQTNVYTTTYYPSPLNKHSFRPEASPGQRCFPNS

SEQ ID NO: 740751 - protein, 313 aa, Homo sapiens
RDEDLSRGRSPGSCDTDALVEDLLSAAVSTSPHTVSGGWAAWGPWSSCSRDCELGFRVRKRTCTNPEPRNGGLPCVGDAAEYQDCNPQACPVRGAWSCWTSWSPCSASCGGGHYQRTRSCTSPAPSPEGWSPWSEWSKCTDDGAQSRSRHCEELLPGSSACAGNSSQSRPCPYSEIPVILPASSMEEATGCAGFNLIHLVATGISCFLGSGLLTLAVYLSCQHCQRQSQESTLVHPATPNHLHYKGGGTPKNEKYTPMEFKTLNKNNLIPDDRANFYPLQQTNVYTTTYYPSPLNKHSFRPEASPGQRCFPNS

SEQ ID NO: 740752 - protein, 334 aa, Homo sapiens
RDEDLSRGRSPGSCDTDALVEDLLSAAVSTSPHTVSGGWAAWGPWSSCSRDCELGFRVRKRTCTNPEPRNGGLPCVGDAAEYQDCNPQACPVRGAWSCWTSWSPCSASCGGGHYQRTRSCTSPAPSPGEDICLGLHTEEALCATQACPEGWSPWSEWSKCTDDGAQSRSRHCEELLPGSSACAGNSSQSRPCPYSEIPVILPASSMEEATGCAGFNLIHLVATGISCFLGSGLLTLAVYLSCQHCQRQSQESTLVHPATPNHLHYKGGGTPKNEKYTPMEFKTLNKNNLIPDDRANFYPLQQTNVYTTTYYPSPLNKHSFRPEASPGQRCFPNS

SEQ ID NO: 740753 - protein, 150 aa, Homo sapiens
CCCFCSQGGRQESVLFTVALILLPASLPLGFNLIHLVATGISCFLGSGLLTLAVYLSCQHCQRQSQESTLVHPATPNHLHYKGGGTPKNEKYTPMEFKTLNKNNLIPDDRANFYPLQQTNVYTTTYYPSPLNKHSFRPEASPGQRCFPNS

SEQ ID NO: 740754 - protein, 313 aa, Homo sapiens; identical to SEQ ID NO: 740751

SEQ ID NO: 740755 - protein, 116 aa, Homo sapiens
QLHLQRNALCVIPQDFFQLLPNLTWLDLRYNRIKALPSGIGAHQHLKTLLLERNPIKMLPVELGSVTTLKALNLRHCPLEFPPQLVVQKGLVAIQRFLRMWAVEHSLPRNPTSQGL

SEQ ID NO: 740756 - protein, 302 aa, Homo sapiens
QLHLQRNALCVIPQDFFQLLPNLTWLDLRYNRIKALPSGIGAHQHLKTLLLERNPIKMLPVELGSVTTLKALNLRHCPLEFPPQLVVQKGLVAIQRFLRMWAVEHSLPRNPTSQEAPPVREMTLCDLPSPGLELSGDHASNQGAVNAQDPEGAVMKEKASFLPPVEKPDLSELRKSADSSENWPSEEEIRRFWKLRQEIVEHVKADVLGDQLLTRELPPNLKAALNIEKELPKPRHVFRRKTASSRSILPDLLSPYQMAIRAKRLEESRAAALRELQEKQALMEQQRREKRALQEWRERARG

SEQ ID NO: 740757 - protein, 313 aa, Homo sapiens
QLHLQRNALCVIPQDFFQLLPNLTWLDLRYNRIKALPSGIGAHQHLKTLLLERNPIKMLPVELGSVTTLKALNLRHCPLEFPPQLVVQKGLVAIQRFLRMWAVEHSLPRNPTSQEAPPVREMTLCDLPSPGLELSGDHASNQGAVNAQDPEGAVMKEKASFLPPVEKPDLSELRKSADSSENWPSEEEIRRFWKLRQEIVEHVKADVLGDQLLTRELPPNLKAALNIEKELPKPRHVFRTRVPRKQALQRLHERKTRIMGVVGRAPTHMGEGRQPPPGASYPTSCHRTKWRSEQKDWKRAERRRSESSRRSRL

SEQ ID NO: 740758 - protein, 73 aa, Homo sapiens
MGREVVLAEPQGPAGPGPAHMHLGRASQRGLMTRAPKRQGQAGVPRREPSCGRSAEPSVPAGSRQRTENAQFR

SEQ ID NO: 740759 - protein, 119 aa, Homo sapiens [sequence omitted]

SEQ ID NO: 740760 - protein, 119 aa, Homo sapiens [sequence omitted]

SEQ ID NO: 740761 - protein, 119 aa, Homo sapiens [sequence omitted]

SEQ ID NO: 740762 - protein, 118 aa, Homo sapiens
PVRASWLLCLPNQAWAMAGAPPPASLPPCSLISDCCASNQRDSVGVGPSEPGAGYILVVRRFLSPSERRSIWVGVTRFSRCRPSPLSLTQKGNSLTPCASQVRQCLALLRLAHGARSH

SEQ ID NO: 740763 - protein, 118 aa, Homo sapiens; identical to SEQ ID NO: 740762

SEQ ID NO: 740764 - protein, 118 aa, Homo sapiens; identical to SEQ ID NO: 740762

SEQ ID NO: 740765 - protein, 273 aa, Homo sapiens
ERVVDMAAIRMGKLTTMPAGLIYASVSVHAAKQEESKKQLVKPEQLPIYTAPPLQSKYVEEQPGHLQMGFASIRTATGCYIGWCKGVYVFVKNGIMDTVQFGKDAYVYLKNPPRDFLPKMGVITVSGLAGLVSARKGSKFKKITYPLGLATLGATVCYPVQSVIIAKVTAKKVYATSQQIFGAVKSLWTKSSKEESLPKPKEKTKLGSSSEIEVPAKTTHVLKHSVPLPTELSSEAKTKSESTSGATQFMPDPKLMDHGQSHPEDIDMYSTRS

SEQ ID NO: 740766 - protein, 690 aa, Homo sapiens
MTDTVFSNSSNRWMYPSDRPLQSKLQAGWSVHPGGQPDRQRKQEELTDEEKEIINRVIARAEKMEEMEQERIGRLVDRLENMRKNVAGDGVNRCILCGEQLGMLGSACVVCEDCKKNVCTKCGVETNNRLHSVWLCKICIEQREVWKRSGAWFFKGFPKQVLPQPMPIKKTKPQQPVSEPAAPEQPAPEPKHPARAPARGDSEDRRGPGQKTGPDPASAPGRGNYGPPVRRASEARMSSSSRDSESWDHSGGAGDSSRSPAGLRRANSVQASRPAPGSVQSPAPPQPGQPGTPGGSRPGPGPAGRFPDQKPEVAPSDPGTTAPPREERTGGVGGYPAVGAREDRMSHPSGPYSQASAAAPQPAAARQPPPPEEEEEEANSYDSDEATTLGALEFSLLYDQDNSSLQCTIIKAKGLKPMDSNGLADPYVKLHLLPGASKSNKLRTKTLRNTRNPIWNETLVYHGITDEDMQRKTLRISVCDEDKFGHNEFIGETRFSLKKLKPNQRKNFNICLERVIPMKRAGTTGSARGMALYEEEQVERVGDIEERGKILVSLMYSTQQGGLIVGIIRCVHLAAMDANGYSDPFVKLWLKPDMGKKAKHKTQIKKKTLNPEFNEEFFYDIKHSDLAKKSLDISVWDYDIGKSNDYIGGCQLGISAKGERLKHWYECLKNKDKKIERWHQLQNENHVSSD

SEQ ID NO: 740767 - protein, 227 aa, Homo sapiens
MTDTVFSNSSNRWMYPSDRPLQSKLQAGWSVHPGGQPDRQRKQEELTDEEKEIINRVIARAEKMEEMEQERIGRLVDRLENMRKNVAGDGVNRCILCGEQLGMLGSACVVCEDCKKNVCTKCGVETNNRLHSVWLCKICIEQREVWKRSGAWFFKGFPKQVLPQPMPIKKTKPQQPVSEPAAPEQPAPEPKHPARAPARGAREDGRAGSQTGRTALLPRDHGLRPGP

SEQ ID NO: 740768 - protein, 690 aa, Homo sapiens; identical to SEQ ID NO: 740766

SEQ ID NO: 740769 - protein, 690 aa, Homo sapiens; identical to SEQ ID NO: 740766

SEQ ID NO: 740770 - protein, 890 aa, Homo sapiens
MEYEWKPDEQGLQQILQLLKESQSPDTTIQRTVQQKLEQLNQYPDFNNYLIFVLTKLKSEDEPTRSLSGLILKNNVKAHFQNFPNGVTDFIKSECLNNIGDSSPLIRATVGILITTIASKGELQNWPDLLPKLCSLLDSEDYNTCEGAFGALQKICEDSAEILDSDVLDRPLNIMIPKFLQFFKHSSPKIRSHAVACVNQFIISRTQALMLHIDSFTENLFALAGDEEPEVRKNVCRALVMLLEVRMDRLLPHMHNIVEYMLQRTQDQDENVALEACEFWLTLAEQPICKDVLVRHLPKLIPVLVNGMKYSDIDIILLKGDVEEDETIPDSEQDIRPRFHRSRTVAQQHDEDGIEEEDDDDDEIDDDDTISDWNLRKCSAAALDVLANVYRDELLPHILPLLKELLFHHEWVVKESGILVLGAIAEGCMQGMIPYLPELIPHLIQCLSDKKALVRSITCWTLSRYAHWVVSQPPDTYLKPLMTELLKRILDSNKRVQEAACSAFATLEEEACTELVPYLAYILDTLVFAFSKYQHKNLLILYDAIGTLADSVGHHLNKPEYIQMLMPPLIQKWNMLKDEDKDLFPLLECLSSVATALQSGFLPYCEPVYQRCVNLVQKTLAQAMLNNAQPDQYEAPDKDFMIVALDLLSGLAEGLGGNIEQLVARSNILTLMYQCMQDKMPEVRQSSFALLGDLTKACFQHVKPCIADFMPILGTNLNPEFISVCNNATWAIGEISIQMGIEMQPYIPMVLHQLVEIINRPNTPKTLLENTAITIGRLGYVCPQEVAPMLQQFIRPWCTSLRNIRDNEEKDSAFRGICTMISVNPSGVIQDFIFFCDAVASWINPKDDLRDMFCKILHGFKNQVGDENWRRFSDQFPLPLKERLAAFYGV

SEQ ID NO: 740771 - protein, 890 aa, Homo sapiens; identical to SEQ ID NO: 740770

SEQ ID NO: 740772 - protein, 921 aa, Homo sapiens
SISGPGQEAVPLRPKAEPPEGSGMVWDRQTKMEYEWKPDEQGLQQILQLLKESQSPDTTIQRTVQQKLEQLNQYPDFNNYLIFVLTKLKSEDEPTRSLSGLILKNNVKAHFQNFPNGVTDFIKSECLNNIGDSSPLIRATVGILITTIASKGELQNWPDLLPKLCSLLDSEDYNTCEGAFGALQKICEDSAEILDSDVLDRPLNIMIPKFLQFFKHSSPKIRSHAVACVNQFIISRTQALMLHIDSFIENLFALAGDEEPEVRKNVCRALVMLLEVRMDRLLPHMHNIVEYMLQRTQDQDENVALEACEFWLTLAEQPICKDVLVRHLPKLIPVLVNGMKYSDIDIILLKGDVEEDETIPDSEQDIRPRFHRSRTVAQQHDEDGIEEEDDDDDEIDDDDTISDWNLRKCSAAALDVLANVYRDELLPHILPLLKELLFHHEWVVKESGILVLGAIAEGCMQGMIPYLPELIPHLIQCLSDKKALVRSITCWTLSRYAHWVVSQPPDTYLKPLMTELLKRILDSNKRVQEAACSAFATLEEEACTELVPYLAYILDTLVFAFSKYQHKNLLILYDAIGTLADSVGHHLNKPEYIQMLMPPLIQKWNMLKDEDKDLFPLLECLSSVATALQSGFLPYCEPVYQRCVNLVQKTLAQAMLNNAQPDQYEAPDKDFMIVALDLLSGLAEGLGGNIEQLVARSNILTLMYQCMQDKMPEVRQSSFALLGDLTKACFQHVKPCIADFMPILGTNLNPEFISVCNNATWAIGEISIQMGIEMQPYIPMVLHQLVEIINRPNTPKTLLENTAITIGRLGYVCPQEVAPMLQQFIRPWCTSLRNIRDNEEKDSAFRGICTMISVNPSGVIQDFIFFCDAVASWINPKDDLRDMFCKILHGFKNQVGDENWRRFSDQFPLPLKERLAAFYGV

SEQ ID NO: 740773 - protein, 523 aa, Homo sapiens
MQKPFKLSFEVSSDLAFILIKSNTSWDIYKATYSCGVVLIVLNVDLNVYKIVSLSLLHSSVSASWHAYKHGLLHLLLTHYNAVSVLNYRNSRCYSDVDFLLEYFYVVGTSGGQCLLFYICLLFPVWLLSLKDSQQNKAADQPKLETESVININLNACLAVPCYSPLASELSATGIHLFRKEFCFLYCLISSMTSYCVKKNHFLIFFGGYFPNNQHVNNLLRASSDALHYCYLILLCKLDFRRIDFKTLNQAIIIFKNKTSSIHFVINIDKHCDFFGYDFFIDLNCLNCIYCKIGSDVYFKLISMDFPLEMLVYSVIKYSDTSFISGEYSCIVFALVTCLYKGHPSYILCFLSVFHLRIFPFSLIFFLIFYAGWGGIKPSGQAFCLQVYLKMSYIWSSFSSNSQNRKVEIFLPYIKLFCLAEMPEINLLHLSLNFKSFAMRKKWFFASYGKSILFILNVLTDNGAKAFFPGKKCIMHNCNLSPSFDNTSKHTQLCFTELFLQIIQGGETNLLLVLLMKYRPWNI

SEQ ID NO: 740774 - protein, 921 aa, Homo sapiens; identical to SEQ ID NO: 740772

SEQ ID NO: 740775 - protein, 890 aa, Homo sapiens [sequence omitted]

SEQ ID NO: 740776 - protein, 890 aa, Homo sapiens; identical to SEQ ID NO: 740770

SEQ ID NO: 740777 - protein, 535 aa, Homo sapiens
CGETLRLERKRFLWQHQLLGLLSVYTRPSCGPEALGHLLSRARSPEELSLATQLYAGLVVSLSGLLPLAFRSCLARVHAGTLQPPFTARFLRNLALLVGWEQQGGEGPAALGAHFGESASAHLSDLAPLLLHPEEEVAEAAASLLAICPFPSEALSPSQLLGLVRAGVHRFFASLRLHGPPGVASACQLLTRLSQTSPAGLKAVLQLLVEGALHRGNTELFGGQVDGDNETLSVVSASLASASLLDTNRRHTAAVPGPGGIWSVFHAGVIGRGLKPPKFVQSRNQQEVIYNTQSLLSLLVHCCSAPGGTECGECWGAPILSPEAAKAVAVTLVESVCPDAAGAELAWPPEEHARATVERDLRIGRRFREQPLLFELLKLVAAAPPALCYCSVLLRGLLAALLGHWEASRHPDTTHSPWHLEASCTLVAVMAEGSLLPPALGNMHEVFSQLAPFEVRLLLLSVWGFLREHGPLPQKFIFQSERGRFIRDFSREGGGEGGPHLAVLHSVLHRNIDRLGLFSGRFQAPSPSTLLRQGT

SEQ ID NO: 740778 - protein, 535 aa, Homo sapiens; identical to SEQ ID NO: 740777

SEQ ID NO: 740779 - protein, 504 aa, Homo sapiens
CGETLRLERKRFLWQHQLLGLLSVYTRPSCGPEALGHLLSRARSPEELSLATQLYAGLVVSLSGLLPLAFRSCLARVHAGTLQPPFTARFLRNLALLVGWEQQGGEGPAALGAHFGESASAHLSDLAPLLLHPEEEVAEAAASLLAICPFPSEALSPSQLLGLVRAGVHRFFASLRLHGPPGVASACQLLTRLSQTSPAGLKAVLQLLVEGALHRGNTELFGGQVDGDNETLSVVSASLASASLLDTNRRHTAAVPGPGGIWSVFHAGVIGRGLKPPKFVQSRNQQEVIYNTQSLLSLLVHCCSAPGGTECGECWGAPILSPEAAKAVAVTLVESVCPDAAGAELAWPPEEHARATVERDLRIGRRFREQPLLFELLKLVAAAPPALCYCSVLLRGLLAALLGHWEASRHPDTTHSPWHLEASCTLVAVMAEGSLLPPALGNMHEVFSQLAPFEVRLLLLSVWGFLREHGPLPQKFIFQSERGRFIRDFSREGGGEGLFFFSFR

SEQ ID NO: 740780 - protein, 495 aa, Homo sapiens
CGETLRLERKRFLWQHQLLGLLSVYTRPSCGPEALGHLLSRARSPEELSLATQLYAGLVVSLSGLLPLAFRSCLARVHAGTLQPPFTARFLRNLALLVGWEQQGGEGPAALGAHFGESASAHLSDLAPLLLHPEEEVAEAAASLLAICPFPSEALSPSQLLGLVRAGVHRFFASLRLHGPPGVASACQLLTRLSQTSPAGLKAVLQLLVEGALHRGNTELFGGQVDGDNETLSVVSASLASASLLDTNRRHTAAVPGPGGIWSVFHAGVIGRGLKPPKFVQSRNQQEVIYNTQSLLSLLVHCCSAPGGTECGECWGAPILSPEAAKAVAVTLVESVCPDAAGAELAWPPEEHARATVERDLRIGRRFREQPLLFELLKLVAAAPPALCYCSVLLRGLLAALLGHWEASRHPDTTHSPWHLEASCTLVAVMAEGSLLPPALGNMHEVFSQLAPFEVRLLLLSVWGFLREHGPLPQKFIFQSERGRFIRDFLLRQGT

SEQ ID NO: 740781 - protein, 108 aa, Homo sapiens
DGSRYPDMPTAADVVNALDQQALASILRTYGEEKHAKKIASAIVQARSIYPITRTQQLASIVAGSLINSQQCLREENYIYMCVCINPPDSLRDSFVLEIQDRILPILL

SEQ ID NO: 740782 - protein, 297 aa, Homo sapiens
MSSAHFNRGPAYGLSAEVKNKLAQKYDHQREQELREWIEGVTGRRIGNNFMDGLKDGIILCEFINKLQPGSVKKINESTQNWHQLENIGNFIKAITKYGVKPHDIFEANDLFENTNHTQVQSTLLALASMAKTKGNKVNVGVKYAEKQERKFEPGKLREGRNIIGLQMGTNKFASQQGMTAYGTRRHLYDPKLGTDQPLDQATISLQMGTNKGASQAGMTAPGTKRQIFEPGLGMEHCDTLNVSLQMGSNKGASQRGMTVYGLPRQVYDPKYCLTPEYPELGEPAHNHHAHNYYNSA

SEQ ID NO: 740783 - protein, 281 aa, Homo sapiens
MLGSQLAQKYDHQREQELREWIEGVTGRRIGNNFMDGLKDGIILCEFINKLQPGSVKKINESTQNWHQLENIGNFIKAITKYGVKPHDIFEANDLFENTNHTQVQSTLLALASMAKTKGNKVNVGVKYAEKQERKFEPGKLREGRNIIGLQMGTNKFASQQGMTAYGTRRHLYDPKLGTDQPLDQATISLQMGTNKGASQAGMTAPGTKRQIFEPGLGMEHCDTLNVSLQMGSNKGASQRGMTVYGLPRQVYDPKYCLTPEYPELGEPAHNHHAHNYYNSA

SEQ ID NO: 740784 - protein, 297 aa, Homo sapiens
RGGDRPSIHSLSSCSRWWSYFWARLVLTPREQELREWIEGVTGRRIGNNFMDGLKDGIILCEFINKLQPGSVKKINESTQNWHQLENIGNFIKAITKYGVKPHDIFEANDLFENTNHTQVQSTLLALASMAKTKGNKVNVGVKYAEKQERKFEPGKLREGRNIIGLQMGTNKFASQQGMTAYGTRRHLYDPKLGTDQPLDQATISLQMGTNKGASQAGMTAPGTKRQIFEPGLGMEHCDTLNVSLQMGSNKGASQRGMTVYGLPRQVYDPKYCLTPEYPELGEPAHNHHAHNYYNSA

SEQ ID NO: 740785 - protein, 297 aa, Homo sapiens; identical to SEQ ID NO: 740782

SEQ ID NO: 740786 - protein, 165 aa, Homo sapiens
GEGKAAEVVGGGAPPLWQAPTANGTALEETRVASGASKTCEEGRVCRRNFSRCLCSQRQCRHCPRQSPPASMSSAHFNRGPAYGLSAEVKNKLAQKYDHQREQELREWIEGVTGRRIGNNFMDGLKDGIILCELLLLLAGPSQAQPTPSPCMASSSPCRTQPLQG

SEQ ID NO: 740787 - protein, 140 aa, Homo sapiens
GEGKAAEVVGGGAPPLWQAPTANGTALEETRVASGASKTCEEGRVCRRNFSRCLCSQRQCRHCPRQSPPASMSSAHFNRGPAYGLSAEVKNKLAQKYDHQREQELREWIEGVTGRRIGNNFMDGLKDGIILCDDWHTMWM

SEQ ID NO: 740788 - protein, 161 aa, Homo sapiens
MRELEAKATKDVERNLSRDLVQEEEQLMEEKKKKKDDKKKKEAAQKKATEQKIKVPEQIKPSVSQPQPANSNNGTSTATSTNNNAKRATANNQQPQQQQQQRLGPLPAALRRALSSRASFAAPHLLVHFTHMRELEAKATKDVERNLSREFSARRRTVDGK

SEQ ID NO: 740789 - protein, 446 aa, Homo sapiens
ALRRSRLGLGSGSGMSALCDPPGAPGPPGPAPATHGPAPLSAQELSQEIKAFLTGVDPILGHQLSAREHARCGLLLLRSLPPARAAVLDHLRGVFDESVRAHLAALDETPVAGPPHLRPPPPSHVPAGGPGLEDVVQEVQQVLSEFIRANPKAWAPVISAWSIDLMGQLSSTYSGQHQRVPHATGALNELLQLWMGCRATRTLMDIYVQCLSALIGSCPDACVDALLDTSVQHSPHFDWVVAHIGSSFPGTIISRVLSCGLKDFCVHGGAGGGAGSSGGSSSQTPSTDPFPGSPAIPAEKRVPKIASVVGILGHLASRHGDSIRRELLRMFHDSLAGGSGGRSGDPSLQATVPFLLQLAVMSPALLGTVSGELVDCLKPPAVLSQLQQHLQGFPREELDNMLNLAVHLVSQASGAGAYRLLQFLVDTAMPASVITTQGLAVPDHRA

SEQ ID NO: 740790 - protein, 41 aa, Homo sapiens
MRVSGPTWLPWMKPLWLVHLTSVHLPFCRLLRQPVSTRPRI

SEQ ID NO: 740791 - protein, 281 aa, Homo sapiens
MGQLSSTYSGQHQRVPHATGALNELLQLWMGCRATRTLMDIYVQCLSALIGSCPDACVDALLDTSVQHSPHFDWVVAHIGSSFPGTIISRVLSCGLKDFCVHGGAGGGAGSSGGSSSQTPSTDPFPGSPAIPAEKRVPKIASVVGILGHLASRHGDSIRRELLRMFHDSLAGGSGGRSGDPSLQATVPFLLQLAVMSPALLGTVSGELVDCLKPPAVLSQLQQHLQGFPREELDNMLNLAVHLVSQASGAGAYRLLQFLVDTAMPASVITTQGLAVPDHRA

SEQ ID NO: 740792 - protein, 142 aa, Homo sapiens [sequence omitted]

SEQ ID NO: 740793 - protein, 655 aa, Homo sapiens
MDHTGAIDTEDEVGPLAHLAPSPQSEAVAHEFQELSLQSSQNLPPLNERKNVLQLRLQQRRTREQLVDQGIMPPLKSPAAFHEQIKSLERARTENFLKHKIRSRPDRSELVRMHILEETFAEPSLQATQMKLKRARLADDLNEKIAQRPGPMELVEKNILPVDSSVKEAIIGVGKEDYPHTQGDFSFDEDSSDALSPDQPASQESQGSAASPSEPKVSESPSPVTTNTPAQFAQCPHAEFLKTPPTADQPPPRPAAPVLPTNTVSSAKPGPALVKQSHPKNPNDKHRSKKCKDPKPRVKKLKYHQYIPPDQKGEKNEPQMDSNYARLLQQQQLFLQLQILSQQKQHYNYQTILPAPFKPLNDKNSNSGNSALNNATPNTPRQNTSTPVRKPGPLPSSLDDLKVSELKTELKLRGLPVSGTKPDLIERLKPYQEVNSSGLAAGGIVAVSSSAIVTSNPEVTVALPVTTLHNTVTSSVSTLKAELPPTGTSNATRVENVHSPLPISPSPSEQSSLSTDDTNMADTFTEIMTMMSPSQFLSSSPLRMTNNEDSLSPTSSTLSNLELDAAEKDRKLQEKEKQIEELKRKLEQEQKLVEVLKMQLEVEKRGQQQRPLEAQPSAPGHSVKSDQKHGSLGSSIKDEASLPDCSSSRQPIPVA

SEQ ID NO: 740794 - protein, 405 aa, Homo sapiens
  misc_feature (338)..(338): Xaa can be any naturally occurring amino acid
MDHTGAIDTEDEVGPLAHLAPSPQSEAVAHEFQELSLQSSQNLPPLNERKNVLQLRLQQRRTREQLVDQGIMPPLKSPAAFHEQIKSLERARTENFLKHKIRSRPDRSELVRMHILEETFAEPSLQATQMKLKRARLADDLNEKIAQRPGPMELVEKNILPVDSSVKEAIIGVGKEDYPHTQGDFSFDEDSSDALSPDQPASQESQGSAASPSEPKVSESPSPVTTNTPAQFAQCPHAEFLKTPPTADQPPPRPAAPVLPTNTVSSAKPGPALVKQSHPKNPNDKHRSKKCKDPKPRVKKLKYHQYIPPDQKGEKNEPQMDSNYARLLLCHLLAQPTXPGPGPRLQQMWLTQCRHMPGHAGWLLSWASAPSHQAVGLRPTRKVAVQPELLKRNPRSWLERDTPDY

SEQ ID NO: 740795 - protein, 238 aa, Homo sapiens
MDHTGAIDTEDEVGPLAHLAPSPQSEAVAHEFQELSLQSSQNLPPLNERKNVLQLRLQQRRTREQLVDQGIMPPLKSPAAFHEQIKSLERARTENFLKHKIRSRPDRSELVRMHILEETFAEPSLQATQMKLKRARLADDLNEKIAQRPGPMELVEKNILPVDSSVKEAIIGVGKEDYPHTQGDFSFDEDSSDALSPDQPASQESQGSAASPSEPKVSESPSPVTTNTPAQFASVSPR

SEQ ID NO: 740796 - protein, 670 aa, Homo sapiens
ANASNSPSSLRLLNEPQKRDCGSTGAGTDNDPNIYFLIQKMFYMLNTLTSNMSQLHSKVDLLSLEVSRIKKQVSPTEMVAKFQPPPEYQLTAAELKQIVDQSLSGGDLACRLLVQLFPELFSDVDFSRGCSACGFAAKRKLESLHLQLIRNYVEVYYPSVKDTAVWQAECLPQLNDFFSRFWAQREMEDSQPSGQVASFFEAEQVDPGHFLDNKDQEEALSLDRSSTIASDHVVDTQDLTEFLDEASSPGEFAVFLLHRLFPELFDHRKLGEQYSCYGDGGKQELDPQRLQIIRNYTEIYFPDMQEEEAWLQQCAQRINDELEGLGLDAGSEGDPPRDDCYDSSSLPDDISVVKVEDSFEGERPGRRSKKIWLVPIDFDKLEIPQPDFEVPGADCLLSKEQLRSIYESSLSIGNFASRLLVHLFPELFTHENLRKQYNCSGSLGKKQLDPSRIKLIRHYVQLLYPRAKNDRVWTLEFVGKLDERCRRRDTEQRRSYQQQRKVHVPGPECRDLTSYAINPERFREEFEGPPLPPERSSKDFCKIPLDELVVPSPDFPVPSPYLLSDKEVREIVQQSLSVGNFAARLLVRLFPELFTAENLRLQYNHSGACNKKQLDPTRLRLIRHYVEAVYPVEKMEEVWHYECIPSIDERCRRPNRKKCDILKKAKKVEK

SEQ ID NO: 740797 - protein, 448 aa, Homo sapiens
MTAALHSPVLRWDTQDLTEFLDEASSPGEFAVFLLHRLFPELFDHRKLGEQYSCYGDGGKQELDPQRLQIIRNYTEIYFPDMQEEEAWLQQCAQRINDELEGLGLDAGSEGDPPRDDCYDSSSLPDDISVVKVEDSFEGERPGRRSKKIWLVPIDFDKLEIPQPDFEVPGADCLLSKEQLRSIYESSLSIGNFASRLLVHLFPELFTHENLRKQYNCSGSLGKKQLDPSRIKLIRHYVQLLYPRAKNDRVWTLEFVGKLDERCRRRDTEQRRSYQQQRKVHVPGPECRDLTSYAINPERFREEFEGPPLPPERSSKDFCKIPLDELVVPSPDFPVPSPYLLSDKEVREIVQQSLSVGNFAARLLVRLFPELFTAENLRLQYNHSGACNKKQLDPTRLRLIRHYVEAVYPVEKMEEVWHYECIPSIDERCRRPNRKKCDILKKAKKVEK

SEQ ID NO: 740798 - protein, 448 aa, Homo sapiens; identical to SEQ ID NO: 740797

SEQ ID NO: 740799 - protein, 448 aa, Homo sapiens; identical to SEQ ID NO: 740797

SEQ ID NO: 740800 - protein, 304 aa, Homo sapiens
CPECGKAFSEKSRLRKHQRTHTGEKPYKCDGCDKAFSAKSGLRIHQRTHTGEKPFECHECGKSFNYKSILIVHQRTHTGEKPFECNECGKSFSHMSGLRNHRRTHTGERPYKCDECGKAFKLKSGLRKHHRTHTGEKPYKCNQCGKAFGQKSQLRGHHRIHTGEKPYKCNHCGEAFSQKSNLRVHHRTHTGEKPYQCEECGKTFRQKSNLRGHQRTHTGEKPYECNECGKAFSEKSVLRKHQRTHTGEKPYNCNQCGEAFSQKSNLRVHQRTHTGEKPYKCDKCGRTFSQKSSLREHQKAHPGD

SEQ ID NO: 740801 - protein, 75 aa, Homo sapiens
DPDDIWQLSSSLKGFDDKYTLKLTFISGRTKQQREAEFTKSIAKFFDHSGTLVMDAYEPEISRLHDSLAIERKIK

SEQ ID NO: 740802 - protein, 75 aa, Homo sapiens; identical to SEQ ID NO: 740801

SEQ ID NO: 740803 - protein, 38 aa, Homo sapiens
MEEVRGITPVFPNNKPTHDRQQLQGPALPSPLGTEQFP

SEQ ID NO: 740804 - protein, 157 aa, Homo sapiens
TAVGKLLLGILADFKWINTLYLYVATLIIMGLALCAIPFAKSYVTLALLSGILGFLTGNWSIFPYVTTKTVGIEKLAHAYGILMFFAGLGNSLGPPIVGWFYDWTQTYDIAFYFSGFCVLLGGFILLLAALPSWDTCNKQLPKPAPTTFLYKVASNV

SEQ ID NO: 740805 - protein, 147 aa, Homo sapiens
MELKKSPDGGWGWVIVFVSFLTQFLCYGSPLAVGVLYIEWLDAFGEGKGKTAWVGSLASGVGLLASPVCSLCVSSFGARPVTIFSGFMVAGGLMLSSFAPNIYFLFFSYGIVVGLGCGLLYTATVTITCQYFDDRRGLALGLISTDF

SEQ ID NO: 740806 - protein, 173 aa, Homo sapiens
PSPNHPRSHNRFRLAGVPRKERQGRKRQQGKPRGGEGEREGGAQRRGPAPQLHVAAAAAGLWGQRAAAPGAARSGTDCLILRQGPGPQLARINSRPAGPELQGRAAAAIPTTPPARPHGALSRVLSTGGPAEAGTQVTCSGFSSAQRLSRELITTNKLGCQKQINALPCFLGA

SEQ ID NO: 740807 - protein, 142 aa, Homo sapiens
PSPNHPRSHNRFRLAGVPRKERQGRKRQQGKPRGGEGEREGGAQRRGPAPQLHVAAAAAGLWGQRAAAPGAARSGTDCLILRQGPGPQLARINSRPAGPELQGRAAAAIPTTPPARPHGALSRVLSTGGPAEAGTQLLESCT

SEQ ID NO: 740808 - protein, 143 aa, Homo sapiens
PSPNHPRSHNRFRLAGVPRKERQGRKRQQGKPRGGEGEREGGAQRRGPAPQLHVAAAAAGLWGQRAAAPGAARSGTDCLILRQGPGPQLARINSRPAGPELQGRAAAAIPTTPPARPHGALSRVLSTGGPAEAGTQDLQRNAS

SEQ ID NO: 740809 - protein, 143 aa, Homo sapiens; identical to SEQ ID NO: 740808

SEQ ID NO: 740810 - protein, 142 aa, Homo sapiens; identical to SEQ ID NO: 740807

SEQ ID NO: 740811 - protein, 122 aa, Homo sapiens
SLPLPAPRDHLHLWLVAPFAICKGSSVAASTFLSLLPLSRCPLLALYLLPSSYEDPCDDMGPPRLSRIISHFRTLNSVTSAKSLLPCKVACSQALGVRMSTSLGDYSSAYHTAHNKIHGQRG

SEQ ID NO: 740812 - protein, 257 aa, Homo sapiens
CWPGERLAAGLSRPSLQGSGSPPPVFSALFLVMAALSKSIPHNCYEIGHTWHPSCRVSFLQITGGALEESLKIYAPLYLIAAILRKRKLDYYLHKLLPEILQSASFLTANGALYMAFFCILRLVLIITIEATETLFRMGVARGTITTLRNGEVLLFCITAAMYMFFFRCKDGLKGFTFSALRFIVGKEEIPTHSFSPEAAYAKVEQKREQHEEKPRRMNMIGLVRKFVDSICKHGPRHRCCKHYEDNCISYCIKVSI

SEQ ID NO: 740813 - protein, 373 aa, Homo sapiens
AGRARGWRLGSRAPPCRAQALPLLSSPRCSSSWRPSASPSLITAMRSATETLFRMGVARGTITTLRNGEVLLFCITAAMYMFFFRCKDGLKGFTFSALRFIVGKEEIPTHSFSPEAAYAKVEQKREQHEEKPRRMNMIGLVRKFVDSICKHGPRHRCCKHYEDNCISYCIKGFIRMFSVGYLIQCCLRIPSAFRHLFTQPSRLLSLFYNKENFQLGAFLGSFVSIYKGTSCFLRWIRNLDDELHAIIAGFLAGISMMFYKSTTISMYLASKLVETMYFKGIEAGKVPYFPHADTIIYSISTAICFQAAVMEVQTLRPSYWKFLLRLTKGKFAVMNRKVLDVFGTGASKHFQDFIPRLDPRYTTVTPELPTEFS

SEQ ID NO: 740814 - protein, 468 aa, Homo sapiens
CWPGERLAAGLSRPSLQGSGSPPPVFSALFLVMAALSKSIPHNCYEIGHTWHPSCRVSFLQITGGALEESLKIYAPLYLIAAILRKRKLDYYLHKLLPEILQSASFLTANGALYMAFFCILRKILGKFYSWTPGFGAALPASYVAILIERKSRRGLLTIYMANLVLLFCITAAMYMFFFRCKDGLKGFTFSALRFIVGKEEIPTHSFSPEAAYAKVEQKREQHEEKPRRMNMIGLVRKFVDSICKHGPRHRCCKHYEDNCISYCIKGFIRMFSVGYLIQCCLRIPSAFRHLFTQPSRLLSLFYNKENFQLGAFLGSFVSIYKGTSCFLRWIRNLDDELHAIIAGFLAGISMMFYKSTTISMYLASKLVETMYFKGIEAGKVPYFPHADTIIYSISTAICFQAAVMEVQTLRPSYWKFLLRLTKGKFAVMNRKVLDVFGTGASKHFQDFIPRLDPRYTTVTPELPTEFS

SEQ ID NO: 740815 - protein, 490 aa, Homo sapiens
CWPGERLAAGLSRPSLQGSGSPPPVFSALFLVMAALSKSIPHNCYEIGHTWHPSCRVSFLQITGGALEESLKIYAPLYLIAAILRKRKLDYYLHKLLPEILQSASFLTANGALYMAFFCILRKILGKFYSWTPGFGAALPASYVAILIERKSRRGLLTIYMANLATETLFRMGVARGTITTLRNGEVLLFCITAAMYMFFFRCKDGLKGFTFSALRFIVGKEEIPTHSFSPEAAYAKVEQKREQHEEKPRRMNMIGLVRKFVDSICKHGPRHRCCKHYEDNCISYCIKGFIRMFSVGYLIQCCLRIPSAFRHLFTQPSRLLSLFYNKENFQLGAFLGSFVSIYKGTSCFLRWIRNLDDELHAIIAGFLAGISMMFYKSTTISMYLASKLVETMYFKGIEAGKVPYFPHADTIIYSISTAICFQAAVMEVQTLRPSYWKFLLRLTKGKFAVMNRKVLDVFGTGASKHFQDFIPRLDPRYTTVTPELPTEFS

SEQ ID NO: 740816 - protein, 373 aa, Homo sapiens; identical to SEQ ID NO: 740813

SEQ ID NO: 740817 - protein, 490 aa, Homo sapiens; identical to SEQ ID NO: 740815

SEQ ID NO: 740818 - protein, 490 aa, Homo sapiens; identical to SEQ ID NO: 740815

SEQ ID NO: 740819 - protein, 423 aa, Homo sapiens
MWYVSTRGVAPRVNFEGALFSGYAPDGGLFMPEELPQLDRETLCQWSTLSYPGLVKELCALFIGSELLPKDELNDLIDRAFSRFRHREVVHLSRLRNGLNVLELWHGVTYAFKDLSLSCTTQFLQYFLEKREKHVTVVVGTSGDTGSAAIESVQGAKNMDIIVLLPKGHCTKIQELQMTTVLKQNVHVFGVEGNSDELDEPIKTVFADVAFVKIGLPIRLVVAVNRNDIIHRTVQQGDFSLSEAVKSTLASAMDIQVPYNMERVFWLLSGSDSQVTRALMEQFERTQSVNLPKELHSKLSEAVTSVSVSDEAITQTMGRCWDENQYLLCPHSAVAVNYHYQQIDRQQPSTPRCCLAPASAAKFPEAVLAAGLTPETPAEIVALEHKETRCTLMRRGDNWMLMLRDTIEDLSRQWRSHALNTSQ

SEQ ID NO: 740820 - protein, 423 aa, Homo sapiens; identical to SEQ ID NO: 740819

SEQ ID NO: 740821 - protein, 484 aa, Homo sapiens
MWYVSTRGVAPRVNFEGALFSGYAPDGGLFMPEELPQLDRETLCQWSTLSYPGLVKELCALFIGSELLPKDELNDLIDRAFSRFRHREVVHLSRLRNGLNVLELWHGVTYAFKDLSLSCTTQFLQYFLEKREKHVTVVVGTSGDTGSAAIESVQGAKNMDIIVLLPKGHCTKIQELQMTTVLKQNVHVFGVEGNSDELDEPIKTVFADVAFVKKHNLMSLNSINWSRVLVQMAHHFFAYFQCTPSLDTHPLPLVEVVVPTGAAGNLAAGYIAQKIGLPIRLVVAVNRNDIIHRTVQQGDFSLSEAVKSTLASAMDIQVPYNMERVFWLLSGSDSQVTRALMEQFERTQSVNLPKELHSKLSEAVTSVSVSDEAITQTMGRCWDENQYLLCPHSAVAVNYHYQQIDRQQPSTPRCCLAPASAAKFPEAVLAAGLTPETPAEIVALEHKETRCTLMRRGDNWMLMLRDTIEDLSRQWRSHALNTSQ

SEQ ID NO: 740822 - protein, 484 aa, Homo sapiens; identical to SEQ ID NO: 740821

SEQ ID NO: 740823 - protein, 384 aa, Homo sapiens
MWYVSTRGVAPRVNFEGALFSGYAPDGGLFMPEELPQLDRETLCQWSTLSYPGLVKELCALFIGSELLPKDELNDLIDRAFSRFRHREVVHLSRLRNGLNVLELWHGVTYAFKDLSLSCTTQFLQYFLEKREKHVTVVVGTSGDTGSAAIESVQGAKNMDIIVLLPKGHCTKIQELQMTTVLKQNVHVFGVEGNSDELDEPIKTVFADVAFVKKHNLMSLNSINWSRVLVQMAHHFFAYFQCTPSLDTHPLPLVEVVVPTGAAGNLAAGYIAQKIGLPIRLVVAVNRNDIIHRTVQQGDFSLSEAVKSTLASAMDIQVPYNMERVFWLLSGSDSQVTRALMEQFERTQSVNLPKELHSKHSPVLPRPCLCSQVPGSCPGCWPDP

SEQ ID NO: 740824 - protein, 377 aa, Homo sapiens
MWYVSTRGVAPRVNFEGALFSGYAPDGGLFMPEELPQLDRETLCQWSTLSYPGLVKELCALFIGSELLPKDELNDLIDRAFSRFRHREVVHLSRLRNGLNVLELWHGVTYAFKDLSLSCTTQFLQYFLEKREKHVTVVVGTSGDTGSAAIESVQGAKNMDIIVLLPKGHCTKIQELQMTTVLKQNVHVFGVEGNSDELDEPIKTVFADVAFVKKHNLMSLNSINWSRVLVQMAHHFFAYFQCTPSLDTHPLPLVEVVVPTGAAGNLAAGYIAQKIGLPIRLVVAVNRNDIIHRTVQQGDFSLSEAVKSTLASAMDIQVPYNMERVFWLLSGSDSQVTRALMEQFERTQSVNLPKELHSKGPSSSPSSGRDRTTKKWL

SEQ ID NO: 740825 - protein, 491 aa, Homo sapiens
MWYVSTRGVAPRVNFEGALFSGYAPDGGLFMPEELPQLDRETLCQWSTLSYPGLVKELCALFIGSELLPKDELNDLIDRAFSRFRHREVVHLSRLRNGLNVLELWHGVTYAFKDLSLSCTTQFLQYFLEKREKHVTVVVGTSGDTGSAAIESVQGAKNMDIIVLLPKGHCTKIQELQMTTVLKQNVHVFGVEGNSDELDEPIKTVFADVAFVKKHNLMSLNSINWSRVLVQMAHHFFAYFQCTPSLDTHPLPLVEVVVPTGAAGNLAAGYIAQKIGLPIRLVVAVNRNDIIHRTVQQGDFSLSEAVKSTLASAMDIQVPYNMERVFWLLSGSDSQVTRALMEQFERTQSVNLPKELHSKWERQDYEKMAVMECDGCCVELCLGNCGPRRGSVTDIPGQPWSEVVAELASNQEEQFASTPRCCLAPASAAKFPEAVLAAGLTPETPAEIVALEHKETRCTLMRRGDNWMLMLRDTIEDLSRQWRSHALNTSQ

SEQ ID NO: 740826 - protein, 420 aa, Homo sapiens
MWYVSTRGVAPRVNFEGALFSGYAPDGGLFMPEELPQLDRETLCQWSTLSYPGLVKELCALFIGSELLPKDELNDLIDRAFSRFRHREVVHLSRLRNGLNVLELWHGVTYAFKDLSLSCTTQFLQYFLEKREKHVTVVVGTSGDTGSAAIESVQGAKNMDIIVLLPKGHCTKIQELQMTTVLKQNVHVFGVEGNSDELDEPIKTVFADVAFVKKHNLMSLNSINWSRVLVQMAHHFFAYFQCTPSLDTHPLPLVEVVVPTGAAGNLAAGYIAQKIGLPIRLVVAVNRNDIIHRTVQQGDFSLSEAVKSTLASAMDIQVPYNMERVFWLLSGSDSQVTRALMEQFERTQSVNLPKELHSKFPEAVLAAGLTPETPAEIVALEHKETRCTLMRRGDNWMLMLRDTIEDLSRQWRSHALNTSQ

SEQ ID NO: 740827 - protein, 461 aa, Homo sapiens
SHCEAENPSSGPDRKPHRTVRDADSGVRTFAARAALLRTGPRAPRPAPRAPHLIDRAFSRFRHREVVHLSRLRNGLNVLELWHGVTYAFKDLSLSCTTQFLQYFLEKREKHVTVVVGTSGDTGSAAIESVQGAKNMDIIVLLPKGHCTKIQELQMTTVLKQNVHVFGVEGNSDELDEPIKTVFADVAFVKKHNLMSLNSINWSRVLVQMAHHFFAYFQCTPSLDTHPLPLVEVVVPTGAAGNLAAGYIAQKIGLPIRLVVAVNRNDIIHRTVQQGDFSLSEAVKSTLASAMDIQVPYNMERVFWLLSGSDSQVTRALMEQFERTQSVNLPKELHSKLSEAVTSVSVSDEAITQTMGRCWDENQYLLCPHSAVAVNYHYQQIDRQQPSTPRCCLAPASAAKFPEAVLAAGLTPETPAEIVALEHKETRCTLMRRGDNWMLMLRDTIEDLSRQWRSHALNTSQ

SEQ ID NO: 740828 - protein, 484 aa, Homo sapiens; identical to SEQ ID NO: 740821

SEQ ID NO: 740829 - protein, 425 aa, Homo sapiens
MWYVSTRGVAPRVNFEGALFSGYAPDGGLFMPEELPQLDRETLCQWSTLSYPGLVKELCALFIGSELLPKDELNDLIDRAFSRFRHREVVHLSRLRNGLNVLELWHGVTYAFKDLSLSCTTQFLQYFLEKREKHVTVVVGTSGDTGSAAIESVQGAKNMDIIVLLPKGHCTKIQELQMTTVLKQNVHVFGVEGNSDELDEPIKTVFADVAFVKKHNLMSLNSINWSRVLVQMAHHFFAYFQCTPSLDTHPLPLVEVVVPTGAAGNLAAGYIAQKIGLPIRLVVAVNRNDIIHRTVQQGDFSLSEAVKSTLASAMDIQVPYNMERVFWLLSGSDSQVTRALMEQFERTQSVNLPKELHSKLSEAVTSVSVSDEAITQTMGRCWDENQYLLCPHSAVAVNYHYQQIDRQQPSTPRCCLAPASAAKAE

SEQ ID NO: 740830 - protein, 392 aa, Homo sapiens
MWYVSTRGVAPRVNFEGALFSGYAPDGGLFMPEELPQLDRETLCQWSTLSYPGLVKELCALFIGSELLPKDELNDLIDRAFSRFRHREVVHLSRLRNGLNVLELWHGVTYAFKDLSLSCTTQFLQYFLEKREKHVTVVVGTSGDTGSAAIESVQGAKNMDIIVLLPKGHCTKIQELQMTTVLKQNVHVFGVEGNSDELDEPIKTVFADVAFVKKHNLMSLNSINWSRVLVQMAHHFFAYFQCTPSLDTHPLPLVEVVVPTGAAGNLAAGYIAQKIGLPIRLVVAVNRNDIIHRTVQQGDFSLSEAVKSTLASAMDIQVPYNMERVFWLLSGSDSQVTRALMEQFERTQSVNLPKELHSKSVTTHTPQRKERVQPHSRLGVWKSGQGKRTPVS

SEQ ID NO: 740831 - protein, 362 aa, Homo sapiens
MWYVSTRGVAPRVNFEGALFSGYAPDGGLFMPEELPQLDRETLCQWSTLSYPGLVKELCALFIGSELLPKDELNDLIDRAFSRFRHREVVHLSRLRNGLNVLELWHGVTYAFKDLSLSCTTQFLQYFLEKREKHVTVVVGTSGDTGSAAIESVQGAKNMDIIVLLPKGHCTKIQELQMTTVLKQNVHVFGVEGNSDELDEPIKTVFADVAFVKKHNLMSLNSINWSRVLVQMAHHFFAYFQCTPSLDTHPLPLVEVVVPTGAAGNLAAGYIAQKIGLPIRLVVAVNRNDIIHRTVQQGDFSLSEAVKSTLASAMDIQVPYNMERVFWLLSGSDSQVTRALMEQFERTQSVNLPKELHSKSSV

SEQ ID NO: 740832 - protein, 369 aa, Homo sapiens
MWYVSTRGVAPRVNFEGALFSGYAPDGGLFMPEELPQLDRETLCQWSTLSYPGLVKELCALFIGSELLPKDELNDLIDRAFSRFRHREVVHLSRLRNGLNVLELWHGVTYAFKDLSLSCTTQFLQYFLEKREKHVTVVVGTSGDTGSAAIESVQGAKNMDIIVLLPKGHCTKIQELQMTTVLKQNVHVFGVEGNSDELDEPIKTVFADVAFVKKHNLMSLNSINWSRVLVQMAHHFFAYFQCTPSLDTHPLPLVEVVVPTGAAGNLAAGYIAQKIGLPIRLVVAVNRNDIIHRTVQQGDFSLSEAVKSTLASAMDIQVPYNMERVFWLLSGSDSQVTRALMEQFERTQSVNLPKELHSKESNWEGLFLF

SEQ ID NO: 740833 - protein, 339 aa, Homo sapiens
SHCEAENPSSGPDRKPHRTVRDADSGVRTFAARAALLRTGPRAPRPAPRAPHLIDRAFSRFRHREVVHLSRLRNGLNVLELWHGVTYAFKDLSLSCTTQFLQYFLEKREKHVTVVVGTSGDTGSAAIESVQGAKNMDIIVLLPKGHCTKIQELQMTTVLKQNVHVFGVEGNSDELDEPIKTVFADVAFVKKHNLMSLNSINWSRVLVQMAHHFFAYFQCTPSLDTHPLPLVEVVVPTGAAGNLAAGYIAQKIGLPIRLVVAVNRNDIIHRTVQQGDFSLSEAVKSTLASAMDIQVPYNMERVFWLLSGSDSQVTRALMEQFERTQSVNLPKELHSKSSV

SEQ ID NO: 740834 - protein, 397 aa, Homo sapiens
PPFPVARAVPRYARREPGRAAKMSQPKKRKLESGGGGEGGEGTEEEDGAEREAALERPRRTKRERDQLYYECYSDVSVHEEMIADRVRTDAYRLGILRNWAALRGKTVLDVGAGTGILSIFCAQAGARRVYAVEASAIWQQAREVVRFNGLEDRVHVLPGPVETVELPEQVDAIVSEWMGYGLLHESMLSSVLHARTKWLKEGGLLLPASAELFIAPISDQMLEWRLGFWSQVKQHYGVDMSCLEGFATRCLMGHSEIVVQGLSGEDVLARPQRFAQLELSRAGLEQELEAGVGGRFRCSCYGSAPMHGFAIWFQVTFPGGESEKPLVLSTSPFHPATHWKQALLYLNEPVQVEQDTDVSGEITLLPSRDNPRRLRVLLRYKVGDQEEKTKDFAMED

SEQ ID NO: 740835 - protein, 397 aa, Homo sapiens; identical to SEQ ID NO: 740834

SEQ ID NO: 740836 - protein, 397 aa, Homo sapiens; identical to SEQ ID NO: 740834

SEQ ID NO: 740837 - protein, 314 aa, Homo sapiens
PPFPVARAVPRYARREPGRAAKMSQPKKRKLESGGGGEGGEGTEEEDGAEREAALERPRRTKRERDQLYYECYSDVSVHEEMIADRVRTDAYRLGILRNWAALRGKTVLDVGAGTGILSIFCAQAGARRVYAVEASAIWQQAREVVRFNGLEDRVHVLPGPVETVELPEQVDAIVSEWMGYGLLHESMLSSVLHARTKWLKEGGLLLPASAELFIAPISDQMLEWRLGFWSQVTFPGGESEKPLVLSTSPFHPATHWKQALLYLNEPVQVEQDTDVSGEITLLPSRDNPRRLRVLLRYKVGDQEEKTKDFAMED

SEQ ID NO: 740838 - protein, 397 aa, Homo sapiens; identical to SEQ ID NO: 740834

SEQ ID NO: 740839 - protein, 112 aa, Homo sapiens [sequence omitted]

SEQ ID NO: 740840 - protein, 447 aa, Homo sapiens
TQRLWSSSCWEAAPGPSTCAAAMASSIICQEHCQISGQAKIDILLVGDVTVGYLADTVQKLFANIAEVTITISDTKEAAALLDDCIFNMVLLKVPSSLSAEELEAIKLIRFGKKKNTHSLFVFIIPENFKGCISGHGMDIALTEPLTMEKMSNVVKYWTTCPSNTVKTENATGPEELGLPLQRSYSEHLGYFPTDLFACSESLRNGNGLELNASLSEFEKNKKISLLHSSKEKLRRERIKYCCEQLRTLLPYVKGRKNDAASVLEATVDYVKYIREKISPAVMAQITEALQSNMRFCKKQQTPIELSLPGTVMAQRENSVMSTYSPERGLQFLANTCWNGCSTPDAESSLDEAVRVPSSSASENAIGDPYKTHISSAALSLNSLHTVRYYSKVTPSYDATAVTNQNISIHLPSAMPPVSKLLPRHCTSGLGQTCTTHPNCLQQFWAY

SEQ ID NO: 740841 - protein, 107 aa, Homo sapiens [sequence omitted]

SEQ ID NO: 740842 - protein, 359 aa, Homo sapiens
MVLLKVPSSLSAEELEAIKLIRFGKKKNTHSLFVFIIPENFKGCISGHGMDIALTEPLTMEKMSNVVKYWTTCPSNTVKTENATGPEELGLPLQRSYSEHLGYFPTDLFACSESLRNGNGLELNASLSEFEKNKKISLLHSSKEKLRRERIKYCCEQLRTLLPYVKGRKNDAASVLEATVDYVKYIREKISPAVMAQITEALQSNMRFCKKQQTPIELSLPGTVMAQRENSVMSTYSPERGLQFLANTCWNGCSTPDAESSLDEAVRVPSSSASENAIGDPYKTHISSAALSLNSLHTVRYYSKVTPSYDATAVTNQNISIHLPSAMPPVSKLLPRHCTSGLGQTCTTHPNCLQQFWAY

SEQ ID NO: 740843 - protein, 359 aa, Homo sapiens; identical to SEQ ID NO: 740842

SEQ ID NO: 740844 - protein, 359 aa, Homo sapiens; identical to SEQ ID NO: 740842

SEQ ID NO: 740845 - protein, 623 aa, Homo sapiens
MKEERNYNFDGVSTNRLKQQLLEEVRKKDAVQLSIFELRHKITELEAKLNTDNEGSEWKTRYETQLELNDELEKQIVYLKEKVEKIHGNSSDRLSSIRVYERMPVKAMRFAVQGWCSGCIMPSGIQASPKFLLCHPFESLNTLLKQLEEEKRTLESQVKYYALKLEQESKAYQKINNERRTYLAEMSQGSGLHQVSKRQQVDQLPRMQENLVKTQKYDILLVGDVTVGYLADTVQKLFANIAEVTITISDTKEAAALLDDCIFNMVLLKVPSSLSAEELEAIKLIRFGKKKNTHSLFVFIIPENFKGCISGHGMDIALTEPLTMEKMSNVVKYWTTCPSNTVKTENATGPEELGLPLQRSYSEHLGYFPTDLFACSESLRNGNGLELNASLSEFEKNKKISLLHSSKEKLRRERIKYCCEQLRTLLPYVKGRKNDAASVLEATVDYVKYIREKISPAVMAQITEALQSNMRFCKKQQTPIELSLPGTVMAQRENSVMSTYSPERGLQFLANTCWNGCSTPDAESSLDEAVRVPSSSASENAIGDPYKTHISSAALSLNSLHTVRYYSKVTPSYDATAVTNQNISIHLPSAMPPVSKLLPRHCTSGLGQTCTTHPNCLQQFWAY

SEQ ID NO: 740846 - protein, 139 aa, Homo sapiens [sequence omitted]

SEQ ID NO: 740847 - protein, 161 aa, Homo sapiens [sequence omitted]

SEQ ID NO: 740848 - protein, 187 aa, Homo sapiens
GRLVVVEDLHSGAQQHWSGHSAEISTLALSHSAQVLASASGRSSTTAHCQIRVWDVSGGLCQHLIFPHSTTVLALAFSPDDRLLVTLGDHDGRTLALWGTATYDLVSSTRLPEPVHGVAFNPWDAGELTCVGQGTVTFWLLQQRGADISLQVRREPVPEAVGAGELTSLCYGAPPLLYCGTSSGQVC

SEQ ID NO: 740849 - protein, 67 aa, Homo sapiens
PMTGIHRVPSLFANEEHEAREVKLPAETSQLRFPSQDLIPRLPHLKLPCTAHGGQHLLEAVHQETGT

SEQ ID NO: 740850 - protein, 264 aa, Homo sapiens
GEVVMAAPEAEVLSSAAVPDLEWYEKSEETHASQIELLETSSTQEPLNASEAFCPRDCMVPVVFPGPVSQEGCCQFTCELLKHIMYQRQQLPLPYEQLKHFYRKPSPQAEEMLKKKPRATTEVSSRKCQQALAELESVLSHLEDFFARTLVPGVDDSPWGHALGPKEFYDLDVSLLAPYSVDQSLSTDSLFAAGSSEAYHGLMPLEKLQGSSIMGTVVMAQEHRKCGEDWFQTKLNIEGQAGHKLTGTRHGGDFHRTTLGKTHI

SEQ ID NO: 740851 - protein, 305 aa, Homo sapiens
LLMFDTLVEDVNICLQACSSLHALSSSLPDDLLQRCVDVCRVQLVHRGTCIRQAFGKLLKSIPLGVFLSDNNHTEIQEISLALRSHMSKAPSNTFHPQDFSDVISFILYGNSHRTGKDNWLERLFYSCQRLDKRDQSTIPRNLLKTDAILWQWAIWEAAQFTVLSKLRTPLGRAQDTFQTIEGIIRSLAGHTLNPDQDVSQWTTADSDEGHGNNQLRLVLLLQYLENLEKLMYNAYEGCANALTSPPKVIRTFLYTNRQTCQDWLTRIRLSIMRVGLLAGQPAVTVRHGFDLLTEMKTTSLSQGK

SEQ ID NO: 740852 - protein, 249 aa, Homo sapiens
MSSFLINSNYVDPKFPPCEEYSQSDYLPSDHSPGYYAGGQRRESSFQPEAGFGRRAACTVQRYAACRDPGPPPPPPPPPPPPPPPGLSPRAPAPPPAGALLPEPGQRCEAVSSSPPPPPCAQNPLHPSPSHSACKEPVVYPWMRKVHVSTVNPNYAGGEPKRSRTAYTRQQVLELEKEFHYNRYLTRRRRVEIAHALCLSERQIKIWFQNRRMKWKKDHKLPNTKIRSGGAAGSAGGPPGRPNGGPRAL

SEQ ID NO: 740853 - protein, 249 aa, Homo sapiens; identical to SEQ ID NO: 740852

SEQ ID NO: 740854 - protein, 79 aa, Homo sapiens
HLIMLEKNLGLNPGKVSLQGQGDLLKNAKNEAIENMKQIQLACLSCGLSKAPSSSAEAKSKRSLEAIEEKESSEENGKL

SEQ ID NO: 740855 - protein, 997 aa, Homo sapiens
MPSEKKISSANDCISFMQAGCELKKVRPNSRIYNRFFTLDTDLQALRWEPSKKDLEKAKLDISAIKEIRLGKNTETFTNNGLADQICEDCAFSILHGENYESLDLVANSADVANIWVSGLRYLVSRSKQPLDFMEGNQNTPRFMWLKTVFEAADVDGNGIMLEDTSVELIKQLNPTLKEAKIRLKFKEIQKSKEKLTTRVTEEEFCEAFCELCTRPEVYFLLVQISKNKEYLDANDLMLFLEAEQGVTHITEDICLDIIRRYELSEEGRQKGFLAIDGFTQYLLSSECDIFDPEQKKVAQDMTQPLSHYYINASHNTYLIEDQFRGPADINGYIRALKMGCRSVELDVSDGSDNEPILCNRNNMTTHVSFRSVIEVINKFAFVASEYPLILCLGNHCSLPQQKVMAQQMKKVFGNKLYTEAPLPSESYLPSPEKLKRMIIVKGKKLPSDPDVLEGEVTDEDEEAEMSRRMSVDYNGEQKQIRLCRELSDLVSICKSVQYRDFELSMKSQNYWEMCSFSETEASRIANEYPEDFVNYNKKFLSRIYPSAMRIDSSNLNPQDFWNCGCQIVAMNFQTPGPMMDLHTGWFLQNGGCGYVLRPSIMRDEVSYFSANTKGILPGVSPLALHIKIISGQNFPKPKGACAKGDVIDPYVCIEIHGIPADCSEQRTKTVQQNSDNPIFDETFEFQVNLPELAMIRFVVLDDDYIGDEFIGQYTIPFECLQPGYRHVPLRSFVGDIMEHVTLFVHIAITNRSGGGKAQKRSLSVRMGKKVREYTMLRNIGLKTIDDIFKIAVHPLREAIDMRENMQNAIVSIKELCGLPPIASLKQCLLTLSSRLITSDNTPSVSLVMKDSFPYLEPLGAIPDVQKKMLTAYDLMIQESRFLIEMADTVQEKIVQCQKAGMEFHEELHNLGAKEGLKGRKLNKATESFAWNITVLKGQGDLLKNAKNEAIENMKQIQLACLSCGLSKAPSSSAEAKSKRSLEAIEEKESSEENGKL

SEQ ID NO: 740856 - protein, 497 aa, Homo sapiens
DSRGSHECLLALGLLQAIKLYLRRQRLLRDLRPFPAPPTHWFLGHQKFIQDDNMEKLEEIIEKYPRAFPFWIGPFQAFFCIYDPDYAKTLLSRTDPKSQYLQKFSPPLLGKGLAALDGPKWFQHRRLLTPGFHFNILKAYIEVMAHSVKMMLDKWEKICSTQDTSVEVYEHINSMSLDIIMKCAFSKETNCQTNSTHDPYAKAIFELSKIIFHRLYSLLYHSDIIFKLSPQGYRFQKLSRVLNQYTDTIIQERKKSLQAGVKQDNTPKRKYQDFLDIVLSAKDESGSSFSDIDVHSEVSTFLLAGHDTLAASISWILYCLALNPEHQERCREEVRGILGDGSSITWDQLGEMSYTTMCIKETCRLIPAVPSISRDLSKPLTFPDGCTLPAGITVVLSIWGLHHNPAVWKNPKVFDPLRFSQENSDQRHPYAYLPFSAGSRNCIGQEFAMIELKVTIALILLHFRVTPDPTRPLTFPNHFILKPKNGMYLHLKKLSEC

SEQ ID NO: 740857 - protein, 441 aa, Homo sapiens
QKQLGRTKRARFGNRLEIPHARLPPLPRPELPLPLPFLLPASQKLREGPERRWGGRPYASSGREKAHPLPRPRKPPAFGAAQSHGILLAGDALGAAFYLAFVFCLALGLLQAIKLYLRRQRLLRDLRPFPAPPTHWFLGHQKFIQDDNMEKLEEIIEKYPRAFPFWIGPFQAFFCIYDPDYAKTLLSRTDPKSQYLQKFSPPLLGKGLAALDGPKWFQHRRLLTPGFHFNILKAYIEVMAHSVKMMLDKWEKICSTQDTSVEVYEHINSMSLDIIMKCAFSKETNCQTNSTHDPYAKAIFELSKIIFHRLYSLLYHSDIIFKLSPQGYRFQKLSRVLNQYTDTIIQERKKSLQAGVKQDNTPKRKYQDFLDIVLSAKDESGSSFSDIDVHSEVSTFLLAGHDTLAASISWILYCLALNPEHQERCREEVRGILGDGSSITW

SEQ ID NO: 740858 - protein, 592 aa, Homo sapiens
QKQLGRTKRARFGNRLEIPHARLPPLPRPELPLPLPFLLPASQKLREGPERRWGGRPYASSGREKAHPLPRPRKPPAFGAAQSHGILLAGDALGAAFYLAFVFCLALGLLQAIKLYLRRQRLLRDLRPFPAPPTHWFLGHQKFIQDDNMEKLEEIIEKYPRAFPFWIGPFQAFFCIYDPDYAKTLLSRTDPKSQYLQKFSPPLLGKGLAALDGPKWFQHRRLLTPGFHFNILKAYIEVMAHSVKMMLDKWEKICSTQDTSVEVYEHINSMSLDIIMKCAFSKETNCQTNSTHDPYAKAIFELSKIIFHRLYSLLYHSDIIFKLSPQGYRFQKLSRVLNQYTDTIIQERKKSLQAGVKQDNTPKRKYQDFLDIVLSAKDESGSSFSDIDVHSEVSTFLLAGHDTLAASISWILYCLALNPEHQERCREEVRGILGDGSSITWDQLGEMSYTTMCIKETCRLIPAVPSISRDLSKPLTFPDGCTLPAGITVVLSIWGLHHNPAVWKNPKVFDPLRFSQENSDQRHPYAYLPFSAGSRNCIGQEFAMIELKVTIALILLHFRVTPDPTRPLTFPNHFILKPKNGMYLHLKKLSEC

SEQ ID NO: 740859 - protein, 489 aa, Homo sapiens
MWGGGLDLCPMPGQLKFPPCLSRCLLWEPPSLYLTQPTSSLAEPQALICMTSSSSGLFIQDDNMEKLEEIIEKYPRAFPFWIGPFQAFFCIYDPDYAKTLLSRTDPKSQYLQKFSPPLLVTPGFHFNILKAYIEVMAHSVKMMLDKWEKICSTQDTSVEVYEHINSMSLDIIMKCAFSKETNCQTNSTHDPYAKAIFELSKIIFHRLYSLLYHSDIIFKLSPQGYRFQKLSRVLNQYTDTIIQERKKSLQAGVKQDNTPKRKYQDFLDIVLSAKDESGSSFSDIDVHSEVSTFLLAGHDTLAASISWILYCLALNPEHQERCREEVRGILGDGSSITWDQLGEMSYTTMCIKETCRLIPAVPSISRDLSKPLTFPDGCTLPAGITVVLSIWGLHHNPAVWKNPKVFDPLRFSQENSDQRHPYAYLPFSAGSRNCIGQEFAMIELKVTIALILLHFRVTPDPTRPLTFPNHFILKPKNGMYLHLKKLSEC

SEQ ID NO: 740860 - protein, 192 aa, Homo sapiens
  misc_feature (6)..(6): Xaa can be any naturally occurring amino acid
LVRSEXLGSWILYCLALNPEHQERCREEVRGILGDGSSITWDQLGEMSYTTMCIKETCRLIPAVPSISRDLSKPLTFPDGCTLPAGITVVLSIWGLHHNPAVWKNPKVFDPLRFSQENSDQRHPYAYLPFSAGSRNCIGQEFAMIELKVTIALILLHFRVTPDPTRPLTFPNHFILKPKNGMYLHLKKLSEC

SEQ ID NO: 740861 - protein, 327 aa, Homo sapiens
CGAAAARRWGASVCGVRARARARARARAGCEPGGGGGDGDGGGMAESEAETPSTPGEFESKYFEFHGVRLPPFCRGKMEEIANFPVRPSDVWIVTYPKSGTSLLQEVVYLVSQGADPDEIGLMNIDEQLPVLEYPQPGLDIIKELTSPRLIKSHLPYRFLPSDLHNGDSKVIYMARNPKDLVVSYYQFHRSLRTMSYRGTFQEFCRRFMNDKLGYGSWFEHVQEFWEHRMDSNVLFLKYEDMHRDLVTMVEQLARFLGVSCDKAQLEALTEHCHQLVDQCCNAEALPVGRGRVGLWKDIFTVSMNEKFDLVYKQKMGKCDLTFDFYL

SEQ ID NO: 740862 - protein, 303 aa, Homo sapiens
CGAAAARRWGASVCGVRARARARARARAGCEPGGGGGDGDGGGMAESEAETPSTPGEFESKYFEFHGVRLPPFCRGKMEEIANFPVRPSDVWIVTYPKSGTSLLQEVVYLVSQGADPDEIGLMNIDEQLPVLEYPQPGLDIIKELTSPRLIKSHLPYRFLPSDLHNGDSKVIYMARNPKDLVVSYYQFHRSLRTMSYRGTFQEFCRRFMNDKLGYGSWFEHVQEFWEHRMDSNVLFLKYEDMHRDLVTMVEQLARFLGVSCDKAQLEALTEHCHQLVDQCCNAEALPVGRAHCVFARKIFLSW

SEQ ID NO: 740863 - protein, 259 aa, Homo sapiens
CGAAAARRWGASVCGAGRGRGRGRGRVRAASREAAAATATAAAWRRARPRPPAPRGSSRASTSSSMACGCRPSAAGRWRRSPTSRCGPATCGSSPTPSPELTSPRLIKSHLPYRFLPSDLHNGDSKVIYMARNPKDLVVSYYQFHRSLRTMSYRGTFQEFCRRFMNDKLGYGSWFEHVQEFWEHRMDSNVLFLKYEDMHRDLVTMVEQLARFLGVSCDKAQLEALTEHCHQLVDQCCNAEALPVGRAHCVFARKIFLSW

SEQ ID NO: 740864 - protein, 214 aa, Homo sapiens
CGAAAARRWGASVCGVRARARARARARAGCEPGGGGGDGDGGGMAESEAETPSTPGEFESKYFEFHGVRLPPFCRGKMEEIANFPVRPSDVWIVTYPKSVGYGSWFEHVQEFWEHRMDSNVLFLKYEDMHRDLVTMVEQLARFLGVSCDKAQLEALTEHCHQLVDQCCNAEALPVGRGRVGLWKDIFTVSMNEKFDLVYKQKMGKCDLTFDFYL

SEQ ID NO: 740865 - protein, 327 aa, Homo sapiens; identical to SEQ ID NO: 740861

SEQ ID NO: 740866 - protein, 332 aa, Homo sapiens
CGAAAARRWGASVCGVRARARARARARAGCEPGGGGGDGDGGGMAESEAETPSTPGEFESKYFEFHGVRLPPFCRGKMEEIANFPVRPSDVWIVTYPKSGTSLLQEVVYLVSQGADPDEIGLMNIDEQLPVLEYPQPGLDIIKELTSPRLIKSHLPYRFLPSDLHNGDSKVIYMARNPKDLVVSYYQFHRSLRTMSYRGTFQEFCRRFMNDKLGYGSWFEHVQEFWEHRMDSNVLFLKYEDMHRDLVTMVEQLARFLGVSCDKAQLEALTEHCHQLVDQCCNAEALPVGREELGCGDQGHQRAFGKGTACGGWLTFSSMVLLLGAPPPAEPC

SEQ ID NO: 740867 - protein, 102 aa, Homo sapiens
CLNHYCYWNCLSHLGIVVWQSIGLYHHRAQSFCLQSFLPSWVQNLKMIVVIAKIIVAFTTSKIASIITKSIIAIPTATISITTTMAATKATTITELDDCICD

SEQ ID NO: 740868 - protein, 102 aa, Homo sapiens
CLSVGSEKSRCVKLFVSVCVCDCRCTCVCKCLRMCLSFTYHFWASSHLPSESVSSKTPSLPSATQRFYLYYGLCNLSNKHRTLAPGGVNLDSLAWSIIKLLS

SEQ ID NO: 740869 - protein, 139 aa, Homo sapiens
MKSIMYSISPANSEEGQELYVCTVKDDVNLDTVLLLPFLKEIAVSQLDQLSPEEQLLVKCAAIIGHSFHIDLLQHLLPGWDKNKLLQVLRALVDIHVLCWSDKSQELPAEPILMPSSIDIIDGTKEKKTKLDGRYDERR

SEQ ID NO: 740870 - protein, 249 aa, Homo sapiens
MKSIMYSISPANSEEGQELYVCTVKDDVNLDTVLLLPFLKEIAVSQLDQLSPEEQLLVKCAAIIGHSFHIDLLQHLLPGWDKNKLLQVLRALVDIHVLCWSDKSQELPAEPILMPSSIDIIDGTKEKKTKLDGGSASLLRLQEELSLPQTEVLEFGVPLLRAAAWELWPKEQQIALHLECACFLQVLACRCGSCHGGDFVPFHHFAVCSTKNSKGTSRFCTYRDTGSVLTQVITEKLQLPSPQEQRKSS

SEQ ID NO: 740871 - protein, 151 aa, Homo sapiens
TEPGEACGGRTSRTASLVSGLLNELYSCTEEEEAAGGGRGAEGRRRRRDSLDSSTEASGSDVVLGGRSGAGDSRVLQELQERPSQRHQMLYLRQKGEGRAQQGPGGFLEPGCPRRLCPRSSAHLGCSAERSDTVSLDLTVVPTVAQIYVHT

SEQ ID NO: 740872 - protein, 867 aa, Homo sapiens
TEPGEACGGRTSRTASLVSGLLNELYSCTEEEEAAGGGRGAEGRRRRRDSLDSSTEASGSDVVLGGRSGAGDSRVLQELQERPSQRHQMLYLRQKDANELKTILRELKYRIGIQSAKLLRHLKQKDRLLHKVQRNCDIVTACLQAVSQKRTWQNSSSGVDTKLKFTLEPSLGQNGFQQWYDALKAVARLSTGIPKEWRRKVWLTLADHYLHSIAIDWDKTMRFTFNERSNPDDDSMGIQIVKDLHRTGCSSYCGQEAEQDRVVLKRVLLAYARWNKTVGYCQGFNILAALILEVMEGNEGDALKIMIYLIDKVLPESYFVNNLRALSVDMAVFRDLLRMKLPELSQHLDTLQRTANKESGGGYEPPLTNVFTMQWFLTLFATCLPNQTVLKIWDSVFFEGSEIILRVSLAIWAKLGEQIECCETADEFYSTMGRLTQEMLENDLLQSHELMQTVYSMAPFPFPQLAELREKYTYNITPFPATVKPTSVSGRHSKARDSDEENDPDDEDAVVNAVGCLGPFSGFLAPELQKYQKQIKEPNEEQSLRSNNIAELSPGAINSCRSEYHAAFNSMMMERMTTDINALKRQYSRIKKKQQQQVHQVYIRADKGPVTSILPSQVNSSPVINHLLLGKKMKMTNRAAKNAVIHIPGHTGGKISPVPYEDLKTKLNSPWRTHIRVHKKNMPRTKSHPGCGDTVGLIDEQNEASKTNGLGAAEAFPSGCTATAGREGSSPEGSTRRTIEGQSPEPVFGDADVDVSAVQAKLGALELNQRDAAAETELRVHPPCQRHCPEPPSAPEENKATSKAPQGSNSKTPIFSPFPSVKPLRKSATARNLGLYGPTERTPTVHFPQMSRSFSKPGGGNSGTKKR

SEQ ID NO: 740873 - protein, 867 aa, Homo sapiens; identical to SEQ ID NO: 740872

SEQ ID NO: 740874 - protein, 860 aa, Homo sapiens
TEPGEACGGRTSRTASLVSGLLNELYSCTEEEEAAGGGRGAEGRRRRRDSLDSSTEASGSDVVLGGRSGAGDSRVLQELQERPSQRHQMLYLRQKDANELKTILRELKYRIGIQSAKLLRHLKQKDRLLHKVQRNCDIVTACLQAVSQKRRVDTKLKFTLEPSLGQNGFQQWYDALKAVARLSTGIPKEWRRKVWLTLADHYLHSIAIDWDKTMRFTFNERSNPDDDSMGIQIVKDLHRTGCSSYCGQEAEQDRVVLKRVLLAYARWNKTVGYCQGFNILAALILEVMEGNEGDALKIMIYLIDKVLPESYFVNNLRALSVDMAVFRDLLRMKLPELSQHLDTLQRTANKESGGGYEPPLTNVFTMQWFLTLFATCLPNQTVLKIWDSVFFEGSEIILRVSLAIWAKLGEQIECCETADEFYSTMGRLTQEMLENDLLQSHELMQTVYSMAPFPFPQLAELREKYTYNITPFPATVKPTSVSGRHSKARDSDEENDPDDEDAVVNAVGCLGPFSGFLAPELQKYQKQIKEPNEEQSLRSNNIAELSPGAINSCRSEYHAAFNSMMMERMTTDINALKRQYSRIKKKQQQQVHQVYIRADKGPVTSILPSQVNSSPVINHLLLGKKMKMTNRAAKNAVIHIPGHTGGKISPVPYEDLKTKLNSPWRTHIRVHKKNMPRTKSHPGCGDTVGLIDEQNEASKTNGLGAAEAFPSGCTATAGREGSSPEGSTRRTIEGQSPEPVFGDADVDVSAVQAKLGALELNQRDAAAETELRVHPPCQRHCPEPPSAPEENKATSKAPQGSNSKTPIFSPFPSVKPLRKSATARNLGLYGPTERTPTVHFPQMSRSFSKPGGGNSGTKKR

SEQ ID NO: 740875 - protein, 199 aa, Homo sapiens
MPEQSNDYRVAVFGAGGVGKSSLVLRFVKGTFRESYIPTVEDTYRQVISCDKSICTLQITDTTGSHQFPAMQRLSISKGHAFILVYSITSRQSLEELKPIYEQICEIKGDVESIPIMLVGNKCDESPSREVQSSEAEALARTWKCAFMETSAKLNHNVKELFQELLNLEKRRTVSLQIDGKKSKQQKRKEKLKGKCVIM

SEQ ID NO: 740876 - protein, 199 aa, Homo sapiens; identical to SEQ ID NO: 740875

SEQ ID NO: 740877 - protein, 876 aa, Homo sapiens
QGDSNPPRDPGVEMTVFRKVSSTPPVRCSSQHSVFGFNQVSELLPRMEDSGPLRDIKELVREQGSNNVIVTSADREMLKLSSQEKLIGDLPQTPPGAVPDPSLASTDSSEPSPLAGDGAPWSGSSMADTPMSPLLKGSLSQELSKSFLTLTRPDRALVRTSSRREQRRGAGGYQPLDRRGSGEPTPQKAGSSDSCFSGTDRETLSSFKSEKTNSTHLDSPPGGPAPEGSDTDPPSEAELPASPDAGVPSDDTLRSFDTVIGAGTPPGLAEPLLVVRPKDLALLRPSKRQPPLRRHSPPGRAPRRPLLEGGGFFEDEDTSEGSELSPASSLRSQRRYSTDSSSSTSCYSPESSRGAAGGPRKRRAPHGAEEGTAVPPKRPYGTQRTPSTASAKTHARVLSMDGAGGDVLRPPLAGCKAELEAQVGVEQAASEPVVLPAEARRGPAANQPGWRGELQEEGAVGGAAEETGRRDRSSSVRRTQAIRRRHNAGSNPTPPASVMGSPPSSLQEAQRGRAASHSRALTLPSALHFASSLLLTRAGANVHEACTFDDTSEGAVHYFYDESGVRRSYTFGLAGGGYENPVGQQGEQTANGAWDRHSHSSSFHSADVPEATGGLNLLQPRPVVLQGMQVRRVPLEIPEEQTLMEEAPPRAQHSYKYWLLPGRWTSVRYERLALLALLDRTRGVLENIFGVGLSSLVAFLGYLLLLKGFFTDIWVFQFCLVIASCQYSLLKSVQPDAASPMHGHNWVIAYSRPVYFCICCLLIWLLDALGSAQPFPPVSLYGLTLFSASFFFCARDVATVFTLCFPFVFLLGLLPQVNTCPRPRSPPEALPCLHICFALTQFGNSNCPAEVHSPDPFPTLVRVAGFSKPLSGISLC

SEQ ID NO: 740878 - protein, 677 aa, Homo sapiens
QGDSNPPRDPGVEMTVFRKVSSTPPVRCSSQHSVFGFNQVSELLPRMEDSGPLRDIKELVREQGSNNVIVTSADREMLKLSSQEKLIGDLPQTPPGAVPDPSLASTDSSEPSPLAGDGAPWSGSSMADTPMSPLLKGSLSQELSKSFLTLTRPDRALVRTSSRREQRRGAGGYQPLDRRGSGEPTPQKAGSSDSCFSGTDRETLSSFKSEKTNSTHLDSPPGGPAPEGSDTDPPSEAELPASPDAGVPSDDTLRSFDTVIGAGTPPGLAEPLLVVRPKDLALLRPSKRQPPLRRHSPPGRAPRRPLLEGGGFFEDEDTSEGSELSPASSLRSQRRYSTDSSSSTSCYSPESSRGAAGGPRKRRAPHGAEEGTAVPPKRPYGTQRTPSTASAKTHARVLSMDGAGGDVLRPPLAGCKAELEAQVGVEQAASEPVVLPAEARRGPAANQPGWRGELQEEGAVGGAAEETGRRDRSSSVRRTQAIRRRHNAGSNPTPPASVMGSPPSSLQEAQRGRAASHSRALTLPSALHFASSLLLTRAGANVHEACTFDDTSEGAVHYFYDESGVRRSYTFGLAGGGYENPVGQQGEQTANGAWDRHSHSSSFHSADVPEATGGLNLLQPRPVVLQGMQVRRVPLEIPEVRSSRGRAVPVGRDGAGRSLSPACIESLPRCPRRDGQC

SEQ ID NO: 740879 - protein, 584 aa, Homo sapiens
QGDSNPPRDPGVEMTVFRKVSSTPPVRCSSQHSVFGFNQVSELLPRMEDSGPLRDIKELVREQGSNNVIVTSADREMLKLSSQEKLIGDLPQTPPGAVPDPSLASTDSSEPSPLAGDGAPWSGSSMADTPMSPLLKGSLSQELSKSFLTLTRPDRALVRTSSRREQRRGAGGYQPLDRRGSGEPTPQKAGSSDSCFSGTDRETLSSFKSEKTNSTHLDSPPGGPAPEGSDTDPPSEAELPASPDAGVPSDDTLRSFDTVIGAGTPPGLAEPLLVVRPKDLALLRPSKRQPPLRRHSPPGRAPRRPLLEGGGFFEDEDTSEGSELSPASSLRSQRRYSTDSSSSTSCYSPESSRGAAGGPRKRRAPHGAEEGTAVPPKRPYGTQRTPSTASAKTHARVLSMDGAGGDVLRPPLAGCKAELEAQVGVEQAASEPVVLPAEARRGPAANQPGWRGELQEEGAVGGAAEETGRRDRSSSVRRTQAIRRRHNAGSNPTPPASVMGSPPSSLQEAQRGRAASHSRALTLPSALHFASSLLLTRAGANVHEACTFDDTSEGAVHYFYDESGTDTRIPPASTRLMSLRLQAA

SEQ ID NO: 740880 - protein, 846 aa, Homo sapiens
QGDSNPPRDPGVEMTVFRKVSSTPPVRCSSQHSVFGFNQVSELLPRMEDSGPLRDIKELVREQGSNNVIVTSADREMLKLSSQEKLIGDLPQTPPGAVPDPSLASTDSSEPSPLAGDGAPWSGSSMADTPMSPLLKGSLSQELSKSFLTLTRPDRALVRTSSRREQRRGAGGYQPLDRRGSGEPTPQKAGSSDSCFSGTDRETLSSFKSEKTNSTHLDSPPGGPAPEGSDTDPPSEAELPASPDAGVPSDDTLRSFDTVIGAGTPPGLAEPLLVVRPKDLALLRPSKRQPPLRRHSPPGRAPRRPLLEGGGFFEDEDTSEGSELSPASSLRSQRRYSTDSSSSTSCYSPESSRGAAGGPRKRRAPHGAEEGTAVPPKRPYGTQRTPSTASAKTHARVLSMDGAGGDVLRPPLAGCKAELEAQVGVEQAASEPVVLPAEARRGPAANQPGWRGELQEEGAVGGAAEETGRRDRSSSVRRTQAIRRRHNAGSNPTPPASVMGSPPSSLQEAQRGRAASHSRALTLPSALHFASSLLLTRAGANVHEACTFDDTSEGAVHYFYDESGDRHSHSSSFHSADVPEATGGLNLLQPRPVVLQGMQVRRVPLEIPEEQTLMEEAPPRAQHSYKYWLLPGRWTSVRYERLALLALLDRTRGVLENIFGVGLSSLVAFLGYLLLLKGFFTDIWVFQFCLVIASCQYSLLKSVQPDAASPMHGHNWVIAYSRPVYFCICCLLIWLLDALGSAQPFPPVSLYGLTLFSASFFFCARDVATVFTLCFPFVFLLGLLPQVNTCPRPRSPPEALPCLHICFALTQFGNSNCPAEVHSPDPFPTLVRVAGFSKPLSGISLC

SEQ ID NO: 740881 - protein, 101 aa, Homo sapiens [sequence omitted]

SEQ ID NO: 740882 - protein, 31 aa, Homo sapiens
MWAGPYFGLTCSFHSLLVKAGLGLSMTQEKG

SEQ ID NO: 740883 - protein, 103 aa, Homo sapiens
METVQELIPLAKEMMAQKRKGKMVKLYVLGSVLALFGVVLGLMETVCSPFTAARRLRDQEAAVAELQAALERQALQKQALQEKGKQQDTVLGGRALSNRQHAS

SEQ ID NO: 740884 - protein, 78 aa, Homo sapiens
LRVPLALTALAWAGEPRRRVSEKRYKRPPDAKAVPAAESPTGRAAAAERRRTLRSVGPTDALTAANCSSRCLLLAPCH

SEQ ID NO: 740885 - protein, 103 aa, Homo sapiens; identical to SEQ ID NO: 740883

SEQ ID NO: 740886 - protein, 501 aa, Homo sapiens
MTFYSEVKQIEEEKVEKRSNSDSKENRETKLNGPGENVSEDEAQSSNQRKRANKHKWVPLHLDVVRSESQERPGSRNSSRCQPEANKPTHNNRRNDTRSWKRDREKRDDQDDVSSVRSEGGNIRGSFRGRGRGRGRGRGRGRGNPRLNFDYSYGYQEHGERTDQPFQTELNTSMMYYYDDGTGVQVYPVEEALLKEYIKRQIEYYFSVENLERDFFLRGKMDEQGFLPISLIAGFQRVQALTTNLNLILEALKDSTEVEIVDEKMRKKIEPEKWPIPGPPPRSVPPTDFSQLIDCPEFVPGQAFCSHTESAPNSPRIGSPLSPKKNSETSILQAMSRGLSTSLPDLDSEPWIEVKKRHQPAPVKLRESVSVPEGSLNQLCSSEEPEQEELDFLFDEEIEQIGRKNTFTDWSDNDSDYEIDDQDLNKILIVTQTPPYVKKHRGGDRTGTHMSRAKITSELAKVINDGLYYYEQDLWMEEDENKHTAIKVIVSGQHLSTDALF

SEQ ID NO: 740887 - protein, 159 aa, Homo sapiens
AAATSAGARGEPSPALVLGRSVPQAAVPVRPLALHLAHKARGPGGPFGGEPPPPPPPPSPLPPLLRDPPAEDAREEVAAGPAEKRQPPLLPPKGNPWTKKPPQHLSPDTTGPPPPPLETLEAGLWLLCVGHWQGAGRGDLRDLPARGGGSGHQARVTAG

SEQ ID NO: 740888 - protein, 118 aa, Homo sapiens
RGRGRRAVGAPFGAGRGVTPGAARPRRAAAAAATAAGLSGCLSPVGAGRCPGGETGSRVPWPRGHPGWGGWGRGTMSTRAPMPAAHSREDPPAVTAERESLLAAANRPAEQPPPPECE

SEQ ID NO: 740889 - protein, 483 aa, Homo sapiens
AAATSAGARGEPSPALVLGRSVPQAAVPVRPLALHLAHKARGPGGPFGGEPPPPPPPPSPLPPLLRDPPAEDAREEVAAGPAEKRQPPLLPPKGNPWTKKPPQHLSPDTTGPPPPPLETLEAEFGSLKIIKAGKLKTKKSNKASDFSDMENWPTPSELVNTGFQSVLSQGNKKPQNRKEKEEKVEKRSNSDSKENRETKLNGPGENVSEDEAQSSNQRKRANKHKWVPLHLDVVRSESQERPGSRNSSRCQPEANKPTHNNRRNDTRSWKRDREKRDDQDDVSSVRSEGGNIRGSFRGRGRGRGRGRGRGRGNPRLNFDYSYGYQEHGERTDQPFQTELNTSMMYYYDDGTGVQVYPVEEALLKEYIKRQIEYYFSVENLERDFFLRGKMDEQGFLPISLIAGFQRVQALTTNLNLILEALKDSTEVEIVDEKMRKKIEPEKWPIPGPPPRSVPPTDFSQLIDCPEFVPGQAFCSHTVRVMIF

SEQ ID NO: 740890 - protein, 405 aa, Homo sapiens
LSGRPSSPSPRLRGQLPALAARASPTRVKLLGLGVLRLRGCPAPEFGSLKIIKAGKLKTKKSNKASDFSDMENWPTPSELVNTGFQSVLSQGNKKPQNRKEKEEKVEKRSNSDSKENRETKLNGPGENVSEDEAQSSNQRKRANKHKWVPLHLDVVRSESQERPGSRNSSRCQPEANKPTHNNRRNDTRSWKRDREKRDDQDDVSSVRSEGGNIRGSFRGRGRGRGRGRGRGRGNPRLNFDYSYGYQEHGERTDQPFQTELNTSMMYYYDDGTGVQVYPVEEALLKEYIKRQIEYYFSVENLERDFFLRGKMDEQGFLPISLIAGFQRVQALTTNLNLILEALKDSTEVEIVDEKMRKKIEPEKWPIPGPPPRSVPPTDFSQLIDCPEFVPGQAFCSHTVRVMIF

SEQ ID NO: 740891 - protein, 371 aa, Homo sapiens
AAATSAGARGEPSPALVLGRSVPQAAVPVRPLALHLAHKARGPGGPFGGEPPPPPPPPSPLPPLLRDPPAEDAREEVAAGPAEKRQPPLLPPKGNPWTKKPPQHLSPDTTGPPPPPLETLEAEFGSLKIIKAGKLKTKKSNKASDFSDMENWPTPSELVNTGFQSVLSQGNKKPQNRKEKEEKVEKRSNSDSKENRETKLNGPGENVSEDEAQSSNQRKRANKHKWVPLHLDVVRSESQERPGSRNSSRCQPEANKPTHNNRRNDTRSWKRDREKRDDQDDVSSVRSEGGNIRGSFRGRGRGRGRGRGRGRGNPRLNFDYSYGYQEHGERTDQPFQTELNTSMMYYYDDGTGVQVYPVEEALLKEYIKRQI

SEQ ID NO: 740892 - protein, 436 aa, Homo sapiens
AAATSAGARGEPSPALVLGRSVPQAAVPVRPLALHLAHKARGPGGPFGGEPPPPPPPPSPLPPLLRDPPAEDAREEVAAGPAEKRQPPLLPPKGNPWTKKPPQHLSPDTTGPPPPPLETLEAEFGSLKIIKAGKLKTKKSNKASDFSDMENWPTPSELVNTGFQSVLSQGNKKPQNRKEKEEKVEKRSNSDSKENRETKLNGPGENVSEDEAQSSNQRKRGWKRDREKRDDQDDVSSVRSEGGNIRGSFRGRGRGRGRGRGRGRGNPRLNFDYSYGYQEHGERTDQPFQTELNTSMMYYYDDGTGVQVYPVEEALLKEYIKRQIEYYFSVENLERDFFLRGKMDEQGFLPISLIAGFQRVQALTTNLNLILEALKDSTEVEIVDEKMRKKIEPEKWPIPGPPPRSVPPTDFSQLIDCPEFVPGQAFCSHTVRVMIF

SEQ ID NO: 740893 - protein, 1062 aa, Homo sapiens
AAATSAGARGEPSPALVLGRSVPQAAVPVRPLALHLAHKARGPGGPFGGEPPPPPPPPSPLPPLLRDPPAEDAREEVAAGPAEKRQPPLLPPKGNPWTKKPPQHLSPDTTGPPPPPLETLEAEFGSLKIIKAGKLKTKKSNKASDFSDMENWPTPSELVNTGFQSVLSQGNKKPQNRKEKEEKVEKRSNSDSKENRETKLNGPGENVSEDEAQSSNQRKRANKHKWVPLHLDVVRSESQERPGSRNSSRCQPEANKPTHNNRRNDTRSWKRDREKRDDQDDVSSVRSEGGNIRGSFRGRGRGRGRGRGRGRGNPRLNFDYSYGYQEHGERTDQPFQTELNTSMMYYYDDGTGVQVYPVEEALLKEYIKRQIEYYFSVENLERDFFLRGKMDEQGFLPISLIAGFQRVQALTTNLNLILEALKDSTEVEIVDEKMRKKIEPEKWPIPGPPPRSVPPTDFSQLIDCPEFVPGQAFCSHTESAPNSPRIGSPLSPKKNSETSILQAMSRGLSTSLPDLDSEPWIEVKKRHQPAPVKLRESVSVPEGSLNQLCSSEEPEQEELDFLFDEEIEQIGRKNTFTDWSDNDSDYEIDDQDLNKILIVTQTPPYVKKHRGGDRTGTHMSRAKITSELAKVINDGLYYYEQDLWMEEDENKHTAIKQEVENFKKLNLISKEQFENLTPELPFEPNQEVPVAPSQSRQGGVQGVLHIPKKDLTDELAQKLFDVSEITSAAMVHSLPTAVPESPRIHPTRTPKTPRTPRLQDPNKTPRFYPVVKEPKAIDVKSPRKRKTRHSTNPPLECHVGWVMDSRDHGPGTSSVSTSNASPSEGAPLAGSYGCTPHSFPKFQHPSHELLKENGFTQQVYHKYRRRCLSERKRLGIGQSQEMNTLFRFWSFFLRDHFNKKMYEEFRQLAWEDAKENYRYGLECLFRFYSYGLEKKFRREIFQDFQEETKKDYESGQLYGLEKFWAYLKYSQSKTQSIDPKLQEYLCSFKRLEDFRVDPPISDEFGRKRHSSTSGEESNRHRLPPNSSTKPPNAAKPTSTSELQVPINSPRRNISPESSDNSH

SEQ ID NO: 740894 - protein, 396 aa, Homo sapiens
  misc_feature (1)..(1): Xaa can be any naturally occurring amino acid
XAKLRLGTSAGWRASPTRVKLLGLGVLRLRGCPAPEFGSLKIIKAGKLKTKKSNKASDFSDMENWPTPSELVNTGFQSVLSQGNKKPQNRKEKEEKVEKRSNSDSKENRETKLNGPGENVSEDEAQSSNQRKRANKHKWVPLHLDVVRSESQERPGSRNSSRCQPEANKPTHNNRRNDTRSWKRDREKRDDQDDVSSVRSEGGNIRGSFRGRGRGRGRGRGRGRGNPRLNFDYSYGYQEHGERTDQPFQTELNTSMMYYYDDGTGVQVYPVEEALLKEYIKRQIEYYFSVENLERDFFLRGKMDEQGFLPISLIAGFQRVQALTTNLNLILEALKDSTEVEIVDEKMRKKIEPEKWPIPGPPPRSVPPTDFSQLIDCPEFVPGQAFCSHTVRVMIF

SEQ ID NO: 740895 - protein, 392 aa, Homo sapiens
WYCRNLGMRASPTRVKLLGLGVLRLRGCPAPEFGSLKIIKAGKLKTKKSNKASDFSDMENWPTPSELVNTGFQSVLSQGNKKPQNRKEKEEKVEKRSNSDSKENRETKLNGPGENVSEDEAQSSNQRKRANKHKWVPLHLDVVRSESQERPGSRNSSRCQPEANKPTHNNRRNDTRSWKRDREKRDDQDDVSSVRSEGGNIRGSFRGRGRGRGRGRGRGRGNPRLNFDYSYGYQEHGERTDQPFQTELNTSMMYYYDDGTGVQVYPVEEALLKEYIKRQIEYYFSVENLERDFFLRGKMDEQGFLPISLIAGFQRVQALTTNLNLILEALKDSTEVEIVDEKMRKKIEPEKWPIPGPPPRSVPPTDFSQLIDCPEFVPGQAFCSHTVRVMIF

SEQ ID NO: 740896 - protein, 465 aa, Homo sapiens
DPALGPKGKSSARSSQRHVRGPPRPLAAVAAGAGREPAASHRGLVRAPPLSLQSGRPQPVSRESSPSSSLALGGQLGRGRPSGRAAPGRANPSAPAGGPAREGPEFGSLKIIKAGKLKTKKSNKASDFSDMENWPTPSELVNTGFQSVLSQGNKKPQNRKEKEEKVEKRSNSDSKENRETKLNGPGENVSEDEAQSSNQRKRANKHKWVPLHLDVVRSESQERPGSRNSSRCQPEANKPTHNNRRNDTRSWKRDREKRDDQDDVSSVRSEGGNIRGSFRGRGRGRGRGRGRGRGNPRLNFDYSYGYQEHGERTDQPFQTELNTSMMYYYDDGTGVQVYPVEEALLKEYIKRQIEYYFSVENLERDFFLRGKMDEQGFLPISLIAGFQRVQALTTNLNLILEALKDSTEVEIVDEKMRKKIEPEKWPIPGPPPRSVPPTDFSQLIDCPEFVPGQAFCSHTVRVMIF

SEQ ID NO: 740897 - protein, 416 aa, Homo sapiens
RGRGRRAVGAPFGAGRGVTPGVLPPKGNPWTKKPPQHLSPDTTGPPPPPLETLEAEFGSLKIIKAGKLKTKKSNKASDFSDMENWPTPSELVNTGFQSVLSQGNKKPQNRKEKEEKVEKRSNSDSKENRETKLNGPGENVSEDEAQSSNQRKRANKHKWVPLHLDVVRSESQERPGSRNSSRCQPEANKPTHNNRRNDTRSWKRDREKRDDQDDVSSVRSEGGNIRGSFRGRGRGRGRGRGRGRGNPRLNFDYSYGYQEHGERTDQPFQTELNTSMMYYYDDGTGVQVYPVEEALLKEYIKRQIEYYFSVENLERDFFLRGKMDEQGFLPISLIAGFQRVQALTTNLNLILEALKDSTEVEIVDEKMRKKIEPEKWPIPGPPPRSVPPTDFSQLIDCPEFVPGQAFCSHTVRVMIF

SEQ ID NO: 740898 - protein, 187 aa, Homo sapiens
MFMFLSLGRGRGRGRGNPRLNFDYSYGYQEHGERTDQPFQTELNTSMMYYYDDGTGVQVYPVEEALLKEYIKRQIEYYFSVENLERDFFLRGKMDEQGFLPISLIAGFQRVQALTTNLNLILEALKDSTEVEIVDEKMRKKIEPEKWPIPGPPPRSVPPTDFSQLIDCPEFVPGQAFCSHTVRVMIF

SEQ ID NO: 740899 - protein, 314 aa, Homo sapiens
MTFYSEVKTNREEKVEKRSNSDSKENRETKLNGPGENVSEDEAQSSNQRKRANKHKWVPLHLDVVRSESQERPGSRNSSRCQPEANKPTHNNRRNDTRSWKRDREKRDDQDDVSSVRSEGGNIRGSFRGRGRGRGRGRGRGRGNPRLNFDYSYGYQEHGERTDQPFQTELNTSMMYYYDDGTGVQVYPVEEALLKEYIKRQIEYYFSVENLERDFFLRGKMDEQGFLPISLIAGFQRVQALTTNLNLILEALKDSTEVEIVDEKMRKKIEPEKWPIPGPPPRSVPPTDFSQLIDCPEFVPGQAFCSHTVRVMIF

SEQ ID NO: 740900 - protein, 670 aa, Homo sapiens
AAATSAGARGEPSPALVLGRSVPQAAVPVRPLALHLAHKARGPGGPFGGEPPPPPPPPSPLPPLLRDPPAEDAREEVAAGPAEKRQPPLLPPKGNPWTKKPPQHLSPDTTGPPPPPLETLEAEFGSLKIIKAGKLKTKKSNKASDFSDMENWPTPSELVNTGFQSVLSQGNKKPQNRKEKEEKVEKRSNSDSKENRETKLNGPGENVSEDEAQSSNQRKRANKHKWVPLHLDVVRSESQERPGSRNSSRCQPEANKPTHNNRRNDTRSWKRDREKRDDQDDVSSVRSEGGNIRGSFRGRGRGRGRGRGRGRGNPRLNFDYSYGYQEHGERTDQPFQTELNTSMMYYYDDGTGVQVYPVEEALLKEYIKRQIEYYFSVENLERDFFLRGKMDEQGFLPISLIAGFQRVQALTTNLNLILEALKDSTEVEIVDEKMRKKIEPEKWPIPGPPPRSVPPTDFSQLIDCPEFVPGQAFCSHTESAPNSPRIGSPLSPKKNSETSILQAMSRGLSTSLPDLDSEPWIEVKKRHQPAPVKLRESVSVPEGSLNQLCSSEEPEQEELDFLFDEEIEQIGRKNTFTDWSDNDSDYEIDDQDLNKILIVTQTPPYVKKHRGGDRTGTHMSRAKITSELAKVINDGLYYYEQDLWMEEDENKHTAIKVIVSGQHLSTDALF

SEQ ID NO: 740901 - protein, 666 aa, Homo sapiens
AAATSAGARGEPSPALVLGRSVPQAAVPVRPLALHLAHKARGPGGPFGGEPPPPPPPPSPLPPLLRDPPAEDAREEVAAGPAEKRQPPLLPPKGNPWTKKPPQHLSPDTTGPPPPPLETLEAEFGSLKIIKAGKLKTKKSNKASDFSDMENWPTPSELVNTGFQSVLSQGNKKPQNRKEKEEKVEKRSNSDSKENRETKLNGPGENVSEDEAQSSNQRKRANKHKWVPLHLDVVRSESQERPGSRNSSRCQPEANKPTHNNRRNDTRSWKRDREKRDDQDDVSSVRSEGGNIRGSFRGRGRGRGRGRGRGRGNPRLNFDYSYGYQEHGERTDQPFQTELNTSMMYYYDDGTGVQVYPVEEALLKEYIKRQIEYYFSVENLERDFFLRGKMDEQGFLPISLIAGFQRVQALTTNLNLILEALKDSTEVEIVDEKMRKKIEPEKWPIPGPPPRSVPPTDFSQLIDCPEFVPGQAFCSHTESAPNSPRIGSPLSPKKNSETSILQAMSRGLSTSLPDLDSEPWIEVKKRHQPAPVKLRESVSVPEGSLNQLCSSEEPEQEELDFLFDEEIEQIGRKNTFTDWSDNDSDYEIDDQDLNKILIVTQTPPYVKKHRGGDRTGTHMSRAKITSELAKVINDGLYYYEQDLWMEEDENKHTAIKVTILRTPFLV

SEQ ID NO: 740902 - protein, 109 aa, Homo sapiens
LLSSPWSQGCANDRGLGSWCPQGERRFLQGGPVVPSILTPGDAQGWMESPSRSPGSAATGAFSAVHGTLVPLCQPEGLWVQFPPRWARSPSPAQLRPPDWDGVPSAQCC

SEQ ID NO: 740903 - protein, 199 aa, Homo sapiens
LHSSLGNRVRPCLKKEFECYAKETGVDPIGKNEPLKKVKQGVRHDWIYMLEISLLKQCGGGIKESELWAGRLVRKLLQKSKRRDKDRSELEQPSSGDKKEETKKRVKRWVVKVSWEGRCLLPACYEIPAGTQTGSPPGCMQGTALMQGTGFPSPTGLLQMISRERVDLPDPPFSSQLIPSPRSMGSPSAQLFPVLGSDI

SEQ ID NO: 740904 - protein, 729 aa, Homo sapiens
GFLGIAFHPSFQHNRRLYVYYSVGIRSSEWIRISEFRVSEDDENAVDHSSERIILEVKEPASNHNGGQLLFGDDGYLYIFTGDGGMAGDPFGTFGNAQNKSALLGKVLRIDVDRKERGLPYGIPPDNPFVGDPAAQPEVYALGVRNMWRCSFDRGDPSSGTGRGRLFCGDVGQNKFEEVDVVERGGNYGWRAREGFECYDRSLCANTSLNDLLPIFAYPHTVGKSVTGGYVYRGCEYPNLNGLYIFGDFMSGRLMSLQENPGTGQWQYSEICMGHGQTCEFPGLINNYYPYIISFGEDEAGELYFMSTGEPSATAPRGVVYKIIDASRRAPPGKCQIQPAQVKIRSRLIPFVPKEKFIPKTRSTPRPTARAPTRAPRRGRPTAAPPAPTPRPARPTQQPGSRRGGGRRRGRLNSASRAFRDGEVRLVRPAGLSSGSGRVEVFVGGRWGTVCDDSWNISGAAVVCRQLGFAYAVRAVKRAEFGQGGSLPILLDDVRCAGWERNLLECQHNGVGTHNCEHDEDAGVVCSHQNPDLRQHAAAPGHPAGGGAWQGPLRPVCAQRVHTCSRVKGVRVCAVLEDMCEALQCMCVLCRPKAGVCVGGGVGSGSAWSIMGGRSSFLTSKRFRHQQEQQPGCGTLRREGSQASRTDMAPGCANRGTACRLRAVGRTRLVLPTAGMEGARTAGGWPEECGPDSMAWCPHPPHPLAVRGAGENRKASSGEGKAFWKVGAG

SEQ ID NO: 740905 - protein, 115 aa, Homo sapiens
MAGTVLGVGAGVFILALLWVAVLLLCVLLSRASGAARFSVIFLFFGAVIITSVLLLFPRAGEFPAPEVEVKIVDDFFIGRYVLLAFLSAIFLGGLFLVLIHYVLEPIYAKPLHSY

SEQ ID NO: 740906 - protein, 115 aa, Homo sapiens; identical to SEQ ID NO: 740905

SEQ ID NO: 740907 - protein, 146 aa, Homo sapiens
MLSRECVSHWSTEDTRSCGAQGGGPPLPPRGMAGTVLGVGAGVFILALLWVAVLLLCVLLSRASGAARFSVIFLFFGAVIITSVLLLFPRAGEFPAPEVEVKIVDDFFIGRYVLLAFLSAIFLGGLFLVLIHYVLEPIYAKPLHSY

SEQ ID NO: 740908 - protein, 150 aa, Homo sapiens
MPWCLLPVLSVSHWSTEDTRSCGAQGGGPPLPPRGMAGTVLGVGAGVFILALLWVAVLLLCVLLSRASGAARFSVIFLFFGAVIITSVLLLFPRAGEFPAPEVEVKIVDDFFIGRYVLLAFLSAIFLGGLFLVLIHYVLEPIYAKPLHSY

SEQ ID NO: 740909 - protein, 115 aa, Homo sapiens; identical to SEQ ID NO: 740905

SEQ ID NO: 740910 - protein, 146 aa, Homo sapiens; identical to SEQ ID NO: 740907

SEQ ID NO: 740911 - protein, 115 aa, Homo sapiens; identical to SEQ ID NO: 740905

SEQ ID NO: 740912 - protein, 110 aa, Homo sapiens
MPWCLLPVLSVSHWSTEDTRSCGAQGGGPPLPPRGMAGTVLGVGAGVFILALLWVAVLLLCVLLSRASGAARNWELPRINGNAPSWYLSRKKDFGMKRLLTAGLWTLLRD

SEQ ID NO: 740913 - protein, 270 aa, Homo sapiens
MAQSRDGGNPFAEPSELDNPFQPPPAYEPPAPAPLPPPSAPSLQPSRKLSPTEPKNYGSYSTQASAAAATAELLKKQEELNRKAEELDRRERELQHAALGGTATRQNNWPPLPSFCPVQPCFFQDISMEIPQEFQKTVSTMYYLWMCSTLALLLNFLACLASFCVETNNGAGFGLSILWVLLFTPCSFVCWYRPMYKAFRSDSSFNLFDSLHSSARCALSPALAPRGIPADRPGPPGTPLRLVGPPPLGPSSEAPHAALTHGVPPRRRDI

SEQ ID NO: 740914 - protein, 148 aa, Homo sapiens
MAQSRDGGNPFAEPSELDNPFQPPPAYEPPAPAPLPPPSAPSLQPSRKLSPTEPKNYGSYSTQASAAAATAELLKKQEELNRKAEELDRRERELQHAALGGTATRQNNWPPLPSFCPVQPCFFQDISMEIPQEFQKTVSTMYYLWMCE

SEQ ID NO: 740915 - protein, 297 aa, Homo sapiens
MAQSRDGGNPFAEPSELDNPFQDPAVIQHRPSRQYATRDVYNPFETREVPPPAYEPPAPAPLPPPSAPSLQPSRKLSPTEPKNYGSYSTQASAAAATAELLKKQEELNRKAEELDRRERELQHAALGGTATRQNNWPPLPSFCPVQPCFFQDISMEIPQEFQKTVSTMYYLWMCSTLALLLNFLACLASFCVETNNGAGFGLSILWVLLFTPCSFVCWYRPMYKAFRSDSSFNLFDSLHSSARCALSPALAPRGIPADRPGPPGTPLRLVGPPPLGPSSEAPHAALTHGVPPRRRDI

SEQ ID NO: 740916 - protein, 299 aa, Homo sapiens
MAQSRDGGNPFAEPSELDNPFQPPPAYEPPAPAPLPPPSAPSLQPSRKLSPTEPKNYGSYSTQVQEVLQVRAGEKGQSWGPGLTSPSAHTGQASAAAATAELLKKQEELNRKAEELDRRERELQHAALGGTATRQNNWPPLPSFCPVQPCFFQDISMEIPQEFQKTVSTMYYLWMCSTLALLLNFLACLASFCVETNNGAGFGLSILWVLLFTPCSFVCWYRPMYKAFRSDSSFNLFDSLHSSARCALSPALAPRGIPADRPGPPGTPLRLVGPPPLGPSSEAPHAALTHGVPPRRRDI

SEQ ID NO: 740917 - protein, 593 aa, Homo sapiens
TTSIDVDLEMARDTFKKLTKKEWISSMITTCLEDDLLRALPCHSPHQEALSVFLLLPECPVMHDSKNWKNLVVPFAKAVCEMSKQSLQVLKKCWAFLQESSLNPLIQMLKAAIISQLLHQTKTEQDHCNVKALLGMMKELHKVNKANCRLPENTFNINELSNLLNFYIDRGRQLFRDNHLIPAETPSPVIFSDFPFIFNSLSKIKLLQADSHIKMQMSEKKAYMLMHETILQKKDEFPPSPRFILRVRRSRLVKDALRQLSQAEATDFCKVLVVEFINEICPESGGVSSEFFHCMFEEMTKPEYGMFMYPEMGSCMWFPAKPKPEKKRYFLFGMLCGLSLFNLNVANLPFPLALYKKLLDQKPSLEDLKELSPRLGKSLQEVLDDAADDIGDALCIRFSIHWDQNDVDLIPNGISIPVDQTNKRDYVSKYIDYIFNVSVKAVYEEFQRGFYRVCEKEILRHFYPEELMTAIIGNTDYDWKQFEQNSKYEQGYQKSHPTIQLFWKAFHKLTLDEKKKFLFFLTGRDRLHARGIQKMEIVFRCPETFSERDHPTSITCHNILSLPKYSTMERMEEALQVAINNNRGFVSPMLTQS

SEQ ID NO: 740918 - protein, 593 aa, Homo sapiens; identical to SEQ ID NO: 740917

SEQ ID NO: 740919 - protein, 74 aa, Homo sapiens
RWRVMAAWRCGGGCEHLEDGSHYVAQAGLELLGSSNSPTSAYQAAGTTGLHHCTPPIQVHIPRNEDNAWHKVGI

SEQ ID NO: 740920 - protein, 118 aa, Homo sapiens
MIEERDTYCKYGVDEIYRLDVYSRDSRDVVDTYIVSVSDVIKLMIQRQDTSIYDFTDALDIHTTRLVEWYQREKIRVSNIYVYKKMLHEDEEEPANNYESRLRIMKPDKSELDLVNSN

SEQ ID NO: 740921 - protein, 777 aa, Homo sapiens
MSAQTSPAEKGLNPGLMCQESYACSGTDEAIFECDECCSLQCLRCEEELHRQERLRNHERIRLKPGHVPYCDLCKGLSGHLPGVRQRAIVRCQTCKINLCLECQKRTHSGGNKRRHPVTVYNVSNLQESLEAEEMDEETKRKKMTEKVVSFLLVDENEEIQVTNEEDFIRKLDCKPDQHLKVVSIFGNTGDGKSHTLNHTFFYGREVFKTSPTQESCTVGVWAAYDPVHKVAVIDTEGLLGATVNLSQRTRLLLKVLAISDLVIYRTHADRLHNDLFKFLGDASEAYLKHFTKELKATTARCGLDVPLSTLGPAVIIFHETVHTQLLGSDHPSEVPEKLIQDRFRKLGRFPEAFSSIHYKGTRTYNPPTDFSGLRRALEQLLENNTTRSPRHPGVIFKALKALSDRFSGEIPDDQMAHSSFFPDEYFTCSSLCLSCGVGCKKSMNHGKEGVPHEAKSRCRYSHQYDNRVYTCKACYERGEEVSVVPKTSASTDSPWMGLAKYAWSGYVIECPNCGVVYRSRQYWFGNQDPVDTVVRTEIVHVWPGTDGFLKDNNNAAQRLLDGMNFMAQSVSELSLGPTKAVTSWLTDQIAPAYWRPNSQILSCNKCATSFKDNDTKHHCRACGEGFCDSCSSKTRPVPERGWGPAPVRVCDNCYEARNVQLAVTEAQVDDEGGTLIARKVGEAVQNTLGAVVTAIDIPLGLVKDAARPAYWVPDHEILHCHNCRKEFSIKLSKHHCRACGQGFCDECSHDRRAVPSRGWDHPVRVCFNCNKKPGDL

SEQ ID NO: 740922 - protein, 362 aa, Homo sapiens
MAHSSFFPDEYFTCSSLCLSCGVGCKKSMNHGKEGVPHEAKSRCRYSHQYDNRVYTCKACYERGEEVSVVPKTSASTDSPWMGLAKYAWSGYVIECPNCGVVYRSRQYWFGNQDPVDTVVRTEIVHVWPGTDGFLKDNNNAAQRLLDGMNFMAQSVSELSLGPTKAVTSWLTDQIAPAYWRPNSQILSCNKCATSFKDNDTKHHCRACGEGFCDSCSSKTRPVPERGWGPAPVRVCDNCYEARNVQLAVTEAQVDDEGGTLIARKVGEAVQNTLGAVVTAIDIPLGLVKDAARPAYWVPDHEILHCHNCRKEFSIKLSKHHCRACGQGFCDECSHDRRAVPSRGWDHPVRVCFNCNKKPGDL

SEQ ID NO: 740923 - protein, 214 aa, Homo sapiens
MNFMAQSVSELSLGPTKAVTSWLTDQIAPAYWRPNSQILSCNKCATSFKDNDTKHHCRACGEGFCDSCSSKTRPVPERGWGPAPVRVCDNCYEARNVQLAVTEAQVDDEGGTLIARKVGEAVQNTLGAVVTAIDIPLGLVKDAARPAYWVPDHEILHCHNCRKEFSIKLSKHHCRACGQGFCDECSHDRRAVPSRGWDHPVRVCFNCNKKPGDL

SEQ ID NO: 740924 - protein, 777 aa, Homo sapiens; identical to SEQ ID NO: 740921

SEQ ID NO: 740925 - protein, 744 aa, Homo sapiens
MSAQTSPAEKGLNPGLMCQESYACSGTDEAIFECDECCSLQCLRCEEELHRQERLRNHERIRLKPGHVPYCDLCKGLSGHLPGVRQRAIVRCQTCKINLCLECQKRTHSGGNKRRHPVTVYNVSNLQESLEAEEMDEETKRKKMTEKVVSFLLVDENEEIQVTNEEDFIRKLDCKPDQHLKVVSIFGNTGDGKSHTLNHTFFYGREVFKTSPTQESCTVGVWAAYDPVHKVAVIDTEGLLGATVNLSQRTRLLLKVLAISDLVIYRTHADRLHNDLFKFLGDASEAYLKHFTKELKATTARCGLDVPLSTLGPAVIIFHETVHTQLLGSDHPSEVPEKLIQDRFRKLGRFPEAFSSIHYKGTRTYNPPTDFSGLRRALEQLLENNTTRSPRHPGVIFKALKALSDRFSGEIPDDQMAHSSFFPDEYFTCSSLCLSCGVGCKKSMNHGKEGVPHEAKSRCRYSHQYDNRVYTCKYVIECPNCGVVYRSRQYWFGNQDPVDTVVRTEIVHVWPGTDGFLKDNNNAAQRLLDGMNFMAQSVSELSLGPTKAVTSWLTDQIAPAYWRPNSQILSCNKCATSFKDNDTKHHCRACGEGFCDSCSSKTRPVPERGWGPAPVRVCDNCYEARNVQLAVTEAQVDDEGGTLIARKVGEAVQNTLGAVVTAIDIPLGLVKDAARPAYWVPDHEILHCHNCRKEFSIKLSKHHCRACGQGFCDECSHDRRAVPSRGWDHPVRVCFNCNKKPGDL

SEQ ID NO: 740926 - protein, 422 aa, Homo sapiens
MLQWRRRHCCFAKMTWNAKRSLFRTHLIGVLSLVFLFAMFLFFNHHDWLPGRAGFKENPVTYTFRGFRSTKSETNHSSLRNIWKETVPQTLRPQTATNSNNTDLSPQGVTGLENTLSANGSIYNEKGTGHPNSYHFKYIINEPEKCQEKSPFLILLIAAEPGQIEARRAIRQTWGNESLAPGIQITRIFLLGLSIKLNGYLQRAILEESRQYHDIIQQEYLDTYYNLTIKTLMGMNWVATYCPHIPYVMKTDSDMFVNTEYLINKLLKPDLPPRHNYFTGYLMRGYAPNRNKDSKWYMPPDLYPSERYPVFCSGTGYVFSGDLAEKIFKVSLGIRRLHLEDVYVGICLAKLRIDPVPPPNEFVFNHWRVSYSSCKYSHLITSHQFQPSELIKYWNHLQQNKHNACANAAKEKAGRYRHRKLH

SEQ ID NO: 740927 - protein, 422 aa, Homo sapiens; identical to SEQ ID NO: 740926

SEQ ID NO: 740928 - protein, 422 aa, Homo sapiens; identical to SEQ ID NO: 740926

SEQ ID NO: 740929 - protein, 96 aa, Homo sapiens
DELLALLCARMAHSGCRRPAGTVHAVISSSRAPGYLCPELRGVSHAMAPSDELARASQTGGKRAWQLHHVYVSPSWVSLVSVSQSVKWASFGCSMD

SEQ ID NO: 740930 - protein, 147 aa, Homo sapiens
VLEPHEKYPLINKQSAVITKSNPACSIPNYVSLPGPMFHHAGKKPGTLGLAFSRKPQLLVIENKVCNRYEYLNGRIKSTELCARHLAGGTDSCKGDSGGPLVCFEKDKYILQGVTSWGLGCARPNKPGVYVRVSRFVTWIEGVMRNN

SEQ ID NO: 740931 - protein, 1080 aa, Homo sapiens
ASAMTAELQQDDAAGAADGHGSSCQMLLNQLREITGIQDPSFLHEALKASNGDITQAVSLLTDERVKEPSQDTVATEPSEVEGSAANKEVLAKVIDLTHDNKDDLQAAIALSLLESPKIQADGRDLNRMHEATSAETKRSKRKRCEVWGENPNPNDWRRVDGWPVGLKNVGNTCWFSAVIQSLFQLPEFRRLVLSYSLPQNVLENCRSHTEKRNIMFMQELQYLFALMMGSNRKFVDPSAALDLLKGAFRSSEEQQQDVSEFTHKLLDWLEDAFQLAVNVNSPRNKSENPMVQLFYGTFLTEGVREGKPFCNNETFGQYPLQVNGYRNLDECLEGAMVEGDVELLPSDHSVKYGQERWFTKLPPVLTFELSRFEFNQSLGQPEKIHNKLEFPQIIYMDRYMYRSKELIRNKRECIRKLKEEIKILQQKLERYVKYGSGPARFPLPDMLKYVIEFASTKPASESCPPESDTHMTLPLSSVHCSVSDQTSKESTSTESSSQDVESTFSSPEDSLPKSKPLTSSRSSMEMPSQPAPRTVTDEEINFVKTCLQRWRSEIEQDIQDLKTCIASTTQTIEQMYCDPLLRQVPYRLHAVLVHEGQANAGHYWAYIYNQPRQSWLKYNDISVTESSWEEVERDSYGGLRNVSAYCLMYINDKLPYFNAEAAPTESDQMSEVEALSVELKHYIQEDNWRFEQEVEEWEEEQSCKIPQMESSTNSSSQDYSTSQEPSVASSHGVRCLSSEHAVIVKEQTAQAIANTARAYEKSGVEAALSEVMLSPAMQGVILAIAKARQTFDRDGSEAGLIKAFHEEYSRLYQLAKETPTSHSDPRLQHVLVYFFQNEAPKRVVERTLLEQFADKNLSYDERSISIMKVAQAKLKEIGPDDMNMEEYKKWHEDYSLFRKVSVYLLTGLELYQKGKYQEALSYLVYAYQSNAALLMKGPRRGVKESVIALYRRKCLLELNAKAASLFETNDDHSVTEGINVMNELIIPCIHLIINNDISKDDLDAIEVMRNHWCSYLGQDIAENLQLCLGEFLPRLLDPSAEIIVLKEPPTIRPNSPYDLCSRFAAVMESIQGVSTVTVK

SEQ ID NO: 740932 - protein, 753 aa, Homo sapiens
MSFLKSLSLCLGKPFCNNETFGQYPLQVNGYRNLDECLEGAMVEGDVELLPSDHSVKYGQERWFTKLPPVLTFELSRFEFNQSLGQPEKIHNKLEFPQIIYMDRYMYRSKELIRNKRECIRKLKEEIKILQQKLERYVKYGSGPARFPLPDMLKYVIEFASTKPASESCPPESDTHMTLPLSSVHCSVSDQTSKESTSTESSSQDVESTFSSPEDSLPKSKPLTSSRSSMEMPSQPAPRTVTDEEINFVKTCLQRWRSEIEQDIQDLKTCIASTTQTIEQMYCDPLLRQVPYRLHAVLVHEGQANAGHYWAYIYNQPRQSWLKYNDISVTESSWEEVERDSYGGLRNVSAYCLMYINDKLPYFNAEAAPTESDQMSEVEALSVELKHYIQEDNWRFEQEVEEWEEEQSCKIPQMESSTNSSSQDYSTSQEPSVASSHGVRCLSSEHAVIVKEQTAQAIANTARAYEKSGVEAALSEAFHEEYSRLYQLAKETPTSHSDPRLQHVLVYFFQNEAPKRVVERTLLEQFADKNLSYDERSISIMKVAQAKLKEIGPDDMNMEEYKKWHEDYSLFRKVSVYLLTGLELYQKGKYQEALSYLVYAYQSNAALLMKGPRRGVKESVIALYRRKCLLELNAKAASLFETNDDHSVTEGINVMNELIIPCIHLIINNDISKDDLDAIEVMRNHWCSYLGQDIAENLQLCLGEFLPRLLDPSAEIIVLKEPPTIRPNSPYDLCSRFAAVMESIQGVSTVTVK

SEQ ID NO: 740933 - protein, 586 aa, Homo sapiens
ASAMTAELQQDDAAGAADGHGSSCQMLLNQLREITGIQDPSFLHEALKASNGDITQAVSLLTDERVKEPSQDTVATEPSEVEGSAANKEVLAKVIDLTHDNKDDLQAAIALSLLESPKIQADGRDLNRMHEATSAETKRSKRKRCEVWGENPNPNDWRRVDGWPVGLKNVGNTCWFSAVIQSLFQLPEFRRLVLSYSLPQNVLENCRSHTEKRNIMFMQELQYLFALMMGSNRKFVDPSAALDLLKGAFRSSEEQQQDVSEFTHKLLDWLEDAFQLAVNVNSPRNKSENPMVQLFYGTFLTEGVREGKPFCNNETFGQYPLQVNGYRNLDECLEGAMVEGDVELLPSDHSVKYGQERWFTKLPPVLTFELSRFEFNQSLGQPEKIHNKLEFPQIIYMDRYMYRSKELIRNKRECIRKLKEEIKILQQKLERYVKYGSGPARFPLPDMLKYVIEFASTKPASESCPPESDTHMTLPLSSVHCSVSDQTSKESTSTESSSQDVESTFSSPEDSLPKSKPLTSSRSSMEMPSQPAPRTVTDEEINFVKTCLQRWRSEIEQDIQDLKTCIASTTQTIEQMYCDPLLRQVE

SEQ ID NO: 740934 - protein, 1080 aa, Homo sapiens; identical to SEQ ID NO: 740931

SEQ ID NO: 740935 - protein, 578 aa, Homo sapiens
  misc_feature (5)..(6): Xaa can be any naturally occurring amino acid
  misc_feature (8)..(8): Xaa can be any naturally occurring amino acid
AGCTXXKXGYRRTHALRSKESTSTESSSQDVESTFSSPEDSLPKSKPLTSSRSSMEMPSQPAPRTVTDEEINFVKTCLQRWRSEIEQDIQDLKTCIASTTQTIEQMYCDPLLRQVPYRLHAVLVHEGQANAGHYWAYIYNQPRQSWLKYNDISVTESSWEEVERDSYGGLRNVSAYCLMYINDKLPYFNAEAAPTESDQMSEVEALSVELKHYIQEDNWRFEQEVEEWEEEQSCKIPQMESSTNSSSQDYSTSQEPSVASSHGVRCLSSEHAVIVKEQTAQAIANTARAYEKSGVEAALSEAFHEEYSRLYQLAKETPTSHSDPRLQHVLVYFFQNEAPKRVVERTLLEQFADKNLSYDERSISIMKVAQAKLKEIGPDDMNMEEYKKWHEDYSLFRKVSVYLLTGLELYQKGKYQEALSYLVYAYQSNAALLMKGPRRGVKESVIALYRRKCLLELNAKAASLFETNDDHSVTEGINVMNELIIPCIHLIINNDISKDDLDAIEVMRNHWCSYLGQDIAENLQLCLGEFLPRLLDPSAEIIVLKEPPTIRPNSPYDLCSRFAAVMESIQGVSTVTVK

SEQ ID NO: 740936 - protein, 118 aa, Homo sapiens
CLPFSHPPSFIFPVASSLRLPLTPACVSISNGAGGPSGPGPEVHASTPGAFLLGNPAVTSPPSVLSTQAPTSAGVEVLGEPSLTSIAVSTWTAVASHPFAGWGGPGAGGHHSPSSLDG

SEQ ID NO: 740937 - protein, 446 aa, Homo sapiens
MSELGTRKPSDGTVSHLLNVVESELQAGREKGDPTEKQLQIILEDAPLWQRFKEVTNEMIVTKNGRRMFPVLKISVTGLDPNAMYSLLLDFVPTDSHRWKYVNGEWVPAGKPEVSSHSCVYIHPDSPNFGAHWMKAPISFSKVKLTNKLNGGGQIMLNSLHKYEPQVHIVRVGSAHRMVTNCSFPETQFIAVTAYQNEEITALKIKYNPFAKAFLDAKERNHLRDVPEAISESQHVTYSHLGGWIFSNPDGVCTAGNSNYQYAAPLPLPAPHTHHGCEHYSGLRGHRQAPYPSAYMHRNHSPSVNLIESSSNNLQVFSGPDSWTSLSSTPHASILSVPHTNGPINPGPSPYPCLWTISNGAGGPSGPGPEVHASTPGAFLLGNPAVTSPPSVLSTQAPTSAGVEVLGEPSLTSIAVSTWTAVASHPFAGWGGPGAGGHHSPSSLDG

SEQ ID NO: 740938 - protein, 107 aa, Homo sapiens
MPVILLLTYFRHHFCPFPLPERNSVLVFLLPLLIFYNSIYGVLNCGPPKICPSLNPGAYKCDLIWEKSLTDEIKLKILPWINQVDAKSNKKVSVQEEKRRITEKKAM

SEQ ID NO: 740939 - protein, 162 aa, Homo sapiens
SPSGKAGESQRAGPSPVARCGRGDDGASGSDGNPASPDRSRQDGAEPAGQGGTTASAGRAQRPTPHRDAENHPVPANTHVGAMAGDRSPLLTRPASHPAHPTTRTHSFVPARVSLSTPSLPPEFSCSRGRRGLATNKGHNPTSTRAARGTRSAKEEGHVGAS

SEQ ID NO: 740940 - protein, 973 aa, Homo sapiens
SGPFCIMVVDFCRRFVARSLCIILMKHFCSSSVSEDLGCRRGDFSRKHYGSVELLISSDADGAIQRAGRFRVENGSSDENATALPGTWRRTDVHLENPEYHTRWYFKYFLGQVHQNYIGNDAEKSPFFLSVTLSDQNNQRVPQYRAILWRKTGTQKICLPYSPTKTLSVKSILSAMNLDKFEKGPREIFHPEIQKDLLVLEEQEGSVNFKFGVLFAKDGQLTDDEMFSNEIGSEPFQKFLNLLGDTITLKGWTGYRGGLDTKNDTTGIHSVYTVYQGHEIMFHVSTMLPYSKENKQQVERKRHIGNDIVTIVFQEGEESSPAFKPSMIRSHFTHIFALVRYNQQNDNYRLKIFSEESVPLFGPPLPTPPVFTDHQEFRDFLLVKLINGEKATLETPTFAQKRRRTLDMLIRSLHQDLMPDLHKNMLNRRSFSDVLPESPKSARKKEEARQAEFVRIGQALKLKSIVRGDAPSSLAASGICKKEPWEPQCFCSNFPHEAVCADPWGQALLVSTDAGVLLVDDDLPSVPVFDRTLPVKQMHVLETLDLLVLRADKGKDARLFVFRLSALQKGLEGKQAGKSRSDCRENKLEKTKGCHLYAINTHHSRELRIVVAIRNKLLLITRKHNKPSGVTSTSLLSPLSESPVEEFQYIREICLSDSPMVMTLVDGPAEESDNLICVAYRHQFDVVNESTGEAFRLHHVEANRVNFVAAIDVYEDGEAGLLLCYNYSCIYKKVCPFNGGSFLVQPSASDFQFCWNQAPYAIVCAFPYLLAFTTDSMEIRLVVNGNLVHTAVVPQLQLVASRVKFNQKICTRFHLETSWAEASNDLLKSPLVSKVITPPTPISVGLAAIPVTHSLSLSRMEIKEIASRTRRELLGLSDEGGPKSEGAPKAKSKPRKRLEESQGGPKPGAVRSSSSDRIPSGSLESASTSEANPEGHSASSDQDPVADREGSPVSGSSPFQLTAFSDEDIIDLK

SEQ ID NO: 740941 - protein, 936 aa, Homo sapiens
RAGHHLQCPLPSVAGRISCILTVLNLSFPVHQNYIGNDAEKSPFFLSVTLSDQNNQRVPQYRAILWRKTGTQKICLPYSPTKTLSVKSILSAMNLDKFEKGPREIFHPEIQKDLLVLEEQEGSVNFKFGVLFAKDGQLTDDEMFSNEIGSEPFQKFLNLLGDTITLKGWTGYRGGLDTKNDTTGIHSVYTVYQGHEIMFHVSTMLPYSKENKQQVERKRHIGNDIVTIVFQEGEESSPAFKPSMIRSHFTHIFALVRYNQQNDNYRLKIFSEESVPLFGPPLPTPPVFTDHQEFRDFLLVKLINGEKATLETPTFAQKRRRTLDMLIRSLHQDLMPDLHKNMLNRRSFSDVLPESPKSARKKEEARQAEFVRIGQALKLKSIVRGDAPSSLAASGICKKEPWEPQCFCSNFPHEAVCADPWGQALLVSTDAGVLLVDDDLPSVPVFDRTLPVKQMHVLETLDLLVLRADKGKDARLFVFRLSALQKGLEGKQAGKSRSDCRENKLEKTKGCHLYAINTHHSRELRIVVAIRNKLLLITRKHNKPSGVTSTSLLSPLSESPVEEFQYIREICLSDSPMVMTLVDGPAEESDNLICVAYRHQFDVVNESTGEAFRLHHVEANRVNFVAAIDVYEDGEAGLLLCYNYSCIYKKVCPFNGGSFLVQPSASDFQFCWNQAPYAIVCAFPYLLAFTTDSMEIRLVVNGNLVHTAVVPQLQLVASRSDIYFTATAAVNEVSSGGSSKGASARNSPQTPPGRDTPVFPSSLGEGEIQSKNLYKIPLRNLVGRSIERPLKSPLVSKVITPPTPISVGLAAIPVTHSLSLSRMEIKEIASRTRRELLGLSDEGGPKSEGAPKAKSKPRKRLEESQGGPKPGAVRSSSSDRIPSGSLESASTSEANPEGHSASSDQDPVADREGSPVSGSSPFQLTAFSDEDIIDLK

SEQ ID NO: 740942 - protein, 844 aa, Homo sapiens
MNLDKFEKGPREIFHPEIQKDLLVLEEQEGSVNFKFGVLFAKDGQLTDDEMFSNEIGSEPFQKFLNLLGDTITLKGWTGYRGGLDTKNDTTGIHSVYTVYQGHEIMFHVSTMLPYSKENKQQVERKRHIGNDIVTIVFQEGEESSPAFKPSMIRSHFTHIFALVRYNQQNDNYRLKIFSEESVPLFGPPLPTPPVFTDHQEFRDFLLVKLINGEKATLETPTFAQKRRRTLDMLIRSLHQDLMPDLHKNMLNRRSFSDVLPESPKSARKKEEARQAEFVRIGQALKLKSIVRGDAPSSLAASGICKKEPWEPQCFCSNFPHEAVCADPWGQALLVSTDAGVLLVDDDLPSVPVFDRTLPVKQMHVLETLDLLVLRADKGKDARLFVFRLSALQKGLEGKQAGKSRSDCRENKLEKTKGCHLYAINTHHSRELRIVVAIRNKLLLITRKHNKPSGVTSTSLLSPLSESPVEEFQYIREICLSDSPMVMTLVDGPAEESDNLICVAYRHQFDVVNESTGEAFRLHHVEANRVNFVAAIDVYEDGEAGLLLCYNYSCIYKKVCPFNGGSFLVQPSASDFQFCWNQAPYAIVCAFPYLLAFTTDSMEIRLVVNGNLVHTAVVPQLQLVASRSDIYFTATAAVNEVSSGGSSKGASARNSPQTPPGRDTPVFPSSLGEGEIQSKNLYKIPLRNLVGRSIERPLKSPLVSKVITPPTPISVGLAAIPVTHSLSLSRMEIKEIASRTRRELLGLSDEGGPKSEGAPKAKSKPRKRLEESQGGPKPGAVRSSSSDRIPSGSLESASTSEANPEGHSASSDQDPVADREGSPVSGSSPFQLTAFSDEDIIDLK

SEQ ID NO: 740943 - protein, 936 aa, Homo sapiens; identical to SEQ ID NO: 740941

SEQ ID NO: 740944 - protein, 114 aa, Homo sapiens
MEIKEIASRTRRELLGLSDEGGPKSEGAPKAKSKPRKRLEESQGGPKPGAVRSSSSDRIPSGSLESASTSEANPEGHSASSDQDPVADREGSPVSGSSPFQLTAFSDEDIIDLK

SEQ ID NO: 740945 - protein, 114 aa, Homo sapiens; identical to SEQ ID NO: 740944

SEQ ID NO: 740946 - protein, 438 aa, Homo sapiens
RAGHHLQCPLPSVAGRISCILTVLNLSFPVHQNYIGNDAEKSPFFLSVTLSDQNNQRVPQYRAILWRKTGTQKICLPYSPTKTLSVKSILSAMNLDKFEKGPREIFHPEIQKDLLVLEEQEGSVNFKFGVLFAKDGQLTDDEMFSNEIGSEPFQKFLNLLGDTITLKGWTGYRGGLDTKNDTTGIHSVYTVYQGHEIMFHVSTMLPYSKENKQQVERKRHIGNDIVTIVFQEGEESSPAFKPSMIRSHFTHIFALVRYNQQNDNYRLKIFSEESVPLFGPPLPTPPVFTDHQEFRDFLLVKLINGEKATLETPTFAQKRRRTLDMLIRSLHQDLMPDLHKNMLNRRSFSDVLPESPKSARKKEEARQAEFVRIGQALKLKSIVRGDAPSSLAASGICKKEPWEPQCFCSNFPHEAVCADPWGQALLVSTDAGVLLVDG

SEQ ID NO: 740947 - protein, 675 aa, Homo sapiens
RAGHHLQCPLPSVAGRISCILTVLNLSFPVHQNYIGNDAEKSPFFLSVTLSDQNNQRVPQYRAILWRKTGTQKICLPYSPTKTLSVKSILSAMNLDKFEKGPREIFHPEIQKDLLVLEEQEGSVNFKFGVLFAKDGQLTDDEMFSNEIGSEPFQKFLNLLGDTITLKGWTGYRGGLDTKNDTTGIHSVYTVYQGHEIMFHVSTMLPYSKENKQQVERKRHIGNDIVTIVFQEGEESSPAFKPSMIRSHFTHIFALVRYNQQNDNYRLKIFSEESVPLFGPPLPTPPVFTDHQEFRDFLLVKLINGEKATLETPTFAQKRRRTLDMLIRSLHQDLMPDLHKNMLNRRSFSDVLPESPKSARKKEEARQAEFVRIGQALKLKSIVRGDAPSSLAASGICKKEPWEPQCFCSNFPHEAVCADPWGQALLVSTDAGVLLVDDDLPSVPVFDRTLPVKQMHVLETLDLLVLRADKGKDARLFVFRLSALQKGLEGKQAGKSRSDCRENKLEKTKGCHLYAINTHHSRELRIVVAIRNKLLLITRKHNKPSGVTSTSLLSPLSESPVEEFQYIREICLSDSPMVMTLVDGPAEESDNLICVAYRHQFDVVNESTGEAFRLHHVEANRVNFVAAIDVYEDGEAGLLLCYNSSQQQAPAFHGNTVSSCSFPVYTTAFLLNGVQ

SEQ ID NO: 740948 - protein, 196 aa, Homo sapiens
MRPEKCRRFVHPQWQLLHLNGTFPNTSDADMEPCVDGWVYDRISFSSTIVTEWDLVCDSQSLTSVAKFVFMAGMMVGGILGGHLSDRFGRRFVLRWCYLQVAIVGTCAALAPTFLIYCSLRFLSGIAAMSLITNTIMLIAEWATHRFQAMGITLGMCPSGIAFMTLAGLAFAIRDWHILQLVVSVPYFVIFLTSRF

SEQ ID NO: 740949 - protein, 339 aa, Homo sapiens
MRPEKCRRFVHPQWQLLHLNGTFPNTSDADMEPCVDGWVYDRISFSSTIVTEWDLVCDSQSLTSVAKFVFMAGMMVGGILGGHLSDRFGRRFVLRWCYLQVAIVGTCAALAPTFLIYCSLRFLSGIAAMSLITNTIMLIAEWATHRFQAMGITLGMCPSGIAFMTLAGLAFAIRDWHILQLVVSVPYFVIFLTSSWLLESARWLIINNKPEEGLKELRKAAHRSGMKNARDTLTLEILKSTMKKELEAAQKKKPSLCEMLHMPNICKRISLLSFTRFANFMAYFGLNLHVQHLGNNVFLLQTLFGAVILLANCVAPWALGVRESLQQGEGELFGTICSS

SEQ ID NO: 740950 - protein, 246 aa, Homo sapiens
MRPEKCRRFVHPQWQLLHLNGTFPNTSDADMEPCVDGWVYDRISFSSTIVTEWDLVCDSQSLTSVAKFVFMAGMMVGGILGGHLSDSSRVGNTQIPGHGNYIGNVPFWYCIYDPGRPGFCHSRLAYPPAGGVCTILCDLSDLKILKSTMKKELEAAQKKKPSLCEMLHMPNICKRISLLSFTRFANFMAYFGLNLHVQHLGNNVFLLQTLFGAVILLANCVAPWALGVRESLQQGEGELFGTICSS

SEQ ID NO: 740951 - protein, 108 aa, Homo sapiens
LGGLERERLANCAEFPVVCAVRGACVQPGLGLFDLGTGSDRHNNNNRVWHFLPSINNVPKMADIITSLNLCCFPLSFLGLNSTWTKSSNCKRLNFKSVSLPPFSTALR

SEQ ID NO: 740952 - protein, 343 aa, Homo sapiens
PGTASLVRAAGQGAMAALGGDGLRLLSVSRPERPPESAALGGLGPGLCCWVSVFSCLSLACSYVGSLYVWKSELPRDHPAVIKRRFTSVLVVSSLSPLCVLLWRELTGIQPGTSLLTLMGFRLEGIFPAALLPLLLTMILFLGPLMQLSMDCPCDLADGLKVVLAPRSWARCLTDMRWLRNQVIAPLTEELVFRACMLPMLAPCMGLGPAVFTCPLFFGVAHFHHIIEQLRFRQSSVGNIFLSAAFQFSYTAVFGAYTAFLFIRTGHLIGPVLCHSFCNYMGFPAVCAALEHPQRRPLLAGYALGVGLFLLLLQPLTDPKLYGSLPLCVLLERAGDSEAPLCS

SEQ ID NO: 740953 - protein, 185 aa, Homo sapiens
PGTASLVRAAGQGAMAALGGDGLRLLSVSRPERPPESAALGGLGPGLCCWVSVFSCLSLACSYVGSLYVWKSELPRDHPAVIKRRFTSVLVVSSLSPLCVLLWRELTGIQPGTSLLTLMGFRLEGIFPAALLPLLLTMILFLGPLMQLSMDCPCDLADGLKVVLGHLKTLGLCWVHTPVLSSIDA

SEQ ID NO: 740954 - protein, 343 aa, Homo sapiens; identical to SEQ ID NO: 740952

SEQ ID NO: 740955 - protein, 168 aa, Homo sapiens [sequence omitted]

SEQ ID NO: 740956 - protein, 43 aa, Homo sapiens
MSLMATLEKELGTEGHSIGEATDRGKLGCRTAVGGGAGSYCPR

SEQ ID NO: 740957 - protein, 155 aa, Homo sapiens
MAVPGCNKDSVRAGCKKCGYPGHLTFECRNFLRVDPKRDIVLDVSSTSSEDSDEENEELNKLQALQEKRINEEEEKKKEKSKEKIKLKKKRKRSYSSSSTEEDTSKQKKQKYQKKEKKKEKKSKSKKGKHHKKEKKKRKKEKHSSTPNSSEFSRK

SEQ ID NO: 740958 - protein, 106 aa, Homo sapiens
MAVPGCNKDSVRAGCKKCGYPGHLTFECRNFLRVDPKRDIVLDVSSTSSEDSDEENEELNKLQALQEKRINEEEEKKKEKSKEKIKLKKKRKRYFLNNILKNKAGL

SEQ ID NO: 740959 - protein, 71 aa, Homo sapiens
LVLPSLEAYRPFPTVARVLLRWGKENAALTVPCSHSWREASAFSKARGSSYPSYHRHGSPRLQQGQCQSRL

SEQ ID NO: 740960 - protein, 77 aa, Homo sapiens
TGSAVARGVQALPDRSEGAAALGEGKRRFDCALFSQLAGSKRLFESQRLELPLLPPSWQSQLLKLPPTFMSVIHHSP

SEQ ID NO: 740961 - protein, 80 aa, Homo sapiens
TGSAVARGVQALPDRSEGAAALGEGKRRFDCALFSQLAGSKRLFESQRLELPLLPPSWQSQVRSNYRASALQQGQCQSRL

SEQ ID NO: 740962 - protein, 121 aa, Homo sapiens
SKNSKFIVLRECKYMKHFLSLCLYSLPYSKKNLRQFKSHLNLSISHKCNSQSVCIIIHRSYSSSSTEEDTSKQKKQKYQKKEKKKEKKSKSKKGKHHKKEKKKRKKEKHSSTPNSSEFSRK

SEQ ID NO: 740963 - protein, 158 aa, Homo sapiens
QRIPLFPSLCYPGHLTFECRNFLRVDPKRDIVLDVSSTSSEDSDEENEELNKLQALQEKRINEEEEKKKEKSKEKIKLKKKRKRSYSSSSTEEDTSKQKKQKYQKKEKKKEKKENKLIFLLYGNTVFLQWSHECFLLLHGLEAAMAKLGGGVNELKVN

SEQ ID NO: 740964 - protein, 77 aa, Homo sapiens; identical to SEQ ID NO: 740960

SEQ ID NO: 740965 - protein, 135 aa, Homo sapiens
MAVPGCNKDSVRAGCKKCGYPGHLTFECRNFLRVDPKRDIVLDVSSTSSEDSDEENEELNKLQALQEKRINEEEEKKKEKSKEKIKLKKKRKRAYSFKFHLKQRHLLKTQSKQKLFIRTASYHNDKNGVKSKTKR

SEQ ID NO: 740966 - protein, 234 aa, Homo sapiens
GSRRRQRGCISVQPARPLLEEDWTKGVTHSFHTVEPLPAWCWSQFSFFMMVDPNGNESSATYFILIGLPGLEEAQFWLAFPLCSLYLIAVLGNLTIIYIVRTEHSLHEPMYIFLCMLSGIDILISTSSMPKMLAIFWFNSTTIQFDACLLQMFAIHSLSGMESTVLLAMAFDRYVAICHPLRHATVLTLPRVTKIGVAAVVRGAALMAPLPVFIKQLPSAAQYPFHSYWLHKMS

SEQ ID NO: 740967 - protein, 120 aa, Homo sapiens
GSRRRQRGCISVQPARPLLEEDWTKGVTHSFHTVEPLPAWCWSQFSFFMMVDPNGNESSATYFILIGLPGLEEAQFWLAFPLCSLYLIAVLASGVTLRCPSSWPISICWFLLCSTQLSME

SEQ ID NO: 740968 - protein, 98 aa, Homo sapiens
DPVACVEGGREGTEGARVKAPPPALAPPSRFSRSRLCASASFSKSALPGPACPGVNFSSQRREEWKPYWMRTGEPVTESRYNADPVKSELYISTYAGQ

SEQ ID NO: 740969 - protein, 102 aa, Homo sapiens
DPVACVEGGREGTEGARVKAPPPALAPPSRFSRSRLCASASFSKSALPGPACPGVNFSSQRREEWKPYWMRTGEPVTESRYNADPVKSERRRPLLVASLLAP

SEQ ID NO: 740970 - protein, 143 aa, Homo sapiens
MAAARLLPVPAGPQAKLTFEDVAVLLSQDEWDRLCPAQRGLYRNVMMETYGNVVSLGLPGSKPDIISQLERGEDPWVLDRKGAKKSQGLWSDYSDNLKYDHTTACTQQDSLSCPWECETKGESQNTDLSPKPLISEQTVILGK

SEQ ID NO: 740971 - protein, 122 aa, Homo sapiens
MAAARLLPVPAGPQAKLTFEDVAVLLSQDEWDRLCPAQRGLYRNVMMETYGNVVSLGLPGSKPDIISQLERGEDPWVLDRKGAKKSQGLWSDYSECETKGESQNTDLSPKPLISEQTVILGK

SEQ ID NO: 740972 - protein, 91 aa, Homo sapiens
AQTGRGSPLSEGAAGCRSFAREAAALTVSGGRVSSPARTLSHHGHRSRCVLHTNRGLFPASTHCLLRLRWSPPLTDARRPPPQGQGRALSP

SEQ ID NO: 740973 - protein, 120 aa, Homo sapiens
MAAARLLPVPAGPQAKLTFEDVAVLLSQDEWDRLCPAQRGLYRNVMMETYGNVVSLGLPGSKPDIISQLERGEDPWVLDRKGAKKSQGLWSDYSDNLKYDHTTACTQQDSLSCPWGWSAV

SEQ ID NO: 740974 - protein, 142 aa, Homo sapiens
GPSGRRRRSLFSDAPCREHAGPDTAKSGCASDLAALSLLSGRNNLTQVIKQEDFSVATKEEKGPLRRRHSHCSGAGTSQAAEGKVVPSSGNRKGKRLGGGNELEFQDGRSQRKSRRDCGAGRGVLHRATAAGAREPGLRAAP

SEQ ID NO: 740975 - protein, 123 aa, Homo sapiens
MQAKEGSFTLSRPHSCYTNGFCCGYPMSGVRRQWYDSSLCVRNWWVLGLTDVKNEAADPRGTASSNGFHLAFPTIIAFTSQGANVGVLPAAKYVYANYASWHLENDHRMSLGTHWTRCKLDLS

SEQ ID NO: 740976 - protein, 77 aa, Homo sapiens
MHPLPITDIRIWFYLQQPLSFAKLTFEDVAVLLSQDEWDRLCPAQRGLYRNVMMETYGNVVSLGKPPSAGLVYVSAY

SEQ ID NO: 740977 - protein, 179 aa, Homo sapiens
GPSGRRRRSLFSDAPCREHAGPDTAKSGCASDLAALSLLSGRNNLTQVIKQEDFSVATKEEKGPLRRRHSHCSGAGTSQAAEGKVVPSSGNRKGKRLGGGNELEFQDGRSQRKSRRDCGAGRGVLHRATAAGAREPGLRAGKARRWAVTSAPGSAAGEPAGPIAQRCSAPLGIAEVWLS

SEQ ID NO: 740978 - protein, 120 aa, Homo sapiens; identical to SEQ ID NO: 740973

SEQ ID NO: 740979 - protein, 251 aa, Homo sapiens
MAAARLLPVPAGPQAKLTFEDVAVLLSQDEWDRLCPAQRGLYRNVMMETYGNVVSLGLPGSKPDIISQLERGEDPWVLDRKGAKKSQGLWSDYSDNLKYDHTTACTQQDSLSCPWDPVPQKPGDVSIPMQAKEGSFTLSRPHSCYTNGFCCGYPMSGVRRQWYDSSLCVRNWWVLGLTDVKNEAADPRGTASSNGFHLAFPTIIAFTSQGANVGVLPAAKYVYANYASWHLENDHRMSLGTHWTRCKLDLS

SEQ ID NO: 740980 - protein, 200 aa, Homo sapiens
MDDKKKKRSPKPCLAQPAQAPGTLRRVPVPTSHSGSLALGLPHLPSPKQRAKFKRVGKEKCRPVLAGGGSGSAGTPLQHSFLTEVTDVYEMEGGLLNLLNDFHSGRLQAFGKECSFEQLEHVREMQEKLARLHFSLDVCGEEEDDEEEEDGVTEGLPEEQKKTMADRNLDQLLSNLEDLSNSIQKLHLAENAEPEEQSAA

SEQ ID NO: 740981 - protein, 200 aa, Homo sapiens; identical to SEQ ID NO: 740980

SEQ ID NO: 740982 - protein, 224 aa, Homo sapiens
MTEPNIRRKRQRTSTTDAHENKTAPTGRKQRAETERAEETPHTRGEEKRRGTRPRREKERKRGEREKKRRERETWKRKEEGTEREISSDAIIKEKSIIEADYGNKSDVVSRVRQETKRKEIKTNQIKMNRVFRKEKQGGGAGEEEKRKEEKKKEVRGEKREDRTSEAREARRTGRGSTARRGQGGGHAGERAGAEGEGGGKGSPGAQARDEKTQEEEQDGRGEK

SEQ ID NO: 740983 - protein, 87 aa, Homo sapiens
CLTAPYPVIMVMSTPPRVGKEKCRPVLAGGGSGSAGTPLQHSFLTEVTDVYEMEGGLLNLLNDFHSGRLQAFGESWGLVSAGVWIGL

SEQ ID NO: 740984 - protein, 200 aa, Homo sapiens; identical to SEQ ID NO: 740980

SEQ ID NO: 740985 - protein, 241 aa, Homo sapiens
MDDKKKKRSPKPCLAQPAQAPGTLRRVPVPTSHSGSLALGLPHLPSPKQRAKFKRVGKEKCRPVLAGGGSGSAGTPLQHSFLTEVTDVYEMEGGLLNLLNDFHSGRLQAFGKECSFEQLEHVREMQEKLARLHFSLDVCGEEEDDEEEEDGVTEGLPEEQKKTMADRNLDQLLSNLEDLSNSMYPFQGTRLCVCVPERSVSSSPALQEYSHTTNFPTSCSPVRFSHRLPKPRYRNLEFPQN

SEQ ID NO: 740986 - protein, 135 aa, Homo sapiens
MDDKKKKRSPKPCLAQPAQAPGTLRRVPVPTSHSGSLALGLPHLPSPKQRAKFKRVGKEKCRPVLAGGGSGSAGTPLQHSFLTEVTDVYEMEGGLLNLLNDFHSGRLQAFAGRTHNFIQKLHLAENAEPEEQSAA

SEQ ID NO: 740987 - protein, 125 aa, Homo sapiens
LVAQAGVQWHDLSSPQPLSPGFKRFSCLSLLGSWDYRYAPPCPANFVFLVEMGFLHVGQAGLELPTSGDPPALASQSAGITGMSHRPWQQFLVSECLVESRKTPWWVLYTKSTSPIYFVLQSLLV

SEQ ID NO: 740988 - protein, 408 aa, Homo sapiens
MMCSRVPSEQSSGTSLLPKDGAPFSWDSLDEDGLDDSLLELSEGEEDDGDVNYTEEEIDALLKEDDPSYEQSSGEDDGGHVEKGERGSQILLDTPREKNSSYSLGPVAETPDLFKLPQLSTSSGHGPAHTKPLNRRSVLEKNLIKVTVAPFNPTVCDALLDKDETDSSKDTEKLSSLGEEMREDGLSPNESKLCTESEGISPNNSAWNGPQLSSSNNNFQQTVSDKNMPDSENPTSVFSRISDHSETPNMELSCRNGGSHKSSCEMRSLVVSTSSNKQDVLNKDSGKMKGHERRLGKVIPVLQTKTRTNVPTFSQSNLEQQKQLYLRSVIAHIEDPEDTNQGISGELCALMDQVHHMQHSKWQHPSDLTTRNYARRQKHLQRYSLTQWVDRNMRSHHRFQRLPDFSYS

SEQ ID NO: 740989 - protein, 408 aa, Homo sapiens; identical to SEQ ID NO: 740988

SEQ ID NO: 740990 - protein, 408 aa, Homo sapiens; identical to SEQ ID NO: 740988

SEQ ID NO: 740991 - protein, 408 aa, Homo sapiens; identical to SEQ ID NO: 740988

SEQ ID NO: 740992 - protein, 272 aa, Homo sapiens
DSAGSGLRGCAGPKRWLLSSRGLKDELLCSICLSIYQDPVSLGCEHYFCRRCITEHWVRQEAQGARDCPECRRTFAEPALAPSLKLANIVERYSSFPLDAILNARRAARPCQAHDKVKLFCLTDRALLCFFCDEPALHEQHQVTGIDDAFDELQRELKDQLQALQDSEREHTEALQLLKRQLAETKSSTKSLRTTIGEAFERLHRLLRERQKAMLEELEADTARTLTDIEQKVQRYSQQLRKVQEGAQILQERLAETDRHTFLAGVASLSER

SEQ ID NO: 740993 - protein, 475 aa, Homo sapiens
MACSLKDELLCSICLSIYQDPVSLGCEHYFCRRCITEHWVRQEAQGARDCPECRRTFAEPALAPSLKLANIVERYSSFPLDAILNARRAARPCQAHDKVKLFCLTDRALLCFFCDEPALHEQHQVTGIDDAFDELQRELKDQLQALQDSEREHTEALQLLKRQLAETKSSTKSLRTTIGEAFERLHRLLRERQKAMLEELEADTARTLTDIEQKVQRYSQQLRKVQEGAQILQERLAETDRHTFLAGVASLSERLKGKIHETNLTYEDFPTSKYTGPLQYTIWKSLFQDIHPVPAALTLDPGTAHQRLILSDDCTIVAYGNLHPQPLQDSPKRFDVEVSVLGSEAFSSGVHYWEVVVAEKTQWVIGLAHEAASRKGSIQIQPSRGFYCIVMHDGNQYSACTEPWTRLNVRDKLDKVGVFLDYDQGLLIFYNADDMSWLYTFREKFPGKLCSYFSPGQSHANGKNVQPLRINTVRI

SEQ ID NO: 740994 - protein, 475 aa, Homo sapiens; identical to SEQ ID NO: 740993

SEQ ID NO: 740995 - protein, 475 aa, Homo sapiens; identical to SEQ ID NO: 740993

SEQ ID NO: 740996 - protein, 475 aa, Homo sapiens; identical to SEQ ID NO: 740993

SEQ ID NO: 740997 - protein, 631 aa, Homo sapiens
AGRQISPPASLCSGSTSSAMAAPEGSGLGEDARLDQETAQWLRWDKNSLTLEAVKRLIAEGNKEELRKCFGARMEFGTAGLRAAMGPGISRMNDLTIIQTTQGFCRYLEKQFSDLKQKGIVISFDARAHPSSGGSSRRFARLAATTFISQGIPVYLFSDITPTPFVPFTVSHLKLCAGIMITASHNPKQDNGYKVYWDNGAQIISPHDKGISQAIEENLEPWPQAWDDSLIDSSPLLHNPSASINNDYFEDLKKYCFHRSVNRETKVKFVHTSVHGVGHSFVQSAFKAFDLVPPEAVPEQKDPDPEFPTVKYPNPEEGKGVLTLSFALADKTKARIVLANDPDADRLAVAEKQDSGEWRVFSGNELGALLGWWLFTSWKEKNQDRSALKDTYMLSSTVSSKILRAIALKEGFHFEETLTGFKWMGNRAKQLIDQGKTVLFAFEEAIGYMCCPFVLDKDGVSAAVISAELASFLATKNLSLSQQLKAIYVEYGYHITKASYFICHDQETIKKLFENLRNYDGKNNYPKACGKFEISAIRDLTTGYDDSQPDKKAVLPTSKSSQMITFTFANGGVATMRTSGTEPKIKYYAELCAPPGNSDPEQLKKELNELVSAIEEHFFQPQKYNLQPKAD

SEQ ID NO: 740998 - protein, 631 aa, Homo sapiens; identical to SEQ ID NO: 740997

SEQ ID NO: 740999 - protein, 623 aa, Homo sapiens
VATSARGTSSAMAAPEGSGLGEDARLDQETAQWLRWDKNSLTLEAVKRLIAEGNKEELRKCFGARMEFGTAGLRAAMGPGISRMNDLTIIQTTQGFCRYLEKQFSDLKQKGIVISFDARAHPSSGGSSRRFARLAATTFISQGIPVYLFSDITPTPFVPFTVSHLKLCAGIMITASHNPKQDNGYKVYWDNGAQIISPHDKGISQAIEENLEPWPQAWDDSLIDSSPLLHNPSASINNDYFEDLKKYCFHRSVNRETKVKFVHTSVHGVGHSFVQSAFKAFDLVPPEAVPEQKDPDPEFPTVKYPNPEEGKGVLTLSFALADKTKARIVLANDPDADRLAVAEKQDSGEWRVFSGNELGALLGWWLFTSWKEKNQDRSALKDTYMLSSTVSSKILRAIALKEGFHFEETLTGFKWMGNRAKQLIDQGKTVLFAFEEAIGYMCCPFVLDKDGVSAAVISAELASFLATKNLSLSQQLKAIYVEYGYHITKASYFICHDQETIKKLFENLRNYDGKNNYPKACGKFEISAIRDLTTGYDDSQPDKKAVLPTSKSSQMITFTFANGGVATMRTSGTEPKIKYYAELCAPPGNSDPEQLKKELNELVSAIEEHFFQPQKYNLQPKAD

SEQ ID NO: 741000 - protein, 631 aa, Homo sapiens; identical to SEQ ID NO: 740997

SEQ ID NO: 741001 - protein, 274 aa, Homo sapiens
AGRQISPPASLCSGSTSSAMAAPEGSGLGEDARLDQETAQWLRWDKNSLTLEAVKRLIAEGNKEELRKCFGARMEFGTAGLRAAMGPGISRMNDLTIIQTTQGFCRYLEKQFSDLKQKGIVISFDARAHPSSGGSSRRFARLAATTFISQGIPVYLFSDITPTPFVPFTVSHLKLCAGIMITASHNPKQDNGYKVYWDNGAQIISPHDKGISQAIEENLEPWPQAWDDSLIDSSPLLHNPSASINNDYFEDLKKYCFHRLCLLLWLTKPRPELF

SEQ ID NO: 741002 - protein, 518 aa, Homo sapiens
NSLTNPFIVRRNDLSSSIQWGSSRRFARLAATTFISQGIPVYLFSDITPTPFVPFTVSHLKLCAGIMITASHNPKQDNGYKVYWDNGAQIISPHDKGISQAIEENLEPWPQAWDDSLIDSSPLLHNPSASINNDYFEDLKKYCFHRSVNRETKVKFVHTSVHGVGHSFVQSAFKAFDLVPPEAVPEQKDPDPEFPTVKYPNPEEGKGVLTLSFALADKTKARIVLANDPDADRLAVAEKQDSGEWRVFSGNELGALLGWWLFTSWKEKNQDRSALKDTYMLSSTVSSKILRAIALKEGFHFEETLTGFKWMGNRAKQLIDQGKTVLFAFEEAIGYMCCPFVLDKDGVSAAVISAELASFLATKNLSLSQQLKAIYVEYGYHITKASYFICHDQETIKKLFENLRNYDGKNNYPKACGKFEISAIRDLTTGYDDSQPDKKAVLPTSKSSQMITFTFANGGVATMRTSGTEPKIKYYAELCAPPGNSDPEQLKKELNELVSAIEEHFFQPQKYNLQPKAD

SEQ ID NO: 741003 - protein, 103 aa, Homo sapiens
VATSARGTSSAMAAPEGSGLGEDARLDQETAQWLRWDKNSLTLEAVKRLIAEGNKEELRKCFGARMEFGTAGLRAAMGPGISRMNDLTIIQTTQLCAVSFQGF

SEQ ID NO: 741004 - protein, 2555 aa, Homo sapiens
MPPLLAPLLCLALLPALAARGPRCSQPGETCLNGGKCEAANGTEACVCGGAFVGPRCQDPNPCLSTPCKNAGTCHVVDRRGVADYACSCALGFSGPLCLTPLDNACLTNPCRNGGTCDLLTLTEYKCRCPPGWSGKSCQQADPCASNPCANGGQCLPFEASYICHCPPSFHGPTCRQDVNECGQKPGLCRHGGTCHNEVGSYRCVCRATHTGPNCERPYVPCSPSPCQNGGTCRPTGDVTHECACLPGFTGQNCEENIDDCPGNNCKNGGACVDGVNTYNCPCPPEWTGQYCTEDVDECQLMPNACQNGGTCHNTHGGYNCVCVNGWTGEDCSENIDDCASAACFHGATCHDRVASFYCECPHGRTGLLCHLNDACISNPCNEGSNCDTNPVNGKAICTCPSGYTGPACSQDVDECSLGANPCEHAGKCINTLGSFECQCLQGYTGPRCEIDVNECVSNPCQNDATCLDQIGEFQCMCMPGYEGVHCEVNTDECASSPCLHNGRCLDKINEFQCECPTGFTGHLCQYDVDECASTPCKNGAKCLDGPNTYTCVCTEGYTGTHCEVDIDECDPDPCHYGSCKDGVATFTCLCRPGYTGHHCETNINECSSQPCRHGGTCQDPDNAYLCFCLKGTTGPNCEINLDDCASSPCDSGTCLDKIDGYECACEPGYTGSMCNSNIDECAGNPCHNGGTCEDGINGFTCRCPEGYHDPTCLSEVNECNSNPCVHGACRDSLNGYKCDCDPGWSGTNCDINNNECESNPCVNGGTCKDMTSGYVCTCREGFSGPNCQTNINECASNPCLNQGTCIDDVAGYKCNCLLPYTGATCEVVLAPCAPSPCRNGGECRQSEDYESFSCVCPTGWQGQTCEVDINECVLSPCRHGASCQNTHGGYRCHCQAGYSGRNCETDIDDCRPNPCHNGGSCTDGINTAFCDCLPGFRGTFCEEDINECASDPCRNGANCTDCVDSYTCTCPAGFSGIHCENNTPDCTESSCFNGGTCVDGINSFTCLCPPGFTGSYCQHDVNECDSQPCLLGGTCQDGRGLHRCTCPQGYTGPNCQNLVHWCDSSPCKNGGKCWQTHTQYRCECPSGWTGLYCDVPSVSCEVAAQRQGVDVARLCQHGGLCVDAGNTHHCRCQAGYTGSYCEDLVDECSPSPCQNGATCTDYLGGYSCKCVAGYHGVNCSEEIDECLSHPCQNGGTCLDLPNTYKCSCPRGTQGVHCEINVDDCNPPVDPVSRSPKCFNNGTCVDQVGGYSCTCPPGFVGERCEGDVNECLSNPCDARGTQNCVQRVNDFHCECRAGHTGRRCESVINGCKGKPCKNGGTCAVASNTARGFICKCPAGFEGATCENDARTCGSLRCLNGGTCISGPRSPTCLCLGPFTGPECQFPASSPCLGGNPCYNQGTCEPTSESPFYRCLCPAKFNGLLCHILDYSFGGGAGRDIPPPLIEEACELPECQEDAGNKVCSLQCNNHACGWDGGDCSLNFNDPWKNCTQSLQCWKYFSDGHCDSQCNSAGCLFDGFDCQRAEGQCNPLYDQYCKDHFSDGHCDQGCNSAECEWDGLDCAEHVPERLAAGTLVVVVLMPPEQLRNSSFHFLRELSRVLHTNVVFKRDAHGQQMIFPYYGREEELRKHPIKRAAEGWAAPDALLGQVKASLLPGGSEGGRRRRELDPMDVRGSIVYLEIDNRQCVQASSQCFQSATDVAAFLGALASLGSLNIPYKIEAVQSETVEPPPPAQLHFMYVAAAAFVLLFFVGCGVLLSRKRRRQHGQLWFPEGFKVSEASKKKRREPLGEDSVGLKPLKNASDGALMDDNQNEWGDEDLETKKFRFEEPVVLPDLDDQTDHRQWTQQHLDAADLRMSAMAPTPPQGEVDADCMDVNVRGPDGFTPLMIASCSGGGLETGNSEEEEDAPAVISDFIYQGASLHNQTDRTGETALHLAARYSRSDAAKRLLEASADANIQDNMGRTPLHAAVSADAQGVFQILIRNRATDLDARMHDGTTPLILAARLAVEGMLEDLINSHADVNAVDDLGKSALHWAAAVNNVDAAVVLLKNGANKDMQNNREETPLFLAAREGSYETAKVLLDHFANRDITDHMDRLPRDIAQERMHHDIVRLLDEYNLVRSPQLHGAPLGGTPTLSPPLCSPNGYLGSLKPGVQGKKVRKPSSKGLACGSKEAKDLKARRKKSQDGKGCLLDSSGMLSPVDSLESPHGYLSDVASPPLLPSPFQQSPSVPLNHLPGMPDTHLGIGHLNVAAKPEMAALGGGGRLAFETGPPRLSHLPVASGTSTVLGSSSGGALNFTVGGSTSLNGQCEWLSRLQSGMVPNQYNPLRGSVAPGPLSTQAPSLQHGMVGPLHSSLAASALSQMMSYQGLPSTRLATQPHLVQTQQVQPQNLQMQQQNLQPANIQQQQSLQPPPPPPQPHLGVSSAASGHLGRSFLSGEPSQADVQPLGPSSLAVHTILPQESPALPTSLPSSLVPPVTAAQFLTPPSQHSYSSPVDNTPSHQLQVPEHPFLTPSPESPDQWSSSSPHSNVSDWSEGVSSPPTSMQSQIARIPEAFK

SEQ ID NO: 741005 - protein, 1830 aa, Homo sapiens
SLDLQCGPPCRYKCDCDPGWSGTNCDINNNECESNPCVNGGTCKDMTSGYVCTCREGFSGPNCQTNINECASNPCLNQGTCIDDVAGYKCNCLLPYTGATCEVVLAPCAPSPCRNGGECRQSEDYESFSCVCPTGWQGQTCEVDINECVLSPCRHGASCQNTHGGYRCHCQAGYSGRNCETDIDDCRPNPCHNGGSCTDGINTAFCDCLPGFRGTFCEEDINECASDPCRNGANCTDCVDSYTCTCPAGFSGIHCENNTPDCTESSCFNGGTCVDGINSFTCLCPPGFTGSYCQHDVNECDSQPCLLGGTCQDGRGLHRCTCPQGYTGPNCQNLVHWCDSSPCKNGGKCWQTHTQYRCECPSGWTGLYCDVPSVSCEVAAQRQGVDVARLCQHGGLCVDAGNTHHCRCQAGYTGSYCEDLVDECSPSPCQNGATCTDYLGGYSCKCVAGYHGVNCSEEIDECLSHPCQNGGTCLDLPNTYKCSCPRGTQGVHCEINVDDCNPPVDPVSRSPKCFNNGTCVDQVGGYSCTCPPGFVGERCEGDVNECLSNPCDARGTQNCVQRVNDFHCECRAGHTGRRCESVINGCKGKPCKNGGTCAVASNTARGFICKCPAGFEGATCENDARTCGSLRCLNGGTCISGPRSPTCLCLGPFTGPECQFPASSPCLGGNPCYNQGTCEPTSESPFYRCLCPAKFNGLLCHILDYSFGGGAGRDIPPPLIEEACELPECQEDAGNKVCSLQCNNHACGWDGGDCSLNFNDPWKNCTQSLQCWKYFSDGHCDSQCNSAGCLFDGFDCQRAEGQCNPLYDQYCKDHFSDGHCDQGCNSAECEWDGLDCAEHVPERLAAGTLVVVVLMPPEQLRNSSFHFLRELSRVLHTNVVFKRDAHGQQMIFPYYGREEELRKHPIKRAAEGWAAPDALLGQVKASLLPGGSEGGRRRRELDPMDVRGSIVYLEIDNRQCVQASSQCFQSATDVAAFLGALASLGSLNIPYKIEAVQSETVEPPPPAQLHFMYVAAAAFVLLFFVGCGVLLSRKRRRQHGQLWFPEGFKVSEASKKKRREPLGEDSVGLKPLKNASDGALMDDNQNEWGDEDLETKKFRFEEPVVLPDLDDQTDHRQWTQQHLDAADLRMSAMAPTPPQGEVDADCMDVNVRGPDGFTPLMIASCSGGGLETGNSEEEEDAPAVISDFIYQGASLHNQTDRTGETALHLAARYSRSDAAKRLLEASADANIQDNMGRTPLHAAVSADAQGVFQILIRNRATDLDARMHDGTTPLILAARLAVEGMLEDLINSHADVNAVDDLGKSALHWAAAVNNVDAAVVLLKNGANKDMQNNREETPLFLAAREGSYETAKVLLDHFANRDITDHMDRLPRDIAQERMHHDIVRLLDEYNLVRSPQLHGAPLGGTPTLSPPLCSPNGYLGSLKPGVQGKKVRKPSSKGLACGSKEAKDLKARRKKSQDGKGCLLDSSGMLSPVDSLESPHGYLSDVASPPLLPSPFQQSPSVPLNHLPGMPDTHLGIGHLNVAAKPEMAALGGGGRLAFETGPPRLSHLPVASGTSTVLGSSSGGALNFTVGGSTSLNGQCEWLSRLQSGMVPNQYNPLRGSVAPGPLSTQAPSLQHGMVGPLHSSLAASALSQMMSYQGLPSTRLATQPHLVQTQQVQPQNLQMQQQNLQPANIQQQQSLQPPPPPPQPHLGVSSAASGHLGRSFLSGEPSQADVQPLGPSSLAVHTILPQESPALPTSLPSSLVPPVTAAQFLTPPSQHSYSSPVDNTPSHQLQVPEHPFLTPSPESPDQWSSSSPHSNVSDWSEGVSSPPTSMQSQIARIPEAFK

SEQ ID NO: 741006 - protein, 1849 aa, Homo sapiens
VWVISELLFYVFQHTSTGYSDWDDYAYSDVDLRDHHSETTLVAVSLTVGTLKPNPCVNGGTCKDMTSGYVCTCREGFSGPNCQTNINECASNPCLNQGTCIDDVAGYKCNCLLPYTGATCEVVLAPCAPSPCRNGGECRQSEDYESFSCVCPTGWQGQTCEVDINECVLSPCRHGASCQNTHGGYRCHCQAGYSGRNCETDIDDCRPNPCHNGGSCTDGINTAFCDCLPGFRGTFCEEDINECASDPCRNGANCTDCVDSYTCTCPAGFSGIHCENNTPDCTESSCFNGGTCVDGINSFTCLCPPGFTGSYCQHDVNECDSQPCLLGGTCQDGRGLHRCTCPQGYTGPNCQNLVHWCDSSPCKNGGKCWQTHTQYRCECPSGWTGLYCDVPSVSCEVAAQRQGVDVARLCQHGGLCVDAGNTHHCRCQAGYTGSYCEDLVDECSPSPCQNGATCTDYLGGYSCKCVAGYHGVNCSEEIDECLSHPCQNGGTCLDLPNTYKCSCPRGTQGVHCEINVDDCNPPVDPVSRSPKCFNNGTCVDQVGGYSCTCPPGFVGERCEGDVNECLSNPCDARGTQNCVQRVNDFHCECRAGHTGRRCESVINGCKGKPCKNGGTCAVASNTARGFICKCPAGFEGATCENDARTCGSLRCLNGGTCISGPRSPTCLCLGPFTGPECQFPASSPCLGGNPCYNQGTCEPTSESPFYRCLCPAKFNGLLCHILDYSFGGGAGRDIPPPLIEEACELPECQEDAGNKVCSLQCNNHACGWDGGDCSLNFNDPWKNCTQSLQCWKYFSDGHCDSQCNSAGCLFDGFDCQRAEGQCNPLYDQYCKDHFSDGHCDQGCNSAECEWDGLDCAEHVPERLAAGTLVVVVLMPPEQLRNSSFHFLRELSRVLHTNVVFKRDAHGQQMIFPYYGREEELRKHPIKRAAEGWAAPDALLGQVKASLLPGGSEGGRRRRELDPMDVRGSIVYLEIDNRQCVQASSQCFQSATDVAAFLGALASLGSLNIPYKIEAVQSETVEPPPPAQLHFMYVAAAAFVLLFFVGCGVLLSRKRRRQHGQLWFPEGFKVSEASKKKRREPLGEDSVGLKPLKNASDGALMDDNQNEWGDEDLETKKFRFEEPVVLPDLDDQTDHRQWTQQHLDAADLRMSAMAPTPPQGEVDADCMDVNVRGPDGFTPLMIASCSGGGLETGNSEEEEDAPAVISDFIYQGASLHNQTDRTGETALHLAARYSRSDAAKRLLEASADANIQDNMGRTPLHAAVSADAQGVFQILIRNRATDLDARMHDGTTPLILAARLAVEGMLEDLINSHADVNAVDDLGKSALHWAAAVNNVDAAVVLLKNGANKDMQNNREETPLFLAAREGSYETAKVLLDHFANRDITDHMDRLPRDIAQERMHHDIVRLLDEYNLVRSPQLHGAPLGGTPTLSPPLCSPNGYLGSLKPGVQGKKVRKPSSKGLACGSKEAKDLKARRKKSQDGKGCLLDSSGMLSPVDSLESPHGYLSDVASPPLLPSPFQQSPSVPLNHLPGMPDTHLGIGHLNVAAKPEMAALGGGGRLAFETGPPRLSHLPVASGTSTVLGSSSGGALNFTVGGSTSLNGQCEWLSRLQSGMVPNQYNPLRGSVAPGPLSTQAPSLQHGMVGPLHSSLAASALSQMMSYQGLPSTRLATQPHLVQTQQVQPQNLQMQQQNLQPANIQQQQSLQPPPPPPQPHLGVSSAASGHLGRSFLSGEPSQADVQPLGPSSLAVHTILPQESPALPTSLPSSLVPPVTAAQFLTPPSQHSYSSPVDNTPSHQLQVPEHPFLTPSPESPDQWSSSSPHSNVSDWSEGVSSPPTSMQSQIARIPEAFK

SEQ ID NO: 741007 - protein, 2651 aa, Homo sapiens
MPPLLAPLLCLALLPALAARGPRCSQPGETCLNGGKCEAANGTEACVCGGAFVGPRCQDPNPCLSTPCKNAGTCHVVDRRGVADYACSCALGFSGPLCLTPLDNACLTNPCRNGGTCDLLTLTEYKCRCPPGWSGKSCQQADPCASNPCANGGQCLPFEASYICHCPPSFHGPTCRQDVNECGQKPGLCRHGGTCHNEVGSYRCVCRATHTGPNCERPYVPCSPSPCQNGGTCRPTGDVTHECACLPGFTGQNCEENIDDCPGNNCKNGGACVDGVNTYNCPCPPEWTGQYCTEDVDECQLMPNACQNGGTCHNTHGGYNCVCVNGWTGEDCSENIDDCASAACFHGATCHDRVASFYCECPHGRTGLLCHLNDACISNPCNEGSNCDTNPVNGKAICTCPSGYTGPACSQDVDECSLGANPCEHAGKCINTLGSFECQCLQGYTGPRCEIDVNECVSNPCQNDATCLDQIGEFQCMCMPGYEGVHCEVNTDECASSPCLHNGRCLDKINEFQCECPTGFTGHLCQYDVDECASTPCKNGAKCLDGPNTYTCVCTEGYTGTHCEVDIDECDPDPCHYGSCKDGVATFTCLCRPGYTGHHCETNINECSSQPCRHGGTCQDPDNAYLCFCLKGTTGPNCEINLDDCASSPCDSGTCLDKIDGYECACEPGYTGSMCNSNIDECAGNPCHNGGTCEDGINGFTCRCPEGYHDPTCLSEVNECNSNPCVHGACRDSLNGYKCDCDPGWSGTNCDINNNECESNPCVNGGTCKDMTSGYVCTCREGFSGPNCQTNINECASNPCLNQGTCIDDVAGYKCNCLLPYTGATCEVVLAPCAPSPCRNGGECRQSEDYESFSCVCPTGWQGQTCEVDINECVLSPCRHGASCQNTHGGYRCHCQAGYSGRNCETDIDDCRPNPCHNGGSCTDGINTAFCDCLPGFRGTFCEEDINECASDPCRNGANCTDCVDSYTCTCPAGFSGIHCENNTPDCTESSCFNGGTCVDGINSFTCLCPPGFTGSYCQHDVNECDSQPCLLGGTCQDGRGLHRCTCPQGYTGPNCQNLVHWCDSSPCKNGGKCWQTHTQYRCECPSGWTGLYCDVPSVSCEVAAQRQGVDVARLCQHGGLCVDAGNTHHCRCQAGYTGSYCEDLVDECSPSPCQNGATCTDYLGGYSCKCVAGYHGVNCSEEIDECLSHPCQNGGTCLDLPNTYKCSCPRGTQGVHCEINVDDCNPPVDPVSRSPKCFNNGTCVDQVGGYSCTCPPGFVGERCEGDVNECLSNPCDARGTQNCVQRVNDFHCECRAGHTGRRCESVINGCKGKPCKNGGTCAVASNTARGFICKCPAGFEGATCENDARTCGSLRCLNGGTCISGPRSPTCLCLGPFTGPECQFPASSPCLGGNPCYNQGTCEPTSESPFYRCLCPAKFNGLLCHILDYSFGGGAGRDIPPPLIEEACELPECQEDAGNKVCSLQCNNHACGWDGGDCSLNFNDPWKNCTQSLQCWKYFSDGHCDSQCNSAGCLFDGFDCQRAEGQCNPLYDQYCKDHFSDGHCDQGCNSAECEWDGLDCAEHVPERLAAGTLVVVVLMPPEQLRNSSFHFLRELSRVLHTNVVFKRDAHGQQMIFPYYGREEELRKHPIKRAAEGWAAPDALLGQVKASLLPGGSEGGRRRRELDPMDVRGSIVYLEIDNRQCVQASSQCFQSATDVAAFLGALASLGSLNIPYKIEAVQTQCECSDLKLTNPPSFKGEKSKSRLQIESAGAGENLAIVCNSDYRVENDLILEERDGGEWVRRRPDAEPVRRPPATSLLRSRCLMSGHLPLAPVPAGETVEPPPPAQLHFMYVAAAAFVLLFFVGCGVLLSRKRRRQHGQLWFPEGFKVSEASKKKRREPLGEDSVGLKPLKNASDGALMDDNQNEWGDEDLETKKFRFEEPVVLPDLDDQTDHRQWTQQHLDAADLRMSAMAPTPPQGEVDADCMDVNVRGPDGFTPLMIASCSGGGLETGNSEEEEDAPAVISDFIYQGASLHNQTDRTGETALHLAARYSRSDAAKRLLEASADANIQDNMGRTPLHAAVSADAQGVFQILIRNRATDLDARMHDGTTPLILAARLAVEGMLEDLINSHADVNAVDDLGKSALHWAAAVNNVDAAVVLLKNGANKDMQNNREETPLFLAAREGSYETAKVLLDHFANRDITDHMDRLPRDIAQERMHHDIVRLLDEYNLVRSPQLHGAPLGGTPTLSPPLCSPNGYLGSLKPGVQGKKVRKPSSKGLACGSKEAKDLKARRKKSQDGKGCLLDSSGMLSPVDSLESPHGYLSDVASPPLLPSPFQQSPSVPLNHLPGMPDTHLGIGHLNVAAKPEMAALGGGGRLAFETGPPRLSHLPVASGTSTVLGSSSGGALNFTVGGSTSLNGQCEWLSRLQSGMVPNQYNPLRGSVAPGPLSTQAPSLQHGMVGPLHSSLAASALSQMMSYQGLPSTRLATQPHLVQTQQVQPQNLQMQQQNLQPANIQQQQSLQPPPPPPQPHLGVSSAASGHLGRSFLSGEPSQADVQPLGPSSLAVHTILPQESPALPTSLPSSLVPPVTAAQFLTPPSQHSYSSPVDNTPSHQLQVPEHPFLTPSPESPDQWSSSSPHSNVSDWSEGVSSPPTSMQSQIARIPEAFK

SEQ ID NO: 741008 - protein, 845 aa, Homo sapiens [sequence omitted]

SEQ ID NO: 741009 - protein, 2049 aa, Homo sapiens
MPPLLAPLLCLALLPALAARGPRCSQPGETCLNGGKCEAANGTEACVCGGAFVGPRCQDPNPCLSTPCKNAGTCHVVDRRGVADYACSCALGFSGPLCLTPLDNACLTNPCRNGGTCDLLTLTEYKCRCPPGWSGKSCQQADPCASNPCANGGQCLPFEASYICHCPPSFHGPTCRQDVNECGQKPGLCRHGGTCHNEVGSYRCVCRATHTGPNCERPYVPCSPSPCQNGGTCRPTGDVTHECACLPGFTGQNCEENIDDCPGNNCKNGGACVDGVNTYNCPCPPEWTGQYCTEDVDECQLMPNACQNGGTCHNTHGGYNCVCVNGWTGEDCSENIDDCASAACFHGATCHDRVASFYCECPHGRTGLLCHLNDACISNPCNEGSNCDTNPVNGKAICTCPSGYTGPACSQDVDECSLGANPCEHAGKCINTLGSFECQCLQGYTGPRCEIDVNECVSNPCQNDATCLDQIGEFQCMCMPGYEGVHCEVNTDECASSPCLHNGRCLDKINEFQCECPTGFTGHLCQYDVDECASTPCKNGAKCLDGPNTYTCVCTEGYTGTHCEVDIDECDPDPCHYGSCKDGVATFTCLCRPGYTGHHCETNINECSSQPCRHGGTCQDPDNAYLCFCLKGTTGPNCEINLDDCASSPCDSGTCLDKIDGYECACEPGYTGSMCNSNIDECAGNPCHNGGTCEDGINGFTCRCPEGYHDPTCLSEVNECNSNPCVHGACRDSLNGYKCDCDPGWSGTNCDINNNECESNPCVNGGTCKDMTSGYVCTCREGFSGPNCQTNINECASNPCLNQGTCIDDVAGYKCNCLLPYTGATCEVVLAPCAPSPCRNGGECRQSEDYESFSCVCPTGWQGQTCEVDINECVLSPCRHGASCQNTHGGYRCHCQAGYSGRNCETDIDDCRPNPCHNGGSCTDGINTAFCDCLPGFRGTFCEEDINECASDPCRNGANCTDCVDSYTCTCPAGFSGIHCENNTPDCTESSCFNGGTCVDGINSFTCLCPPGFTGSYCQHDVNECDSQPCLLGGTCQDGRGLHRCTCPQGYTGPNCQNLVHWCDSSPCKNGGKCWQTHTQYRCECPSGWTGLYCDVPSVSCEVAAQRQGVDVARLCQHGGLCVDAGNTHHCRCQAGYTGSYCEDLVDECSPSPCQNGATCTDYLGGYSCKCVAGYHGVNCSEEIDECLSHPCQNGGTCLDLPNTYKCSCPRGTQGVHCEINVDDCNPPVDPVSRSPKCFNNGTCVDQVGGYSCTCPPGFVGERCEGDVNECLSNPCDARGTQNCVQRVNDFHCECRAGHTGRRCESVINGCKGKPCKNGGTCAVASNTARGFICKCPAGFEGATCENDARTCGSLRCLNGGTCISGPRSPTCLCLGPFTGPECQFPASSPCLGGNPCYNQGTCEPTSESPFYRCLCPAKFNGLLCHILDYSFGGGAGRDIPPPLIEEACELPECQEDAGNKVCSLQCNNHACGWDGGDCSLNFNDPWKNCTQSLQCWKYFSDGHCDSQCNSAGCLFDGFDCQRAEGQCNPLYDQYCKDHFSDGHCDQGCNSAECEWDGLDCAEHVPERLAAGTLVVVVLMPPEQLRNSSFHFLRELSRVLHTNVVFKRDAHGQQMIFPYYGREEELRKHPIKRAAEGWAAPDALLGQVKASLLPGGSEGGRRRRELDPMDVRGSIVYLEIDNRQCVQASSQCFQSATDVAAFLGALASLGSLNIPYKIEAVQSETVEPPPPAQLHFMYVAAAAFVLLFFVGCGVLLSRKRRRQHGQLWFPEGFKVSEASKKKRREPLGEDSVGLKPLKNASDGALMDDNQNEWGDEDLETKKFRFEEPVVLPDLDDQTDHRQWTQQHLDAADLRMSAMAPTPPQGEVDADCMDVNVRGPDGFTPLMIASCSGGGLETGNSEEEEDAPAVISDFIYQGASLHNQTDRTGETALHLAARYSRSDAAKRLLEASADANIQDNMGRTPLHAAVSADAQGVFQILIRNRATDLDARMHDGTTPLILAARLAVEGMLEDLINSHADVNAVDDLGKSACTGRRREQCDAQTRKDPL

SEQ ID NO: 741010 - protein, 1912 aa, Homo sapiens
MPPLLAPLLCLALLPALAARGPRCSQPGETCLNGGKCEAANGTEACVCGGAFVGPRCQDPNPCLSTPCKNAGTCHVVDRRGVADYACSCALGFSGPLCLTPLDNACLTNPCRNGGTCDLLTLTEYKCRCPPGWSGKSCQQADPCASNPCANGGQCLPFEASYICHCPPSFHGPTCRQDVNECGQKPGLCRHGGTCHNEVGSYRCVCRATHTGPNCERPYVPCSPSPCQNGGTCRPTGDVTHECACLPGFTGQNCEENIDDCPGNNCKNGGACVDGVNTYNCPCPPEWTGQYCTEDVDECQLMPNACQNGGTCHNTHGGYNCVCVNGWTGEDCSENIDDCASAACFHGATCHDRVASFYCECPHGRTGLLCHLNDACISNPCNEGSNCDTNPVNGKAICTCPSGYTGPACSQDVDECSLGANPCEHAGKCINTLGSFECQCLQGYTGPRCEIDVNECVSNPCQNDATCLDQIGEFQCMCMPGYEGVHCEVNTDECASSPCLHNGRCLDKINEFQCECPTGFTGHLCQYDVDECASTPCKNGAKCLDGPNTYTCVCTEGYTGTHCEVDIDECDPDPCHYGSCKDGVATFTCLCRPGYTGHHCETNINECSSQPCRHGGTCQDPDNAYLCFCLKGTTGPNCEINLDDCASSPCDSGTCLDKIDGYECACEPGYTGSMCNSNIDECAGNPCHNGGTCEDGINGFTCRCPEGYHDPTCLSEVNECNSNPCVHGACRDSLNGYKCDCDPGWSGTNCDINNNECESNPCVNGGTCKDMTSGYVCTCREGFSGPNCQTNINECASNPCLNQGTCIDDVAGYKCNCLLPYTGATCEVVLAPCAPSPCRNGGECRQSEDYESFSCVCPTGWQGQTCEVDINECVLSPCRHGASCQNTHGGYRCHCQAGYSGRNCETDIDDCRPNPCHNGGSCTDGINTAFCDCLPGFRGTFCEEDINECASDPCRNGANCTDCVDSYTCTCPAGFSGIHCENNTPDCTESSCFNGGTCVDGINSFTCLCPPGFTGSYCQHDVNECDSQPCLLGGTCQDGRGLHRCTCPQGYTGPNCQNLVHWCDSSPCKNGGKCWQTHTQYRCECPSGWTGLYCDVPSVSCEVAAQRQGVDVARLCQHGGLCVDAGNTHHCRCQAGYTGSYCEDLVDECSPSPCQNGATCTDYLGGYSCKCVAGYHGVNCSEEIDECLSHPCQNGGTCLDLPNTYKCSCPRGTQGVHCEINVDDCNPPVDPVSRSPKCFNNGTCVDQVGGYSCTCPPGFVGERCEGDVNECLSNPCDARGTQNCVQRVNDFHCECRAGHTGRRCESVINGCKGKPCKNGGTCAVASNTARGFICKCPAGFEGATCENDARTCGSLRCLNGGTCISGPRSPTCLCLGPFTGPECQFPASSPCLGGNPCYNQGTCEPTSESPFYRCLCPAKFNGLLCHILDYSFGGGAGRDIPPPLIEEACELPECQEDAGNKVCSLQCNNHACGWDGGDCSLNFNDPWKNCTQSLQCWKYFSDGHCDSQCNSAGCLFDGFDCQRAEGQCNPLYDQYCKDHFSDGHCDQGCNSAECEWDGLDCAEHVPERLAAGTLVVVVLMPPEQLRNSSFHFLRELSRVLHTNVVFKRDAHGQQMIFPYYGREEELRKHPIKRAAEGWAAPDALLGQVKASLLPGGSEGGRRRRELDPMDVRGSIVYLEIDNRQCVQASSQCFQSATDVAAFLGALASLGSLNIPYKIEAVQSETVEPPPPAQLHFMYVAAAAFVLLFFVGCGVLLSRKRRRQHGQLWFPEGFKVSEASKKKRREPLGEDSVGLKPLKNASDGALMDDNQNEWGDEDLETKKFRFEEPVVLPDLDDQTDHRQWTQQHLDAADLRMSAMAPTPPQGEVDADCMDVNVRGPGKGASSQGFPSPVAHLPLSPKPRGWGTVDTLET

SEQ ID NO: 741011 - protein, 945 aa, Homo sapiens
MPPLLAPLLCLALLPALAARGPRCSQPGETCLNGGKCEAANGTEACVCGGAFVGPRCQDPNPCLSTPCKNAGTCHVVDRRGVADYACSCALGFSGPLCLTPLDNACLTNPCRNGGTCDLLTLTEYKCRCPPGWSGKSCQQADPCASNPCANGGQCLPFEASYICHCPPSFHGPTCRQDVNECGQKPGLCRHGGTCHNEVGSYRCVCRATHTGPNCERPYVPCSPSPCQNGGTCRPTGDVTHECACLPGFTGQNCEENIDDCPGNNCKNGGACVDGVNTYNCPCPPEWTGQYCTEDVDECQLMPNACQNGGTCHNTHGGYNCVCVNGWTGEDCSENIDDCASAACFHGATCHDRVASFYCECPHGRTGLLCHLNDACISNPCNEGSNCDTNPVNGKAICTCPSGYTGPACSQDVDECSLGANPCEHAGKCINTLGSFECQCLQGYTGPRCEIDVNECVSNPCQNDATCLDQIGEFQCMCMPGYEGVHCEVNTDECASSPCLHNGRCLDKINEFQCECPTGFTGHLCQYDVDECASTPCKNGAKCLDGPNTYTCVCTEGYTGTHCEVDIDECDPDPCHYGSCKDGVATFTCLCRPGYTGHHCETNINECSSQPCRHGGTCQDPDNAYLCFCLKGTTGPNCEINLDDCASSPCDSGTCLDKIDGYECACEPGYTGSMCNSNIDECAGNPCHNGGTCEDGINGFTCRCPEGYHDPTCLSEVNECNSNPCVHGACRDSLNGYKCDCDPGWSGTNCDINNNECESNPCVNGGTCKDMTSGYVCTCREGFSGPNCQTNINECASNPCLNQGTCIDDVAGYKCNCLLPYTGATCEVVLAPCAPSPCRNGGECRQSEDYESFSCVCPTGWQGQTCEVDINECVLSPCRHGASCQNTHGGYRCHCQAGYSGRNCETDIDDCRPNPCHNGGSCTDGINTAFCDCLPGFRGTFCDTF

SEQ ID NO: 741012 - protein, 334 aa, Homo sapiens
MPPLLAPLLCLALLPALAARGPRCSQPGETCLNGGKCEAANGTEACVCGGAFVGPRCQDPNPCLSTPCKNAGTCHVVDRRGVADYACSCALGFSGPLCLTPLDNACLTNPCRNGGTCDLLTLTEYKCRCPPGWSGKSCQQADPCASNPCANGGQCLPFEASYICHCPPSFHGPTCRQDVNECGQKPGLCRHGGTCHNEVGSYRCVCRATHTGPNCERPYVPCSPSPCQNGGTCRPTGDVTHECACLPGSAARWPGCTSPSPAARPRGWERGAWCRGSPGRAHGGELGRRDGEFPRLRVVSGGRVWSGVCAGRRLAQGPGASPCLWSFPELTFEL

SEQ ID NO: 741013 - protein, 751 aa, Homo sapiens
MPPLLAPLLCLALLPALAARGPRCSQPGETCLNGGKCEAANGTEACVCGGAFVGPRCQDPNPCLSTPCKNAGTCHVVDRRGVADYACSCALGFSGPLCLTPLDNACLTNPCRNGGTCDLLTLTEYKCRCPPGWSGKSCQQADPCASNPCANGGQCLPFEASYICHCPPSFHGPTCRQDVNECGQKPGLCRHGGTCHNEVGSYRCVCRATHTGPNCERPYVPCSPSPCQNGGTCRPTGDVTHECACLPGFTGQNCEENIDDCPGNNCKNGGACVDGVNTYNCPCPPEWTGQYCTEDVDECQLMPNACQNGGTCHNTHGGYNCVCVNGWTGEDCSENIDDCASAACFHGATCHDRVASFYCECPHGRTGLLCHLNDACISNPCNEGSNCDTNPVNGKAICTCPSGYTGPACSQDVDECSLGANPCEHAGKCINTLGSFECQCLQGYTGPRCEIDVNECVSNPCQNDATCLDQIGEFQCMCMPGYEGVHCEVNTDECASSPCLHNGRCLDKINEFQCECPTGFTGHLCQYDVDECASTPCKNGAKCLDGPNTYTCVCTEGYTGTHCEVDIDECDPDPCHYGSCKDGVATFTCLCRPGYTGHHCETNINECSSQPCRHGGTCQDPDNAYLCFCLKGTTGPNCEINLDDCASSPCDSGTCLDKIDGYECACEPGYTGSMCNSNIDECAGNPCHNGGTCEDGINGFTCRCPEGYHDPTCLSEVNECNSNPCVHGACRDSLNGVSLYLPASARVLGNR

SEQ ID NO: 741014 - protein, 130 aa, Homo sapiens
MWPQARLPPHPAMAEETRQSKLAAAKRKLKEYWQRNSPGVPAGAKRNRKTNGSIHETATSGGCHSPGDSATGIHGESPTSSATLKDLESPCQELAVVPDSRSVKVSQLKNTIKSLKQQNKQVEHQLEEVT

SEQ ID NO: 741015 - protein, 115 aa, Homo sapiens
AGITSVHHLTQPYLTFSILFSSSLALSPPTPSAHELLLRLEDVIPMLLPLEMSQNFQWINPGRDNYFLFCGLVFHSDLHHSTYMAKTDCFTYGCFIKPEGRRNILGCKACFFASS

SEQ ID NO: 741016 - protein, 727 aa, Homo sapiens
RTACPCVLQPSAGPAEQQQRTLLTARQPPPPAVALLSRWSVRPAHVTMGKSRTKRFKRPQFSPTGDCQAEAAAAANGTGGEEDDGPAAELLEKLQHPSAEVRECACAGLARLVQQRPALPGLARRDAVRRLGPLLLDPSLAVRETAAGALRNPSACGGFEVCDDMVTKDIMTPLVALLKECSAGLDSNEMSLQEKKDQNRNSIENIANETVNVLWNICECSSRAVSIFNKEGCLEIVLKYLSRFPTNVDLAISVAYCLQTVTEDNPELLKSFSATALNMLESALLSPVSSMESLLLKTLVAGTIWNLKDIIPCKSQAEIINALLKILSEVLGMDAGEMVIQMKEAETQRLKTAAEAEEILENTNGDDLIEDDEMEGISHKRRVRRKTFVSDLLPPTDKELRETIALLTAQQTALEIIVNMCCNEDPSDDEWEELSSSDESDAFMENSFSECGGQLFSPLCLSHEVHTALTNYLIPKKIFEKTAFPNSIAVDLCSRNPTWKPLIRKMNTIQCRALFCLQSLVSLLDVEHLGGAAALQTLAQHLSQLLFSQPDFAKHVDFLEAISSALRALLQTMASKNISQCMTPDQLMTLCKAGIHSSNVGVRVNVVSILGITGSVLAKEDGTLETLKNIGCFLLEVTTKDPSLVVAGEALDALFDVFADGKEAERASIQIKLLSALKEFQPVFKMKIRKEGRGNYSTDQLCVLDNVKMNLRRFIAYQETVEKRLTS

SEQ ID NO: 741017 - protein, 346 aa, Homo sapiens
MWIEPLFPSYEQTPTDKELRETIALLTAQQTALEIIVNMCCNEDPSDDEWEELSSSDESDAFMENSFSECGGQLFSPLCLSHEVHTALTNYLIPKKIFEKTAFPNSIAVDLCSRNPTWKPLIRKMNTIQCRALFCLQSLVSLLDVEHLGGAAALQTLAQHLSQLLFSQPDFAKHVDFLEAISSALRALLQTMASKNISQCMTPDQLMTLCKAGIHSSNVGVRVNVVSILGITGSVLAKEDGTLETLKNIGCFLLEVTTKDPSLVVAGEALDALFDVFADGKEAERASIQIKLLSALKEFQPVFKMKIRKEGRGNYSTDQLCVLDNVKMNLRRFIAYQETVEKRLTS

SEQ ID NO: 741018 - protein, 389 aa, Homo sapiens
RTACPCVLQPSAGPAEQQQRTLLTARQPPPPAVALLSRWSVRPAHVTMGKSRTKRFKRPQFSPTGDCQAEAAAAANGTGGEEDDGPAAELLEKKSSACGGFEVCDDMVTKDIMTPLVALLKECSAGLDSNEMSLQEKKDQNRNSIENIANETVNVLWNICECSSRAVSIFNKEGCLEIVLKYLSRFPTNVDLAISVAYCLQTVTEDNPELLKSFSATALNMLESALLSPVSSMESLLLKTLVAGTIWNLKDIIPCKSQAEIINALLKILSEVLGMDAGEMVIQMKEAETQRLKTAAEAEEILENTNGDDLIEDDEMEGISHKRRVRRKTFVSDLLPPTDKELRETIALLTAQQTALEIIVNMCCNEGLLTFTFRHFPPEPRGKLPWRFS

SEQ ID NO: 741019 - protein, 346 aa, Homo sapiens; identical to SEQ ID NO: 741017

SEQ ID NO: 741020 - protein, 346 aa, Homo sapiens; identical to SEQ ID NO: 741017

SEQ ID NO: 741021 - protein, 669 aa, Homo sapiens
RTACPCVLQPSAGPAEQQQRTLLTARQPPPPAVALLSRWSVRPAHVTMGKSRTKRFKRPQFSPTGDCQAEAAAAANGTGGEEDDGPAAELLEKKSSACGGFEVCDDMVTKDIMTPLVALLKECSAGLDSNEMSLQEKKDQNRNSIENIANETVNVLWNICECSSRAVSIFNKEGCLEIVLKYLSRFPTNVDLAISVAYCLQTVTEDNPELLKSFSATALNMLESALLSPVSSMESLLLKTLVAGTIWNLKDIIPCKSQAEIINALLKILSEVLGMDAGEMVIQMKEAETQRLKTAAEAEEILENTNGDDLIEDDEMEGISHKRRVRRKTFVSDLLPPTDKELRETIALLTAQQTALEIIVNMCCNEDPSDDEWEELSSSDESDAFMENSFSECGGQLFSPLCLSHEVHTALTNYLIPKKIFEKTAFPNSIAVDLCSRNPTWKPLIRKMNTIQCRALFCLQSLVSLLDVEHLGGAAALQTLAQHLSQLLFSQPDFAKHVDFLEAISSALRALLQTMASKNISQCMTPDQLMTLCKAGIHSSNVGVRVNVVSILGITGSVLAKEDGTLETLKNIGCFLLEVTTKDPSLVVAGEALDALFDVFADGKEAERASIQIKLLSALKEFQPVFKMKIRKEGRGNYSTDQLCVLDNVKMNLRRFIAYQETVEKRLTS

SEQ ID NO: 741022 - protein, 87 aa, Homo sapiens
ALYTIAAWRACAYMYCDHDRFLSALGTILVMTVVRILIKSASGRPERDGIKADMHIESCRQTSVSIEIEVQREIAYRSSTWMLAGIF

SEQ ID NO: 741023 - protein, 317 aa, Homo sapiens
ARGLEIIANMCCILDPSDDEWEELSSSDESDAFMENSFSECGGQLFSPLCLSHEVHTALTNYLIPKKIFEKTAFPNSIAVDLCSRNPTWKPLIRKMNTIQCRALFCLQSLVSLLDVEHLGGAAALQTLAQHLSQLLFSQPDFAKHVDFLEAISSALRALLQTMASKNISQCMTPDQLMTLCKAGIHSSNVGVRVNVVSILGITGSVLAKEDGTLETLKNIGCFLLEVTTKDPSLVVAGEALDALFDVFADGKEAERASIQIKLLSALKEFQPVFKMKIRKEGRGNYSTDQLCVLDNVKMNLRRFIAYQETVEKRLTS

SEQ ID NO: 741024 - protein, 346 aa, Homo sapiens; identical to SEQ ID NO: 741017

SEQ ID NO: 741025 - protein, 389 aa, Homo sapiens; identical to SEQ ID NO: 741018

SEQ ID NO: 741026 - protein, 495 aa, Homo sapiens
MDSLAESRWPPGLAVMKTIDDLLRCGICFEYFNIAMIIPQCSHNYCSLCIRKFLSYKTQCPTCCVTVTEPDLKNNRILDELVKSLNFARNHLLQFALESPAKSPASSSSKNLAVKVYTPVASRQSLKQGSRLMDNFLIREMSGSTSELLIKENKSKFSPQKEASPAAKTKETRSVEEIAPDPSEAKRPEPPSTSTLKQVTKVDCPVCGVNIPESHINKHLDSCLSREEKKESLRSSVHKRKPLPKTVYNLLSDRDLKKKLKEHGLSIQGNKQQLIKRHQEFVHMYNAQCDALHPKSAAEIVQEIENIEKTRMRLEASKLNESVMVFTKDQTEKEIDEIHSKYRKKHKSEFQLLVDQARKGYKKIAGMSQKTVTITKEDESTEKLSSVCMGQEDNMTSVTNHFSQSKLDSPEELEPDREEDSSSCIDIQEVLSSSESDSCNSSSSDIIRDLLEEEEAWEASHKNDLQDTEISPRQNRRTRAAESAEIEPRNKRNRN

SEQ ID NO: 741027 - protein, 495 aa, Homo sapiens; identical to SEQ ID NO: 741026

SEQ ID NO: 741028 - protein, 495 aa, Homo sapiens; identical to SEQ ID NO: 741026

SEQ ID NO: 741029 - protein, 494 aa, Homo sapiens
MDSLAESRWPPGLAVMKTIDDLLRCGICFEYFNIAMIIPQCSHNYCSLCIRKFLSYKTQCPTCCVTVTEPDLKNNRILDELVKSLNFARNHLLQFALESPAKSPASSSSKNLAVKVYTPVASRQSLKQGSRLMDNFLIREMSGSTSELLIKENKSKFSPQKEASPAAKTKETRSVEEIAPDPSEAKRPEPPSTSTLKQVTKVDCPVCGVNIPESHINKHLDSCLSREEKKESLRSSVHKRKPLPKTVYNLLSDRDLKKKLKEHGLSIQGNKQQLIKRHQEFVHMYNAQCDALHPKSAAEIVQEIENIEKTRMRLEASKLNESVMVFTKDQTEKEIDEIHSKYRKKHKSEFQLLVDQARKGYKKIAGMSQKTVTITKEDESTEKLSSVCMGQEDNMTSVTNHFSQSKLDSPEELEPDREEDSSSCIDIQEVLSSSESDSCNSSSSDIIRDLLEEEEAWEASHKLYFSKRRYIFQGSCVSTNPFFCKRTACFYSKL

SEQ ID NO: 741030 - protein, 462 aa, Homo sapiens [sequence omitted]

SEQ ID NO: 741031 - protein, 481 aa, Homo sapiens
MDSLAESRWPPGLAVMKTIDDLLRCGICFEYFNIAMIIPQCSHNYCSLCIRKFLSYKTQCPTCCVTVTEPDLKNNRILDELVKSLNFARNHLLQFALESPAKSPASSSSKNLAVKVYTPVASRQSLKQGSRLMDNFLIREMSGSTSELLIKENKSKFSPQKEASPAAKTKETRSVEEIAPDPSEAKRPEPPSTSTLKQVTKVDCPVCGVNIPESHINKHLDSCLSREEKKESLRSSVHKRKPLPKTVYNLLSDRDLKKKLKEHGLSIQGNKQQLIKRHQEFVHMYNAQCDALHPKSAAEIVQEIENIEKTRMRLEASKLNESVMVFTKDQTEKEIDEIHSKYRKKHKSEFQLLVDQARKGYKKIAGMSQKTVTITKEDESTEKLSSVCMGQEDNMTSVTNHFSQSKLDSPEELEPDREEDSSSCIDIQEVLSSSESDSCNSSSSDIIRDLLEEEEAWEASHKNDLQDTEISPRQNRRTRGS

SEQ ID NO: 741032 - protein, 368 aa, Homo sapiens [sequence omitted]

SEQ ID NO: 741033 - protein, 193 aa, Homo sapiens
MSAQSVEEDSILIIPTPDEEEKILRVKLEEDPDGEEGSSIPWNHLPDPEIFRQRFRQFGYQDSPGPREAVSQLRELCRLWLRPETHTKEQILELVVLEQFVAILPKELQTWVRDHHPENGEEAVTVLEDLESELDDPGQPVSLRRRKREVLVEDMVSQEEAQGLPSSELDAVENQLKWASWELHSLRHCVIIP

SEQ ID NO: 741034 - protein, 128 aa, Homo sapiens
RPPTTTKFAAASTEDSILIIPTPDEEEKILRVKLEEDPDGEEGSSIPWNHLPDPEIFRQRFRQFGYQDSPGPREAVSQLRELCRLWLRPETHTKEQILELVVLEQFVAILPKELQTVDAAANLVVVVD

SEQ ID NO: 741035 - protein, 368 aa, Homo sapiens [sequence omitted]

SEQ ID NO: 741036 - protein, 368 aa, Homo sapiens [sequence omitted]

SEQ ID NO: 741037 - protein, 368 aa, Homo sapiens [sequence omitted]

SEQ ID NO: 741038 - protein, 368 aa, Homo sapiens [sequence omitted]

SEQ ID NO: 741039 - protein, 368 aa, Homo sapiens [sequence omitted]

SEQ ID NO: 741040 - protein, 368 aa, Homo sapiens [sequence omitted]

SEQ ID NO: 741041 - protein, 101 aa, Homo sapiens
NFRPRPTGEKPYGCVECGKAFSRSSILVQHQRVHTGEKPYKCLECGKAFSQNSGLINHQRIHTGEKPYECVQCGKSYSQSSNLFRHQRRHNAEKLLNVVKV

SEQ ID NO: 741042 - protein, 368 aa, Homo sapiens [sequence omitted]

SEQ ID NO: 741043 - protein, 200 aa, Homo sapiens
MSAQSVEEDSILIIPTPDEEEKILRVKLEEDPDGEEGSSIPWNHLPDPEIFRQRFRQFGYQDSPGPREAVSQLRELCRLWLRPETHTKEQILELVVLEQFVAILPKELQTWVRDHHPENGEEAVTVLEDLESELDDPGQPVSLRRRKREVLVEDMVSQEEAQGLPSSELDAVENQLKWASWELHSLRHCGEDQNSVWARG

SEQ ID NO: 741044 - protein, 390 aa, Homo sapiens
SVDHREVQVLSQSMPLTPHQAVPSGERPYMCVECGKCFGRSSHLLQHQRIHTGEKPYVCSVCGKAFSQSSVLSKHRRIHTGEKPYECNECGKAFRVSSDLAQHHKIHTGEKPHECLECRKAFTQLSHLIQHQRIHTGERPYVCPLCGKAFNHSTVLRSHQRVHTGEKPHRCNECGKTFSVKRTLLQHQRIHTGEKPYTCSECGKAFSDRSVLIQHHNVHTGEKPYECSECGKTFSHRSTLMNHERIHTEEKPYACYECGKAFVQHSHLIQHQRVHTGEKPYVCGECGHAFSARRSLIQHERIHTGEKPFQCTECGKAFSLKATLIVHLRTHTGEKPYECNSCGKAFSQYSVLIQHQRIHTGEKPYECGECGRAFNQHGHLIQHQKVHRKL

SEQ ID NO: 741045 - protein, 305 aa, Homo sapiens
SVDHREVQVLSQSMPLTPHQAVPSGERPYMCVECGKCFGRSSHLLQHQRIHTGEKPYVCSVCGKAFSQSSVLSKHRRIHTGEKPYECNECGKAFRVSSDLAQHHKIHTGEKPHECLECRKAFTQLSHLIQHQRIHTGERPYVCPLCGKAFNHSTVLRSHQRVHTGEKPHRCNECGKTFSVKRTLLQHQRIHTGEKPYTCSECGKAFSDRSVLIQHHNVHTGEKPYECSECGKTFSHRSTLMNHERIHTEEKPYACYECGKAFVQHSHLIQHQRVHTGEKPYVCGECGHAFSARRSLIQHERIHTV

SEQ ID NO: 741046 - protein, 266 aa, Homo sapiens
SVDHREVQVLSQSMPLTPHQAVPSGERPYMCVECGKCFGRSSHLLQHQRIHTGEKPYVCSVCGKAFSQSSVLSKHRRIHTGEKPYECNECGKAFRVSSDLAQHHKIHTGEKPHECLECRKAFTQLSHLIQHQRIHTGERPYVCPLCGKAFNHSTVLRSHQRVHTGEKPHRCNECGKTFSVKRTLLQHQRIHTGEKPYTCSECGKAFSDRSVLIQHHNVHTGEKPYECSECGKTFSHRSTLMNHERIHTEADPAPESPHWGEALCVW

SEQ ID NO: 741047 - protein, 388 aa, Homo sapiens
MAGCCAALAAFLFEYDTPRIVLIRSRKVGLMNRAVQLLILAYVIGWVFVWEKGYQETDSVVSSVTTKVKGVAVTNTSKLGFRIWDVADYVIPAQEENSLFVMTNVILTMNQTQGLCPEIPDATTVCKSDASCTAGSAGTHSNGVSTGRCVAFNGSVKTCEVAAWCPVEDDTHVPQPAFLKAAENFTLLVKNNIWYPKFNFSKRNILPNITTTYLKSCIYDAKTDPFCPIFRLGKIVENAGHSFQDMAVEGGIMGIQVNWDCNLDRAASLCLPRYSFRRLDTRDVEHNVSPGYNFRFAKYYRDLAGNEQRTLIKAYGIRFDIIVFGKAGKFDIIPTMINIGSGLALLGMATVLCDIIVLYCMKKRLYYREKKYKYVEDYEQGLASELDQ

SEQ ID NO: 741048 - protein, 398 aa, Homo sapiens
MDGLGAGGAAMAGCCAALAAFLFEYDTPRIVLIRSRKVGLMNRAVQLLILAYVIGWVFVWEKGYQETDSVVSSVTTKVKGVAVTNTSKLGFRIWDVADYVIPAQEENSLFVMTNVILTMNQTQGLCPEIPDATTVCKSDASCTAGSAGTHSNGVSTGRCVAFNGSVKTCEVAAWCPVEDDTHVPQPAFLKAAENFTLLVKNNIWYPKFNFSKRNILPNITTTYLKSCIYDAKTDPFCPIFRLGKIVENAGHSFQDMAVEGGIMGIQVNWDCNLDRAASLCLPRYSFRRLDTRDVEHNVSPGYNFRFAKYYRDLAGNEQRTLIKAYGIRFDIIVFGKAGKFDIIPTMINIGSGLALLGMATVLCDIIVLYCMKKRLYYREKKYKYVEDYEQGLASELDQ

SEQ ID NO: 741049 - protein, 404 aa, Homo sapiens
MAGCCAALAAFLFEYDTPRIVLIRSRKVGLMNRAVQLLILAYVIGCYHPHLAEVEMESPRRWVFVWEKGYQETDSVVSSVTTKVKGVAVTNTSKLGFRIWDVADYVIPAQEENSLFVMTNVILTMNQTQGLCPEIPDATTVCKSDASCTAGSAGTHSNGVSTGRCVAFNGSVKTCEVAAWCPVEDDTHVPQPAFLKAAENFTLLVKNNIWYPKFNFSKRNILPNITTTYLKSCIYDAKTDPFCPIFRLGKIVENAGHSFQDMAVEGGIMGIQVNWDCNLDRAASLCLPRYSFRRLDTRDVEHNVSPGYNFRFAKYYRDLAGNEQRTLIKAYGIRFDIIVFGKAGKFDIIPTMINIGSGLALLGMATVLCDIIVLYCMKKRLYYREKKYKYVEDYEQGLASELDQ

SEQ ID NO: 741050 - protein, 287 aa, Homo sapiens
MTNVILTMNQTQGLCPEIPDATTVCKSDASCTAGSAGTHSNGVSTGRCVAFNGSVKTCEVAAWCPVEDDTHVPQPAFLKAAENFTLLVKNNIWYPKFNFSKRNILPNITTTYLKSCIYDAKTDPFCPIFRLGKIVENAGHSFQDMAVEGGIMGIQVNWDCNLDRAASLCLPRYSFRRLDTRDVEHNVSPGYNFRFAKYYRDLAGNEQRTLIKAYGIRFDIIVFGKAGKFDIIPTMINIGSGLALLGMATVLCDIIVLYCMKKRLYYREKKYKYVEDYEQGLASELDQ

SEQ ID NO: 741051 - protein, 422 aa, Homo sapiens
MAGCCAALAAFLFEYDTPRIVLIRSRKVGLMNRAVQLLILAYVIGWVFVWEKGYQETDSVVSSVTTKVKGVAVTNTSKLGFRIWDVADYVIPAQEENSLFVMTNVILTMNQTQGLCPEIPDATTVCKSDASCTAGSAGTHSNGVSTGRCVAFNGSVKTCEVAAWCPVEDDTHVPQPAFLKAAENFTLLVKNNIWYPKFNFSKRNILPNITTTYLKSCIYDAKTDPFCPIFRLGKIVENAGHSFQDMAVEGGIMGIQVNWDCNLDRAASLCLPRYSFRRLDTRDVEHNVSPGYNFRFAKYYRDLAGNEQRTLIKAYGIRFDIIVFGKAGKFDIIPTMINIGSGLALLGMATVLCDIIVLYCMKKRLYYREKKYKYVEDYEQVGPSWPPAGTGLSSLGCGSPGRGPVWGGPSAEAGTSVAWCPR

SEQ ID NO: 741052 - protein, 283 aa, Homo sapiens
MATVLCDTGPVPQIPDATTVCKSDASCTAGSAGTHSNGVSTGRCVAFNGSVKTCEVAAWCPVEDDTHVPQPAFLKAAENFTLLVKNNIWYPKFNFSKRNILPNITTTYLKSCIYDAKTDPFCPIFRLGKIVENAGHSFQDMAVEGGIMGIQVNWDCNLDRAASLCLPRYSFRRLDTRDVEHNVSPGYNFRFAKYYRDLAGNEQRTLIKAYGIRFDIIVFGKAGKFDIIPTMINIGSGLALLGMATVLCDIIVLYCMKKRLYYREKKYKYVEDYEQGLASELDQ

SEQ ID NO: 741053 - protein, 163 aa, Homo sapiens
AGTVRKCYDRLGAGGAAMAGCCAALAAFLFEYDTPRIVLIRSRKVGLMNRAVQLLILAYVIGWVFVWEKGYQETDSVVSSVTTKVKGVAVTNTSKLGFRIWDVADYVIPAQEENSLFVMTNVILTMNQTQGLCPEIPDATTVCKSDASCTAGSAGTHSNDLLF

SEQ ID NO: 741054 - protein, 258 aa, Homo sapiens
MAGCCAALAAFLFEYDTPRIVLIRSRKVGLMNRAVQLLILAYVIGPAFLKAAENFTLLVKNNIWYPKFNFSKRNILPNITTTYLKSCIYDAKTDPFCPIFRLGKIVENAGHSFQDMAVEGGIMGIQVNWDCNLDRAASLCLPRYSFRRLDTRDVEHNVSPGYNFRFAKYYRDLAGNEQRTLIKAYGIRFDIIVFGKAGKFDIIPTMINIGSGLALLGMATVLCDIIVLYCMKKRLYYREKKYKYVEDYEQGLASELDQ

SEQ ID NO: 741055 - protein, 350 aa, Homo sapiens
MAGCCAALAAFLFEYDTPRIVLIRSRKVGLMNRAVQLLILAYVIGWVFVWEKGYQETDSVVSSVTTKVKGVAVTNTSKLGFRIWDVADYVIPAQEENSLFVMTNVILTMNQTQGLCPEIPDATTVCKSDASCTAGSAGTHSNGVSTGRCVAFNGSVKTCEVAAWCPVEDDTHVPQPAFLKAAENFTLLVKNNIWYPKFNFSKRNILPNITTTYLKSCIYDAKTDPFCPIFRLGKIVENAGHSFQDMAVEGGIMGIQVNWDCNLDRAASLCLPRYSFRRLDTRDVEHNVSPGYNFRFAKYYRDLAGNEQREDLYMCRTYPLNYSEGCPVENVALRMPSPAVDSGGERLPAL

SEQ ID NO: 741056 - protein, 185 aa, Homo sapiens
MAGCCAALAAFLFEYDTPRIVLIRSRKVGLMNRAVQLLILAYVIGWVFVWEKGYQETDSVVSSVTTKVKGVAVTNTSKLGFRIWDVADYVIPAQEENSLFVMTNVILTMNQTQGLCPEIPDATTVCKSDASCTAGSAGTHSNGVSTGRCVAFNGSVKTCEVAAWCPVEDDTHVPQEAAWLQSLDL

SEQ ID NO: 741057 - protein, 371 aa, Homo sapiens
MAAPALRLCHIAFHVPAGQPLARNLQRLFGFQPLASREVDGWRQLALRSGDAVFLVNEGAGSGEPLYGLDPRHAVPSATNLCFDVADAGAATRELAALGCSVPVPPVRVRDAQGAATYAVVSSPAGILSLTLLERAGYRGPFLPGFRPVSSAPGPGWVSRVDHLTLACTPGSSPTLLRWFHDCLGFCHLPLSPGEDPELGLEMTAGFGLGGLRLTALQAQPGSIVPTLVLAESLPGATTRQDQVEQFLARHKGPGLQHVGLYTPNIVEATEGVATAGGQFLAPPGAYYQQPGKERQIRAAGHEPHLLARQGILLDGDKGKFLLQVFTKSLFTEDTFFLELIQRQGATGFGQGNIRALWQSVQEQSARSQEA

SEQ ID NO: 741058 - protein, 371 aa, Homo sapiens; identical to SEQ ID NO: 741057

SEQ ID NO: 741059 - protein, 235 aa, Homo sapiens
MAAPALRLCHIAFHVPAGQPLARNLQRLFGFQPLASREVDGWRQLALRSGDAVFLVNEGAGSGEPLYGLDPRHAVPSATNLCFDVADAGAATRELAALGCSVPVPPVRVRDAQGAATYAVVSSPAGILSLTLLERAGYRGPFLPGFRPVSSAPGPGWVSRVDHLTLADPESQLCAGPAAGFAWRSRGVRVVDEGGWVGKRAGGCPFLLPRAPLCCPGGGSLAGEFSPMGLSFARA

SEQ ID NO: 741060 - protein, 371 aa, Homo sapiens; identical to SEQ ID NO: 741057

SEQ ID NO: 741061 - protein, 150 aa, Homo sapiens
MNLWLLACLVAGFLGAWAPAVHTQGVFEDCCLAYHYPIGWAVLRRAWTYRIQEVSGSCNLPAAIFYLPKRHRKVCGNPKSREVQRAMKLLDARNKVFAKLHHNTQTFQAGPHAVKKLSSGNSKLSSSKFSNPISSSKRNVSLLISANSGL

SEQ ID NO: 741062 - protein, 84 aa, Homo sapiens
MNLWLLACLVAGFLGAWAPAVHTQGVFEDCCLAYHYPIGWAVLRRAWTYRIQEVSGSCNLPAAIRPSCCKEVEFWKLQVIIIQV

SEQ ID NO: 741063 - protein, 90 aa, Homo sapiens
  misc_feature (34)..(34): Xaa can be any naturally occurring amino acid
FLPGVTGGPWCLYSGSAASPTPFLVPVAPACSSXNLQPPKPSVIPRPLCSHWPHKSPILGPGVLSPSILSVTSVLVCSYLHVNLEMAVAL

SEQ ID NO: 741064 - protein, 128 aa, Homo sapiens
SWSWDRRKKEKCIKNTQPGGRTQPFLPEGGREGNKRSRRFGPSIITPTMRTTAPSCVSGAKQRKIHIWGQNPCERQNLEGRGPKDTEPAPGKGGGKGKRCLDASKGFVFPPKFAHPASSPSLQVPIQR

SEQ ID NO: 741065 - protein, 136 aa, Homo sapiens
MARTKQTARKSTGGKAPRKQLATKAARKSAPATGGVKKPHRYRPGTVALREIRRYQKSTELLIRKLPFQRLVREIAQDFKTDLRFQSSAVMALQEACEAYLVGLFEDTNLCAIHAKRVTIMPKDIQLARRIRGERA

SEQ ID NO: 741066 - protein, 121 aa, Homo sapiens
PCFMENKHSLQVMKTRCREDKFKKLKSKPAHVALREIRRYQKSTELLIRKLPFQRLVREIAQDFKTDLRFQSSAVMALQEACEAYLVGLFEDTNLCAIHAKRVTIMPKDIQLARRIRGERA

SEQ ID NO: 741067 - protein, 105 aa, Homo sapiens
VITNYNQEQLGVFMGFGVFFSKKLVFQPANFQYFPFCHLLTFFFCSSHSIVIALRTVQLSFNTGMVSFCSITELGILILYYSVLLPLSPEAKRMKIGAGRSASHL

SEQ ID NO: 741068 - protein, 626 aa, Homo sapiens
MAARPAATLAWSLLLLSSALLREGCRARFVAERDSEDDGEEPVVFPESPLQSPTVLVAVLARNAAHTLPHFLGCLERLDYPKSRMAIWAATDHNVDNTTEIFREWLKNVQRLYHYVEWRPMDEPESYPDEIGPKHWPTSRFAHVMKLRQAALRTAREKWSDYILFIDVDNFLTNPQTLNLLIAENKTIVAPMLESRGLYSNFWCGITPKGFYKRTPDYVQIREWKRTGCFPVPMVHSTFLIDLRKEASDKLTFYPPHQDYTWTFDDIIVFAFSSRQAGIQMYLCNREHYGYLPIPLKPHQTLQEDIENLIHVQIEAMIDRPPMEPSQYVSVVPKYPDKMGFDEIFMINLKRRKDRRDRMLRTLYEQEIEVKIVEAVDGKALNTSQLKALNIEMLPGYRDPYSSRPLTRGEIGCFLSHYSVWKEVIDRELEKTLVIEDDVRFEHQFKKKLMKLMDNIDQAQLDWELIYIGRKRMQVKEPEKAVPNVANLVEADYSYWTLGYVISLEGAQKLVGANPFGKMLPVDEFLPVMYNKHPVAEYKEYYESRDLKAFSAEPLLIYPTHYTGQPGYLSDTETSTIWDNETVATDWDRTHAWKSRKQSRIYSNAKNTEALPPPTSLDTVPSRDEL

SEQ ID NO: 741069 - protein, 626 aa, Homo sapiens; identical to SEQ ID NO: 741068

SEQ ID NO: 741070 - protein, 67 aa, Homo sapiens
VHGVRACCGHLNLPGAAGFQPLIGMLGRAEGESLLGRMRHTCVQAHTGSDLASSETVQSGTLLLPAL

SEQ ID NO: 741071 - protein, 73 aa, Homo sapiens
MFDAPPPTKLEHPRSTSDCCAGSKNFKPVDLRFLGSMGVGYAELDHPSPWLQPPFQESEQFCLAAIPGATGAL

SEQ ID NO: 741072 - protein, 110 aa, Homo sapiens
MYYLQPGPLSSMLQTPIAICLFDSSPGVGRGGSHVSLQHLKNLPRPKFVIFLHKSGPPPLFTSQDWALCPSSWACQNLEVVNTSPFSTSESPFKSVPFNSVSTITSPGLQ

SEQ ID NO: 741073 - protein, 235 aa, Homo sapiens
MGSRKKEIALQVNISTQELWEEMLSSKGLTVVDVYQGWCGPCKPVVSLFQKMRIEVGLDLLHFALAEADRLDVLEKYRGKCEPTFLFYAGGELVAVVRGANAPLLQKTILDQLEAEKKVLAEGRERKVIKDEALSDEDECVSHGKNNGEDEDMVSSERTCTLAIIKPDAVAHGKTDEIIMKIQEAGFEILTNEERTMTEAEVRLFYQHKAGEVSSSTSTSSTHCRFSSSNIMLID

SEQ ID NO: 741074 - protein, 110 aa, Homo sapiens
LKYIMLSLDSVPLQVTFTWPEHCSSSLCSFQVMPSRLPNLSLDVLFSGKFIHLLCVRCCSRPWGCSREEDKVTAFGEELSSSESKLPPSAVSTSRYCFISLLSLFMKLFQ

SEQ ID NO: 741075 - protein, 112 aa, Homo sapiens
YFSFYSSFVLGVVRKVRRVELNEKKVDFCLFYAEQCLQKNQNRKNKMHSNGSLTLFGNEAFSSHRVVCRSENLPSFLLYVQLKFALAPKRRETGGCRKQGVESFIFLSFTFI

SEQ ID NO: 741076 - protein, 1146 aa, Homo sapiens
QVWGRQELQRPSPFHATRGTEDLGPGQLGVVRRAGRENETRNPKAAPEPCFPLHLRRAAMDLYSTPAAALDRFVARRLQPRKEFVEKARRALGALAAALRERGGRLGAAAPRVLKTVKGGSSGRGTALKGGCDSELVIFLDCFKSYVDQRARRAEILSEMRASLESWWQNPVPGLRLTFPEQSVPGALQFRLTSVDLEDWMDVSLVPAFNVLGQAGSGVKPKPQVYSTLLNSGCQGGEHAACFTELRRNFVNIRPAKLKNLILLVKHWYHQVCLQGLWKETLPPVYALELLTIFAWEQGCKKDAFSLAEGLRTVLGLIQQHQHLCVFWTVNYGFEDPAVGQFLQRQLKRPRPVILDPADPTWDLGNGAAWHWDLLAQEAASCYDHPCFLRGMGDPVQSWKGPGLPRAGCSGLGHPIQLDPNQKTPENSKSLNAVYPRAGSKPPSCPAPGPTGAASIVPSVPGMALDLSQIPTKELDRFIQDHLKPSPQFQEQVKKAIDIILRCLHENCVHKASRVSKGGSFGRGTDLRDGCDVELIIFLNCFTDYKDQGPRRAEILDEMRAHVESWWQDQVPSLSLQFPEQNVPEALQFQLVSTALKSWTDVSLLPAFDAVGQLSSGTKPNPQVYSRLLTSGCQEGEHKACFAELRRNFMNIRPVKLKNLILLVKHWYRQVAAQNKGKGPAPASLPPAYALELLTIFAWEQGCRQDCFNMAQGFRTVLGLVQQHQQLCVYWTVNYSTEDPAMRMHLLGQLRKPRPLVLDPADPTWNVGHGSWELLAQEAAALGMQACFLSRDGTSVQPWDVMPALLYQTPAGDLDKFISEFLQPNRQFLAQVNKAVDTICSFLKENCFRNSPIKVIKVVKGGSSAKGTALRGRSDADLVVFLSCFSQFTEQGNKRAEIISEIRAQLEACQQERQFEVKFEVSKWENPRVLSFSLTSQTMLDQSVDFDVLPAFDALGQLVSGSRPSSQVYVDLIHSYSNAGEYSTCFTELQRDFIISRPTKLKSLIRLVKHWYQQCTKISKGRGSLPPQHGLELLTVYAWEQGGKDSQFNMAEGFRTVLELVTQYRQLCIYWTINYNAKDKTVGDFLKQQLQKPRPIILDPADPTGNLGHNARWDLLAKEAAACTSALCCMGRNGIPIQPWPVKAAV

SEQ ID NO: 741077 - protein, 282 aa, Homo sapiens
QVWGRQELQRPSPFHATRGTEDLGPGQLGVVRRAGRENETRNPKAAPEPCFPLHLRRAAMDLYSTPAAALDRFVARRLQPRKEFVEKARRALGALAAALRERGGRLGAAAPRVLKTVKGGSSGRGTALKGGCDSELVIFLDCFKSYVDQRARRAEILSEMRASLESWWQNPVPGLRLTFPEQSVPGALQFRLTSVDLEDWMDVSLVPAFNVLGQAGSGVKPKPQVYSTLLNSGCQGGEHAACFTELRRNFVNIRPAKLKNLILLVKHWYHQVKPLGRVSPDM

SEQ ID NO: 741078 - protein, 96 aa, Homo sapiens
AELGTNTALHPVSSVPSLNSQRFTPTGQAGSGVKPKPQVYSTLLNSGCQGGEHAACFTELRRNFVNIRPAKLKNLILLVKHWYHQVKPLGRVSPDM

SEQ ID NO: 741079 - protein, 1146 aa, Homo sapiens; identical to SEQ ID NO: 741076

SEQ ID NO: 741080 - protein, 1023 aa, Homo sapiens
QVWGRQELQRPSPFHATRGTEDLGPGQLGVVRRAGRENETRNPKAAPEPCFPLHLRRAAMDLYSTPAAALDRFVARRLQPRKEFVEKARRALGALAAALRERGGRLGAAAPRVLKTVKGGSSGRGTALKGGCDSELVIFLDCFKSYVDQRARRAEILSEMRASLESWWQNPVPGLRLTFPEQSVPGALQFRLTSVDLEDWMDVSLVPAFNVLGQAGSGVKPKPQVYSTLLNSGCQGGEHAACFTELRRNFVNIRPAKLKNLILLVKHWYHQVCLQGLWKETLPPVYALELLTIFAWEQGCKKDAFSLAEGLRTVLGLIQQHQHLCVFWTVNYGFEDPAVGQFLQRQLKRPRPVILDPADPTWDLGNGAAWHWDLLAQEAASCYDHPCFLRGMGDPVQSWKGPGLPRAGCSGLGHPIQLDPNQKTPENSKSLNAVYPRAGSKPPSCPAPGPTGAASIVPSVPGMALDLSQIPTKELDRFIQDHLKPSPQFQEQVKKAIDIILRCLHENCVHKASRVSKGGSFGRGTDLRDGCDVELIIFLNCFTDYKDQGPRRAEILDEMRAHVESWWQDQVPSLSLQFPEQNVPEALQFQLVSTALKSWTDVSLLPAFDAVGQLSSGTKPNPQVYSRLLTSGCQEGEHKACFAELRRNFMNIRPVKLKNLILLVKHWYRQVAAQNKGKGPAPASLPPAYALELLTIFAWEQGCRQDCFNMAQGFRTVLGLVQQHQQLCVYWTVNYSTEDPAMRMHLLGQLRKPRPLVLDPADPTWNVGHGSWELLAQEAAALGMQACFLSRDGTSVQPWDVMPALLYQTPAGDLDKFISEFLQPNRQFLAQVNKAVDTICSFLKENCFRNSPIKVIKVVKGGSSAKGTALRGRSDADLVVFLSCFSQFTEQGNKRAEIISEIRAQLEACQQERQFEVKFEVSKWENPRVLSFSLTSQTMLDQSVDFDVLPAFDALGQLVSGSRPSSQVYVDLIHSYSNAGEYSTCFTELQRDFIISRPTKLKSLIRLVKHWYQQVRHMDRPPS

SEQ ID NO: 741081 - protein, 482 aa, Homo sapiens
QVWGRQELQRPSPFHATRGTEDLGPGQLGVVRRAGRENETRNPKAAPEPCFPLHLRRAAMDLYSTPAAALDRFVARRLQPRKEFVEKARRALGALAAALRERGGRLGAAAPRVLKTVKGGSSGRGTALKGGCDSELVIFLDCFKSYVDQRARRAEILSEMRASLESWWQNPVPGLRLTFPEQSVPGALQFRLTSVDLEDWMDVSLVPAFNVLGQAGSGVKPKPQVYSTLLNSGCQGGEHAACFTELRRNFVNIRPAKLKNLILLVKHWYHQVCLQGLWKETLPPVYALELLTIFAWEQGCKKDAFSLAEGLRTVLGLIQQHQHLCVFWTVNYGFEDPAVGQFLQRQLKRPRPVILDPADPTWDLGNGAAWHWDLLAQEAASCYDHPCFLRGMGDPVQSWKGPVSEGAPGPLGFALCLCVQCFLSIYYVPYGVEQALKSRGGQVWWLTPVISTHWEAEVGRLPEVRGQEFETSLDNMVKPCLY

SEQ ID NO: 741082 - protein, 236 aa, Homo sapiens
QVWGRQELQRPSPFHATRGTEDLGPGQLGVVRRAGRENETRNPKAAPEPCFPLHLRRAAMDLYSTPAAALDRFVARRLQPRKEFVEKARRALGALAAALRERGGRLGAAAPRVLKTVKGGSSGRGTALKGGCDSELVIFLDCFKSYVDQRARRAEILSEMRASLESWWQNPVPGLRLTFPEQSVPGALQFRLTSVDLEDWMDVSLVPAFNVLGEGFLDHSRVGGKRSLGTTQDFQF

SEQ ID NO: 741083 - protein, 1146 aa, Homo sapiens; identical to SEQ ID NO: 741076

SEQ ID NO: 741084 - protein, 236 aa, Homo sapiens; identical to SEQ ID NO: 741082

SEQ ID NO: 741085 - protein, 640 aa, Homo sapiens
QVWGRQELQRPSPFHATRGTEDLGPGQLGVVRRAGRENETRNPKAAPEPCFPLHLRRAAMDLYSTPAAALDRFVARRLQPRKEFVEKARRALGALAAALRERGGRLGAAAPRVLKTVKGGSSGRGTALKGGCDSELVIFLDCFKSYVDQRARRAEILSEMRASLESWWQNPVPGLRLTFPEQSVPGALQFRLTSVDLEDWMDVSLVPAFNVLGQAGSGVKPKPQVYSTLLNSGCQGGEHAACFTELRRNFVNIRPAKLKNLILLVKHWYHQVCLQGLWKETLPPVYALELLTIFAWEQGCKKDAFSLAEGLRTVLGLIQQHQHLCVFWTVNYGFEDPAVGQFLQRQLKRPRPVILDPADPTWDLGNGAAWHWDLLAQEAASCYDHPCFLRGMGDPVQSWKGPGLPRAGCSGLGHPIQLDPNQKTPENSKSLNAVYPRAGSKPPSCPAPGPTGAASIVPSVPGMALDLSQIPTKELDRFIQDHLKPSPQFQEQVKKAIDIILRCLHENCVHKASRVSKGGSFGRGTDLRDGCDVELIIFLNCFTDYKDQGPRRAEILDEMRAHVESWWQDQVPSLSLQFPEQNVPEALQFQLVSTALKSWTDVSLLPAFDAVGQLSSGTKPNPQVYSRLLTSGCQEGEHKA

SEQ ID NO: 741086 - protein, 1065 aa, Homo sapiens
MDAAGRGCHLLPLPAARGPARAPAAAAAAAASPPGPCSGAACAPSAAAGAGAMNPSSSAGEEKGATGGSSSSGSGAGSCCLGAEGGADPRGAGSAAAAGAAALDEPAAAGQKEKDEALEEKLRNLTFRKQVSYRKAISRAGLQHLAPAHPLSLPVANGPAKEPRATLDWSENAVNGEHLWLETNVSGDLCYLGEENCQVRFAKSALRRKCAVCKIVVHTACIEQLEKINFRCKPTFREGGSRSPRENFVRHHWVHRRRQEGKCKQCGKGFQQKFSFHSKEIVAISCSWCKQAFHNKVTCFMLHHIEEPCSLGAHAAVIVPPTWIIKVKKPQNSLKASNRKKKRTSFKRKASKRGMEQENKGRPFVIKPISSPLMKPLLVFVNPKSGGNQGTKVLQMFMWYLNPRQVFDLSQEGPKDALELYRKVPNLRILACGGDGTVGWILSILDELQLSPQPPVGVLPLGTGNDLARTLNWGGGYTDEPVSKILCQVEDGTVVQLDRWNLHVERNPDLPPEELEDGVCKLPLNVFNNYFSLGFDAHVTLEFHESREANPEKFNSRFRNKMFYAGAAFSDFLQRSSRDLSKHVKVVCDGTDLTPKIQELKFQCIVFLNIPRYCAGTMPWGNPGDHHDFEPQRHDDGYIEVIGFTMASLAALQVGGHGERLHQCREVMLLTYKSIPMQVDGEPCRLAPAMIRISLRNQANMVQKSKRRTSMPLLNDPQSVPDRLRIRVNKISLQDYEGFHYDKEKLREASISDWLRTIAGELVQSFGAIPLGILVVRGDCDLETCRMYIDRLQEDLQSVSSGSQRVHYQDHETSFPRALSAQRLSPRWCFLDDRSQEHLHFVMEISQDEIFILDPDMVVSQPAGTPPGMPDLVVEQASGISDWWNPALRKRMLSDSGLGMIAPYYEDSDLKDLSHSRVLQSPVSSEDHAILQAVIAGDLMKLIESYKNGGSLLIQGPDHCSLLHYAAKTGNGEIVKYILDHGPSELLDMADSETGETALHKAACQRNRAVCQLLVDAGASLRKTDSKGKTPQERAQQAGDPDLAAYLESRQNYKVIGHEDLETAV

SEQ ID NO: 741087 - protein, 134 aa, Homo sapiens [sequence omitted]

SEQ ID NO: 741088 - protein, 1052 aa, Homo sapiens
MDAAGRGCHLLPLPAARGPARAPAAAAAAAASPPGPCSGAACAPSAAAGAGAMNPSSSAGEEKGATGGSSSSGSGAGSCCLGAEGGADPRGAGSAAAAGAAALDEPAAAGQKEKDEALEEKLRNLTFRKQVSYRKAISRAGLQHLAPAHPLSLPVANGPAKEPRATLDWSENAVNGEHLWLETNVSGDLCYLGEENCQVRFAKSALRRKCAVCKIVVHTACIEQLEKINFRCKPTFREGGSRSPRENFVRHHWVHRRRQEGKCKQCGKGFQQKFSFHSKEIVAISCSWCKQAFHNKVTCFMLHHIEEPCSLGAHAAVIVPPTWIIKVKKPQNSLKASNRKKKRTSFKRKASKRGMEQENKGRPFVIKPISSPLMKPLLVFVNPKSGGNQGTKVLQMFMWYLNPRQVFDLSQEGPKDALELYRKVPNLRILACGGDGTVGWILSILDELQLSPQPPVGVLPLGTGNDLARTLNWGGGYTDEPVSKILCQVEDGTVVQLDRWNLHVERNPDLPPEELEDGVCKLPLNVFNNYFSLGFDAHVTLEFHESREANPEKFNSRFRNKMFYAGAAFSDFLQRSSRDLSKHVKVVCDGTDLTPKIQELKFQCIVFLNIPRYCAGTMPWGNPGDHHDFEPQRHDDGYIEVIGFTMASLAALQVGGHGERLHQCREVMLLTYKSIPMQVDGEPCRLAPAMIRISLRNQANMVQKSKRRTSMPLLNDPQSVPDRLRIRVNKISLQDYEGFHYDKEKLREASISDWLRTIAGELVQSFGAIPLGILVVRGDCDLETCRMYIDRLQEDLQSVSSGSQRVHYQDHETSFPRALSAQRLSPRWCFLDDRSQEHLHFVMEISQDEIFILDPDMVVSQPAGTPPGMPDLVVEQASGISDWWNPALRKRMLSDSGLGMIAPYYEDSDLKDLSHSRVLQSPVSSEDHAILQAVIAGDLMKLIESYKNGGSLLIQGPDHCSLLHYAAKTGNGEIVKYILDHGPSELLDMADSETGETALHKAACQRNRAVCQLLVDAGASLRKTDSKQVSFLPPSEEVAFLPFAFQHDCKAS

SEQ ID NO: 741089 - protein, 1040 aa, Homo sapiens
MLEDISEEDIWEYKSKRKPKRVDPNNGSKNILKSVEKATDGKYQSKRSRNRKRAAEAKEVKDHEVPLGNAGCQTSVASSQNSSCGDGIQQTQDKETTPGKLCRTQKSQHVSPKIRPVYDGYCPNCQMPFSSLIGQTPRWHVFECLDSPPRSETECPDGLLCTSTIPFHYKRYTHFLLAQSRAGDHPFSSPSPASGGSFSETKSGVLCSLEERWSSYQNQTDNSVSNDPLLMTQYFKKSPSLTEASEKISTHIQTSQQALQFTDFVENDKLVGVALRLANNSEHINLPLPENDFSDCEISYSPLQSDEDTHDIDEKPDDSQEQLFFTESSKDGSLEEDDDSCGFFKKRHGPLLKDQDESCPKVNSFLTRDKYDEGLYRFNSLNDLSQPISQNNESTLPYDLACTGGDFVLFPPALAGKLAASVHQATKAKPDEPEFHSAQSNKQKQVIEESSVYNQVSLPLVKSLMLKPFESQVEGYLSSQPTQNTIRKLSSENLNAKNNTNSACFCRKALEGVPVGKATILNTENLSSTPAPKYLKILPSGLKYNARHPSTKVMKQMDIGVYFGLPPKRKEEKLLGESALEGINLNPVPSPNQKRSSQCKRKAEKSLSDLEFDASTLHESQLSVELSSERSQRQKKRCRKSNSLQEGACQKRSDHLINTESEAVNLSKVKVFTKSAHGGLQRGNKKIPESSNVGGSRKKTCPFYKKIPGTGFTVDAFQYGVVEGCTAYFLTHFHSDHYAGLSKHFTFPVYCSEITGNLLKNKLHVQEQYIHPLPLDTECIVNGVKVVLLDANHCPGAVMILFYLPNGTVILHTGDFRADPSMERSLLADQKVHMLYLDTTYCSPEYTFPSQQEVIRFAINTAFEAVTLNPHALVVCGTYSIGKEKVFLAIADVLGSKVGMSQEKYKTLQCLNIPEINSLITTDMCSSLVHLLPMMQINFKGLQSHLKKCGGKYNQILAFRPTGWTHSNKFTRIADVIPQTKGNISIYGIPYSEHSSYLEMKRFVQWLKPQKIIPTVNVGTWKSRSTMEKYFREWKLEAGY

SEQ ID NO: 741090 - protein, 1040 aa, Homo sapiens; identical to SEQ ID NO: 741089

SEQ ID NO: 741091 - protein, 1040 aa, Homo sapiens; identical to SEQ ID NO: 741089

SEQ ID NO: 741092 - protein, 104 aa, Homo sapiens
QLRGTHLRMLVFISTPASRVRSLDLELQSLSWASFLFCFITSSRTILDANEEFKSMSGTIQLGRKLITKYNRRELTDKLLIFLALALFLATVLYIVKKRLFPFL

SEQ ID NO: 741093 - protein, 237 aa, Homo sapiens
PLPVAGVPNMAAPQDVHVRICNQEIVKFDLEVKALIQDIRDCSGPLSALTELNTKVKEKFQQLRHRIQDLEQLAKEQDKESEKQLLLQEVENHKKQMLSNQASWRKANLTCKIAIDNLEKAELLQGGDLLRQRKTTKESLAQTSSTITESLMGISRMMAQQVQQSEEAMQSLVTSSRTILDANEEFKSMSGTIQLGRKLITKYNRRELTDKLLIFLALALFLATVLYIVKKRLFPFL

SEQ ID NO: 741094 - protein, 246 aa, Homo sapiens
PLPVAGVPNMAAPQDVHVRICNQEIVKFDLEVKALIQDIRDCSGPLSALTELNTKVKEKFQQLRHRIQPVLYQRAFIWTASTFFFKLTYSLTDFSSTQHDFNSPTTPVTFSDLEQLAKEQDKESEKQLLLQEVENHKKQMLRKTTKESLAQTSSTITESLMGISRMMAQQVQQSEEAMQSLVTSSRTILDANEEFKSMSGTIQLGRKLITKYNRRELTDKLLIFLALALFLATVLYIVKKRLFPFL

SEQ ID NO: 741095 - protein, 237 aa, Homo sapiens; identical to SEQ ID NO: 741093

SEQ ID NO: 741096 - protein, 203 aa, Homo sapiens
PLPVAGVPNMAAPQDVHVRICNQEIVKFDLEVKALIQDIRDCSGPLSALTELNTKVKEKFQQLRHRIQDLEQLAKEQDKESEKQLLLQEVENHKKQMLRKTTKESLAQTSSTITESLMGISRMMAQQVQQSEEAMQSLVTSSRTILDANEEFKSMSGTIQLGRKLITKYNRRELTDKLLIFLALALFLATVLYIVKKRLFPFL

SEQ ID NO: 741097 - protein, 191 aa, Homo sapiens
  misc_feature (1)..(1): Xaa can be any naturally occurring amino acid
XAVPVRIPAIKEKFQQLRHRIQDLEQLAKEQDKESEKQLLLQEVENHKKQMLSNQASWRKANLTCKIAIDNLEKAELLQGGDLLRQRKTTKESLAQTSSTITESLMGISRMMAQQVQQSEEAMQSLVTSSRTILDANEEFKSMSGTIQLGRKLITKYNRRELTDKLLIFLALALFLATVLYIVKKRLFPFL

SEQ ID NO: 741098 - protein, 140 aa, Homo sapiens
PLPVAGVPNMAAPQDVHVRICNQEIVKFDLEVKALIQDIRDCSGPLSALTELNTKVKEKFQQLRHRIQDLEQLAKEQDKESEKQLLLQEVENHKKQMLSNQASWRKANLTCKIAIDNLEKAELLQGGDLLRQRASWGSAG

SEQ ID NO: 741099 - protein, 239 aa, Homo sapiens
PLPVAGVPNMAAPQDVHVRICNQEIVKFDLEVKALIQDIRDCSGPLSALTELNTKVKEKFQQLRHRIQPVLYQRAFIWTASTFFFKLTYSLTDFSSTQHDFNSPTTPVTFSDLEQLAKEQDKESEKQLLLQEVENHKKQMLSNQASWRKANLTCKIAIDNLEKAELLQGGDLLRQRKTTKESLAQTSSTITESLMGISRMMAQQSLLHERSWMQMKNLSPCRAPSSWAGSLSQNTIAGS

SEQ ID NO: 741100 - protein, 187 aa, Homo sapiens
PLPVAGVPNMAAPQDVHVRICNQEIVKFDLEVKALIQDIRDCSGPLSALTELNTKVKEKFQQLRHRIQDLEQLAKEQDKESEKQLLLQEVENHKKQMLSNQASWRKANLTCKIAIDNLEKAELLQGGDLLRQRKTTKESLAQTSSTITESLMGISRMMAQQVQQSEEAMQSLVPFKRCESEATGETA

SEQ ID NO: 741101 - protein, 280 aa, Homo sapiens
PLPVAGVPNMAAPQDVHVRICNQEIVKFDLEVKALIQDIRDCSGPLSALTELNTKVKEKFQQLRHRIQPVLYQRAFIWTASTFFFKLTYSLTDFSSTQHDFNSPTTPVTFSDLEQLAKEQDKESEKQLLLQEVENHKKQMLSNQASWRKANLTCKIAIDNLEKAELLQGGDLLRQRKTTKESLAQTSSTITESLMGISRMMAQQVQQSEEAMQSLVTSSRTILDANEEFKSMSGTIQLGRKLITKYNRRELTDKLLIFLALALFLATVLYIVKKRLFPFL

SEQ ID NO: 741102 - protein, 104 aa, Homo sapiens; identical to SEQ ID NO: 741092

SEQ ID NO: 741103 - protein, 237 aa, Homo sapiens; identical to SEQ ID NO: 741093

SEQ ID NO: 741104 - protein, 225 aa, Homo sapiens
PLPVAGVPNMAAPQDVHVRICNQEIVKFDLEVKALIQVLIPGTLKEKFQQLRHRIQDLEQLAKEQDKESEKQLLLQEVENHKKQMLSNQASWRKANLTCKIAIDNLEKAELLQGGDLLRQRKTTKESLAQTSSTITESLMGISRMMAQQVQQSEEAMQSLVTSSRTILDANEEFKSMSGTIQLGRKLITKYNRRELTDKLLIFLALALFLATVLYIVKKRLFPFL

SEQ ID NO: 741105 - protein, 237 aa, Homo sapiens; identical to SEQ ID NO: 741093

SEQ ID NO: 741106 - protein, 227 aa, Homo sapiens
PLPVAGVPNMAAPQDVHVRICNQEIVKFDLEVKALIQDIRDCSGPLSALTELNTKVKEKFQQLRHRIQDLEQLAKEQDKESEKQLLLQEVENHKKQMLSNQASWRKANLTCKIAIDNLEKAELLQGGDLLRQRKTTKESLAQTSSTITESLMGISRMMAQQVQQSEEAMQSLVTSSRTILDANEEFKSMSGTIQLGRKLITKYNRRELTDKLLIFDLSWFLSSRLLS

SEQ ID NO: 741107 - protein, 378 aa, Homo sapiens
MQLRLFRRLLLAALLLVIVWTLFGPSGLGEELLSLSLASLLPAPASPGPPLALPRLLIPNQEACSGPGAPPFLLILVCTAPENLNQRNAIRASWGGLREARGLRVQTLFLLGEPNAQHPVWGSQGSDLASESAAQGDILQAAFQDSYRNLTLKTLSGLNWAEKHCPMARYVLKTDDDVYVNVPELVSELVLRGGRWGQWERSTEPQREAEQEGGQVLHSEEVPLLYLGRVHWRVNPSRTPGGRHRVSEEQWPHTWGPFPPYASGTGYVLSASAVQLILKVASRAPLLPLEDVFVGVSARRGGLAPTQCVKLAGATHYPLDRCCYGKFLLTSHRLDPWKMQEAWKLVGGSDGERTAPFCSWFQGVLGILRCRAIAWLQS

SEQ ID NO: 741108 - protein, 378 aa, Homo sapiens; identical to SEQ ID NO: 741107

SEQ ID NO: 741109 - protein, 341 aa, Homo sapiens
MQLRLFRRLLLAALLLVIVWTLFGPSGLGEELLSLSLASLLPAPASPGPPLALPRLLIPNQEACSGPGAPPFLLILVCTAPENLNQRNAIRASWGGLREARGLRVQTLFLLGEPNAQHPVWGSQGSDLASESAAQGDILQAAFQDSYRNLTLKTLSGLNWAEKHCPMARYVLKTDDDVYVNVPELVSELVLRGGRWGQWERSTEPQREAEQEGGQVLHSEEVPLLYLGRVHWRVNPSRTPGGRHRVSEEQWPHTWGPFPPYASGTGYVLSASAVQLILKVASRAPLLPLEDVFVGVSARRGGLAPTQCVKLAGATHYPLDRCCYGKFLGILRCRAIAWLQS

SEQ ID NO: 741110 - protein, 422 aa, Homo sapiens
MQQALSSHTAFTKHSEELGTEEGEVEEMDTLDPQTGLFYRSALTQSQSAKQQKLSQPPLEQTQLQVKTLQCFQTKQKQTIHLQADQLQHKLPQMPQLSIRHQKLTPLQQEQAQPKPDVQHTQHPMVAKDRQLPTLMAQPPQTVVQVLAVKTTQQLPKLQQAPNQPKIYVQPQTPQSQMSLPASSEKQTASQVEQPIITQGSSVTKITFEGRQPPTVTKITGGSSVPKLTSPVTSISPIQASEKTAVSDILKMSLMEAQIDTNVEHMIVDPPKKALATSMLTGEAGSLPSTHMVVAGMANSTPQQQKCRESCSSPSTVGSSLTTRKIDPPAVPATGQFMRIQNVGQKKAEESPAEIIIQAIPQYAIPCHSSSNVVVEPSGLLELNNFTSQQLDDEETAMEQDIDSSTEDGTEPSPSQSSAERS

SEQ ID NO: 741111 - protein, 422 aa, Homo sapiens; identical to SEQ ID NO: 741110

SEQ ID NO: 741112 - protein, 422 aa, Homo sapiens; identical to SEQ ID NO: 741110

SEQ ID NO: 741113 - protein, 405 aa, Homo sapiens
MQQALSSHTAFTKHSEELGTEEGEVEEMDTLDPQTGLFYRSALTQSQSAKQQKLSQPPLEQTQLQVKTLQCFQTKQKQTIHLQADQLQHKLPQMPQLSIRHQKLTPLQQEQAQPKPDVQHTQHPMVAKDRQLPTLMAQPPQTVVQVLAVKTTQQLPKLQQAPNQPKIYVQPQTPQSQMSLPASSEKQTASQVEQPIITQGSSVTKITFEGRQPPTVTKITGGSSVPKLTSPVTSISPIQASEKTAVSDILKMSLMEAQIDTNVEHMIVDPPKKALATSMLTGEAGSLPSTHMVVAGMANSTPQQQKCRESCSSPSTVGSSLTTRKIDPPAVPATGQFMRIQNVGQKKAEESPAEIIIQVKTKELLSPGYPLEVVFYLPLSLQGYSSVCYSLSLQLQCGGGAQWAS

SEQ ID NO: 741114 - protein, 255 aa, Homo sapiens
MQQALSSHTAFTKHSEELGTEEGEVEEMDTLDPQTGLFYRSALTQSQSAKQQKLSQPPLEQTQLQVKTLQCFQTKQKQTIHLQADQLQHKLPQMPQLSIRHQKLTPLQQEQAQPKPDVQHTQHPMVAKDRQLPTLMAQPPQTVVQVLAVKTTQQLPKLQQAPNQPKIYVQPQTPQSQMSLPASSEKQTASQAIPQYAIPCHSSSNVVVEPSGLLELNNFTSQQLDDEETAMEQDIDSSTEDGTEPSPSQSSAERS

SEQ ID NO: 741115 - protein, 422 aa, Homo sapiens; identical to SEQ ID NO: 741110

SEQ ID NO: 741116 - protein, 78 aa, Homo sapiens
KKLEDDPKFLKSGDAAIVDMVLGEHMCVESFSDYPPRGRFAVRDMRQTVAVGVIKAVDKKAAGAGKVTKSAQKAQKAK

SEQ ID NO: 741117 - protein, 516 aa, Homo sapiens
MGLHFKWPLGAPMLAAIYAMSMVLKMLPALGMACPPKCRCEKLLFYCDSQGFHSVPNATDKGSLGLSLRHNHITELERDQFASFSQLTWLHLDHNQISTVKEDAFQGLYKLKELILSSNKIFYLPNTTFTQLINLQNLDLSFNQLSSLHPELFYGLRKLQTLHLRSNSLRTIPVRLFWDCRSLEFLDLSTNRLRSLARNGFAGLIKLRELHLEHNQLTKINFAHFLRLSSLHTLFLQWNKISNLTCGMEWTWGTLEKLDLTGNEIKAIDLTVFETMPNLKILLMDNNKLNSLDSKILNSLRSLTTVGLSGNLWECSARICALASWLGSFQGRWEHSILCHSPDHTQGEDILDAVHGFQLCWNLSTTVTVMATTYRDPTTEYTKRISSSSYHVGDKEIPTTAGIAVTTEEHFPEPDNAIFTQRVITGTMALLFSFFFIIFIVFISRKCCPPTLRRIRQCSMVQNHRQLRSQTRLHMSNMSDQGPYNEYEPTHEGPFIIINGYGQCKCQQLPYKECEV

SEQ ID NO: 741118 - protein, 109 aa, Homo sapiens
MKRVEADSAPVLKSRSCSLRTDGKRTKRVENPAVQPFPSKHASQPLRRLRQEDHLSPGGQGCSEPWSPLHSILGDRVRHRFQKNSTEMLYLQIYIISFGNRFKNFLRMR

SEQ ID NO: 741119 - protein, 433 aa, Homo sapiens
MLELIEVNGTPGSQLSTPRSGKSPSPSPTSPGSLRKQRSSQHGGSSTSLASTKVCSSMDENDGPGEEVSEEGFQIPATITERYKVGRTIGDGNFAVVKECVERSTAREYALKIIKKSKCRGKEHMIQNEVSILRRVKHPNIVLLIEEMDVPTELYLVMELVKGGDLFDAITSTNKYTERDASGMLYNLASAIKYLHSLNIVHRDIKPENLLVYEHQDGSKSLKLGDFGLATIVDGPLYTVCGTPTYVAPEIIAETGYGLKVDIWAAGVITYILLCGFPPFRGSGDDQEVLFDQILMGQVDFPSPYWDNVSDSAKELITMMLLVDVDQRFSAVQVLEHPWVNDDGLPENEHQLSVAGKIKKHFNTGPKPNSTAAGVSVIATTALDKERQVFRRRRNQDVRSRYKAQPAPPELNSESEDYSPSSSETVRSPNSPF

SEQ ID NO: 741120 - protein, 370 aa, Homo sapiens
MLELIEVNGTPGSQLSTPRSGKSPSPSPTSPGSLRKQRSSQHGGSSTSLASTKVCSSMDENDGPGEEVSEEGFQIPATITERYKVGRTIGDGNFAVVKECVERSTAREYALKIIKKSKCRGKEHMIQNEVSILRRVKHPNIVLLIEEMDVPTELYLVMELVKGGDLFDAITSTNKYTERDASGMLYNLASAIKYLHSLNIVHRDIKPENLLVYEHQDGSKSLKLGDFGLATIVDGPLYTVCGTPTYVAPEIIAETGYGLKVDIWAAGVITYILLCGFPPFRGSGDDQEVLFDQILMGQVDFPSPYWDNVSDSAKELITMMLLVDVDQRFSAVQVLEHPWVNVSDSHHFLCSLLTFLLKISCRFSNVIASF

SEQ ID NO: 741121 - protein, 729 aa, Homo sapiens
MSFGRDMELEHFDERDKAQRYSRGSRVNGLPSPTHSAHCSFYRTRTLQTLSSEKKAKKVRFYRNGDRYFKGIVYAISPDRFRSFEALLADLTRTLSDNVNLPQGVRTIYTIDGLKKISSLDQLVEGESYVCGSIEPFKKLEYTKNVNPNWSVNVKTTSASRAVSSLATAKGSPSEVRENKDFIRPKLVTIIRSGVKPRKAVRILLNKKTAHSFEQVLTDITDAIKLDSGVVKRLYTLDGKQVMCLQDFFGDDDIFIACGPEKFRYQDDFLLDESECRVVKSTSYTKIASSSRRSTTKSPGPSRRSKSPASTSSVNGTPGSQLSTPRSGKSPSPSPTSPGSLRKQRSSQHGGSSTSLASTKVCSSMDENDGPGEEVSEEGFQIPATITERYKVGRTIGDGNFAVVKECVERSTAREYALKIIKKSKCRGKEHMIQNEVSILRRVKHPNIVLLIEEMDVPTELYLVMELVKGGDLFDAITSTNKYTERDASGMLYNLASAIKYLHSLNIVHRDIKPENLLVYEHQDGSKSLKLGDFGLATIVDGPLYTVCGTPTYVAPEIIAETGYGLKVDIWAAGVITYILLCGFPPFRGSGDDQEVLFDQILMGQVDFPSPYWDNVSDSAKELITMMLLVDVDQRFSAVQVLEHPWVNDDGLPENEHQLSVAGKIKKHFNTGPKPNSTAAGVSVIALDHGFTIKRSGSLDYYQQPGMYWIRPPLLIRRGRFSDEDATRM

SEQ ID NO: 741122 - protein, 433 aa, Homo sapiens; identical to SEQ ID NO: 741119

SEQ ID NO: 741123 - protein, 352 aa, Homo sapiens
SPWVVAPDFALKPLESFLWGLELQDPIKATTEGHWAFIATKGLLVPADSGHAPPCPTPPFPGCQALSKRHLRPSGLPRPSLAAQALTKAASGLPPQAQGRSWLLASGCLLGRWGWSLAGLSSTLSASWQVLSCTSLPGQRAETRATGGTSDVQFLASVLPPDTDPAFFEHLRALDCSEVTVRALPEGSLAFPGVPLLQVSGPLLVVQLLETPLLCLVSYASLVATNAARLRLIAGPEKRLLEMGLRRAQGPDGGLTASTYSYLGGFDSSSNVLAGQLRGVPVAGTLAHSFVTSFSGSEVPPDPVSPSSKPCCLQATGPKPALALARGVPPKAGHPSAVPRKLARAALPLLSN

SEQ ID NO: 741124 - protein, 300 aa, Homo sapiens
MAAEQDPEARAAARPLLTDLYQATMALGYWRAGRARDAAEFELFFRRCPFGGAFALAAGLRDCVRFLRAFRLRDADVQFLASVLPPDTDPAFFEHLRALDCSEVTVRALPEGSLAFPGVPLLQVSGPLLVVQLLETPLLCLVSYASLVATNAARLRLIAGPEKRLLEMGLRRAQGPDGGLTASTYSYLGGFDSSSNVLAGQLRGVPVAGTLAHSFVTSFSGSEVPPDPMLAPAAGEGPGVDLAAKPRCGWSRCVPTWGWGCRSRIQASGQPLWPMPWLFPGPSRASWTPTACGGVVSPTS

SEQ ID NO: 741125 - protein, 300 aa, Homo sapiens; identical to SEQ ID NO: 741124

SEQ ID NO: 741126 - protein, 300 aa, Homo sapiens; identical to SEQ ID NO: 741124

SEQ ID NO: 741127 - protein, 300 aa, Homo sapiens; identical to SEQ ID NO: 741124

SEQ ID NO: 741128 - protein, 300 aa, Homo sapiens; identical to SEQ ID NO: 741124

SEQ ID NO: 741129 - protein, 300 aa, Homo sapiens; identical to SEQ ID NO: 741124

SEQ ID NO: 741130 - protein, 300 aa, Homo sapiens; identical to SEQ ID NO: 741124

SEQ ID NO: 741131 - protein, 300 aa, Homo sapiens; identical to SEQ ID NO: 741124

SEQ ID NO: 741132 - protein, 311 aa, Homo sapiens
MAAEQDPEARAAARPLLTDLYQATMALGYWRAGRARDAAEFELFFRRCPFGGAFALAAGLRDCVRFLRAFRLRDADVQFLASVLPPDTDPAFFEHLRALDCSEVTVRALPEGSLAFPGVPLLQVSGPLLVVQLLETPLLCLVSYASLVATNAARLRLIAGPEKRLLEMGLRRAQGPDGGLTASTYSYLGGFDSSSNVLAGQLRGVPVAGTLAHSFVTSFSGSEVPPDPMLAPAAGEGPGVDLAAKPRCGWSRCVPTWGWGCRSRIQASGQPLWPMPWLFPGPSRASWTPTACGAMRAAPQATPLMEPHLVC

SEQ ID NO: 741133 - protein, 350 aa, Homo sapiens
MAAEQDPEARAAARPLLTDLYQATMALGYWRAGRARDAAEFELFFRRCPFGGAFALAAGLRDCVRFLRAFRLRDAGSPPSARRAPHARQKPPPMAGGSPCPPVEPPMSHDRSVPALVSAQFTSFPDVQFLASVLPPDTDPAFFEHLRALDCSEVTVRALPEGSLAFPGVPLLQVSGPLLVVQLLETPLLCLVSYASLVATNAARLRLIAGPEKRLLEMGLRRAQGPDGGLTASTYSYLGGFDSSSNVLAGQLRGVPVAGTLAHSFVTSFSGSEVPPDPMLAPAAGEGPGVDLAAKPRCGWSRCVPTWGWGCRSRIQASGQPLWPMPWLFPGPSRASWTPTACGGVVSPTS

SEQ ID NO: 741134 - protein, 196 aa, Homo sapiens
MAAEQDPEARAAARPLLTDLYQATMALGYWRAGRARDAAEFELFFRRCPFGGAFALAAGLRDCVRFLRAFRLRDADVQFLASVLPPDTDPAFFEHLRALDCSEVTVRALPEGSLAFPGVPLLQVSGPLLVVQLLETPLLCLVSYASLVATNAARLRLIAGPEKRLLEMGLRRAQGPDGGLTASTYSYLGDVGASSW

SEQ ID NO: 741135 - protein, 273 aa, Homo sapiens
SPLLHRHTCTGPTPAPATPGLGPPGPPQALTSCWRQHLWNRVGEEWGPDVQFLASVLPPDTDPAFFEHLRALDCSEVTVRALPEGSLAFPGVPLLQVSGPLLVVQLLETPLLCLVSYASLVATNAARLRLIAGPEKRLLEMGLRRAQGPDGGLTASTYSYLGGFDSSSNVLAGQLRGVPVAGTLAHSFVTSFSGSEVPPDPMLAPAAGEGPGVDLAAKPRCGWSRCVPTWGWGCRSRIQASGQPLWPMPWLFPGPSRASWTPTACGGVVSPTS

SEQ ID NO: 741136 - protein, 196 aa, Homo sapiens; identical to SEQ ID NO: 741134

SEQ ID NO: 741137 - protein, 133 aa, Homo sapiens [sequence omitted]

SEQ ID NO: 741138 - protein, 213 aa, Homo sapiens
QACRVGETTPSNTLYAFQVPWLESVLIVVSNNIDEEALARLAQEGSEVNVIGIGTSVVTCPQQPSLGGVYKLVAVGGQPRMKLTEDPEKQTLPGSKAAFRLLGSDGSPLMDMLQLAEEPVPQAGQELRVWPPGAQEPCTVRPAQVEPLLRLCLQQGQLCEPLPSLAESRALAQLSLSRLSPEHRRLRSPAQYQVVLSERLQALVNSLCAGQSP

SEQ ID NO: 741139 - protein, 256 aa, Homo sapiens
MAAEQDPEARAAARPLLTDLYQATMALGYWRAGRARDAAEFELFFRRCPFGGAFALAAGLRDCVRFLRAFRLRDADVQFLASVLPPDTDPAFFEHLRALDCSEVTVRALPEGSLAFPGVPLLQVSGPLLVVQLLETPLLCLVSYASLVATNAARLRLIAGPEKRLLEMGLRRAQGPDGGLTASTYSYLGGECLVRGKARAGKEEPHLGPRSPNPTAFLPRLRQQQQRASGPAARCAGGRDPGPLLRHFLFRQRGAP

SEQ ID NO: 741140 - protein, 197 aa, Homo sapiens
EFEEEEGELEEEEEEEDEEEEEELEEVEDLEFGTAGGEVEEGAPPPPTLPPALPPPESPPKVQPEPEPEPGLLLEVEEPGTEEERGADTAPTLAPEALPSQGEVEREGESPAAGPPPQELVEEEPSAPPTLLEEETEDGSDKVQPPPETPAEEEMETETEAEALQEKEQDDTASMLADFIDCPPDDEKPPPPTEPDS

SEQ ID NO: 741141 - protein, 325 aa, Homo sapiens
MAPEINLPGPMSLIDNTKGQLVVNPEALKILSAITQPVVVVAIVGLYRTGKSYLMNKLAGKKNGFSLGSTVKSHTKGIWMWCVPHPKKPEHTLVLLDTEGLGDIEKGDNENDSWIFALAILLSSTFVYNSMGTINQQAMDQLHYVTELTDRIKANSSPGNNSVDDSADFVSFFPAFVWTLRDFTLELEVDGEPITADDYLELSLKLRKGTDKKSKSFNDPRLCIRKFFPKRKCFVFDWPAPKKYLAHLEQLKEEELNPDFIEQVAEFCSYILSHSNVKTLSGGIPVNGPRESLSLPTSYLDFLLLPIVEDKMESIRVTSDKCIVY

SEQ ID NO: 741142 - protein, 212 aa, Homo sapiens
MAPEINLPGPMSLIDNTKGQLVVNPEALKILSAITQPVVVVAIVGLYRTGKSYLMNKLAGKKNGFSLGSTVKSHTKGIWMWCVPHPKKPEHTLVLLDTEGLGDIEKGDNENDSWIFALAILLSSTFVYNSMGTINQQAMDQLHYVTELTDRIKANSSPGNNSVDDSADFVSFFPAFVWTLRDFTLELEVDGEPITADDYLELSLKLRKGYWV

SEQ ID NO: 741143 - protein, 524 aa, Homo sapiens
MDTESTYSGYSYYSSHSKKSHRQGERTRERHKSPRNKDGRGSEKSVTIQPPTGEPLLGNDSTRTEEVQDDNWGETTTAITGTSEHSISQEDIARISKDMEDSVGLDCKRYLGLTVASFLGLLVFLTPIAFILLPPILWRDELEPCGTICEGLFISMAFKLLILLIGTWALFFRKRRADMPRVFVFRALLLVLIFLFVVSYWLFYGVRILDSRDRNYQGIVQYAVSLVDALLFIHYLAIVLLELRQLQPMFTLQVVRSTDGESRFYSLGHLSIQRAALVVLENYYKDFTIYNPNLLTASKFRAAKHMAGLKVYNVDGPSNNATGQSRAMIAAAARRRDSSHNELYYEEAEHERRVKKRKARLVVAVEEAFIHIQRLQAEEQQKAPGEVMDPREAAQAIFPSMARALQKYLRITRQQNYHSMESILQHLAFCITNGMTPKAFLERYLSAGPTLQYDKDRWLSTQWRLVSDEAVTNGLRDGIVFVLKCLDFSLVVNVKKIPFIILSEEFIDPKSHKFVLRLQSETSV

SEQ ID NO: 741144 - protein, 295 aa, Homo sapiens
MLCCWFPWRILAAGQVPYSPHSPQVAGCDLTRCESGGARALSIQRAALVVLENYYKDFTIYNPNLLTASKFRAAKHMAGLKVYNVDGPSNNATGQSRAMIAAAARRRDSSHNELYYEEAEHERRVKKRKARLVVAVEEAFIHIQRLQAEEQQKAPGEVMDPREAAQAIFPSMARALQKYLRITRQQNYHSMESILQHLAFCITNGMTPKAFLERYLSAGPTLQYDKDRWLSTQWRLVSDEAVTNGLRDGIVFVLKCLDFSLVVNVKKIPFIILSEEFIDPKSHKFVLRLQSETSV

SEQ ID NO: 741145 - protein, 219 aa, Homo sapiens [sequence omitted]

SEQ ID NO: 741146 - protein, 271 aa, Homo sapiens
MDTESTYSGYSYYSSHSKKSHRQGERTRERHKSPRNKDGRGSEKSVTIQPPTGEPLLGNDSTRTEEVQDDNWGETTTAITGTSEHSISQEDIARISKDMEDSVGLDCKRYLGLTVASFLGLLVFLTPIAFILLPPILWRDELEPCGTICEGLFISMAFKLLILLIGTWALFFRKRRADMPRVFVFRALLLVLIFLFVVSYWLFYGVRILDSRDRNYQGIVQYAVSLVDALLFIHYLAIVLLELRQLQPMFTLQVVRSTDGESRFYSLGHLR

SEQ ID NO: 741147 - protein, 80 aa, Homo sapiens
LSVRGGLQAPGTHPPRHQDAQEEGHEGTIKEEPKRRLAQLSAKPAPAKVEAKLKKAAAKDKSSGKNVHSVRSVVVVVLFS

SEQ ID NO: 741148 - protein, 380 aa, Homo sapiens
MAFVCLAIGCLYTFLISTTFGCTSSSDTEIKVNPPQDFEIVDPGYLGYLYLQWQPPLSLDHFKECTVEYELKYRNIGSETWKTIITKNLHYKDGFDLNKGIEAKIHTLLPWQCTNGSEVQSSWAETTYWISPQGIPETKVQDMDCVYYNWQYLLCSWKPGIGVLLDTNYNLFYWYEGLDHALQCVDYIKADGQNIGCRFPYLEASDYKDFYICVNGSSENKPIRSSYFTFQLQNIVKPLPPVYLTFTRESSCEIKLKWSIPLGPIPARCFDYEIEIREDDTTLVTATVENETYTLKTTNETRQLCFVVRSKVNIYCSDDGIWSEWSDKQCWEGEDLSKKTLLRFWLPFGFILILVIFVTGLLLRKPNTYPKMIPEFFCDT

SEQ ID NO: 741149 - protein, 380 aa, Homo sapiens; identical to SEQ ID NO: 741148

SEQ ID NO: 741150 - protein, 381 aa, Homo sapiens
RIVLGLVAKMASSASARTPAGKRVINQEELRRLMKEKQRLSTSRKRIESPFAKYNRLGQLSCALCNTPVKSELLWQTHVLGKQHREKVAELKGAKEASQGSSASSAPQSVKRKAPDADDQDVKRAKATLVPQVQPSTSAWTTNFDKIGKEFIRATPSKPSGLSLLPDYEDEEEEEEEEEGDGERKRGDASKPLSDAQGKEHSVSSSREVTSSVLPNDFFSTNPPKAPIIPHSGSIEKAEIHEKVVERRENTAEALPEGFFDDPEVDARVRKVDAPKDQMDKEWDEFQKAMRQVNTISEAIVAEEDEEGRLDRQIGEIDEQIECYRRVEKLRNRQDEIKNKLKEILTIKELQKKEEENADSDDEGELQDLLSQDWRVKGALL

SEQ ID NO: 741151 - protein, 101 aa, Homo sapiens
RIVLGLVAKMASSASARTPAGKRVINQEELRRLMKEIDEQIECYRRVEKLRNRQDEIKNKLKEILTIKELQKKEEENADSDDEGELQDLLSQDWRVKGALL

SEQ ID NO: 741152 - protein, 381 aa, Homo sapiens; identical to SEQ ID NO: 741150

SEQ ID NO: 741153 - protein, 381 aa, Homo sapiens; identical to SEQ ID NO: 741150

SEQ ID NO: 741154 - protein, 149 aa, Homo sapiens
IHFSISHTFYTIDSKEALSTWFSFGSEKPTTKNLRGARGHEGHLLAPLSPGLACRKRERDSGLPGPGNPRRPGNGGFPCHPQPQLELLGRKACARCSAGRSGSSHGCSTCFPSPRIFNGGLQQSPTRPFSGCPHSRPAFPEGLSSGVVL

SEQ ID NO: 741155 - protein, 129 aa, Homo sapiens
TPRTAQLSPLVSPPTRHHRSWGCVWRVCALWGEFQEAPPLLKLGAWRAVPVRAGAEARSVFEGTPPPPPPQFLPRVSCPGCVRGRGFPCASSCTSRSVSGGREEDWGSRLLLGDVSGAGDPGCARGRRP

SEQ ID NO: 741156 - protein, 71 aa, Homo sapiens
LPCPQTPRARDTGRRPGHQASSRNRLAPESRLGLQSPLLPSLRSAPCPPLPALLASKPNFAFHPERLIPRR

SEQ ID NO: 741157 - protein, 106 aa, Homo sapiens
LWSNAIFAGYKQDLWNQREHTPLLKIEVVYARDETEFYLGKRCAYVYKAKNNPVTPGSKPNKTRVIGGKVTHAHGNSGLVRAKFRSNLPAKAIGHRIRVMLYPSRI

SEQ ID NO: 741158 - protein, 68 aa, Homo sapiens
HYRECISSSKCFACLTYNASFQRWEQNQLCSVLYWYLNNKMKEKKRKKKEEEENKKKKRKKKRRRKKK

SEQ ID NO: 741159 - protein, 622 aa, Homo sapiens
MGLYGQACPSVTSLRMTSELESSLTSMDWLPQLTMRAAIQKSDATQNAHGTGISKKNALLDPNTTLDQEEVQQHKDGKPPYSYASLITFAINSSPKKKMTLSEIYQWICDNFPYYREAGSGWKNSIRHNLSLNKCFLKVPRSKDDPGKGSYWAIDTNPKEDALPTRPKKRARSVERASTPYSIDSDSLGMECIISGSASPTLAINTVTNKVTLYNTDQDGSDSPRSSLNNSLSDQSLASVNLNSVGSVHSYTPVTSHPESVSQSLTPQQQPQYNLPERDKQLLFSEYNFEDLSASFRSLYKSVFEQSLSQQGLMNIPSESSQQSHTSCTYQHSPSSTVSTHPHSNQSSLSNSHGSGLNTTGSNSVAQVSLSHPQMHTQPSPHPPHRPHGLPQHPQRSPHPAPHPQQHSQLQSPHPQHPSPHQHIQHHPNHQHQTLTHQAPPPPQQVSCNSGVSNDWYATLDMLKESCRIASSVNWSDVDLSQFQGLMESMRQADLKNWSLDQVQFADLCSSLNQFFTQTGLIHSQSNVQQNVCHGAMHPTKPSQHIGTGNLYIDSRQNLPPSVMPPPGYPHIPQALSTPGTTMAGHHRAMNQQHMMPSQAFQMRRSLPPDDIQDDFDWDSIV

SEQ ID NO: 741160 - protein, 622 aa, Homo sapiens
MGLYGQACPSVTSLRMTSELESSLTSMDWLPQLTMRAAIQKSDATQNAHGTGISKKNALLDPNTTLDQEEVQQHKDGKPPYSYASLITFAINSSPKKKMTLSEIYQWICDNFPYYREAGSGWKNSIRHNLSLNKCFLKVPRSKDDPGKGSYWAIDTNPKEDVLPTRPKKRARSVERASTPYSIDSDSLGMECIISGSASPTLAINTVTNKVTLYNTDQDGSDSPRSSLNNSLSDQSLASVNLNSVGSVHSYTPVTSHPESVSQSLTPQQQPQYNLPERDKQLLFSEYNFEDLSASFRSLYKSVFEQSLSQQGLMNIPSESSQQSHTSCTYQHSPSSTVSTHPHSNQSSLSNSHGSGLNTTGSNSVAQVSLSHPQMHTQPSPHPPHRPHGLPQHPQRSPHPAPHPQQHSQLQSPHPQHPSPHQHIQHHPNHQHQTLTHQAPPPPQQVSCNSGVSNDWYATLDMLKESCRIASSVNWSDVDLSQFQGLMESMRQADLKNWSLDQVQFADLCSSLNQFFTQTGLIHSQSNVQQNVCHGAMHPTKPSQHIGTGNLYIDSRQNLPPSVMPPPGYPHIPQALSTPGTTMAGHHRAMNQQHMMPSQAFQMRRSLPPDDIQDDFDWDSIV

SEQ ID NO: 741161 - protein, 588 aa, Homo sapiens
MGLYGQACPSVTSLRMTSELESSLTSMDWLPQLTMRAAIQKSDATQNAHGTGISKKNALLDPNTTLDQEEVQQHKDGKPPYSYASLITFAINSSPKKKMTLSEIYQWICDNFPYYREAGSGWKNSIRHNLSLNKCFLKVPRSKDDPGKGSYWAIDTNPKEDALPTRPKKRARSVERVTLYNTDQDGSDSPRSSLNNSLSDQSLASVNLNSVGSVHSYTPVTSHPESVSQSLTPQQQPQYNLPERDKQLLFSEYNFEDLSASFRSLYKSVFEQSLSQQGLMNIPSESSQQSHTSCTYQHSPSSTVSTHPHSNQSSLSNSHGSGLNTTGSNSVAQVSLSHPQMHTQPSPHPPHRPHGLPQHPQRSPHPAPHPQQHSQLQSPHPQHPSPHQHIQHHPNHQHQTLTHQAPPPPQQVSCNSGVSNDWYATLDMLKESCRIASSVNWSDVDLSQFQGLMESMRQADLKNWSLDQVQFADLCSSLNQFFTQTGLIHSQSNVQQNVCHGAMHPTKPSQHIGTGNLYIDSRQNLPPSVMPPPGYPHIPQALSTPGTTMAGHHRAMNQQHMMPSQAFQMRRSLPPDDIQDDFDWDSIV

SEQ ID NO: 741162 - protein, 588 aa, Homo sapiens; identical to SEQ ID NO: 741161

SEQ ID NO: 741163 - protein, 497 aa, Homo sapiens
HRQLYSGLRSLRFSLWPDGFVWTGLSICNFIKNSIRHNLSLNKCFLKVPRSKDDPGKGSYWAIDTNPKEDALPTRPKKRARSVERVTLYNTDQDGSDSPRSSLNNSLSDQSLASVNLNSVGSVHSYTPVTSHPESVSQSLTPQQQPQYNLPERDKQLLFSEYNFEDLSASFRSLYKSVFEQSLSQQGLMNIPSESSQQSHTSCTYQHSPSSTVSTHPHSNQSSLSNSHGSGLNTTGSNSVAQVSLSHPQMHTQPSPHPPHRPHGLPQHPQRSPHPAPHPQQHSQLQSPHPQHPSPHQHIQHHPNHQHQTLTHQAPPPPQQVSCNSGVSNDWYATLDMLKESCRIASSVNWSDVDLSQFQGLMESMRQADLKNWSLDQVQFADLCSSLNQFFTQTGLIHSQSNVQQNVCHGAMHPTKPSQHIGTGNLYIDSRQNLPPSVMPPPGYPHIPQALSTPGTTMAGHHRAMNQQHMMPSQAFQMRRSLPPDDIQDDFDWDSIV

SEQ ID NO: 741164 - protein, 433 aa, Homo sapiens
MECIISGSASPTLAINTVTNKVTLYNTDQDGSDSPRSSLNNSLSDQSLASVNLNSVGSVHSYTPVTSHPESVSQSLTPQQQPQYNLPERDKQLLFSEYNFEDLSASFRSLYKSVFEQSLSQQGLMNIPSESSQQSHTSCTYQHSPSSTVSTHPHSNQSSLSNSHGSGLNTTGSNSVAQVSLSHPQMHTQPSPHPPHRPHGLPQHPQRSPHPAPHPQQHSQLQSPHPQHPSPHQHIQHHPNHQHQTLTHQAPPPPQQVSCNSGVSNDWYATLDMLKESCRIASSVNWSDVDLSQFQGLMESMRQADLKNWSLDQVQFADLCSSLNQFFTQTGLIHSQSNVQQNVCHGAMHPTKPSQHIGTGNLYIDSRQNLPPSVMPPPGYPHIPQALSTPGTTMAGHHRAMNQQHMMPSQAFQMRRSLPPDDIQDDFDWDSIV

SEQ ID NO: 741165 - protein, 430 aa, Homo sapiens
GGLEDPISGQDEGRSVERVTLYNTDQDGSDSPRSSLNNSLSDQSLASVNLNSVGSVHSYTPVTSHPESVSQSLTPQQQPQYNLPERDKQLLFSEYNFEDLSASFRSLYKSVFEQSLSQQGLMNIPSESSQQSHTSCTYQHSPSSTVSTHPHSNQSSLSNSHGSGLNTTGSNSVAQVSLSHPQMHTQPSPHPPHRPHGLPQHPQRSPHPAPHPQQHSQLQSPHPQHPSPHQHIQHHPNHQHQTLTHQAPPPPQQVSCNSGVSNDWYATLDMLKESCRIASSVNWSDVDLSQFQGLMESMRQADLKNWSLDQVQFADLCSSLNQFFTQTGLIHSQSNVQQNVCHGAMHPTKPSQHIGTGNLYIDSRQNLPPSVMPPPGYPHIPQALSTPGTTMAGHHRAMNQQHMMPSQAFQMRRSLPPDDIQDDFDWDSIV

SEQ ID NO: 741166 - protein, 348 aa, Homo sapiens
KGSEMRHYRSSKYNFEDLSASFRSLYKSVFEQSLSQQGLMNIPSESSQQSHTSCTYQHSPSSTVSTHPHSNQSSLSNSHGSGLNTTGSNSVAQVSLSHPQMHTQPSPHPPHRPHGLPQHPQRSPHPAPHPQQHSQLQSPHPQHPSPHQHIQHHPNHQHQTLTHQAPPPPQQVSCNSGVSNDWYATLDMLKESCRIASSVNWSDVDLSQFQGLMESMRQADLKNWSLDQVQFADLCSSLNQFFTQTGLIHSQSNVQQNVCHGAMHPTKPSQHIGTGNLYIDSRQNLPPSVMPPPGYPHIPQALSTPGTTMAGHHRAMNQQHMMPSQAFQMRRSLPPDDIQDDFDWDSIV

SEQ ID NO: 741167 - protein, 588 aa, Homo sapiens; identical to SEQ ID NO: 741161

SEQ ID NO: 741168 - protein, 145 aa, Homo sapiens
MGLYGQACPSVTSLRMTSELESSLTSMDWLPQLTMRAAIQKSDATQNAHGTGISKKNALLDPNTTLDQEEVQQHKDGKPPYSYASLITFAINSSPKKKMTLSEIYQWICDNFPYYREAGSGWKISYLFIYWYCNVKSSIKFDITR

SEQ ID NO: 741169 - protein, 351 aa, Homo sapiens
MGLYGQACPSVTSLRMTSELESSLTSMDWLPQLTMRAAIQKSDATQNAHGTGISKKNALLDPNTTLDQEEVQQHKDGKPPYSYASLITFAINSSPKKKMTLSEIYQWICDNFPYYREAGSGWKNSIRHNLSLNKCFLKVPRSKDDPGKGSYWAIDTNPKEDALPTRPKKRARSVERVTLYNTDQDGSDSPRSSLNNSLSDQSLASVNLNSVGSVHSYTPVTSHPESVSQSLTPQQQPQYNLPERDKQLLFSEYNFEDLSASFRSLYKSVFEQSLSQQGLMNIPSESSQQSHTSCTYQHSPSSTVSTHPHSNQSSLSNSHGSGLNTTGSNSVAQVSLSHPQAAYAIELLTRD

SEQ ID NO: 741170 - protein, 168 aa, Homo sapiens [sequence omitted]

SEQ ID NO: 741171 - protein, 50 aa, Homo sapiens
MAVASTPQAVIRLHRSHCLTPRCTHSHLHILPIDRMVYRSIRSVPHTQHH

SEQ ID NO: 741172 - protein, 106 aa, Homo sapiens
ELEPEPRESRLPGAADMEGQSSRGSRRPGTRAGLGSLPMPQGVAQTGAPSKTEKLRRWAERYLPKVTQSWALNLHSQSQLPALAPEWSSGNGWTQVFSSQQRRTQP

SEQ ID NO: 741173 - protein, 146 aa, Homo sapiens
ELEPEPRESRLPGAADMEGQSSRGSRRPGTRAGLGSLPMPQGVAQTGAPSKVDSSFQLPAKKNAALGPSEPRLALAPVGPRAAMSASSEGPRLALASPRPILAPLCTPEGQKTATAHRSSSLAPTSVGQLVMSASAGPKPPPATTG

SEQ ID NO: 741174 - protein, 454 aa, Homo sapiens
MLCFLNCHLPAHMDKAEQRKDNFQTILSLQQFQGPGAQGILDHDLVFWFGDLNFRIESYDLHFVKFAIDSDQLHQLWEKDQLNMAKNTWPILKGFQEGPLNFAPTFKFDVGTNKYDTSAKKRKPAWTDRILWKVKAPGGGPSPSGRKSHRLQVTQHSYRSHMEYTVSDHKPVAAQFLLQFAFRDDMPLVRLEVADEWVRPEQAVVRYRMETVFARSSWDWIGLYRVGFRHCKDYVAYVWAKHEDVDGNTYQVTFSEESLPKGHGDFILGYYSHNHSILIGITEPFQISLPSSELASSSTDSSGTSSEGEDDSTLELLAPKSRSPSPGKSKRHRSRSPGLARFPGLALRPSSRERRGASRSPSPQSRRLSRVAPDRSSNGSSRGSSEEGPSGLPGPWAFPPAVPRSLGLLPALRLETVDPGGGGSWGPDREALAPNSLSPSPQGHRGLEEGGLGP

SEQ ID NO: 741175 - protein, 501 aa, Homo sapiens
ELEPEPRESRLPGAADMEGQSSRGSRRPGTRAGLGSLPMPQGVAQTGAPSKVDSSFQLPAKKNAALGPSEPRITVVTWNVGTAMPPDDVTSLLHLGGGDDSDGADMIAIGLQEVNSMLNKRLKDALFTDQWSELFMDALGPFNFVLVSSVRMQGVILLLFAKYYHLPFLRDVQTDCTRTGLGGYWGNKGGVSVRLAAFGHMLCFLNCHLPAHMDKAEQRKDNFQTILSLQQFQGPGAQGILDHDLVFWFGDLNFRIESYDLHFVKFAIDSDQLHQLWEKDQLNMAKNTWPILKGFQEGPLNFAPTFKFDVGTNKYDTSAKKRKPAWTDRILWKVKAPGGGPSPSGRKSHRLQVTQHSYRSHMEYTVSDHKPVAAQFLLQFAFRDDMPLVRLEVADEWVRPEQAVVRYRMETVFARSSWDWIGLYRVGFRHCKDYVAYVWAKHEDVDGNTYQVTFSEESLPKGHGDFILGYYSHNHSIRSGKMIDEGVIMKGDKLFYASVAG

SEQ ID NO: 741176 - protein, 267 aa, Homo sapiens
ELEPEPRESRLPGAADMEGQSSRGSRRPGTRAGLGSLPMPQGVAQTGAPSKVDSSFQLPAKKNAALGPSEPRITVVTWNVGTAMPPDDVTSLLHLGGGDDSDGADMIAIGLQEVNSMLNKRLKDALFTDQWSELFMDALGPFNFVLVSSVRMQGVILLLFAKYYHLPFLRDVQTDCTRTGLGGYWGNKGGVSVRLAAFGHMLCFLNCHLPAHMDKAEQRKDNFQTILSLQQFQGPGAQGILDHDLVFWFRDLNFRYYEQWGTLDQHT

SEQ ID NO: 741177 - protein, 237 aa, Homo sapiens
SWSRSQGSPGCRGLQTWRARAAGAAGGQGPGLAWVPCPCPRVLPKLGHPPRITVVTWNVGTAMPPDDVTSLLHLGGGDDSDGADMIAIGLQEVNSMLNKRLKDALFTDQWSELFMDALGPFNFVLVTHPSPPGQPETLLNSWLQLYPGSLWGPLGLCGWVRDMGGWRSRPEGGREGGGVVFCPPATWPPAAGEFGEDAGCHPAAVRQVLPPALPARRADRLHAHWPGRLLGEPVSRP

SEQ ID NO: 741178 - protein, 654 aa, Homo sapiens
ELEPEPRESRLPGAADMEGQSSRGSRRPGTRAGLGSLPMPQGVAQTGAPSKVDSSFQLPAKKNAALGPSEPRITVVTWNVGTAMPPDDVTSLLHLGGGDDSDGADMIAIGLQEVNSMLNKRLKDALFTDQWSELFMDALGPFNFVLVSSVRMQGVILLLFAKYYHLPFLRDVQTDCTRTGLGGYWGNKGGVSVRLAAFGHMLCFLNCHLPAHMDKAEQRKDNFQTILSLQQFQGPGAQGILDHDLVFWFGDLNFRIESYDLHFVKFAIDSDQLHQLWEKDQLNMAKNTWPILKGFQEGPLNFAPTFKFDVGTNKYDTSAKKRKPAWTDRILWKVKAPGGGPSPSGRKSHRLQVTQHSYRSHMEYTVSDHKPVAAQFLLQFAFRDDMPLVRLEVADEWVRPEQAVVRYRMETVFARSSWDWIGLYRVGFRHCKDYVAYVWAKHEDVDGNTYQVTFSEESLPKGHGDFILGYYSHNHSILIGITEPFQISLPSSELASSSTDSSGTSSEGEDDSTLELLAPKSRSPSPGKSKRHRSRSPGLARFPGLALRPSSRERRGASRSPSPQSRRLSRVAPDRSSNGSSRGSSEEGPSGLPGPWAFPPAVPRSLGLLPALRLETVDPGGGGSWGPDREALAPNSLSPSPQGHRGLEEGGLGP

SEQ ID NO: 741179 - protein, 681 aa, Homo sapiens
ELEPEPRESRLPGAADMEGQSSRGSRRPGTRAGLGSLPMPQGVAQTGAPSKVDSSFQLPAKKNAALGPSEPRITVVTWNVGTAMPPDDVTSLLHLGGGDDSDGADMIAIGLQEVNSMLNKRLKDALFTDQWSELFMDALGPFNFVLVTHPSPPGQPETLLNSWLQLYPGSLWGPLGLCGWVRDMVGGGADLKVGARAGELCSVPQPRGLPLQGNKGGVSVRLAAFGHMLCFLNCHLPAHMDKAEQRKDNFQTILSLQQFQGPGAQGILDHDLVFWFGDLNFRIESYDLHFVKFAIDSDQLHQLWEKDQLNMAKNTWPILKGFQEGPLNFAPTFKFDVGTNKYDTSAKKRKPAWTDRILWKVKAPGGGPSPSGRKSHRLQVTQHSYRSHMEYTVSDHKPVAAQFLLQFAFRDDMPLVRLEVADEWVRPEQAVVRYRMETVFARSSWDWIGLYRVGFRHCKDYVAYVWAKHEDVDGNTYQVTFSEESLPKGHGDFILGYYSHNHSILIGITEPFQISLPSSELASSSTDSSGTSSEGEDDSTLELLAPKSRSPSPGKSKRHRSRSPGLARFPGLALRPSSRERRGASRSPSPQSRRLSRVAPDRSSNGSSRGSSEEGPSGLPGPWAFPPAVPRSLGLLPALRLETVDPGGGGSWGPDREALAPNSLSPSPQGHRGLEEGGLGP

SEQ ID NO: 741180 - protein, 106 aa, Homo sapiens
VSRSQLVIITPYKYNNFARDPYCPVCPKSYCYCTPFVLKDFATGIGGDFFFFETESRSVAQAGVQWRDLGSLQAPPPGFTPFSCLSLPSSWDYRRPPPRPANFLYF

SEQ ID NO: 741181 - protein, 81 aa, Homo sapiens
FRIQGLFLFALIIQRTMNQAFSLCCHCILPFPPSVIDPCHSHCNLIERETVTLKKEIEDRLTPWKLRQTDKKNGRNTENDR

SEQ ID NO: 741182 - protein, 132 aa, Homo sapiens
MLIEDVDALKSWLAKLLEPICDADPSALANYVVALVKKDKPEKELKAFCADQLDVFLQKETSGFVDKLFESLYTKNYLPLLEPVKPEPKPLVQEKEEIKEEVFQEPAEEERDGRKKKYPSPQKTRSESSERR

SEQ ID NO: 741183 - protein, 413 aa, Homo sapiens
MGTFCSVIKFENLQELKRLCHWGPIIALGVIAICSTMAMIDSVLWYWPLHTTGGSVNFIMLINWTVMILYNYFNAMFVGPGFVPLGWKPEISQDTMYLQYCKVCQAYKAPRSHHCRKCNRCVMKMDHHCPWINNCCGYQNHASFTLFLLLAPLGCIHAAFIFVMTMYTQLYHRLSFGWNTVKIDMSAARRDPLPIVPFGLAAFATTLFALGLALGTTIAVGMLFFIQMKIILRNKTSIESWIEEKAKDRIQYYQLDEVFVFPYDMGSRWRNFKQVFTWSGVPEGDGLEWPVREGCHQYSLTIEQLKQKADKRVRSVRYKVIEDYSGACCPLNKGIKTFFTSPCTEEPRIQLQKGEFILATRGLRYWLYGDKILDDSFIEGVSRIRGWFPRKCVEKCPCDAETDQAPEGEKKNR

SEQ ID NO: 741184 - protein, 413 aa, Homo sapiens; identical to SEQ ID NO: 741183

SEQ ID NO: 741185 - protein, 317 aa, Homo sapiens
MGTFCSVIKFENLQELKRLCHWGPIIALGVIAICSTMAMIDSVLWYWPLHTTGGSVNFIMLINWTVMILYNYFNAMFVGPGFVPLGWKPEISQDTMYLQYCKVCQAYKAPRSHHCRKCNRCVMKMDHHCPWINNCCGYQNHASFTLFLLLAPLGCIHAAFIFVMTMYTQLYHRLSFGWNTVKIDMSAARRDPLPIVPFGLAAFATTLFALGLALGTTIAVGMLFFIQMKIILRNKTSIESWIEEKAKDRIQYYQLDEVFVFPYDMGSRWRNFKQVFTWSGVPEGDGLEWPVREGCHQYSLTFVCHVSTESVNLSVFT

SEQ ID NO: 741186 - protein, 263 aa, Homo sapiens
MGTFCSVIKFENLQELKRLCHWGPIIALGVIAICSTMAMIDSVLWYWPLHTTGGSVNFIMLINWTVMILYNYFNAMFVGPGFVPLGWKPEISQDTMYLQYCKVCQAYKAPRSHHCRKCNRCVMKMDHHCPWINNCCGYQNHASFTLFLLLAPLGCIHAAFIFVMTMYTQLYHRMKIILRNKTSIESWIEEKAKDRIQYYQLDEVFVFPYDMGSRWRNFKQVFTWSGVPEGDGLEWPVREGCHQYSLTFVCHVSTESVNLSVFT

SEQ ID NO: 741187 - protein, 446 aa, Homo sapiens
MGTFCSVIKFENLQELKRLCHWGPIIALGVIAICSTMAMIDSVLWYWPLHTTGGSVNFIMLINWTVMILYNYFNAMFVGPGFVPLGWKPEISQDTMYLQYCKVCQAYKAPRSHHCRKCNRCVMKMDHHCPWINNCCGYQNHASFTLFLLLAPLGCIHAAFIFVMTMYTQLYHRLSFGWNTVKIDMSAARRDPLPIVPFGLAAFATTLFALGLALGTTIAVGMLFFIQMKIILRNKTSIESWIEEKAKDRIQYYQLDEVFVFPYDMGSRWRNFKQVFTWSGVPEGDGLEWPVREGCHQYSLTFVCHVSTESVNLSVFTMRSFMRAENILPDPWATIEQLKQKADKRVRSVRYKVIEDYSGACCPLNKGIKTFFTSPCTEEPRIQLQKGEFILATRGLRYWLYGDKILDDSFIEGVSRIRGWFPRKCVEKCPCDAETDQAPEGEKKNR

SEQ ID NO: 741188 - protein, 413 aa, Homo sapiens; identical to SEQ ID NO: 741183

SEQ ID NO: 741189 - protein, 413 aa, Homo sapiens; identical to SEQ ID NO: 741183

SEQ ID NO: 741190 - protein, 317 aa, Homo sapiens; identical to SEQ ID NO: 741185

SEQ ID NO: 741191 - protein, 153 aa, Homo sapiens
  misc_feature (126)..(126): Xaa can be any naturally occurring amino acid
  misc_feature (128)..(128): Xaa can be any naturally occurring amino acid
MGTFCSVIKFENLQELKRLCHWGPIIALGVIAICSTMAMIDSVLWYWPLHTTGGSVNFIMLINWTVMILYNYFNAMFVGPGFVPLGWKPEISQDTMYLQYCKVCQAYKAPRSHHCRKCNRCVMKMXHXCPWFKPLHSSLGDKRKTLSPQKEKH

SEQ ID NO: 741192 - protein, 413 aa, Homo sapiens; identical to SEQ ID NO: 741183

SEQ ID NO: 741193 - protein, 413 aa, Homo sapiens; identical to SEQ ID NO: 741183

SEQ ID NO: 741194 - protein, 413 aa, Homo sapiens; identical to SEQ ID NO: 741183

SEQ ID NO: 741195 - protein, 317 aa, Homo sapiens; identical to SEQ ID NO: 741185

SEQ ID NO: 741196 - protein, 90 aa, Homo sapiens
DEQNDTQKQFCEEQNTGILHDEILIHEEKQIEVVEKMNSELSLSCKKEKDFLHENSTLREEIAMLRLELDTMKHQSQLRKKKYLEDIESV

SEQ ID NO: 741197 - protein, 139 aa, Homo sapiens
QSRKLRNYITDLMSRARELTCSSPSLVPSPFTKIQMPPSGSLHEKVEAAREALARETTQRRRPQRKFALVQELSGQALGAGWERKLMSSYGGASSLHEDSELLQAESHLSHHVGHNVTHSGSIESIIRVGLPQTSFTST

SEQ ID NO: 741198 - protein, 464 aa, Homo sapiens
LTRWRDPQGFTSNYPSAGEGSAASKAALPFSKRRAKRRSFSTNIRAMAQESVMFSDVSVDFSQEEWECLNDDQRDLYRDVMLENYSNLVSMGHSISKPNVISYLEQGKEPWLADRELTRGQWPVLESRCETKKLFLKKEIYEIESTQWEIMEKLTRRDFQCSSFRDDWECNRQFKKELGSQGGHFNQLVFTHEDLPTLSHHPSFTLQQIINSKKKFCASKEYRKTFRHGSQFATHEIIHTIEKPYECKECGKSFRHPSRLTHHQKIHTGKKPFECKECGKTFICGSDLTRHHRIHTGEKPYECKECGKAFSSGSNFTRHQRIHTGEKPYECKECGKAFSSGSNFTQHQRIHTGEKPYECKECGNAFSQSSQLIKHQRIHTGEKPYECKECEKAFRSGSDLTRHQRIHTGEKPYECKICGKAYSQSSQLISHHRIHTSEKPYEYRECGKNFNYDPQLIQHQNLYW

SEQ ID NO: 741199 - protein, 367 aa, Homo sapiens
LTRWRDPQGFTSNYPSAGEGSAASKAVLESRCETKKLFLKKEIYEIESTQWEIMEKLTRRDFQCSSFRDDWECNRQFKKELGSQGGHFNQLVFTHEDLPTLSHHPSFTLQQIINSKKKFCASKEYRKTFRHGSQFATHEIIHTIEKPYECKECGKSFRHPSRLTHHQKIHTGKKPFECKECGKTFICGSDLTRHHRIHTGEKPYECKECGKAFSSGSNFTRHQRIHTGEKPYECKECGKAFSSGSNFTQHQRIHTGEKPYECKECGNAFSQSSQLIKHQRIHTGEKPYECKECEKAFRSGSDLTRHQRIHTGEKPYECKICGKAYSQSSQLISHHRIHTSEKPYEYRECGKNFNYDPQLIQHQNLYW

SEQ ID NO: 741200 - protein, 445 aa, Homo sapiens
SALCGGGALPFSKRRAKRRSFSTNIRAMAQESVMFSDVSVDFSQEEWECLNDDQRDLYRDVMLENYSNLVSMGHSISKPNVISYLEQGKEPWLADRELTRGQWPVLESRCETKKLFLKKEIYEIESTQWEIMEKLTRRDFQCSSFRDDWECNRQFKKELGSQGGHFNQLVFTHEDLPTLSHHPSFTLQQIINSKKKFCASKEYRKTFRHGSQFATHEIIHTIEKPYECKECGKSFRHPSRLTHHQKIHTGKKPFECKECGKTFICGSDLTRHHRIHTGEKPYECKECGKAFSSGSNFTRHQRIHTGEKPYECKECGKAFSSGSNFTQHQRIHTGEKPYECKECGNAFSQSSQLIKHQRIHTGEKPYECKECEKAFRSGSDLTRHQRIHTGEKPYECKICGKAYSQSSQLISHHRIHTSEKPYEYRECGKNFNYDPQLIQHQNLYW

SEQ ID NO: 741201 - protein, 390 aa, Homo sapiens
THALAGPSGLYQQLPQCRGGFCCFESCSTLLQKKSQEKVLFYKYQSHGSVLESRCETKKLFLKKEIYEIESTQWEIMEKLTRRDFQCSSFRDDWECNRQFKKELGSQGGHFNQLVFTHEDLPTLSHHPSFTLQQIINSKKKFCASKEYRKTFRHGSQFATHEIIHTIEKPYECKECGKSFRHPSRLTHHQKIHTGKKPFECKECGKTFICGSDLTRHHRIHTGEKPYECKECGKAFSSGSNFTRHQRIHTGEKPYECKECGKAFSSGSNFTQHQRIHTGEKPYECKECGNAFSQSSQLIKHQRIHTGEKPYECKECEKAFRSGSDLTRHQRIHTGEKPYECKICGKAYSQSSQLISHHRIHTSEKPYEYRECGKNFNYDPQLIQHQNLYW

SEQ ID NO: 741202 - protein, 349 aa, Homo sapiens
LTRWRDPQGFTSNYPSAGEGSAASKAALPFSKRRAKRRSFSTNIRAMAQESVMFSDVSVDFSQEEWECLNDDQRDLYRDVMLENYSNLVSMGHSISKPNVISYLEQGKEPWLADRELTRGQWPVLESRCETKKLFLKKEIYEIESTQWEIMEKLTRRDFQCSSFRDDWECNRQFKKELGSQGGHFNQLVFTHEDLPTLSHHPSFTLQQIINSKKKFCASKEYRKTFRHGSQFATHEIIHTIEKPYECKECGKSFRHPSRLTHHQKIHTGKKPFECKECGKTFICGSDLTRHHRIHTGEKPYECKECGKAFSSGSNFTRHQRIHTEKWITIHFPEICFFTFNCTFWIFLQ

SEQ ID NO: 741203 - protein, 136 aa, Homo sapiens
MQRQEGHRCSRCPRQPEAAGIQQQRGWAWNGPPEAGQRPGSWERLGRPGEGAAPAEAPPGSSSETLQAGGGFLGQCHPRQAPGAHRPPGHSGSSSGQGGRAECKPLLRRQTRRHEQVRRELPPAGRPRTLASASMS

SEQ ID NO: 741204 - protein, 106 aa, Homo sapiens
ILHLHWKPRRVLHMPETMRTLCEVQSMQDQVREGPSGPAPKPPRLGEAWTHESNSSPKQERIIRLDPWEAGCKTAELSQDVSPCSPIPPGHSKAQHALKGTVSQPR

SEQ ID NO: 741205 - protein, 186 aa, Homo sapiens
LPTREQKRRGPAGEEETGVSAPELGLWNGVGAVVCSIAGSSLGGTLLAKHWKLLPLLRSVLRFRLGGLACQTALVFHLDTLGASMDAGTILRGSALLSLCLQHFLGGLVTTVTFTGMMRCSQLAPRALQATHYSLLATLELLGKLLLGTLAGGLADGLGPHPCFLLLLILSAFPVLYLDLAPSTFL

SEQ ID NO: 741206 - protein, 163 aa, Homo sapiens
MASTRPRVHVVCSIAGSSLGGTLLAKHWKLLPLLRSVLRFRLGGLACQTALVFHLDTLGASMDAGTILRGSALLSLCLQHFLGGLVTTVTFTGMMRCSQLAPRALQATHYSLLATLELLGKLLLGTLAGGLADGLGPHPCFLLLLILSAFPVLYLDLAPSTFL

SEQ ID NO: 741207 - protein, 412 aa, Homo sapiens
MRGKLLPLAGLYLVQGLPYGLQSGLLPVLLRAGGLSLTRVGLAKVLYAPWLLKLAWAPLVDAQGSARAWVTRSTAGLGLVCGLLAGLPPPGAGQAGLPAAVAGLLLLLNLGAAMQDVALDALAVQLLEPAELGPGNTVQVVAYKLGAALAGGALLALLPTFSWPQLFLLLAATYWLAAALAWAAPALRRLPQQPPSEQRPHTAHLLRDVLAVPGTVWTAGFVLTYKLGEQGASSLFPLLLLDHGVSAPELGLWNGVGAVVCSIAGSSLGGTLLAKHWKLLPLLRSVLRFRLGGLACQTALVFHLDTLGASMDAGTILRGSALLSLCLQHFLGGLVTTVTFTGMMRCSQLAPRALQATHYSLLATLELLGKLLLGTLAGGLADGLGPHPCFLLLLILSAFPVLYLDLAPSTFL

SEQ ID NO: 741208 - protein, 233 aa, Homo sapiens
MRGKLLPLAGLYLVQGLPYGLQSGLLPVLLRAGGLSLTRVGLAKVLYAPWLLKLAWAPLVDAQGSARAWVTRSTAGLGLVCGLLAGLPPPGAGQAGLPAAVAGLLLLLNLGAAMQDVALDALAVQLLEPAELGPGNTVQVVAYKLGAALAGGALLALLPTFSWPQLFLLLAATYWLAAALAWAAPALRRLPQQPPSEQRPHTAHLLRDVLAVPGTVWTAGFVLTYKLGNCCLC

SEQ ID NO: 741209 - protein, 433 aa, Homo sapiens
MRGKLLPLAGLYLVQGLPYGLQSGLLPVLLRAGGLSLTRVGLAKVLYAPWLLKLAWAPLVDAQGSARAWVTRSTAGLGLVCGLLAGLPPPGAGQAGLPAAVAGLLLLLNLGAAMQDVALDALAVQLLEPAELGPGNTVQVVAYKLGAALAGGALLALLPTFSWPQLFLLLAATYWLAAALAWAAPALRRLPQQPPSEQRPHTAHLLRDVLAVPGTVWTAGFVLTYKLGEQGASSLFPLLLLDHGVSAPELGLWNGVGAVVCSIAGSSLGGTLLAKHWKLLPLLRSVLRFRLGGLACQTALVFHLDTLGASMDAGTILRGSALLSLCLQHFLGGLVTTVTFTGMMRCSQLAPRALQVSRCSRDTRETTGLGLCGPDLDRDPHPPPHTTAFWPRWSCWGSCCWALWPEAWLMGWGHIPASCSCSSSLPFPFCTWT

SEQ ID NO: 741210 - protein, 436 aa, Homo sapiens
MRGKLLPLAGLYLVQGLPYGLQSGLLPVLLRAGGLSLTRVGLAKVLYAPWLLKLAWAPLVDAQGSARAWVTRSTAGLGLVCGLLAGLPPPGAGQAGLPAAVAGLLLLLNLGAAMQDVALDALAVQLLEPAELGPGNTVQVVAYKLGAALAGGALLALLPTFSWPQLFLLLAATYWLAAALAWAAPALRRLPQQPPSEQRPHTAHLLRDVLAVPGTVWTAGFVLTYKLGEQGASSLFPLLLLDHGVSAPELGLWNGVGAVVCSIAGSSLGGTLLAKHWKLLPLLRSVLRFRLGGLACQTALVFHLDTLGASMDAGTILRGEGLALEEEERGQEPGALLTSALPGSALLSLCLQHFLGGLVTTVTFTGMMRCSQLAPRALQATHYSLLATLELLGKLLLGTLAGGLADGLGPHPCFLLLLILSAFPVLYLDLAPSTFL

SEQ ID NO: 741211 - protein, 328 aa, Homo sapiens
MRGKLLPLAGLYLVQGLPYGLQSGLLPVLLRAGGLSLTRVGLAKVLYAPWLLKLAWAPLVDAQGSARAWVTRSTAGLGLVCGLLAGLPPPGAGQAGLPAAVAGLLLLLNLGAAMQDVALDALAVQLLEPAELGPGNTVQVVAYKLGAALAGGALLALLPTFSWPQLFLLLAATYWLAAALAWAAPALRRLPQQPPSEQRPHTAHLLRDVLAVPGTVWTAGFVLTYKLGEQGASSLFPLLLLDHGVSAPELGLWNGVGAVVCSIAGSSLGGTLLAKHWKLLPLLRSVLRFRLGGLACQTALVFRHTLQPSGHAGAAGEAAAGHSGRRPG

SEQ ID NO: 741212 - protein, 233 aa, Homo sapiens; identical to SEQ ID NO: 741208

SEQ ID NO: 741213 - protein, 216 aa, Homo sapiens
MRGKLLPLAGLYLVQGLPYGLQSGLLPVLLRAGGLSLTRVGLAKVLYAPWLLKLAWAPLVDAQGSARAWVTRSTAGLGLVCGLLAGLPPPGAGQAGLPAAVAGLLLLLNLGAAMQDVALDALAVQLLEPAELGPGNTVQVVAYKLGAALAGGALLALLPTFSWRIFCLVHYGGGLAGDSLGSQSPSRVPPALGLYRRAVRGVAQHGARLFGQVHGE

SEQ ID NO: 741214 - protein, 199 aa, Homo sapiens
  misc_feature (1)..(2): Xaa can be any naturally occurring amino acid
  misc_feature (61)..(61): Xaa can be any naturally occurring amino acid
XXSPRVKAAGLLLLSGRDAGSPEEYVIVLSCQWTALFPYQYEVIRFPHDNVVVSPTPTPQXKHWKLLPLLRSVLRFRLGGLACQTALVFHLDTLGASMDAGTILRGSALLSLCLQHFLGGLVTTVTFTGMMRCSQLAPRALQATHYSLLATLELLGKLLLGTLAGGLADGLGPHPCFLLLLILSAFPVLYLDLAPSTFL

SEQ ID NO: 741215 - protein, 123 aa, Homo sapiens
LQLWNTEESRAGLRAQVGRREVGADMEPPVLMPPPPPKVSRVPAACFLFSCWTTAFLLPSWDCGMVWVLWSAPSLAPPWVGPCWPSTGEPSPVYPAHPLVPELPPIHYTDPFPTPIPGNCCLC

SEQ ID NO: 741216 - protein, 224 aa, Homo sapiens [sequence omitted]

SEQ ID NO: 741217 - protein, 145 aa, Homo sapiens
MGCGGSRADAIEPRYYESWTRETESTWLTYTDSDAPPSAAAPDSGPEAGGLHSGMLEDGLPSNGVPRSTAPGGIPNPEKKTNCETQCPNPQSLSSGPLTQKQNGLQTTEAKRDAKRMPAKEVTINVTDSIQQMDRSRRITKNCVN

SEQ ID NO: 741218 - protein, 224 aa, Homo sapiens [sequence omitted]

SEQ ID NO: 741219 - protein, 259 aa, Homo sapiens
MGTGGEGGPWRRRGGTGWERARTRGGGHRRSSARLQRGRERGRDVAAAASLRAGAAPPGLSRRQSRQPSSRWALPRRRRMGCGGSRADAIEPRYYESWTRETESTWLTYTDSDAPPSAAAPDSGPEAGGLHSVLEAEKSKIKAPTDSVSDEGLFSASKMAPLAVFSHGMLEDGLPSNGVPRSTAPGGIPNPEKKTNCETQCPNPQSLSSGPLTQKQNGLQTTEAKRDAKRMPAKEVTINVTDSIQQMDRSRRITKNCVN

SEQ ID NO: 741220 - protein, 215 aa, Homo sapiens
MKISENLQEPKNSSPPCCMPWSVVKENILFHSSSSALETQALHSKAPGIVHQHQQFSAKSISQNLFYLFQFLSFHRIVFLQVIADSHTALQIHVQLWSECAVFSQNSSLKLNPQCDSINSCGLLESEGGALVSGIRALIKEIEGSYLALPSLLPCEDTVFIPFVFPPFEDAERRCHLGSKEQPSPDTKSAGTLILDFPASRTVRNEFLLFINYLV

SEQ ID NO: 741221 - protein, 224 aa, Homo sapiens [sequence omitted]

SEQ ID NO: 741222 - protein, 191 aa, Homo sapiens
MGTGGEGGPWRRRGGTGWERARTRGGGHRRSSARLQRGRERGRDVAAAASLRAGAAPPGLSRRQSRQPSSRWALPRRRRMGCGGSRADAIEPRYYESWTRETESTWLTYTDSDAPPSAAAPDSGPEAGGLHSGMLEDGLPSNGVPRSTAPGGIPNPEKKTNCETQCPNPQSLSSGPLTQKQNGLQTTEVAF

SEQ ID NO: 741223 - protein, 106 aa, Homo sapiens
RWPGSVQCATRGLYRLSKNLEEMNPFQRPSKGSPAYTGISRNRNLGFILEVVEAFGGLNQDSTCGFPAMGSSFKRTSQALHPDCDVSSCSSLGCFWIASPMRTALK

SEQ ID NO: 741224 - protein, 224 aa, Homo sapiens [sequence omitted]

SEQ ID NO: 741225 - protein, 224 aa, Homo sapiens [sequence omitted]

SEQ ID NO: 741226 - protein, 106 aa, Homo sapiens; identical to SEQ ID NO: 741223

SEQ ID NO: 741227 - protein, 273 aa, Homo sapiens
ARGEEEGRGLEDTNMNKLKSSQKDKVRQFMIFTQSSEKTAVSCLSQNDWKLDVATDNFFQNPELYIRESVKGSLDRKKLEQLYNRYKDPQDENKIGIDGIQQFCDDLALDPASISVLIIAWKFRAATQCEFSKQEFMDGMTELGCDSIEKLKAQIPKMEQELKEPGRFKDFYQFTFNFAKNPGQKGLDLEMAIAYWNLVLNGRFKFLDLWNKFLLEHHKRSIPKDTWNLLLDFSTMIADDMSNYDEEGAWPVLIDDFVEFARPQIAGTKSTTV

SEQ ID NO: 741228 - protein, 273 aa, Homo sapiens; identical to SEQ ID NO: 741227

SEQ ID NO: 741229 - protein, 206 aa, Homo sapiens
ELEARVNNKLKSSQKDKVRQFMIFTQSSEKTAVSCLSQNDWKLDVATDNFFQNPELYIRESVKGSLDRKKLEQLYNRYKDPQDENKIGIDGIQQFCDDLALDPASISVLIIAWKFRAATQCEFSKQEFMDGMTELGCDSIEKLKAQIPKMEQELKEPGRFKDFYQFTFNFAKNPGQKGLDLRNGHLSTGSLVLKWKNGKYFRLSGN

SEQ ID NO: 741230 - protein, 273 aa, Homo sapiens; identical to SEQ ID NO: 741227

SEQ ID NO: 741231 - protein, 244 aa, Homo sapiens
MIFTQSSEKTAVSCLSQNDWKLDVATDNFFQNPELYIRESVKGSLDRKKLEQLYNRYKDPQDENKIGIDGIQQFCDDLALDPASISVLIIAWKFRAATQCEFSKQEFMDGMTELGCDSIEKLKAQIPKMEQELKEPGRFKDFYQFTFNFAKNPGQKGLDLEMAIAYWNLVLNGRFKFLDLWNKFLLEHHKRSIPKDTWNLLLDFSTMIADDMSNYDEEGAWPVLIDDFVEFARPQIAGTKSTTV

SEQ ID NO: 741232 - protein, 273 aa, Homo sapiens; identical to SEQ ID NO: 741227

SEQ ID NO: 741233 - protein, 134 aa, Homo sapiens
MTELGCDSIEKLKAQIPKMEQELKEPGRFKDFYQFTFNFAKNPGQKGLDLEMAIAYWNLVLNGRFKFLDLWNKFLLEHHKRSIPKDTWNLLLDFSTMIADDMSNYDEEGAWPVLIDDFVEFARPQIAGTKSTTV

SEQ ID NO: 741234 - protein, 271 aa, Homo sapiens
TRGSTTRRGRVGRNKLKSSQKDKVRQFMIFTQSSEKTAVSCLSQNDWKLDVATDNFFQNPELYIRESVKGSLDRKKLEQLYNRYKDPQDENKIGIDGIQQFCDDLALDPASISVLIIAWKFRAATQCEFSKQEFMDGMTELGCDSIEKLKAQIPKMEQELKEPGRFKDFYQFTFNFAKNPGQKGLDLEMAIAYWNLVLNGRFKFLDLWNKFLLEHHKRSIPKDTWNLLLDFSTMIADDMSNYDEEGAWPVLIDDFVEFARPQIAGTKSTTV

SEQ ID NO: 741235 - protein, 273 aa, Homo sapiens; identical to SEQ ID NO: 741227

SEQ ID NO: 741236 - protein, 245 aa, Homo sapiens
YIFILTMPEIPKIHEFEYEIQFESEAMKSKLESCVALYMIEKSYDIMAKRITFIFNLVFTPKKPLRSHITLKIECVTEGIWKFPIMLIATEPDTDAVIDIEGVGLFKESVFELRLKSQTRNPEPFTAHFLPGSDLEFFVKPQAGELLPFNTNGTLITVGFKPKMYCRKYKATLVIQTEEMYWKYEINGLTPTTVPPKNAKAKIDATHKTHDNMPVRPHNFVRENTKLIRTGVSSTIKGAPLVKNQ

SEQ ID NO: 741237 - protein, 191 aa, Homo sapiens
YIFILTMPEIPKIHEFEYEIQFESEAMKSKLESCVALYMIEKSYDIMAKRITFIFNLVFTPKKPLRNPEPFTAHFLPGSDLEFFVKPQAGELLPFNTNGTLITVGFKPKMYCRKYKATLVIQTEEMYWKYEINGLTPTTVPPKNAKAKIDATHKTHDNMPVRPHNFVRENTKLIRTGVSSTIKGAPLVKNQ

SEQ ID NO: 741238 - protein, 92 aa, Homo sapiens
TAFGPNLCQSVMYANSGYSINGRIKMCFNKGSHGFDNVLMDMKTFRAFGPDFKRNGLAEPFNDIHIYPFMCKLLGVTPKPTTAPWQSPRKCS

SEQ ID NO: 741239 - protein, 173 aa, Homo sapiens
MYANSGYSINGRIKMCFNKGSHGFDNVLMDMKTFRAFGPDFKRNGLAEPFNDIHIYPFMCKLLGVTPKPSNGSLAVTQEMLVNSYDQQPGETQKQLPENCQQSLLCPEIEKKQKVVSWWGGGNSSRTILIPSSFGALGTRCQQLQTDSTGGRESLDLLVTFDIVPFRQREGAL

SEQ ID NO: 741240 - protein, 149 aa, Homo sapiens
QARGEKGRQPAGAACVFECASVSECECRVLPLLVPPAEGPGGLGRAGGLLGGRGSKRRRRGEPRRRRRREERAEQPLLRETLQTKKAPDSPRPPAPQAGPLAPGPRPSGHCNFPPGQRPPRGGPRLCVRVFVRPADWSSQSGLPVPLGT

SEQ ID NO: 741241 - protein, 145 aa, Homo sapiens
YEKSNCICNPTLSFIEGKEPQMTSQFCPPSACDSLSSSPTPMVCIFLTSPPQEQLSRMRGGEAPSLRERGEKGAALLLYFWFCFSWAGMGWERGSATFLQNLPSAPPTAYVIPHRISSTPAATFGRVLSQELREGVRKVDIPSQL

SEQ ID NO: 741242 - protein, 489 aa, Homo sapiens
RAHTQRPLAFLPGFLPVCSAPDRPLAAARGRPHRAEAGPGRRRAQRGPRAAAAAHARPVPARGGHRDSAGPPEAGDVKMSVGCACPGCSSKSFKLYSPKEPPNGNAFPPFHPGTMLDRDVGPTPMYPPTYLEPGIGRHTPYGNQTDYRIFELNKRLQNWTEECDNLWWDAFTTEFFEDDAMLTITFCLEDGPKRYTIGRTLIPRYFRSIFEGGATELYYVLKHPKEAFHSNFVSLDCDQGSMVTQHGKPMFTQVCVEGRLYLEFMFDDMMRIKTWHFSIRQHRELIPRSILAMHAQDPQMLDQLSKNITRCGLSNSTLNYLRLCVILEPMQELMSRHKTYSLSPRDCLKTCLFQKWQRMVAPPAEPTRQQPSKRRKRKMSGGSTMSSGGGNTNNSNSKKKSPASTFALSSQVPDVMVVGEPTLMGGEFGDEDERLITRLENTQFDAANGIDDEDSFNNSPALGANSPWNSKPPSSQESKSENPTSQASQ

SEQ ID NO: 741243 - protein, 316 aa, Homo sapiens
MLDRDVGPTPMYPPTYLEPGIGRHTPYGNQTDYRIFELNKRLQNWTEECDNLWWDAFTTEFFEDDAMLTITFCLEDGPKRYTIGRTLIPRYFRSIFEGGATELYYVLKHPKEAFHSNFVSLDCDQGSMVTQHGKPMFTQVCVEGRLYLEFMFDDMMRIKTWHFSIRQHRELIPRSILAMHAQDPQMLDQLSKNITRCGLSNSTLNYLRLCVILEPMQELMSRHKTYSLSPRDCLKTCLFQKWQRMVAPPAEPTRQQPSKRRKRKMSGGSTMSSGGGNTNNSNSKKKSPASTFALSSQVPVSISAFFSLLGCPTTHP

SEQ ID NO: 741244 - protein, 438 aa, Homo sapiens
  misc_feature (3)..(3): Xaa can be any naturally occurring amino acid
MFXAHGLLWCLKCATCRKTSSLVTSVLSMDSWLRMSLGTSVLVRTESPDRVQRRFNPVSLTSAMLDRDVGPTPMYPPTYLEPGIGRHTPYGNQTDYRIFELNKRLQNWTEECDNLWWDAFTTEFFEDDAMLTITFCLEDGPKRYTIGRTLIPRYFRSIFEGGATELYYVLKHPKEAFHSNFVSLDCDQGSMVTQHGKPMFTQVCVEGRLYLEFMFDDMMRIKTWHFSIRQHRELIPRSILAMHAQDPQMLDQLSKNITRCGLSNSTLNYLRLCVILEPMQELMSRHKTYSLSPRDCLKTCLFQKWQRMVAPPAEPTRQQPSKRRKRKMSGGSTMSSGGGNTNNSNSKKKSPASTFALSSQVPDVMVVGEPTLMGGEFGDEDERLITRLENTQFDAANGIDDEDSFNNSPALGANSPWNSKPPSSQESKSENPTSQASQ

SEQ ID NO: 741245 - protein, 371 aa, Homo sapiens
MMWANSQCIRYNLEPGIGRHTPYGNQTDYRIFELNKRLQNWTEECDNLWWDAFTTEFFEDDAMLTITFCLEDGPKRYTIGRTLIPRYFRSIFEGGATELYYVLKHPKEAFHSNFVSLDCDQGSMVTQHGKPMFTQVCVEGRLYLEFMFDDMMRIKTWHFSIRQHRELIPRSILAMHAQDPQMLDQLSKNITRCGLSNSTLNYLRLCVILEPMQELMSRHKTYSLSPRDCLKTCLFQKWQRMVAPPAEPTRQQPSKRRKRKMSGGSTMSSGGGNTNNSNSKKKSPASTFALSSQVPDVMVVGEPTLMGGEFGDEDERLITRLENTQFDAANGIDDEDSFNNSPALGANSPWNSKPPSSQESKSENPTSQASQ

SEQ ID NO: 741246 - protein, 375 aa, Homo sapiens
MLDRDVGPTPMYPPTYLEPGIGRHTPYGNQTDYRIFELNKRLQNWTEECDNLWWDAFTTEFFEDDAMLTITFCLEDGPKRYTIGRTLIPRYFRSIFEGGATELYYVLKHPKEAFHSNFVSLDCDQGSMVTQHGKPMFTQVCVEGRLYLEFMFDDMMRIKTWHFSIRQHRELIPRSILAMHAQDPQMLDQLSKNITRCGLSNSTLNYLRLCVILEPMQELMSRHKTYSLSPRDCLKTCLFQKWQRMVAPPAEPTRQQPSKRRKRKMSGGSTMSSGGGNTNNSNSKKKSPASTFALSSQVPDVMVVGEPTLMGGEFGDEDERLITRLENTQFDAANGIDDEDSFNNSPALGANSPWNSKPPSSQESKSENPTSQASQ

SEQ ID NO: 741247 - protein, 315 aa, Homo sapiens
MLDRDVGPTPMYPPTYLEPGIGRHTPYGNQTDYRIFELNKRLQNWTEECDNLWWDAFTTEFFEDDAMLTITFCLEDGPKRYTIGRTLIPRYFRSIFEGGATELYYVLKHPKEAFHSNFVSLDCDQGSMVTQHGKPMFTQVCVEGRLYLEFMFDDMMRIKTWHFSIRQHRELIPRSILAMHAQDPQMLDQLSKNITRCGLSNSTLNYLRLCVILEPMQELMSRHKTYSLSPRDCLKTCLFQKWQRMVAPPAEPTRQQPSKRRKRKMSGGSTMSSGGGNTNNSNSKKKSGVNPGGGACGEPEIAPLHSSLGDRARLR

SEQ ID NO: 741248 - protein, 323 aa, Homo sapiens
MLDRDVGPTPMYPPTYLEPGIGRHTPYGNQTDYRIFELNKRLQNWTEECDNLWWDAFTTEFFEDDAMLTITFCLEDGPKRYTIGRTLIPRYFRSIFEGGATELYYVLKHPKEAFHSNFVSLDCDQGSMVTQHGKPMFTQVCVEGRLYLEFMFDDMMRIKTWHFSIRQHRELIPRSILAMHAQDPQMLDQLSKNITRCGLSNSTLNYLRLCVILEPMQELMSRHKTYSLSPHPCQDSSGVAVAPPYLSWCPQQRGPVAWGGRAGCSEAEAARGGGGEAEKEEEERGKSGAAIVEGNLANKEGSGLPAAPRPPGRPPGPRPTAQW

SEQ ID NO: 741249 - protein, 217 aa, Homo sapiens
MLDRDVGPTPMYPPTYLEPGIGRHTPYGNQTDYRIFELNKRLQNWTEECDNLWWDAFTTEFFEDDAMLTITFCLEDGPKRYTIGRTLIPRYFRSIFEGGATELYYVLKHPKEAFHSNFVSLDCDQGSMVTQHGKPMFTQVCVEGRLYLEFMFDDMMRIKTWHFSIRQHRELIPRSILAMHAQDPQMLDQLSKNITRCGLSNSTLNYLRLCVILEPMQ

SEQ ID NO: 741250 - protein, 181 aa, Homo sapiens
MLDRDVGPTPMYPPTYLEPGIGRHTPYGNQTDYRIFELNKRLQNWTEECDNLWWDAFTTEFFEDDAMLTITFCLEDGPKRYTIGRTLIPRYFRSIFEGGATELYYVLKHPKEAFHSNFVSLDCDQGSMVTQHGKPMFTQVCVEGRLYLEFMFDDMMRIKTWHFSIRQHRELIPRSILAMHF

SEQ ID NO: 741251 - protein, 171 aa, Homo sapiens
MLDRDVGPTPMYPPTYLEPGIGRHTPYGNQTDYRIFELNKRLQNWTEECDNLWWDAFTTEFFEDDAMLTITFCLEDGPKRYTIGRTLIPRYFRSIFEGGATELYYVLKHPKEAFHSNFVSLDCDQGSMVTQHGKPMFTQVSNPAGCGTPWHLGLIPILSPSVYSQLFPREA

SEQ ID NO: 741252 - protein, 375 aa, Homo sapiens; identical to SEQ ID NO: 741246

SEQ ID NO: 741253 - protein, 149 aa, Homo sapiens; identical to SEQ ID NO: 741240

SEQ ID NO: 741254 - protein, 467 aa, Homo sapiens
RGARRAPARPPPPPPHVSWQRASAGGGEQHELLKLSPRQPSPLPGLLWACSRSPVPLLAPSVLPGCSSKSFKLYSPKEPPNGNAFPPFHPGTMLDRDVGPTPMYPPTYLEPGIGRHTPYGNQTDYRIFELNKRLQNWTEECDNLWWDAFTTEFFEDDAMLTITFCLEDGPKRYTIGRTLIPRYFRSIFEGGATELYYVLKHPKEAFHSNFVSLDCDQGSMVTQHGKPMFTQVCVEGRLYLEFMFDDMMRIKTWHFSIRQHRELIPRSILAMHAQDPQMLDQLSKNITRCGLSNSTLNYLRLCVILEPMQELMSRHKTYSLSPRDCLKTCLFQKWQRMVAPPAEPTRQQPSKRRKRKMSGGSTMSSGGGNTNNSNSKKKSPASTFALSSQVPDVMVVGEPTLMGGEFGDEDERLITRLENTQFDAANGIDDEDSFNNSPALGANSPWNSKPPSSQESKSENPTSQASQ

SEQ ID NO: 741255 - protein, 375 aa, Homo sapiens; identical to SEQ ID NO: 741246

SEQ ID NO: 741256 - protein, 90 aa, Homo sapiens
GDSMLWFTVRVFSHPLPAGPPASWVYIVGLSMCPTAPTSQRGCFPGPDHDSHKEGLRARPLGLLWPGKLCVSVLIPSPAVSRVIGEFPQS

SEQ ID NO: 741257 - protein, 182 aa, Homo sapiens
MSQKPAKEGPRLSKNQKYSEHFSIHCCPPFTFLNSKKEIVDRKYSICKSGCFYQKKEEDWICCACQKTRTSRRAKSPQRPKQQPAAPPAVVRAPAKPRSPPRSERQPRSPPRSERQPRSPPRSERQPRSPPRSERQPRPRPEVRPPPAKQRPPQKSKQQPRSSPLRGPGASRGGSPVKASRF

SEQ ID NO: 741258 - protein, 182 aa, Homo sapiens; identical to SEQ ID NO: 741257

SEQ ID NO: 741259 - protein, 183 aa, Homo sapiens
MSQKPAKEGPRLSKNQKYSEHFSIHCCPPFTFLNSKKEIVDRKYSICKSGCFYQKKEEDWICCACQKTRTSRRAKSPQRPKQQPAAPPAVVRAPAKPRSPPRSERQPRSPPRSERQPRSPPRSERQPRSPPRSERQPRPRPEVRPPPAKQRPPQKSKQQPRSSPLRGPGASRGGSPVKASRFW

SEQ ID NO: 741260 - protein, 182 aa, Homo sapiens; identical to SEQ ID NO: 741257

SEQ ID NO: 741261 - protein, 182 aa, Homo sapiens; identical to SEQ ID NO: 741257

SEQ ID NO: 741262 - protein, 182 aa, Homo sapiens; identical to SEQ ID NO: 741257

SEQ ID NO: 741263 - protein, 227 aa, Homo sapiens
LRTPLFPLVGSGLGSDTGRHSRETGRWVGEQGLPTCFQLLPASLKQQRRALAPASSFFVALSEPAAVPSPLRGPSNSQLRPPRWSERQPSHGPLRGLSVSHGPLRGLSVSHGPLRGLSVSHGPLRGLSVSHVPAQRSDHRQPSSVPLRSPSNSRAAAPSEGQAPAVGGPPSKLLGSGNTISSLLFPSPKIEKEDQANPKEEVTKEEFKLNEQPRLLDSLLHNPSTPG

SEQ ID NO: 741264 - protein, 183 aa, Homo sapiens; identical to SEQ ID NO: 741259

SEQ ID NO: 741265 - protein, 134 aa, Homo sapiens [sequence omitted]

SEQ ID NO: 741266 - protein, 141 aa, Homo sapiens
METAGAATGQPASGLEAPGSTNDRLFLVKGGIFLGTVAAAGMLAGFITTLSLAKKKSPEWFNKGSMATAALPESGSSLALRALGWGSLYAWCGVGVISFAVWKALGVHSMNDFRSKMQSIFPTIPKNSESAVEWEETLKSK

SEQ ID NO: 741267 - protein, 138 aa, Homo sapiens
HEHSWTPEPPAQRPAAQLQRPLSPCLGGIFLGTVAAAGMLAGFITTLSLAKKKSPEWFNKGSMATAALPESGSSLALRALGWGSLYAWCGVGVISFAVWKALGVHSMNDFRSKMQSIFPTIPKNSESAVEWEETLKSK

SEQ ID NO: 741268 - protein, 190 aa, Homo sapiens
METAGAATGQPASGLEAPGSTNDRLFLVKGGIFLGTVAAAGMLAGFITTLSLAKKKSPEWFNKGSMATAALPESGSSLALRALGWGSLYAWCGVGVISFAVWKALGVHSNFLKKLEQSFMCVCCQELVYQPVTTECFHNVCKDCLQRSFKAQVFSCPAAGMIFGQNYIMIPNEILQTLLDLFFPGYSKGR

SEQ ID NO: 741269 - protein, 455 aa, Homo sapiens
KEAPSPFQALFSDIPPRYPFQALPPHYGRPYPFLLQPTAAADADGLAPDVPLPADGPERLALSPEDKPIRLSPSKITEPLREGPEEEPLAEREVKAEVEDMDEGPTELPPLESPLPLPAAEAMATPSPAGGCGGGLLEAQALSATGQSCAEPSECPDFVEGPEPRVDSPGRTEPCTAALDLGVQLTPETLVEAKEEPVEVPVAVPVVEAVPEEGLAQVAPSESQPTLEMSDCDVPAGEGQCPSLEPQEAVPVLGSTCFLEEASSDQFLPSLEDPLAGMNALAAAAELPQARPLPSPGAAGAQALEKLEAAESLVLEQSFLHGITLLSEIAELELERRSQEMGAHPKASHRAWDRAARCQLAYLTVPGALPPPSQDGLDLGNRAGWGCSPECLSKAPGGEGPAQAHPGPNPHTTENPNGAETVARPRLAPPHPGGRWHFLTCTVLLYQETRPAPVS

SEQ ID NO: 741270 - protein, 49 aa, Homo sapiens
MFCPQNRGKGGAVSKLMESMAAEEDFEPNQDSSFSEDEHLPRGGAVERP

SEQ ID NO: 741271 - protein, 105 aa, Homo sapiens
MAPLCCFLLQKKKGKEAGPGAGLPPPRAPALPSEARAPHASSLTAAKRSKAKAKGKEVKKENRGKGGAVSKLMESMAAEEDFEPNQDSSFSEDEHLPRGGAVERP

SEQ ID NO: 741272 - protein, 1361 aa, Homo sapiens
KEAPSPFQALFSDIPPRYPFQALPPHYGRPYPFLLQPTAAADADGLAPDVPLPADGPERLALSPEDKPIRLSPSKITEPLREGPEEEPLAEREVKAEVEDMDEGPTELPPLESPLPLPAAEAMATPSPAGGCGGGLLEAQALSATGQSCAEPSECPDFVEGPEPRVDSPGRTEPCTAALDLGVQLTPETLVEAKEEPVEVPVAVPVVEAVPEEGLAQVAPSESQPTLEMSDCDVPAGEGQCPSLEPQEAVPVLGSTCFLEEASSDQFLPSLEDPLAGMNALAAAAELPQARPLPSPGAAGAQALEKLEAAESLVLEQSFLHGITLLSEIAELELERRSQEMGGAERALVARPSLESLLAAGSHMLREVLDGPVVDPLKNLRLPRELKPNKKYSWMRKKEERMYAMKSSLEDMDALELDFRMRLAEVQRQYKEKQRELVKLQRRRDSEDRREEPHRSLARRGPGRPRKRTHAPSALSPPRKRGKSGHSSGKLSSKSLLTSDDYELGAGIRKRHKGSEEEHDALIGMGKARGRNQTWDEHEASSDFISQLKIKKKKMASDQEQLASKLDKALSLTKQDKLKSPFKFSDSAGGKSKTSGGCGRYLTPYDSLLGKNRKALAKGLGLSLKSSREGKHKRAAKTRKMEVGFKARGQPKSAHSPFASEVSSYSYNTDSEEDEEFLKDEWPAQGPSSSKLTPSLLCSMVAKNSKAAGGPKLTKRGLAAPRTLKPKPATSRKQPFCLLLREAEARSSFSDSSEESFDQDESSEEEDEEEELEEEDEASGGGYRLGARERALSPGLEESGLGLLARFAASALPSPTVGPSLSVVQLEAKQKARKKEERQSLLGTEFEYTDSESEVKVRKRSPAGLLRPKKGLGEPGPSLAAPTPGARGPDPSSPDKAKLAVEKGRKARKLRGPKEPGFEAGPEASDDDLWTRRRSERIFLHDASAAAPAPVSTAPATKTSRCAKGGPLSPRKDAGRAKDRKDPRKKKKGKEAGPGAGLPPPRAPALPSEARAPPSSSSSSSSSSSSSSSSSSSSSSSSSSSSSSSSSSSSSSSSSSSSSSSSSSTTDEDSSCSSDDEAAPAPTAGPSAQAALPTKATKQAGKARPSAHSPGKKTPAPQPQAPPPQPTQPLQPKAQAGAKSRPKKREGVHLPTTKELAKRQRLPSVENRPKIAAFLPARQLWKWFGKPTQRRGMKGKARKLFYKAIVRGKEMIRIGDCAVFLSAGRPNLPYIGRIQSMWESWGNNMVVRVKWFYHPEETSPGKQFHQGQHWDQKSSRSLPAALRVSSQRKDFMERALYQSSHVDENDVQTVSHKCLVVGLEQYEQMLKTKKYQDSEGLYYLAGTYEPTTGMIFSTDGVPVLC

SEQ ID NO: 741273 - protein, 399 aa, Homo sapiens
MLSHFSFCTYMLHFWLIMEENLQHYTVKLGCIHPFKWHQYRCRHPCCLTLQSQLSVHWQPSNTPSSSSSSSSSSSSSSSSSSSSSSSSSSSSSSSSSSSSSSTTDEDSSCSSDDEAAPAPTAGPSAQAALPTKATKQAGKARPSAHSPGKKTPAPQPQAPPPQPTQPLQPKAQAGAKSRPKKREGVHLPTTKELAKRQRLPSVENRPKIAAFLPARQLWKWFGKPTQRRGMKGKARKLFYKAIVRGKEMIRIGDCAVFLSAGRPNLPYIGRIQSMWESWGNNMVVRVKWFYHPEETSPGKQFHQGQHWDQKSSRSLPAALRVSSQRKDFMERALYQSSHVDENDVQTVSHKCLVVGLEQYEQMLKTKKYQDSEGLYYLAGTYEPTTGMIFSTDGVPVLC

SEQ ID NO: 741274 - protein, 826 aa, Homo sapiens
RPLTPAPRSCIIDKDELKDGLRVLIPMDDKLLYAGHVQTVHSPDIYRVVVEGERGNRPHIYCLEQLLQEAIIDVRPASTRFLPQGTRIAAYWSQQYRCLYPGTVVRGLLDLEDDGDLITVEFDDGDTGRIPLSHIRLLPPDYKIQCAEPSPALLVPSAKRRSRKTSKDTGEGKDGGTAGSEEPGAKARGRGRKPSAKAKGDRAATLEEGNPTDEVPSTPLALEPSSTPGSKKSPPEPVDKRAKAPKARPAPPQPSPAPPAFTSCPAPEPFAELPAPATSLAPAPLITMPATRPKPKKARAAEESGAKGPRRPGEEAELLVKLDHEGVTSPKSKKAKEALLLREDPGAGGWQEPKSLLSLGSYPPAAGSSEPKAPWPKATDGDLAQEPGPGLTFEDSGNPKSPDKAQAEQDGAEESESSSSSSSGSSSSSSSSSSSGSETEGEEEGDKNGDGGCGTGGRNCSAASSRAAFTGLLLLLLILVLLLLLLLILLFLLLLFLLLLFLFVFLLFLLLLFLVLILLLLLLFLLFFLHHSEDSSCSSDDEAAPAPTAGPSAQAALPTKATKQAGKARPSAHSPGKKTPAPQPQAPPPQPTQPLQPKAQAGAKSRPKKREGVHLPTTKELAKRQRLPSVENRPKIAAFLPARQLWKWFGKPTQRRGMKGKARKLFYKAIVRGKEMIRIGDCAVFLSAGRPNLPYIGRIQSMWESWGNNMVVRVKWFYHPEETSPGKQFHQGQHWDQKSSRSLPAALRVSSQRKDFMERALYQSSHVDENDVQTVSHKCLVVGLEQYEQMLKTKKYQDSEGLYYLAGTYEPTTGMIFSTDGVPVLC

SEQ ID NO: 741275 - protein, 186 aa, Homo sapiens
MPDRLWKCFGKPTQRRGMKGKARKLFYKAIVRGKEMIRIGDCAVFLSAGRPNLPYIGRIQSMWESWGNNMVVRVKWFYHPEETSPGKQFHQGQHWDQKSSRSLPAALRVSSQRKDFMERALYQSSHVDENDVQTVSHKCLVVGLEQYEQMLKTKKYQDSEGLYYLAGTYEPTTGMIFSTDGVPVLC

SEQ ID NO: 741276 - protein, 107 aa, Homo sapiens
ERSGRCREIPGGMGPGVHVDARVSVCACTCVHACAHASSPTFQPLSAPRTGAPLSYQGMAGPALPAQHVASTWPGRPSRLLLRGGPGAPRSMQTGDSVGRGASKEPN

SEQ ID NO: 741277 - protein, 761 aa, Homo sapiens
KEAPSPFQALFSDIPPRYPFQALPPHYGRPYPFLLQPTAAADADGLAPDVPLPADGPERLALSPEDKPIRLSPSKITEPLREGPEEEPLAEREVKAEVEDMDEGPTELPPLESPLPLPAAEAMATPSPAGGCGGGLLEAQALSATGQSCAEPSECPDFVEGPEPRVDSPGRTEPCTAALDLGVQLTPETLVEAKEEPVEVPVAVPVVEAVPEEGLAQVAPSESQPTLEMSDCDVPAGEGQCPSLEPQEAVPVLGSTCFLEEASSDQFLPSLEDPLAGMNALAAAAELPQARPLPSPGAAGAQALEKLEAAESLVLEQSFLHGITLLSEIAELELERRSQEMGGAERALVARPSLESLLAAGSHMLREVLDGPVVDPLKNLRLPRELKPNKKYSWMRKKEERMYAMKSSLEDMDALELDFRMRLAEVQRQYKEKQRELVKLQRRRDSEDRREEPHRSLARRGPGRPRKRTHAPSALSPPRKRGKSGHSSGKLSSKSLLTSDDYELGAGIRKRHKGSEEEHDALIGMGKARGRNQTWDEHEASSDFISQLKIKKKKMASDQEQLASKLDKALSLTKQDKLKSPFKFSDSAGGKSKTSGGCGRYLTPYDSLLGKNRKALAKGLGLSLKSSREGKHKRAAKTRKMEVGFKARGQPKSAHSPFASEVSSYSYNTDSEEDEEFLKDEWPAQGPSSSKLTPSLLCSMVAKNSKAAGGPKLTKRGLAAPRTLKPKPATSRKQPFCLLLREAEARSSFSDSSEESFDQGY

SEQ ID NO: 741278 - protein, 1091 aa, Homo sapiens
KEAPSPFQALFSDIPPRYPFQALPPHYGRPYPFLLQPTAAADADGLAPDVPLPADGPERLALSPEDKPIRLSPSKITEPLREGPEEEPLAEREVKAEVEDMDEGPTELPPLESPLPLPAAEAMATPSPAGGCGGGLLEAQALSATGQSCAEPSECPDFVEGPEPRVDSPGRTEPCTAALDLGVQLTPETLVEAKEEPVEVPVAVPVVEAVPEEGLAQVAPSESQPTLEMSDCDVPAGEGQCPSLEPQEAVPVLGSTCFLEEASSDQFLPSLEDPLAGMNALAAAAELPQARPLPSPGAAGAQALEKLEAAESLVLEQSFLHGITLLSEIAELELERRSQEMGGAERALVARPSLESLLAAGSHMLREVLDGPVVDPLKNLRLPRELKPNKKYSWMRKKEERMYAMKSSLEDMDALELDFRMRLAEVQRQYKEKQRELVKLQRRRDSEDRREEPHRSLARRGPGRPRKRTHAPSALSPPRKRGKSGHSSGKLSSKSLLTSDDYELGAGIRKRHKGSEEEHDALIGMGKARGRNQTWDEHEASSDFISQLKIKKKKMASDQEQLASKLDKALSLTKQDKLKSPFKFSDSAGGKSKTSGGCGRYLTPYDSLLGKNRKALAKGLGLSLKSSREGKHKRAAKTRKMEVGFKARGQPKSAHSPFASEVSSYSYNTDSEEDEEFLKDEWPAQGPSSSKLTPSLLCSMVAKNSKAAGGPKLTKRGLAAPRTLKPKPATSRKQPFCLLLREAEARSSFSDSSEESFDQDESSEEEDEEEELEEEDEASGGGYRLGARERALSPGLEESGLGLLARFAASALPSPTVGPSLSVVQLEAKQKARKKEERQSLLGTEFEYTDSESEVKVRKRSPAGLLRPKKGLGEPGPSLAAPTPGARGPDPSSPDKAKLAVEKGRKARKLRGPKEPGFEAGPEASDDDLWTRRRSERIFLHDASAAAPAPVSTAPATKTSRCAKGGPLSPRKDAGRAKDRKDPRKVPATVSKGRHWKKKGKEAGPGAGLPPPRAPALPSEARAPHASSLTAAKRSKAKAKGKEVKKENRGKGGAVSKLMESMAAEEDFEPNQDSSFSEDEHLPRGGAVERP

SEQ ID NO: 741279 - protein, 1018 aa, Homo sapiens
KEAPSPFQALFSDIPPRYPFQALPPHYGRPYPFLLQPTAAADADGLAPDVPLPADGPERLALSPEDKPIRLSPSKITEPLREGPEEEPLAEREVKAEVEDMDEGPTELPPLESPLPLPAAEAMATPSPAGGCGGGLLEAQALSATGQSCAEPSECPDFVEGPEPRVDSPGRTEPCTAALDLGVQLTPETLVEAKEEPVEVPVAVPVVEAVPEEGLAQVAPSESQPTLEMSDCDVPAGEGQCPSLEPQEAVPVLGSTCFLEEASSDQFLPSLEDPLAGMNALAAAAELPQARPLPSPGAAGAQALEKLEAAESLVLEQSFLHGITLLSEIAELELERRSQEMGGAERALVARPSLESLLAAGSHMLREVLDGPVVDPLKNLRLPRELKPNKKYSWMRKKEERMYAMKSSLEDMDALELDFRMRLAEVQRQYKEKQRELVKLQRRRDSEDRREEPHRSLARRGPGRPRKRTHAPSALSPPRKRGKSGHSSGKLSSKSLLTSDDYELGAGIRKRHKGSEEEHDALIGMGKARGRNQTWDEHEASSDFISQLKIKKKKMASDQEQLASKLDKALSLTKQDKLKSPFKFSDSAGGKSKTSGGCGRYLTPYDSLLGKNRKALAKGLGLSLKSSREGKHKRAAKTRKMEVGFKARGQPKSAHSPFASEVSSYSYNTDSEEDEEFLKDEWPAQGPSSSKLTPSLLCSMVAKNSKAAGGPKLTKRGLAAPRTLKPKPATSRKQPFCLLLREAEARSSFSDSSEESFDQDESSEEEDEEEELEEEDEASGGGYRLGARERALSPGLEESGLGLLARFAASALPSPTVGPSLSVVQLEAKQKARKKEERQSLLGTEFEYTDSESEVKVRKRSPAGLLRPKKGLGEPGPSLAAPTPGARGPDPSSPDKAKLAVEKGRKARKLRGPKEPGFEAGPEASDDDLWTRRRSERIFLHDASAAAPAPVSTAPATKTSRCAKGGPLSPRKDAGRAKDRKDPRKVGAALGGGAAEGSLGFREGGALSPPSLGKRLHC

SEQ ID NO: 741280 - protein, 1018 aa, Homo sapiens; identical to SEQ ID NO: 741279

SEQ ID NO: 741281 - protein, 697 aa, Homo sapiens
KEAPSPFQALFSDIPPRYPFQALPPHYGRPYPFLLQPTAAADADGLAPDVPLPADGPERLALSPEDKPIRLSPSKITEPLREGPEEEPLAEREVKAEVEDMDEGPTELPPLESPLPLPAAEAMATPSPAGGCGGGLLEAQALSATGQSCAEPSECPDFVEGPEPRVDSPGRTEPCTAALDLGVQLTPETLVEAKEEPVEVPVAVPVVEAVPEEGLAQVAPSESQPTLEMSDCDVPAGEGQCPSLEPQEAVPVLGSTCFLEEASSDQFLPSLEDPLAGMNALAAAAELPQARPLPSPGAAGAQALEKLEAAESLVLEQSFLHGITLLSEIAELELERRSQEMGGAERALVARPSLESLLAAGSHMLREVLDGPVVDPLKNLRLPRELKPNKKYSWMRKKEERMYAMKSSLEDMDALELDFRMRLAEVQRQYKEKQRELVKLQRRRDSEDRREEPHRSLARRGPGRPRKRTHAPSALSPPRKRGKSGHSSGKLSSKSLLTSDDYELGAGIRKRHKGSEEEHDALIGMGKARGRNQTWDEHEASSDFISQLKIKKKKMASDQEQLASKLDKALSLTKQDKLKSPFKFSDSAGGKSKTSGGCGRYLTPYDSLLGKNRKALAKGLGLSLKSSREGKHKRAAKTRKMEVGFKARGQPKSAHSPFASEVSSYSYITFSAHPETPGLVRALFGHGFGGGFPRNIL

SEQ ID NO: 741282 - protein, 399 aa, Homo sapiens; identical to SEQ ID NO: 741273

SEQ ID NO: 741283 - protein, 386 aa, Homo sapiens
MAPLCCFLLQKKKGKEAGPGAGLPPPRAPALPSEARAPPSSSSSSSSSSSSSSSSSSSSSSSSSSSSSSSSSSSSSSSSSSSSSSSSSSTTDEDSSCSSDDEAAPAPTAGPSAQAALPTKATKQAGKARPSAHSPGKKTPAPQPQAPPPQPTQPLQPKAQAGAKSRPKKREGVHLPTTKELAKRQRLPSVENRPKIAAFLPARQLWKWFGKPTQRRGMKGKARKLFYKAIVRGKEMIRIGDCAVFLSAGRPNLPYIGRIQSMWESWGNNMVVRVKWFYHPEETSPGKQFHQGQHWDQKSSRSLPAALRVSSQRKDFMERALYQSSHVDENDVQTVSHKCLVVGLEQYEQMLKTKKYQDSEGLYYLAGTYEPTTGMIFSTDGVPVLC

SEQ ID NO: 741284 - protein, 761 aa, Homo sapiens; identical to SEQ ID NO: 741277

SEQ ID NO: 741285 - protein, 1321 aa, Homo sapiens
KEAPSPFQALFSDIPPRYPFQALPPHYGRPYPFLLQPTAAADADGLAPDVPLPADGPERLALSPEDKPIRLSPSKITEPLREGPEEEPLAEREVKAEVEDMDEGPTELPPLESPLPLPAAEAMATPSPAGGCGGGLLEAQALSATGQSCAEPSECPDFVEGPEPRVDSPGRTEPCTAALDLGVQLTPETLVEAKEEPVEVPVAVPVVEAVPEEGLAQVAPSESQPTLEMSDCDVPAGEGQCPSLEPQEAVPVLGSTCFLEEASSDQFLPSLEDPLAGMNALAAAAELPQARPLPSPGAAGAQALEKLEAAESLVLEQSFLHGITLLSEIAELELERRSQEMGGAERALVARPSLESLLAAGSHMLREVLDGPVVDPLKNLRLPRELKPNKKYSWMRKKEERMYAMKSSLEDMDALELDFRMRLAEVQRQYKEKQRELVKLQRRRDSEDRREEPHRSLARRGPGRPRKRTHAPSALSPPRKRGKSGHSSGKLSSKSLLTSDDYELGAGIRKRHKGSEEEHDALIGMGKARGRNQTWDEHEASSDFISQLKIKKKKMASDQEQLASKLDKALSLTKQDKLKSPFKFSDSAGGKSKTSGGCGRYLTPYDSLLGKNRKALAKGLGLSLKSSREGKHKRAAKTRKMEVGFKARGQPKSAHSPFASEVSSYSYNTDSEEDEEFLKDEWPAQGPSSSKLTPSLLCSMVAKNSKAAGGPKLTKRGLAAPRTLKPKPATSRKQPFCLLLREAEARSSFSDSSEESFDQDESSEEEDEEEELEEEDEASGGGYRLGARERALSPGLEESGLGLLARFAASALPSPTVGPSLSVVQLEAKQKARKKEERQSLLGTEFEYTDSESEVKVRKRSPAGLLRPKKGLGEPGPSLAAPTPGARGPDPSSPDKAKLAVEKGRKARKLRGPKEPGFEAGPEASDDDLWTRRRSERIFLHDASAAAPAPVSTAPATKTSRCAKGGPLSPRKDAGRAKDRKDPRKKKKGKEAGPGAGLPPPRAPALPSEARAPPSSSSSSSSSSSSSSSSSSSSSSSSSSSSSSSSSSSSSSSSSSSSSSSSSSTTDEDSSCSSDDEAAPAPTAGPSAQAALPTKATKQAGKARPSAHSPGKKTPAPQPQAPPPQPTQPLQPKAQAGAKSRPKKREGVHLPTTKELAKRQRLPSVENRPKIAAFLPARQLWKWFGKPTQRRGMKGKARKLFYKAIVRGKEMIRIGDCAVFLSAGRPNLPYIGRIQSMWESWGNNMVVRVKWFYHPEETSPGKQFHQGQHWDQKSSRAVLIPSPSLGVRCSPPRAVTNRAAVSHCVQVSSWVYFTNGLDVSG

SEQ ID NO: 741286 - protein, 1080 aa, Homo sapiens
KEAPSPFQALFSDIPPRYPFQALPPHYGRPYPFLLQPTAAADADGLAPDVPLPADGPERLALSPEDKPIRLSPSKITEPLREGPEEEPLAEREVKAEVEDMDEGPTELPPLESPLPLPAAEAMATPSPAGGCGGGLLEAQALSATGQSCAEPSECPDFVEGPEPRVDSPGRTEPCTAALDLGVQLTPETLVEAKEEPVEVPVAVPVVEAVPEEGLAQVAPSESQPTLEMSDCDVPAGEGQCPSLEPQEAVPVLGSTCFLEEASSDQFLPSLEDPLAGMNALAAAAELPQARPLPSPGAAGAQALEKLEAAESLVLEQSFLHGITLLSEIAELELERRSQEMGGAERALVARPSLESLLAAGSHMLREVLDGPVVDPLKNLRLPRELKPNKKYSWMRKKEERMYAMKSSLEDMDALELDFRMRLAEVQRQYKEKQRELVKLQRRRDSEDRREEPHRSLARRGPGRPRKRTHAPSALSPPRKRGKSGHSSGKLSSKSLLTSDDYELGAGIRKRHKGSEEEHDALIGMGKARGRNQTWDEHEASSDFISQLKIKKKKMASDQEQLASKLDKALSLTKQDKLKSPFKFSDSAGGKSKTSGGCGRYLTPYDSLLGKNRKALAKGLGLSLKSSREGKHKRAAKTRKMEVGFKARGQPKSAHSPFASEVSSYSYNTDSEEDEEFLKDEWPAQGPSSSKLTPSLLCSMVAKNSKAAGGPKLTKRGLAAPRTLKPKPATSRKQPFCLLLREAEARSSFSDSSEESFDQDESSEEEDEEEELEEEDEASGGGYRLGARERALSPGLEESGLGLLARFAASALPSPTVGPSLSVVQLEAKQKARKKEERQSLLGTEFEYTDSESEVKVRKRSPAGLLRPKKGLGEPGPSLAAPTPGARGPDPSSPDKAKLAVEKGRKARKLRGPKEPGFEAGPEASDDDLWTRRRSERIFLHDASAAAPAPVSTAPATKTSRCAKGGPLSPRKDAGRAKDRKDPRKKKKGKEAGPGAGLPPPRAPALPSEARAPHASSLTAAKRSKAKAKGKEVKKENRGKGGAVSKLMESMAAEEDFEPNQDSSFSEDEHLPRGGAVERP

SEQ ID NO: 741287 - protein, 1069 aa, Homo sapiens
KEAPSPFQALFSDIPPRYPFQALPPHYGRPYPFLLQPTAAADADGLAPDVPLPADGPERLALSPEDKPIRLSPSKITEPLREGPEEEPLAEREVKAEVEDMDEGPTELPPLESPLPLPAAEAMATPSPAGGCGGGLLEAQALSATGQSCAEPSECPDFVEGPEPRVDSPGRTEPCTAALDLGVQLTPETLVEAKEEPVEVPVAVPVVEAVPEEGLAQVAPSESQPTLEMSDCDVPAGEGQCPSLEPQEAVPVLGSTCFLEEASSDQFLPSLEDPLAGMNALAAAAELPQARPLPSPGAAGAQALEKLEAAESLVLEQSFLHGITLLSEIAELELERRSQEMGGAERALVARPSLESLLAAGSHMLREVLDGPVVDPLKNLRLPRELKPNKKYSWMRKKEERMYAMKSSLEDMDALELDFRMRLAEVQRQYKEKQRELVKLQRRRDSEDRREEPHRSLARRGPGRPRKRTHAPSALSPPRKRGKSGHSSGKLSSKSLLTSDDYELGAGIRKRHKGSEEEHDALIGMGKARGRNQTWDEHEASSDFISQLKIKKKKMASDQEQLASKLDKALSLTKQDKLKSPFKFSDSAGGKSKTSGGCGRYLTPYDSLLGKNRKALAKGLGLSLKSSREGKHKRAAKTRKMEVGFKARGQPKSAHSPFASEVSSYSYNTDSEEDEEFLKDEWPAQGPSSSKLTPSLLCSMVAKNSKAAGGPKLTKRGLAAPRTLKPKPATSRKQPFCLLLREAEARSSFSDSSEESFDQDESSEEEDEEEELEEEDEASGGGYRLGARERALSPGLEESGLGLLARFAASALPSPTVGPSLSVVQLEAKQKARKKEERQSLLGTEFEYTDSESEVKVRKRSPAGLLRPKKGLGEPGPSLAAPTPGARGPDPSSPDKAKLAVEKGRKARKLRGPKEPGFEAGPEASDDDLWTRRRSERIFLHDASAAAPAPVSTAPATKTSRCAKGGPLSPRKDAGRAKDRKDPRKKKKGKEAGPGAGLPPPRAPALPSEARAPHASSLTAAKRSKAKAKGKEVKKEVRLTVPWLGAVGGSAMLLWSGQGAPPAPLYSPS

SEQ ID NO: 741288 - protein, 630 aa, Homo sapiens
KEAPSPFQALFSDIPPRYPFQALPPHYGRPYPFLLQPTAAADADGLAPDVPLPADGPERLALSPEDKPIRLSPSKITEPLREGPEEEPLAEREVKAEVEDMDEGPTELPPLESPLPLPAAEAMATPSPAGGCGGGLLEAQALSATGQSCAEPSECPDFVEGPEPRVDSPGRTEPCTAALDLGVQLTPETLVEAKEEPVEVPVAVPVVEAVPEEGLAQVAPSESQPTLEMSDCDVPAGEGQCPSLEPQEAVPVLGSTCFLEEASSDQFLPSLEDPLAGMNALAAAAELPQARPLPSPGAAGAQALEKLEAAESLVLEQSFLHGITLLSEIAELELERRSQEMGGAERALVARPSLESLLAAGSHMLREVLDGPVVDPLKNLRLPRELKPNKKYSWMRKKEERMYAMKSSLEDMDALELDFRMRLAEVQRQYKEKQRELVKLQRRRDSEDRREEPHRSLARRGPGRPRKRTHAPSALSPPRKRGKSGHSSGKLSSKSLLTSDDYELGAGIRKRHKGSEEEHDALIGMGKARGRNQTWDEHEASSDFISQLKIKKKKMASDQEQLASKLDKALSLTKQDKLKSPFKFSDSAGGKSKTSGGCGRYLTPYDSLLGKNRKAHSRSRRRAASRPTRR

SEQ ID NO: 741289 - protein, 631 aa, Homo sapiens
MFGHGLKHLFHSRRRSREREHQTSQDSQQHQQQQGMSDHDSPDEKERSPEMHRVSYAMSLHDLPARPTAFNRVLQQIRSRPSIKRGASLHSSSGGGSSGSSSRRTKSSSLEPQRGSPHLLRKAPQDSSLAAILHQHQCRPRSSSTTDTALLLADGSNVYLLAEEAEGIGDKVDKGDLVALSLPAGHGDTDGPISLDVPDGAPDPQRTKAAIDHLHQKILKITEQIKIEQEARDDNVAEYLKLANNADKQQVSRIKQVFEKKNQKSAQTIAQLHKKLEHYRRRLKEIEQNGPSRQPKDVLRDMQQGLKDVGANVRAGISGFGGGVVEGVKGSLSGLSQATHTAVVSKPREFASLIRNKFGSADNIAHLKDPLEDGPPEEAARALSGSATLVSSPKYGSDDECSSASASSAGAGSNSGAGPGGALGSPKSNALYGAPGNLDALLEELREIKEGQSHLEDSMEDLKTQLQRDYTYMTQCLQEERYRYERLEEQLNDLTELHQNEMTNLKQELASMEEKVAYQSYERARDIQEAVESCLTRVTKLELQQQQQQVVQLEGVENANARALLGKFINVILALMAVLLVFVSTIANFITPLMKTRLRITSTTLLVLVLFLLWKHWDSLTYLLEHVLLPS

SEQ ID NO: 741290 - protein, 484 aa, Homo sapiens
MNQVVQPLMSRHSACRGSQAHLSWVDKGDLVALSLPAGHGDTDGPISLDVPDGAPDPQRTKAAIDHLHQKILKITEQIKIEQEARDDNVAEYLKLANNADKQQVSRIKQVFEKKNQKSAQTIAQLHKKLEHYRRRLKEIEQNGPSRQPKDVLRDMQQGLKDVGANVRAGISGFGGGVVEGVKGSLSGLSQATHTAVVSKPREFASLIRNKFGSADNIAHLKDPLEDGPPEEAARALSGSATLVSSPKYGSDDECSSASASSAGAGSNSGAGPGGALGSPKSNALYGAPGNLDALLEELREIKEGQSHLEDSMEDLKTQLQRDYTYMTQCLQEERYRYERLEEQLNDLTELHQNEMTNLKQELASMEEKVAYQSYERARDIQEAVESCLTRVTKLELQQQQQQVVQLEGVENANARALLGKFINVILALMAVLLVFVSTIANFITPLMKTRLRITSTTLLVLVLFLLWKHWDSLTYLLEHVLLPS

SEQ ID NO: 741291 - protein, 366 aa, Homo sapiens
MFGHGLKHLFHSRRRSREREHQTSQDSRQPKDVLRDMQQGLKDVGANVRAGISGFGGGVVEGVKGSLSGLSQATHTAVVSKPREFASLIRNKFGSADNIAHLKDPLEDGPPEEAARALSGSATLVSSPKYGSDDECSSASASSAGAGSNSGAGPGGALGSPKSNALYGAPGNLDALLEELREIKEGQSHLEDSMEDLKTQLQRDYTYMTQCLQEERYRYERLEEQLNDLTELHQNEMTNLKQELASMEEKVAYQSYERARDIQEAVESCLTRVTKLELQQQQQQVVQLEGVENANARALLGKFINVILALMAVLLVFVSTIANFITPLMKTRLRITSTTLLVLVLFLLWKHWDSLTYLLEHVLLPS

SEQ ID NO: 741292 - protein, 499 aa, Homo sapiens
PVLPSVCDPGGLTQSADSWGLRAPGTSSPARLRETVPTQVDKGDLVALSLPAGHGDTDGPISLDVPDGAPDPQRTKAAIDHLHQKILKITEQIKIEQEARDDNVAEYLKLANNADKQQVSRIKQVFEKKNQKSAQTIAQLHKKLEHYRRRLKEIEQNGPSRQPKDVLRDMQQGLKDVGANVRAGISGFGGGVVEGVKGSLSGLSQATHTAVVSKPREFASLIRNKFGSADNIAHLKDPLEDGPPEEAARALSGSATLVSSPKYGSDDECSSASASSAGAGSNSGAGPGGALGSPKSNALYGAPGNLDALLEELREIKEGQSHLEDSMEDLKTQLQRDYTYMTQCLQEERYRYERLEEQLNDLTELHQNEMTNLKQELASMEEKVAYQSYERARDIQEAVESCLTRVTKLELQQQQQQVVQLEGVENANARALLGKFINVILALMAVLLVFVSTIANFITPLMKTRLRITSTTLLVLVLFLLWKHWDSLTYLLEHVLLPS

SEQ ID NO: 741293 - protein, 709 aa, Homo sapiens
MKRCRSDELQQQQGEEDGAGLEDAASHLPGADLRPGETTGANSAGGPTSDAGAAAAPNPGPRSKPPDLKKIQQLSEGSMFGHGLKHLFHSRRRSREREHQTSQDSQQHQQQQGMSDHDSPDEKERSPEMHRVSYAMSLHDLPARPTAFNRVLQQIRSRPSIKRGASLHSSSGGGSSGSSSRRTKSSSLEPQRGSPHLLRKAPQDSSLAAILHQHQCRPRSSSTTDTALLLADGSNVYLLAEEAEGIGDKVDKGDLVALSLPAGHGDTDGPISLDVPDGAPDPQRTKAAIDHLHQKILKITEQIKIEQEARDDNVAEYLKLANNADKQQVSRIKQVFEKKNQKSAQTIAQLHKKLEHYRRRLKEIEQNGPSRQPKDVLRDMQQGLKDVGANVRAGISGFGGGVVEGVKGSLSGLSQATHTAVVSKPREFASLIRNKFGSADNIAHLKDPLEDGPPEEAARALSGSATLVSSPKYGSDDECSSASASSAGAGSNSGAGPGGALGSPKSNALYGAPGNLDALLEELREIKEGQSHLEDSMEDLKTQLQRDYTYMTQCLQEERYRYERLEEQLNDLTELHQNEMTNLKQELASMEEKVAYQSYERARDIQEAVESCLTRVTKLELQQQQQQVVQLEGVENANARALLGKFINVILALMAVLLVFVSTIANFITPLMKTRLRITSTTLLVLVLFLLWKHWDSLTYLLEHVLLPS

SEQ ID NO: 741294 - protein, 527 aa, Homo sapiens
PCLSERQFCCEKLPLERSSRPQDSAGQPVTLLTAHCPQLWTSVPLCWPLTEFPAGTVKMKSKEEETAVDKGDLVALSLPAGHGDTDGPISLDVPDGAPDPQRTKAAIDHLHQKILKITEQIKIEQEARDDNVAEYLKLANNADKQQVSRIKQVFEKKNQKSAQTIAQLHKKLEHYRRRLKEIEQNGPSRQPKDVLRDMQQGLKDVGANVRAGISGFGGGVVEGVKGSLSGLSQATHTAVVSKPREFASLIRNKFGSADNIAHLKDPLEDGPPEEAARALSGSATLVSSPKYGSDDECSSASASSAGAGSNSGAGPGGALGSPKSNALYGAPGNLDALLEELREIKEGQSHLEDSMEDLKTQLQRDYTYMTQCLQEERYRYERLEEQLNDLTELHQNEMTNLKQELASMEEKVAYQSYERARDIQEAVESCLTRVTKLELQQQQQQVVQLEGVENANARALLGKFINVILALMAVLLVFVSTIANFITPLMKTRLRITSTTLLVLVLFLLWKHWDSLTYLLEHVLLPS

SEQ ID NO: 741295 - protein, 484 aa, Homo sapiens; identical to SEQ ID NO: 741290

SEQ ID NO: 741296 - protein, 591 aa, Homo sapiens [sequence omitted]

SEQ ID NO: 741297 - protein, 591 aa, Homo sapiens [sequence omitted]

SEQ ID NO: 741298 - protein, 245 aa, Homo sapiens
RITSSVVLPQDSEREAIEVFMKNSFKDVDQMFQRKLGAQLEARRDDFCKQNSKASSDCCMALLQDIFGPLEEDVKQGTFSKPGGYRLFTQKLQELKNKYYQVPRKGIQAKEVLKKYLESKEDVADALLQTDQSLSEKEKAIEVERIKAESAEAAKKMLEEIQKKNEEMMEQKEKSYQEHVKQLTEKMERDRAQLMAEQEKTLALKLQEQERLLKEGFENESKRLQKDIWDIQMRSKSLEPICNIL

SEQ ID NO: 741299 - protein, 186 aa, Homo sapiens [sequence omitted]

SEQ ID NO: 741300 - protein, 578 aa, Homo sapiens
MAPEINLPGPMSLIDNTKGQLVVNPEALKILSAITQPVVVVAIVGLYRTGKSYLMNKLAGKKNGFSLGSTVKSHTKGIWMWCVPHPKKPEHTLVLLDTEGLGDIEKGDNENDSWIFALAILLSSTFVYNSMGTINQQAMDQLHYVTELTDRIKANSSPGNNSVDDSADFVSFFPAFVWTLRDFTLELEVDGEPITADDYLELSLKLRKGTDKKSKSFNDPRLCIRKFFPKRKCFVFDWPAPKKYLAHLEQLKEEELNPDFIEQVAEFCSYILSHSNVKTLSGGIAVNGPRLESLVLTYVNAIGSGDLPCMENAVLALAQIENSAAVEKAIAHYEQQMGQKVQLPTETLQELLDLHRDSEREAIEVFMKNSFKDVDQMFQRKLGAQLEARRDDFCKQNSKASSDCCMALLQDIFGPLEEDVKQGTFSKPGGYRLFTQKLQELKNKYYQVPRKGIQAKEVLKKYLESKEDVADALLQTDQSLSEKEKAIEVERIKAESAEAAKKMLEEIQKKNEEMMEQKEKSYQEHVKQLTEKMERDRAQLMAEQEKTLALKLQVAHRCSRIVREPYSTAIPPRIILPL

SEQ ID NO: 741301 - protein, 563 aa, Homo sapiens
MAPEINLPGPMSLIDNTKGQLVVNPEALKILSAITQPVVVVAIVGLYRTGKSYLMNKLAGKKNGFSLGSTVKSHTKGIWMWCVPHPKKPEHTLVLLDTEGLGDIEKGDNENDSWIFALAILLSSTFVYNSMGTINQQAMDQLHYVTELTDRIKANSSPGNNSVDDSADFVSFFPAFVWTLRDFTLELEVDGEPITADDYLELSLKLRKGTDKKSKSFNDPRLCIRKFFPKRKCFVFDWPAPKKYLAHLEQLKEEELNPDFIEQVAEFCSYILSHSNVKTLSGGIAVNGPRLESLVLTYVNAIGSGDLPCMENAVLALAQIENSAAVEKAIAHYEQQMGQKVQLPTETLQELLDLHRDSEREAIEVFMKNSFKDVDQMFQRKLGAQLEARRDDFCKQNSKASSDCCMALLQDIFGPLEEDVKQGTFSKPGGYRLFTQKLQELKNKYYQVPRKGIQAKEVLKKYLESKEDVADALLQTDQSLSEKEKAIEVERIKAESAEAAKKMLEEIQKKNEEMMEQKEKSYQEHVKQLTEKMERDRAQLMAEQEKTLALKLQNRNAFSRRVS

SEQ ID NO: 741302 - protein, 270 aa, Homo sapiens
IQKKNEVMMEQKEKSYQEHVKQLTEKMERDRAQLMAEQEKTLALKLQEQERLLKEGFENESKRLQKDIGDDFCKQNSKASSDCCMALLQDIFGPLEEDVKQGTFSKPGGYRLFTQKLQELKNKYYQVPRKGIQAKEVLKKYLESKEDVADALLQTDQSLSEKEKAIEVERIKAESAEAAKKMLEEIQKKNEEMMEQKEKSYQEHVKQLTEKMERDRAQLMAEQEKTLALKLQEQERLLKEGFENESKRLQKDIWDIQMRSKSLEPICNIL

SEQ ID NO: 741303 - protein, 434 aa, Homo sapiens
MAPEINLPGPMSLIDNTKGQLVVNPEALKILSAITQPVVVVAIVGLYRTGKSYLMNKLAGKKNGFSLGSTVKSHTKGIWMWCVPHPKKPEHTLVLLDTEGLGDIEKGDNENDSWIFALAILLSSTFVYNSMGTINQQAMDQLHYVTELTDRIKANSSPGNNSVDDSADFVSFFPAFVWTLRDFTLELEVDGEPITADDYLELSLKLRKGTDKKSKSFNDPRLCIRKFFPKRKCFVFDWPAPKKYLAHLEQLKEEELNPDFIEQVAEFCSYILSHSNVKTLSGGIAVNGPRLESLVLTYVNAIGSGDLPCMENAVLALAQIENSAAVEKAIAHYEQQMGQKVQLPTETLQELLDLHRDSEREAIEVFMKNSFKDVDQMFQRKLGAQLEARRDDFCKQNSKASSDCCMALLQDIFGPLEEDVKQGFRLHGGSSRFD

SEQ ID NO: 741304 - protein, 205 aa, Homo sapiens
MSVDPMTYEAQFFGFTPQTCMLRIYIAFQDYLFEVMQAVEQVILKKLDGIPDCDISPVQIRKCTEKFFCFMKGDFDNLFSKMEQLFLQLILRIPSNILLPEDKCKETPYSEEDFQHLQKEIEQLQEKYKTELCTKQALLAELEEQKIVQAKLKQTLTFFDELHNVGRDHGTSDFRESLVSLVQNSRKLQNIRDNVEKESKRLKIS

SEQ ID NO: 741305 - protein, 373 aa, Homo sapiens
MAVKWTGGHSSPVLCLNASKEGLLASGAEGGDLTAWGEDGTPLGHTRFQGADDVTSVLFSPSCPTKLYASHGETISVLDVRSLKDSLDHFHVNEEEINCLSLNQTENLLASADDSGAIKILDLENKKVIRSLKRHSNICSSVAFRPQRPQSLVSCGLDMQVMLWSLQKARPLWITNLQEDETEEMEGPQSPGQLLNPALAHSISVASCGNIFSCGAEDGKVRIFRVMGVKCEQELGFKGHTSGVSQVCFLPESYLLLTGGNDGKITLWDANSEVEKKQKSPTKRTHRKKPKRGTCTKQGGNTNASVTDEEEHGNILPKLNIEHGEKVNWLLGTKIKGHQNAGITGVSHHAQPNSLFLIVALYHILQMCESAMD

SEQ ID NO: 741306 - protein, 358 aa, Homo sapiens
MAVKWTGGHSSPVLCLNASKEGLLASGAEGGDLTAWGEDGTPLGHTRFQGADDVTSVLFSPSCPTKLYASHGETISVLDVRSLKDSLDHFHVNEEEINCLSLNQTENLLASADDSGAIKILDLENKKVIRSLKRHSNICSSVAFRPQRPQSLVSCGLDMQVMLWSLQKARPLWITNLQEDETEEMEGPQSPGQLLNPALAHSISVASCGNIFSCGAEDGKVRIFRVMGVKCEQELGFKGHTSGVSQVCFLPESYLLLTGGNDGKITLWDANSEVEKKQKSPTKRTHRKKPKRGTCTKQGGNTNASVTDEEEHGNILPKLNIEHGEKVNWLLGTKIKGHQNILVADQTSCISVYPLNEF

SEQ ID NO: 741307 - protein, 374 aa, Homo sapiens
MRLQLFPPLHRVSGTIMAVKWTGGHSSPVLCLNASKEGLLASGAEGGDLTAWGEDGTPLGHTRFQGADDVTSVLFSPSCPTKLYASHGETISVLDVRSLKDSLDHFHVNEEEINCLSLNQTENLLASADDSGAIKILDLENKKVIRSLKRHSNICSSVAFRPQRPQSLVSCGLDMQVMLWSLQKARPLWITNLQEDETEEMEGPQSPGQLLNPALAHSISVASCGNIFSCGAEDGKVRIFRVMGVKCEQELGFKGHTSGVSQVCFLPESYLLLTGGNDGKITLWDANSEVEKKQKSPTKRTHRKKPKRGTCTKQGGNTNASVTDEEEHGNILPKLNIEHGEKVNWLLGTKIKGHQNILVADQTSCISVYPLNEF

SEQ ID NO: 741308 - protein, 358 aa, Homo sapiens; identical to SEQ ID NO: 741306

SEQ ID NO: 741309 - protein, 222 aa, Homo sapiens
DARRDWAPAGEVITRRRGGEREAQVMLWSLQKARPLWITNLQEDETEEMEGPQSPGQLLNPALAHSISVASCGNIFSCGAEDGKVRIFRVMGVKCEQELGFKGHTSGVSQVCFLPESYLLLTGGNDGKITLWDANSEVEKKQKSPTKRTHRKKPKRGTCTKQGGNTNASVTDEEEHGNILPKLNIEHGEKVNWLLGTKIKGHQNILVADQTSCISVYPLNEF

SEQ ID NO: 741310 - protein, 373 aa, Homo sapiens; identical to SEQ ID NO: 741305

SEQ ID NO: 741311 - protein, 358 aa, Homo sapiens; identical to SEQ ID NO: 741306

SEQ ID NO: 741312 - protein, 358 aa, Homo sapiens; identical to SEQ ID NO: 741306

SEQ ID NO: 741313 - protein, 176 aa, Homo sapiens
MAVKWTGGHSSPVLCLNASKEGLLASGAEGGDLTAWGEDGTPLGHTRFQGADDVTSVLFSPSCPTKLYASHGETISVLDVRSLKDSLDHFHVNEEEINCLSLNQTENLLASADDSGAIKILDLENKKVIRSLKRHSNICSSVAFRPQRPQSLVSCGLDMQVMLLHRVLGEFLSGIC

SEQ ID NO: 741314 - protein, 132 aa, Homo sapiens
SVDGKQLEGFEEGWCDLTRILESSRWLKCGGKKQGAEVEVRGSQLGGYRSSPDQTGGWLGPQRSWWGRLESDQVRANRTFFFRLGLACCPGCSALVQSWLTAALTSWIKVSSHLSAAREAGAGELLEPGRQK

SEQ ID NO: 741315 - protein, 198 aa, Homo sapiens
MAQKGVLGPGQLGAVAILLYLGLLRSGTGAEGAEAPCGVAPQARITGGSSAVAGQWPWQVSITYEGVHVCGGSLVSEQWVLSAAHCFPSEHHKEAYEVKLGAHQLDSYSEDAKVSTLKDIIPHPSYLQEGSQGRHCTPPTQQTHHLLPLHPAHLPPCSQRLLPQRPPLHCHWLGSCGPLSEPPDAQATAATRGASDQS

SEQ ID NO: 741316 - protein, 186 aa, Homo sapiens
  misc_feature (159)..(159): Xaa can be any naturally occurring amino acid
  misc_feature (185)..(185): Xaa can be any naturally occurring amino acid
MAQKGVLGPGQLGAVAILLYLGLLRSGTGAEGAEAPCGVAPQARITGGSSAVAGQWPWQVSITYEGVHVCGGSLVSEQWVLSAAHCFPSEHHKEAYEVKLGAHQLDSYSEDAKVSTLKDIIPHPSYLQEGSQGRHCTPPTQQTHHLLPLHPAHLPPLAXPNGLPFPQTGLSNWQLGHLGLGGSMXG

SEQ ID NO: 741317 - protein, 108 aa, Homo sapiens
QASNDVRGHGPAHWPSSWGAPGTLGYENEPWLPPVSGRLLPARLPRLMSTSLCPLPVFWAGATFVQLRGQERPQSCPLAAERPRALTPGLRRTEPPPELGWRLDLGWE

SEQ ID NO: 741318 - protein, 198 aa, Homo sapiens; identical to SEQ ID NO: 741315

SEQ ID NO: 741319 - protein, 198 aa, Homo sapiens; identical to SEQ ID NO: 741315

SEQ ID NO: 741320 - protein, 198 aa, Homo sapiens; identical to SEQ ID NO: 741315

SEQ ID NO: 741321 - protein, 198 aa, Homo sapiens; identical to SEQ ID NO: 741315

SEQ ID NO: 741322 - protein, 123 aa, Homo sapiens
MVCAGYVEGGKDACQGDSGGPLSCPVEGLWYLTGIVSWGDACGARNRPGVYTLASSYASWIQSKVTELQPRVVPQTQESQPDSNLCGSHLAFSSAPAQGLLRPILFLPLGLALGLLSPWLSEH

SEQ ID NO: 741323 - protein, 198 aa, Homo sapiens; identical to SEQ ID NO: 741315

SEQ ID NO: 741324 - protein, 184 aa, Homo sapiens
ELGSLALLGALLFWGHVAPSVSLLTPKPLQQLEVPLISRETCNCLYNIDAKPEEPHFVQEDMVCAGYVEGGKDACQGDSGGPLSCPVEGLWYLTGIVSWGDACGARNRPGVYTLASSYASWIQSKVTELQPRVVPQTQESQPDSNLCGSHLAFSSAPAQGLLRPILFLPLGLALGLLSPWLSEH

SEQ ID NO: 741325 - protein, 180 aa, Homo sapiens
  misc_feature (149)..(149): Xaa can be any naturally occurring amino acid
  misc_feature (174)..(174): Xaa can be any naturally occurring amino acid
MAQKGVLGPGQLGAVAILLYLGLLRSGTGAEGAEAPCGVAPQARITGGSSAVAGQWPWQVSITYEGVHVCGGSLVSEQWVLSAAHCFPSEHHKEAYEVKLGAHQLDSYSEDAKVSTLKDIIPHPSYLQEGSQGRHCTPPVSTSQVGLQXAPTMPRIQNFVYHSPQQPRCENRIXPLVPEL

SEQ ID NO: 741326 - protein, 123 aa, Homo sapiens [sequence omitted]

SEQ ID NO: 741327 - protein, 89 aa, Homo sapiens
LILDVPRSSCYTRQLNDRWAKGELPLLGARKVTNLKMLLPAQILNASSQQLRGLPFAISTTASCQHRYRSQRCEQTMESTLSLAVVYIF

SEQ ID NO: 741328 - protein, 115 aa, Homo sapiens
ALPVQSSVARAAGSCSHQLEDVEREHQKRTARSLARSLRDAVGAPSRASTLWERICRGEAREPNVSVPPVACPALVSALSGPSTLKASSRDQGKEYCVRLADFLLSVWTGLIFAC

SEQ ID NO: 741329 - protein, 51 aa, Homo sapiens
MELCWDKCVEKPGNRLDSRTENCLSSCVDRFIDTTLAITSRFAQIVQKGGQ

SEQ ID NO: 741330 - protein, 94 aa, Homo sapiens
SCRKVASLRRTMAELGEADEAELQRLVAAEQQKAQFTAQVHHFMELCWDKCVEKPGNRLDSRTENCLSSCVDRFIDTTLAITSRFAQIVQKGGQ

SEQ ID NO: 741331 - protein, 94 aa, Homo sapiens; identical to SEQ ID NO: 741330

SEQ ID NO: 741332 - protein, 51 aa, Homo sapiens; identical to SEQ ID NO: 741329

SEQ ID NO: 741333 - protein, 211 aa, Homo sapiens
MEEPPVREEEEEEGEEDEERDEVGPEGALGKSPFQLTAEDVYDISYLLGRELMALGSDPRVTQLQFKVVRVLEMLEALVNEGSLALEELKMERDHLRKEVEGLRRQSPPASGEVNLGPNKMVVDLTDPNRPRFTLQELRDVLQERNKLKSQLLVVQEELQCYKSGLIPPREGPGGRREKDAVVTSAKNAGRNKEEKTIIKKLFFFRSGKQT

SEQ ID NO: 741334 - protein, 164 aa, Homo sapiens
MEEPPVREEEEEEGEEDEERDEVGPEGALGKSPFQLTAEDVYDISYLLGRELMALGSDPRVTQLQFKVVRVLEMLEALVNEGSLALEELKMERDHLRKEVEGLRRQSPPASGEVNLGPNKMVVDLTDPNRPRFTLQELRDVLQERNKLKSQLLVVQEELQCYKS

SEQ ID NO: 741335 - protein, 240 aa, Homo sapiens
RLHESWLRRLGREGSVDGRMVRGSSVAEDKRKKEVKEMRIDRASRDRRSGGRGERVGKESSLRVDRAEDVYDISYLLGRELMALGSDPRVTQLQFKVVRVLEMLEALVNEGSLALEELKMERDHLRKEVEGLRRQSPPASGEVNLGPNKMVVDLTDPNRPRFTLQELRDVLQERNKLKSQLLVVQEELQCYKSGLIPPREGPGGRREKDAVVTSAKNAGRNKEEKTIIKKLFFFRSGKQT

SEQ ID NO: 741336 - protein, 118 aa, Homo sapiens
CGCWGGYRKPFPWLGRKQSQDMTAGCMAPDPGGVFYYRLQLDSQHSHLPGVTQASGTRTGWHPESLQACPTDSNQSQGRWLTPALLGQPAFWAFQKFLHAFCCLLPCPAAPLPYLLMN

SEQ ID NO: 741337 - protein, 594 aa, Homo sapiens
MGKKSRVKTQKSGTGATATVSPKEILNLTSELLQKCSSPAPGPGKEWEEYVQIRTLVEKIRKKQKGLSVTFDGKREDYFPDLMKWASENGASVEGFEMVNFKEEGFGLRATRDIKAEELFLWVPRKLLMTVESAKNSVLGPLYSQDRILQAMGNIALAFHLLCERASPNSFWQPYIQTLPSEYDTPLYFEEDEVRYLQSTQAIHDVFSQYKNTARQYAYFYKVIQTHPHANKLPLKDSFTYEDYRWAVSSVMTRQNQIPTEDGSRVTLALIPLWDMCNHTNGLITTGYNLEDDRCECVALQDFRAGEQIYIFYGTRSNAEFVIHSGFFFDNNSHDRVKIKLGVSKSDRLYAMKAEVLARAGIPTSSVFALHFTEPPISAQLLAFLRVFCMTEEELKEHLLGDSAIDRIFTLGNSEFPVSWDNEVKLWTFLEDRASLLLKTYKTTIEEDKSVLKNHDLSVRAKMAIKLRLGEKEILEKAVKSAAVNREYYRQQMEEKAPLPKYEESNLGLLESSVGDSRLPLVLRNLEEEAGVQDALNIREAISKAKATENGLVNGENSIPNGTRSENESLNQESKRAVEDAKGSSSDSTAGVKE

SEQ ID NO: 741338 - protein, 594 aa, Homo sapiens; identical to SEQ ID NO: 741337

SEQ ID NO: 741339 - protein, 498 aa, Homo sapiens
MVNVHREGLRLDEPNGYTKVQRGMMGLRSLLCELSNVLKVHVWGPLYSQDRILQAMGNIALAFHLLCERASPNSFWQPYIQTLPSEYDTPLYFEEDEVRYLQSTQAIHDVFSQYKNTARQYAYFYKVIQTHPHANKLPLKDSFTYEDYRWAVSSVMTRQNQIPTEDGSRVTLALIPLWDMCNHTNGLITTGYNLEDDRCECVALQDFRAGEQIYIFYGTRSNAEFVIHSGFFFDNNSHDRVKIKLGVSKSDRLYAMKAEVLARAGIPTSSVFALHFTEPPISAQLLAFLRVFCMTEEELKEHLLGDSAIDRIFTLGNSEFPVSWDNEVKLWTFLEDRASLLLKTYKTTIEEDKSVLKNHDLSVRAKMAIKLRLGEKEILEKAVKSAAVNREYYRQQMEEKAPLPKYEESNLGLLESSVGDSRLPLVLRNLEEEAGVQDALNIREAISKAKATENGLVNGENSIPNGTRSENESLNQESKRAVEDAKGSSSDSTAGVKE

SEQ ID NO: 741340 - protein, 382 aa, Homo sapiens
YILYIDNYKSRSPHPPSSHLLPLTDSFTYEDNRWAVSSVMTRQNQIPTEDGSRVTLALIPLWDMCNHTNGLITTGYNLEDDRCECVALQDFRAGEQIYIFYGTRSNAEFVIHSGFFFDNNSHDRVKIKLGVSKSDRLYAMKAEVLARAGIPTSSVFALHFTEPPISAQLLAFLRVFCMTEEELKEHLLGDSAIDRIFTLGNSEFPVSWDNEVKLWTFLEDRASLLLKTYKTTIEEDKSVLKNHDLSVRAKMAIKLRLGEKEILEKAVKSAAVNREYYRQQMEEKAPLPKYEESNLGLLESSVGDSRLPLVLRNLEEEAGVQDALNIREAISKAKATENGLVNGENSIPNGTRSENESLNQESKRAVEDAKGSSSDSTAGVKE

SEQ ID NO: 741341 - protein, 594 aa, Homo sapiens; identical to SEQ ID NO: 741337

SEQ ID NO: 741342 - protein, 162 aa, Homo sapiens
RSTEHRAIYLIRENAVWFKKNHQDLSVRAKMAIKLRLGEKEILEKAVKSAAVNREYYRQQMEEKAPLPKYEESNLGLLESSVGDSRLPLVLRNLEEEAGVQDALNIREAISKAKATENGLVNGENSIPNGTRSENESLNQESKRAVEDAKGSSSDSTAGVKE

SEQ ID NO: 741343 - protein, 594 aa, Homo sapiens; identical to SEQ ID NO: 741337

SEQ ID NO: 741344 - protein, 594 aa, Homo sapiens; identical to SEQ ID NO: 741337

SEQ ID NO: 741345 - protein, 110 aa, Homo sapiens
MGKKSRVKTQKSGTGATATVSPKEILNLTSELLQKCSSPAPGPGKEWEEYVQIRTLVEKIRKKQKGLSVTFDGKREDYFPDLMKCLNQESKRAVEDAKGSSSDSTAGVKE

SEQ ID NO: 741346 - protein, 594 aa, Homo sapiens; identical to SEQ ID NO: 741337

SEQ ID NO: 741347 - protein, 594 aa, Homo sapiens; identical to SEQ ID NO: 741337

SEQ ID NO: 741348 - protein, 594 aa, Homo sapiens; identical to SEQ ID NO: 741337

SEQ ID NO: 741349 - protein, 296 aa, Homo sapiens
MGKKSRVKTQKSGTGATATVSPKEILNLTSELLQKCSSPAPGPGKEWEEYVQIRTLVEKIRKKQKGLSVTFDGKREDYFPDLMKWASENGASVEGFEMVNFKEEGFGLRATRDIKAEELFLWVPRKLLMTVESAKNSVLGPLYSQDRILQAMGNIALAFHLLCERASPNSFWQPYIQTLPSEYDTPLYFEEDEVRYLQSTQAIHDVFSQYKNTARQYAYFYKVIQTHPHANKLPLKDSFTYEDYRWAVSSVMTRQNQIPTEDGSRVTLALIPLWDMCNHTNGLTPEDSFALAVASA

SEQ ID NO: 741350 - protein, 296 aa, Homo sapiens; identical to SEQ ID NO: 741349

SEQ ID NO: 741351 - protein, 284 aa, Homo sapiens
MGKKSRVKTQKSGTGATATVSPKEILNLTSELLQKCSSPAPGPGKEWEEYVQIRTLVEKIRKKQKGLSVTFDGKREDYFPDLMKWASENGASVEGFEMVNFKEEGFGLRATRDIKAEELFLWVPRKLLMTVESAKNSVLGPLYSQDRILQAMGNIALAFHLLCERASPNSFWQPYIQTLPSEYDTPLYFEEDEVRYLQSTQAIHDVFSQYKNTARQYAYFYKVIQTHPHANKLPLKDSFTYEDYRWAVSSVMTRQNQIPTEDGSRVTLALIPLWDMCNHTNGLV

SEQ ID NO: 741352 - protein, 73 aa, Homo sapiens
AICFRLYFSGSPMTLGCPGQALEVPQEDQLGLPPLECTAPWPLSTPPPPFPAFFLTNTKGGRNQKTGDPAALG

SEQ ID NO: 741353 - protein, 445 aa, Homo sapiens
METRTEDGGLTRRPTLASSWDVAGGALTHSLLLTRAGLGPGDFDWEELLAPPAPGQDLVILKRNHNNKDENPCFLYLRCGPDGGEEIASIGILSSARNMEVYLGEEYCGTSRGKNVCTVLDDSEHEKIILYKKNLKLESSTHACKIKLLSFGERQCVFISKVVVHMRSVFANSSTSSPALGSRIDLDKVQTIMESMGSKLSPGAQQLMDMVRCQQRNCIPIGEQLQSVLGNSGYKHMIGLQSSSTLGTLNKSSSTPFPFRTGLTSGNVTENLQTYIDKSTQLPGGENSTKLDECKVMPQNHSFLENDLKNAMASFLPKKVSDNSNIPNSELLPFLQNLCSQVNHLHVGNKTECQENITKHGERILGVGMEEQSICSYLEKILSKNMELMEKKLMDYIDQRIHELQEHIDDKIALLLDLLQNPNSPPTGIPLRHYDSGERLSNGER

SEQ ID NO: 741354 - protein, 107 aa, Homo sapiens
DGVLSPRLECSCAISAHCSLCLPGSSNPPRMEEQSICSYLEKILSKNMELMEKKLMDYIDQRIHELQEHIDDKIALLLDLLQNPNSPPTGIPLRHYDSGERLSNGER

SEQ ID NO: 741355 - protein, 445 aa, Homo sapiens; identical to SEQ ID NO: 741353

SEQ ID NO: 741356 - protein, 147 aa, Homo sapiens
GRRFTYPSLLVSHRRMHSGERPFPCPECGMRFKRKFAVEAHQWIHRSCSGGRRGRRPGIRAVLGPPSEVTGTRLCSSGTTQTSSRSAAERHRRLELSLTLARRTDGSLRWATESGTPELKFMPWAFLKDPSSFQLVKRKVPVKIRID

SEQ ID NO: 741357 - protein, 108 aa, Homo sapiens
MLILIGSLDSDPGTPPSAPQLDATSDGHSQPLPAAKRWPSGTLYGLRHLRAVLGPAGTPDMNRLKNWSEVHTSPSFSLRKKGKPWDQELSRLLPRAAARTLTLSPITP

SEQ ID NO: 741358 - protein, 59 aa, Homo sapiens
AADYYYYCSEFKLLTMYGDMNEKGHIFKNTWQMSVSLKVLTGFYYSCYLFPLPIFCALK

SEQ ID NO: 741359 - protein, 1237 aa, Homo sapiens
MAVSDVPSLSVGKEVQWEKLIAKAASIRDICKQRPYQHGADMLAAISQVLNECTKPDQATPAALVLQGLHALCQAEVVCIRSTWNALSPKLSCDTRPLILKTLSELFSLVPSLTVNTTEYENFKVQVLSFLWTHTQNKDPIVANAAYRSLANFSAGEHTILHLPEKIRPEIPIPEELDDDEDVEDVDLSVPGSCYLKLLSLTPPLVLPALEEFFTSLVKQEMVNMPRGIYHSALKGGARSDQGKTVAGIPNFILKMYETNKQPGLKPGLAGGMLFCYDVSMYQSKDGKPLNRLMASRGRSFKQTSLALVHEVHIQLSEWHRAIFLPQAWLAYMNRAYHAILQGRLGELELQLKHGKEEPEEVQYKKSTAWLWVRDMLTDEITKAAAKESPVVKGNALLALSSLAVVVSRHEASLSSDSDGLLEVQPNFLSMKEWVSMVLDTLLVIVDSHYQPRGQLLSWFYYKSYSGENTASAIARSAAATALSLLVPVFIISCKEKVEEILNMLTARLPGKPSADESQAVQIHMGLALGMFLSRLCEEKLSDISGQEMNLLLMKSLDALENCCFDTSLEYNTGCILGVGLVLSLMSHSSQMQSRVHVAALLRKLSAHVDDSGSQSRTFQEVLAYTLSCVCTSAFSAGIIEATEAEDVMNKLRLLVENSQQTSGFALALGNIVHGLSVCGHGKAEDLGSKLLPAWIRIVLTEGTPTMLCLAALHGMVALVGSEGDVMQLKSEAIQTSHFQGRLNEVIRTLTQVISVSGVIGLQSNAVWLLGHLHLSTLSSSQSRASVPTDYSYLPESSFIGAAIGFFITGGKKGPESVPPSLLKVVMKPIATVGESYQYPPVNWAALLSPLMRLNFGEEIQQLCLEIMVTQAQSSQNAAALLGLWVTPPLIHSLSLNTKRYLLISAPLWIKHISDEQILGFVENLMVAVFKAASPLGSPELCPSALHGLSQAMKLPSPAHHLWSLLSEATGKIFDLLPNKIRRKDLELYISIAKCLLEMTDDDANRIAQVTKSNIEKAAFVKLYLVSQGRFPLVNLTDMLSVAVQHREKEVLAWMILHSLYQARIVSHANTGVLKRMEWLLELMGYIRNVAYQSTSFHNTALDEALDFFLLIFATAVVAWADHTAPLLLGLSASWLPWHQENGPAGPVPSFLGRSPMHRVTLQEVLTLLPNSMALLLQKEPWKEQTQKFIDWLFSIMESPKEALSAQSRDLLKATLLSLRVLPEFKKKAVWTRAYGW

SEQ ID NO: 741360 - protein, 148 aa, Homo sapiens
MAVSDVPSLSVGKEVQWEKLIAKAASIRDICKQRPYQHGADMLAAISQVLNECTKPDQATPAALVLQGLHALCQAEVVCIRSTWNALSPKLSCDTRPLILKTLSELFSLVPSLTVNTTEYEVCIWSSAHCLLLHGKDVCYNNFWNKYS

SEQ ID NO: 741361 - protein, 1016 aa, Homo sapiens
MVNMPRGIYHSALKGGARSDQGKTVAGIPNFILKMYETNKQPGLKPGLAGGMLFCYDVSMYQSKDGKPLNRLMASRGRSFKQTSLALVHEVHIQLSEWHRAIFLPQAWLAYMNRAYHAILQGRLGELELQLKHGKEEPEEVQYKKSTAWLWVRDMLTDEITKAAAKESPVVKGNALLALSSLAVVVSRHEASLSSDSDGLLEVQPNFLSMKEWVSMVLDTLLVIVDSHYQPRGQLLSWFYYKSYSGENTASAIARSAAATALSLLVPVFIISCKEKVEEILNMLTARLPGKPSADESQAVQIHMGLALGMFLSRLCEEKLSDISGQEMNLLLMKSLDALENCCFDTSLEYNTGCILGVGLVLSLMSHSSQMQSRVHVAALLRKLSAHVDDSGSQSRTFQEVLAYTLSCVCTSAFSAGIIEATEAEDVMNKLRLLVENSQQTSGFALALGNIVHGLSVCGHGKAEDLGSKLLPAWIRIVLTEGTPTMLCLAALHGMVALVGSEGDVMQLKSEAIQTSHFQGRLNEVIRTLTQVISVSGVIGLQSNAVWLLGHLHLSTLSSSQSRASVPTDYSYLPESSFIGAAIGFFITGGKKGPESVPPSLLKVVMKPIATVGESYQYPPVNWAALLSPLMRLNFGEEIQQLCLEIMVTQAQSSQNAAALLGLWVTPPLIHSLSLNTKRYLLISAPLWIKHISDEQILGFVENLMVAVFKAASPLGSPELCPSALHGLSQAMKLPSPAHHLWSLLSEATGKIFDLLPNKIRRKDLELYISIAKCLLEMTDDDANRIAQVTKSNIEKAAFVKLYLVSQGRFPLVNLTDMLSVAVQHREKEVLAWMILHSLYQARIVSHANTGVLKRMEWLLELMGYIRNVAYQSTSFHNTALDEALDFFLLIFATAVVAWADHTAPLLLGLSASWLPWHQENGPAGPVPSFLGRSPMHRVTLQEVLTLLPNSMALLLQKEPWKEQTQKFIDWLFSIMESPKEALSAQSRDLLKATLLSLRVLPEFKKKAVWTRAYGW

SEQ ID NO: 741362 - protein, 200 aa, Homo sapiens
MGRLHCTEDPVPEAVGGDMQQLNQLGAQQFSALTEVLFHFLTEPKEVERFLAQLSEFATTNQISLGSLRSIVKSLLLVPNGALKKSLTAKQVQADFITLGLSEEKATYFSEKWKQNAPTLARWAIGQTLMINQLIDMEWKFGVTSGSSELEKVGSIFLQLKLVVKKGNQTENVYIELTLPQFYSFLHEMERVRTSMECFC

SEQ ID NO: 741363 - protein, 279 aa, Homo sapiens
SGWYTPGVLGSGGLCVLLPARAPRLRTAQGGRGRSALRRPWRKCGCGCAERPAAVAAAAEEEAEQGGGGGGTCGAGARAMGRLHCTEDPVPEAVGGDMQQLNQLGAQQFSALTEVLFHFLTEPKEVERFLAQLSEFATTNQISLGSLRSIVKSLLLVPNGALKKSLTAKQVQADFITLGLSEEKATYFSEKWKQNAPTLARWAIGQTLMINQLIDMEWKFGVTSGSSELEKVGSIFLQLKLVVKKGNQTENVYIELTLPQFYSFLHEMERVRTSMECFC

SEQ ID NO: 741364 - protein, 201 aa, Homo sapiens
  misc_feature (181)..(181): Xaa can be any naturally occurring amino acid
MGRLHCTEDPVPEAVGGDMQQLNQLGAQQFSALTEVLFHFLTEPKEVERFLAQLSEFATTNQISLGSLRSIVKSLLLVPNGALKKSLTAKQVQADFITLGLSEEKATYFSEKWKQNAPTLARWAIGQTLMINQLIDMEWKFGVTSGSSELEKVGSIFLQLKLVVKKGNQTENVYIGESEFXLEPLHLFCVLLQSGAWLTLT

SEQ ID NO: 741365 - protein, 210 aa, Homo sapiens
MGRLHCTEDPVPEAVGGDMQQLNQLGAQQFSALTEVLFHFLTEPKEARVFTVLSLQVERFLAQLSEFATTNQISLGSLRSIVKSLLLVPNGALKKSLTAKQVQADFITLGLSEEKATYFSEKWKQNAPTLARWAIGQTLMINQLIDMEWKFGVTSGSSELEKVGSIFLQLKLVVKKGNQTENVYIELTLPQFYSFLHEMERVRTSMECFC

SEQ ID NO: 741366 - protein, 140 aa, Homo sapiens
SRINLLLRFLQTDGLGLLFIIILATPLMSLPMLSLFSWSLYISSLLIFNSHLGITFFSNFLRRQSMACGLHWLFSVCFSSLVLRLFLLVLCPWRLTCLYSITWGTHLPVGTGQCEAMVGRSEGSGKRLEGITEGLSEIYI

SEQ ID NO: 741367 - protein, 98 aa, Homo sapiens
KGCHTDPLPLLAEGSHLTQKGRGSTELLTLKPYADSQAKRAPKHFLWDFRGHWHPSPDVAAGPVQSSLLLVPEGICPSCRTHSPVCSLQQGVEHSRFE

SEQ ID NO: 741368 - protein, 325 aa, Homo sapiens
MAVGNNTQRSYSIIPCFIFVELVIMAGTVLLAYYFECTDTFQVHIQGFFCQDGDLMKPYPGTEEESFITPLVLYCVLAATPTAIIFIGEISMYFIKSTRESLIAQEKTILTGECCYLNPLLRRIIRFTGVFAFGLFATDIFVNAGQVVTGHLTPYFLTVCKPNYTSADCQAHHQFINNGNICTGDLEVIEKARRSFPSKHAALSIYSALYATMYITSTIKTKSSRLAKPVLCLGTLCTAFLTGLNRVSEYRNHCSDVIAGFILGTAVALFLGMCVVHNFKGTQGSPSKPKPEDPRGVPLMAFPRIESPLETLSAQNHSASMTEVT

SEQ ID NO: 741369 - protein, 325 aa, Homo sapiens; identical to SEQ ID NO: 741368

SEQ ID NO: 741370 - protein, 309 aa, Homo sapiens [sequence omitted]

SEQ ID NO: 741371 - protein, 146 aa, Homo sapiens
GIRNLFRFLCFFCDPYFFRLPAQPVRRLAAVPAIPRESVAPSAKTWTLSQKPWAPAPCLLQPPKSGKPQALRVLVTASLVVPGLLLHLFHGPAISLVQPRTIGRKRWRAEGDACWAFPLVTECFLRRVRCYQWRPGRLSLSSFWSP

SEQ ID NO: 741372 - protein, 257 aa, Homo sapiens
MTNMNLVLTKQNLLHMELLLLETFQWNLCLPTAAHFIEYYLSEAVHETDLHDGWPMICLEKTKLYMAKYADYFLEVSLQAAACVASSRIILRLSPTWPTRLHRLTAYSWDFLVQCIERLLIAHDNDVKEANKQRGQAGPQSAQLSVFQTASQPSRPVHFQQPQYLHQTHQTSLQYRHPTSEQPSCQQIVSTTHTSSYTLQTCPAGFQTSVQGLGHMQTGVGMSLAIPVEVKPCLSVSYNRSYQINEHYPCITPCFER

SEQ ID NO: 741373 - protein, 269 aa, Homo sapiens
MTNMNLVLTKQNLLHMELLLLETFQWNLCLPTAAHFIEYYLSEAVHETDLHDGWPMICLEKTKLYMAKYADYFLEVSLQDYAFLNYAPSLVAAACVASSRIILRLSPTWPTRLHRLTAYSWDFLVQCIERLLIAHDNDVKEANKQRGQAGPQSAQLSVFQTASQPSRPVHFQQPQYLHQTHQTSLQYRHPTSEQPSCQQIVSTTHTSSYTLQTCPAGFQTSVQGLGHMQTGVGMSLAIPVEVKPCLSVSYNRSYQINEHYPCITPCFER

SEQ ID NO: 741374 - protein, 257 aa, Homo sapiens; identical to SEQ ID NO: 741372

SEQ ID NO: 741375 - protein, 257 aa, Homo sapiens; identical to SEQ ID NO: 741372

SEQ ID NO: 741376 - protein, 70 aa, Homo sapiens
HPTSRGVHRQRRGFAKTGVLLEASRFEKESVTTKQTTLYLTVEQFVPTFARRVYVSVEPCPWLRGHGPRR

SEQ ID NO: 741377 - protein, 130 aa, Homo sapiens
ATRRMARPGAAAAPAPNAAATSIVREVIQNSKEVLSLLQEKNPAFKPVLAIIQAGDDNLMQEINQNLAEEAGLNITHICLPPDSSEAEIIDEILKINEDTRVHGLALQISENLFSNKVLNALKPEKDVDG

SEQ ID NO: 741378 - protein, 119 aa, Homo sapiens
MAKKGQAWMGSHTHTRREEHAWMGSLTLGMWCFHPKSGQGVCLWHQCPQAWLRAPARDWPAFSIIFYGVLVTVNQLSQASGPGPRPWRFPGVNVNALHGSRESLACLVLSAAAPAADWA

SEQ ID NO: 741379 - protein, 101 aa, Homo sapiens
DFPKYWDYRREPPHRALRPLFHPYSSLCLCMCVPHPFGNFYFLFQEWVKVSDFFFPYTLSVQSGPTWRRAAAFPPFFCGRLQTLAHGRVRAVPRVGAIKLS

SEQ ID NO: 741380 - protein, 162 aa, Homo sapiens
VEAGVFSDSELYRPRVTMKFNPFVTSDRSKNRKRHFNAPSHVRRKIMSSPLSKELRQKYNVRSMPIRKDDEVQVVRGHYKGQQIGKVVQVYRKKYVIYIERVQREKANGTTVHVGIHPSKVVITRLKLDKDRKKILERKAKSRQVGKEKGKYKEELIEKMQE

SEQ ID NO: 741381 - protein, 160 aa, Homo sapiens
GRVGRSEAASSRRVTMKFNPFVTSDRSKNRKRHFNAPSHVRRKIMSSPLSKELRQKYNVRSMPIRKDDEVQVVRGHYKGQQIGKVVQVYRKKYVIYIERVQREKANGTTVHVGIHPSKVVITRLKLDKDRKKILERKAKSRQVGKEKGKYKEELIEKMQE

SEQ ID NO: 741382 - protein, 160 aa, Homo sapiens; identical to SEQ ID NO: 741381

SEQ ID NO: 741383 - protein, 145 aa, Homo sapiens
MKFNPFVTSDRSKNRKRHFNAPSHVRRKIMSSPLSKELRQKYNVRSMPIRKDDEVQVVRGHYKGQQIGKVVQVYRKKYVIYIERVQREKANGTTVHVGIHPSKVVITRLKLDKDRKKILERKAKSRQVGKEKGKYKEELIEKMQE

SEQ ID NO: 741384 - protein, 145 aa, Homo sapiens; identical to SEQ ID NO: 741383

SEQ ID NO: 741385 - protein, 103 aa, Homo sapiens
GLAPAGGPSLSLQLPLPPAAAPRQSCDPTAGGAGRGKIWPPWSFCVGSSERERRGGTPEKSLGGCVLLLPKLGVRTNPAAPTGLTGEEEGLGTVGSPSQPGGA

SEQ ID NO: 741386 - protein, 322 aa, Homo sapiens
TVAFSSHRRKISFCLRRETKPHTKERGMMAKKPPKPAPRRIFQERLKITALPLYFEGFLLIKRSGYREYEHYWTELRGTTLFFYTDKKSIIYVDKLDIVDLTCLTEQNSTEKNCAKFTLVLPKEEVQLKTENTESGEEWRGFILTVTELSVPQNVSLLPGQVIKLHEVLEREKKRRIETEQSTSVEKEKEPTEDYVDVLNPMPACFYTVSRKEATEMLQKNPSLGNMILRPGSDSRNYSITIRQEIDIPRIKHYKVMSVGQNYTIELEKPVTLPNLFSVIDYFVKETRGNLRPFICSTDENTGQEPSMEGRSEKLKKNPHIA

SEQ ID NO: 741387 - protein, 322 aa, Homo sapiens; identical to SEQ ID NO: 741386

SEQ ID NO: 741388 - protein, 322 aa, Homo sapiens; identical to SEQ ID NO: 741386

SEQ ID NO: 741389 - protein, 322 aa, Homo sapiens; identical to SEQ ID NO: 741386

SEQ ID NO: 741390 - protein, 52 aa, Homo sapiens
MLLSSLMCLMPSLEIYLLDHHFHIYLVTRSPSYGILKFMIHNPCQKSCSELW

SEQ ID NO: 741391 - protein, 123 aa, Homo sapiens
FLVLCIGAAFLGVGTSVSPCCRGRSACLLHQKPPLLMLSAPLGEQLPTQLLLPPRSSGSKFHRYQRPGPRVGVHLHKGSSEIREAGGPQLWPQCPHPVDLDVLRTTQHCLQSEGPTSVHLSSV

SEQ ID NO: 741392 - protein, 123 aa, Homo sapiens; identical to SEQ ID NO: 741391

SEQ ID NO: 741393 - protein, 123 aa, Homo sapiens; identical to SEQ ID NO: 741391

SEQ ID NO: 741394 - protein, 109 aa, Homo sapiens
GVWMMSSSLPHVTSNHVSYNGLYGVAVFSQKDGSSELPRGHRAQENFSEDGDAILWETELEKEDDPLRRPITIALVESNSINHNGGEYTPSAPAQEPSMAPHCLFFSPI

SEQ ID NO: 741395 - protein, 392 aa, Homo sapiens
IQLPETLLQPSQGTAPLCLLLLQGSTMQPLWLCWALWVLPLASPGAALTGEQLLGSLLRQLQLKEVPTLDRADMEELVIPTHVRAQYVALLQRSHGDRSRGKRFSQSFREVAGRFLALEASTHLLVFGMEQRLPPNSELVQAVLRLFQEPVPKAALHRHGRLSPRSARARVTVEWLRVRDDGSNRTSLIDSRLVSVHESGWKAFDVTEAVNFWQQLSRPRQPLLLQVSVQREHLGPLASGAHKLVRFASQGAPAGLGEPQLELHTLDLGDYGAQGDCDPEAPMTEGTRCCRQEMYIDLQGMKWAENWVLEPPGFLAYECVGTCRQPPEALAFKWPFLGPRQCIASETDSLPMIVSIKEGGRTRPQVVSLPNMRVQKCSCASDGALVPRRLQP

SEQ ID NO: 741396 - protein, 392 aa, Homo sapiens; identical to SEQ ID NO: 741395

SEQ ID NO: 741397 - protein, 705 aa, Homo sapiens
MIDSVKLRRDSAADFFSHYEYLCALQNSVPLPAVRACLREGVLDFNADRLRGVDWAPLLSTLKINKDLPLVSIKSFFQPWLGDTGSDMNKFCRSRVPAIRYKDVTFQLCKALKGCLSISSVLKNLELNGLILRERDLTILAKGLNKSASLVHLSLANCPIGDGGLEIICQGIKSSITLKTVNFTGCNLTWQGADHMAKILKYQTMRRHEETWAESLRYRRPDLDCMAGLRRITLNCNTLIGDLGACAFADSLSEDLWLRALDLQQCGLTNEGAKALLEALETNTTLVVLDIRKNPLIDHSMMKAVIKKVLQNGRSAKSEYQWITSPSVKEPSKTAKQKRRTIILGSGHKGKATIRIGLATKKPVSSGRKHSLGKEYYAPAPLPPGVSGFLPWRTAERAKRHRGFPLIKTRDICNQLQQPGFPVTVTVESPSSSEVEEVDDSSESVHEVPEKTSIEQEALQEKLEECLKQLKEERVIRLKVDKRVSELEHENAQLRNINFSLSEALHAQSLTNMILDDEGVLGSIENSFQKFHAFLDLLKDAGLGQLATMAGIDQSDFQLLGHPQMTSTVSNPPKEEKKALEDEKPEPKQNALGQMQNIQFQKITGDARIPLPLDSFPVPVSTPEGLGTSSNNLGVPATEQRQESFEGFIARMCSPSPDATSGTGSQRKEEELSRNSRSSSEKKTKTGEYTKKHSDKQHPGKDLHS

SEQ ID NO: 741398 - protein, 689 aa, Homo sapiens
MIDSVKLRRDSAADFFSHYEYLCALQNSVPLPAVRACLREGVLDFNADRLRGVDWAPLLSTLKINKDLPLVSIKSFFQPWLGDTGSDMNKFCRSRVPAIRYKDVTFQLCKALKGCLSISSVLKNLELNGLILRERDLTILAKGLNKSASLVHLSLANCPIGDGGLEIICQGIKSSITLKTVNFTGCNLTWQGADHMAKILKYQTMRRHEETWAESLRYRRPDLDCMAGLRRITLNCNTLIGDLGACAFADSLSEDLWLRALDLQQCGLTNEGAKALLEALETNTTLVVLDIRKNPLIDHSMMKAVIKKVLQNGRSAKSEYQWITSPSVKEPSKTAKQKRRTIILGSGHKGKATIRIGLATKKPVSSGRKHSLGKEYYAPAPLPPGVSGFLPWRTAERAKRHRGFPLIKTRDICNQLQQPGFPVTVTVESPSSSEVEEVDDSSESVHEVPEKTSIEQEALQEKLEECLKQLKEERVIRLKVDKRVSELEHENAQLRNINFSLSEALHAQSLTNMILDDEGVLGSIENSFQKFHAFLDLLKDAGLGQLATMAGIDQSDFQLLGHPQMTSTVSNPPKEEKKALEDEKPEPKQNALGQMQNIQFQKITGDARIPLPLDSFPVPVSTPEGLGTSSNNLGVPATEQRQESFEGFIARMCSPSPDATSGTGSQRKEEELSRNSRSSSEKKTKTESH

SEQ ID NO: 741399 - protein, 720 aa, Homo sapiens
HEPTLGYGRGWWESAEDDSVKLRRDSAADFFSHYEYLCALQNSVPLPAVRACLREGVLDFNADRLRGVDWAPLLSTLKINKDLPLVSIKSFFQPWLGDTGSDMNKFCRSRVPAIRYKDVTFQLCKALKGCLSISSVLKNLELNGLILRERDLTILAKGLNKSASLVHLSLANCPIGDGGLEIICQGIKSSITLKTVNFTGCNLTWQGADHMAKILKYQTMRRHEETWAESLRYRRPDLDCMAGLRRITLNCNTLIGDLGACAFADSLSEDLWLRALDLQQCGLTNEGAKALLEALETNTTLVVLDIRKNPLIDHSMMKAVIKKVLQNGRSAKSEYQWITSPSVKEPSKTAKQKRRTIILGSGHKGKATIRIGLATKKPVSSGRKHSLGKEYYAPAPLPPGVSGFLPWRTAERAKRHRGFPLIKTRDICNQLQQPGFPVTVTVESPSSSEVEEVDDSSESVHEVPEKTSIEQEALQEKLEECLKQLKEERVIRLKVDKRVSELEHENAQLRNINFSLSEALHAQSLTNMILDDEGVLGSIENSFQKFHAFLDLLKDAGLGQLATMAGIDQSDFQLLGHPQMTSTVSNPPKEEKKALEDEKPEPKQNALGQMQNIQFQKITGDARIPLPLDSFPVPVSTPEGLGTSSNNLGVPATEQRQESFEGFIARMCSPSPDATSGTGSQRKEEELSRNSRSSSEKKTKTGEYTKKHSDKQHPGKDLHS

SEQ ID NO: 741400 - protein, 519 aa, Homo sapiens
ASTRPGGDHMAKILKYQTMRRHEETWAESLRYRRPDLDCMAGLRRITLNCNTLIGDLGACAFADSLSEDLWLRALDLQQCGLTNEGAKALLEALETNTTLVVLDIRKNPLIDHSMMKAVIKKVLQNGRSAKSEYQWITSPSVKEPSKTAKQKRRTIILGSGHKGKATIRIGLATKKPVSSGRKHSLGKEYYAPAPLPPGVSGFLPWRTAERAKRHRGFPLIKTRDICNQLQQPGFPVTVTVESPSSSEVEEVDDSSESVHEVPEKTSIEQEALQEKLEECLKQLKEERVIRLKVDKRVSELEHENAQLRNINFSLSEALHAQSLTNMILDDEGVLGSIENSFQKFHAFLDLLKDAGLGQLATMAGIDQSDFQLLGHPQMTSTVSNPPKEEKKALEDEKPEPKQNALGQMQNIQFQKITGDARIPLPLDSFPVPVSTPEGLGTSSNNLGVPATEQRQESFEGFIARMCSPSPDATSGTGSQRKEEELSRNSRSSSEKKTKTGEYTKKHSDKQHPGKDLHS

SEQ ID NO: 741401 - protein, 720 aa, Homo sapiens
HEPTLGYGRGWWESAEDDSVKLRRDSAADFFSHYEYLCALQNSVPLPAVRACLREGVLDFNADRLRGVDWAPLLSTLKINKDLPLVSIKSFFQPWLGDTGSDMNKFCRSRVPAIRYKDVTFQLCKALKGCLSISSVLKNLELNGLILRERDLTILAKGLNKSASLVHLSLANCPIGDGGLEIICQGIKSSITLKTVNFTGCNLTWQGADHMAKILKYQTMRRHEETWAESLRYRRPDLDCMAGLRRITLNCNTLIGDLGACAFADSLSEDLWLRALDLQQCGLTNEGAKALLEALETNTTLVVLDIRKNPLIDHSMMKAVIKKVLQNGRSAKSEYQWITSPSVKEPSKTAKQKRRTIILGSGHKGKATIRIGLATKKPVSSGRKHSLGKEYYAPAPLPPGVSGFLPWRTAERAKRHRGFPLIKTRDICNQLQQPGFPVTVTVESPSSSEVEEVDDSSESVHEVPEKTSIEQEALQEKLEECLKQLKEERVIRLKVDKRVSELEHENAQLRNINFSLSEALHAQSLTNMILDDEGVLGSIENSFQKFHAFLDLLKDAGLGQLATMAGIDQSDFQLLGHPQMTSTVSNPPKEEKKALEDEKPEPKQNALGQMQNIQVSICMQSAYNEGTLMKFQKITGDARIPLPLDSFPVPVSTPEGLGTSSNNLGVPATEQRQESFEGFIARMCSPSPDATSGTGSQRKEEELSRNSRSSSEKKTKTESH

SEQ ID NO: 741402 - protein, 283 aa, Homo sapiens
MSFSIWYSVYIIIQSCPLFLSQPGFPVTVTVESPSSSEVEEVDDSSESVHEVPEKTSIEQEALQLEHENAQLRNINFSLSEALHAQSLTNMILDDEGVLGSIENSFQKFHAFLDLLKDAGLGQLATMAGIDQSDFQLLGHPQMTSTVSNPPKEEKKALEDEKPEPKQNALGQMQNIQFQKITGDARIPLPLDSFPVPVSTPEGLGTSSNNLGVPATEQRQESFEGFIARMCSPSPDATSGTGSQRKEEELSRNSRSSSEKKTKTGEYTKKHSDKQHPGKDLHS

SEQ ID NO: 741403 - protein, 157 aa, Homo sapiens
MAGIDQSDFQLLGHPQMTSTVSNPPKEEKKALEDEKPEPKQNALGQMQNIQFQKITGDARIPLPLDSFPVPVSTPEGLGTSSNNLGVPATEQRQESFEGFIARMCSPSPDATSGTGSQRKEEELSRNSRSSSEKKTKTGEYTKKHSDKQHPGKDLHS

SEQ ID NO: 741404 - protein, 119 aa, Homo sapiens [sequence omitted]

SEQ ID NO: 741405 - protein, 843 aa, Homo sapiens
MWTPELAILRGFPTEAERQQWKQEGVVGSESGSFLQLLLEGNYEAIFLNSMTQNIFNSTTTAEEKIDSYLEKQVVTFLDYSTDLDTTERQQLIFLLGVSSLQLFVQSNWTGPPVDLHPQDFLSSVLFQQFSEVKGLDAFVLSLLTLDGESIYSLTSKPILLLLARIILVNVRHKLTAIQSLPWWTLRCVNIHQHLLEERSPLLFTLAENCIDQVMKLQNLFVDDSGRYLAIQFHLECAYVFLYYYEYRKAKDQLDIAKDISQLQIDLTGALGKRTRFQENYVAQLILDVRREGDVLSNCEFTPAPTPQEHLTKNLELNDDTILNDIKLADCEQFQMPDLCAEEIAIILGICTNFQKNNPVHTLTEVELLAFTSCLLSQPKFWAIQTSALILRTKLEKGSTRRVERAMRQTQALADQFEDKTTSVLERLKIFYCCQVPPHWAIQRQLASLLFELGCTSSALQIFEKLEMWEDVVICYERAGQHGKAEEILRQELEKKETPSLYCLLGDVLGDHSCYDKAWELSRYRSARAQRSKALLHLRNKEFQECVECFERSVKINPMQLGVWFSLGCAYLALEDYQGSAKAFQRCVTLEPDNAEAWNNLSTSYIRLKQKVKAFRTLQEALKCNYEHWQIWENYILTSTDVGEFSEAIKAYHRLLDLRDKYKDVQVLKILVRAVIDGMTDRSGDVATGLKGKLQELFGRVTSRVTNDGEIWRLYAHVYGNGQSEKPDENEKAFQCLSKAYKCDTQSNCWEKDITSFKEVVQRALGLAHVAIKCSKNKSSSQEAVQMLSSVRLNLRGLLSKAKQLFTDVATGEMSRELADDITAMDTLVTELQDLSNQFRNQY

SEQ ID NO: 741406 - protein, 668 aa, Homo sapiens
MWTPELAILRGFPTEAERQQWKQEGVVGSESGSFLQLLLEGNYEAIFLNSMTQNIFNSTTTAEEKIDSYLEKQVVTFLDYSTDLDTTERQQLIFLLGVSSLQLFVQSNWTGPPVDLHPQDFLSSVLFQQFSEVKGLDAFVLSLLTLDGESIYSLTSKPILLLLARIILVNVRHKLTAIQSLPWWTLRCVNIHQHLLEERSPLLFTLAENCIDQVMKLQNLFVDDSGRYLAIQFHLECAYVFLYYYEYRKAKDQLDIAKDISQLQIDLTGALGKRTRFQENYVAQLILDVRREGDVLSNCEFTPAPTPQEHLTKNLELNDDTILNDIKLADCEQFQMPDLCAEEIAIILGICTNFQKNNPVHTLTEVELLAFTSCLLSQPKFWAIQTSALILRTKLEKGSTRRVERAMRQTQALADQFEDKTTSVLERLKIFYCCQVPPHWAIQRQLASLLFELGCTSSALQIFEKLEMWEDVVICYERAGQHGKAEEILRQELEKKETPSLYCLLGDVLGDHSCYDKAWELSRYRSARAQRSKALLHLRNKEFQECVECFERSVKINPMQLGVWFSLGCAYLALEDYQGSAKAFQRCVTLEPDNAEAWNNLSTSYIRLKQKVKAFRTLQEALKCNYEHWQIWENYILTSTDVGEFSEAIKAYHRLLDLRDKYKDVQWP

SEQ ID NO: 741407 - protein, 528 aa, Homo sapiens
MMHTNTEWHRVPRCKLTWMSHLCTEYSSYNTWSLLYIQKNRRVQRLTWKCRYWRSNSHVRFHITRCLGIQTSALILRTKLEKGSTRRVERAMRQTQALADQFEDKTTSVLERLKIFYCCQVPPHWAIQRQLASLLFELGCTSSALQIFEKLEMWEDVVICYERAGQHGKAEEILRQELEKKETPSLYCLLGDVLGDHSCYDKAWELSRYRSARAQRSKALLHLRNKEFQECVECFERSVKINPMQLGVWFSLGCAYLALEDYQGSAKAFQRCVTLEPDNAEAWNNLSTSYIRLKQKVKAFRTLQEALKCNYEHWQIWENYILTSTDVGEFSEAIKAYHRLLDLRDKYKDVQVLKILVRAVIDGMTDRSGDVATGLKGKLQELFGRVTSRVTNDGEIWRLYAHVYGNGQSEKPDENEKAFQCLSKAYKCDTQSNCWEKDITSFKEVVQRALGLAHVAIKCSKNKSSSQEAVQMLSSVRLNLRGLLSKAKQLFTDVATGEMSRELADDITAMDTLVTELQDLSNQFRNQY

SEQ ID NO: 741408 - protein, 429 aa, Homo sapiens
MWTPELAILRGFPTEAERQQWKQEGVVGSESGSFLQLLLEGNYEAIFLNSMTQNIFNSTTTAEEKIDSYLEKQVVTFLDYSTDLDTTERQQLIFLLGVSSLQLFVQSNWTGPPVDLHPQDFLSSVLFQQFSEVKGLDAFVLSLLTLDGESIYSLTSKPILLLLARIILVNVRHKLTAIQSLPWWTLRCVNIHQHLLEERSPLLFTLAENCIDQVMKLQNLFVDDSGRYLAIQFHLECAYVFLYYYEYRKAKDQLDIAKDISQLQIDLTGALGKRTRFQENYVAQLILDVRREGDVLSNCEFTPAPTPQEHLTKNLELNDDTILNDIKLADCEQFQMPDLCAEEIAIILGICTNFQKNNPVHTLTEVELLAFTSCLLSQPKFWAIQTSALILRTKLEKGSTRRVERAMRQTQVAHDVHLSCHWGCYLIIQ

SEQ ID NO: 741409 - protein, 139 aa, Homo sapiens
AARGVVFSRLCLFGLGRLSRFSKGISALCDSRTRCLCIFHCLVYRNFVVSFENANAEAWNNLSTSYIRLKQKVKAFRTLQEALKCNYEHWQIWENYILTSTDVGEFSEAIKAYHRLLDLRDKYKDVQVGYSYSVISVCV

SEQ ID NO: 741410 - protein, 843 aa, Homo sapiens; identical to SEQ ID NO: 741405

SEQ ID NO: 741411 - protein, 505 aa, Homo sapiens
  misc_feature (26)..(26): Xaa can be any naturally occurring amino acid
  misc_feature (32)..(32): Xaa can be any naturally occurring amino acid
  misc_feature (39)..(39): Xaa can be any naturally occurring amino acid
  misc_feature (44)..(44): Xaa can be any naturally occurring amino acid
  misc_feature (49)..(49): Xaa can be any naturally occurring amino acid
  misc_feature (58)..(58): Xaa can be any naturally occurring amino acid
  misc_feature (64)..(64): Xaa can be any naturally occurring amino acid
  misc_feature (66)..(66): Xaa can be any naturally occurring amino acid
  misc_feature (69)..(69): Xaa can be any naturally occurring amino acid
  misc_feature (72)..(72): Xaa can be any naturally occurring amino acid
WAAAAPGTCLNVALRSLPPGRRGAPXLRGAAXRAACAEXRPRPXSVLSXRPGRLPGAXNRRRTXRXVAXLAXAALADQFEDKTTSVLERLKIFYCCQVPPHWAIQRQLASLLFELGCTSSALQIFEKLEMWEDVVICYERAGQHGKAEEILRQELEKKETPSLYCLLGDVLGDHSCYDKAWELSRYRSARAQRSKALLHLRNKEFQECVECFERSVKINPMQLGVWFSLGCAYLALEDYQGSAKAFQRCVTLEPDNAEAWNNLSTSYIRLKQKVKAFRTLQEALKCNYEHWQIWENYILTSTDVGEFSEAIKAYHRLLDLRDKYKDVQVLKILVRAVIDGMTDRSGDVATGLKGKLQELFGRVTSRVTNDGEIWRLYAHVYGNGQSEKPDENEKAFQCLSKAYKCDTQSNCWEKDITSFKEVVQRALGLAHVAIKCSKNKSSSQEAVQMLSSVRLNLRGLLSKAKQLFTDVATGEMSRELADDITAMDTLVTELQDLSNQFRNQY

SEQ ID NO: 741412 - protein, 304 aa, Homo sapiens
AARGVVFSRLCLFGLGRLSRFSKGISALCDSRTRCLCIFHCLVYRNFVVSFENANAEAWNNLSTSYIRLKQKVKAFRTLQEALKCNYEHWQIWENYILTSTDVGEFSEAIKAYHRLLDLRDKYKDVQVLKILVRAVIDGMTDRSGDVATGLKGKLQELFGRVTSRVTNDGEIWRLYAHVYGNGQSEKPDENEKAFQCLSKAYKCDTQSNCWEKDITSFKEVVQRALGLAHVAIKCSKNKSSSQEAVQMLSSVRLNLRGLLSKAKQLFTDVATGEMSRELADDITAMDTLVTELQDLSNQFRNQY

SEQ ID NO: 741413 - protein, 344 aa, Homo sapiens
  misc_feature (123)..(124): Xaa can be any naturally occurring amino acid
AARGVVFSRLCLFGLGRLSRFSKGISALCDSRTRCLCIFHCLVYRNFVVSFENANAEAWNNLSTSYIRLKQKVKAFRTLQEALKCNYEHWQIWENYILTSTELYLGGLIANKGGLTGRHMATXXTPPPPPARRGRAGGGGWGGGGGGGVLRAYHRLLDLRDKYKDVQVLKILVRAVIDGMTDRSGDVATGLKGKLQELFGRVTSRVTNDGEIWRLYAHVYGNGQSEKPDENEKAFQCLSKAYKCDTQSNCWEKDITSFKEVVQRALGLAHVAIKCSKNKSSSQEAVQMLSSVRLNLRGLLSKAKQLFTDVATGEMSRELADDITAMDTLVTELQDLSNQFRNQY

SEQ ID NO: 741414 - protein, 186 aa, Homo sapiens
ARSRHGSGGEGPSELFCGIREQQLRLLGREDNIEPERRVAEPRIRRSRRAAVGTRRRSGSRDLDELFRSVTRPAFLYNPLNKQIDWERHVVKAPEEPPKEFKIWKSNYVPPPETYTTEKKPPPPELDMAIKWSNIYEDNGDDAPQNAKKARLLPEGEETLESDDEKDEHTSKKRKVEPGEPAKKKK

SEQ ID NO: 741415 - protein, 574 aa, Homo sapiens
MEPNSLRTKVPAFLSDLGKATLRGIRKCPRCGTYNGTRGLSCKNKTCGTIFRYGARKQPSVEAVKIITGSDLQVYSVRQRDRGPDYRCFVELGVSETTIQTVDGTIITQLSSGRCYVPSCLKAATQGVVENQCQHIKLAVNCQAEATPLTLKSSVLNAMQASPETKQTIWQLATEPTGPLVQRITKNILVVKCKASQKHSLGYLHTSFVQKVSGKSLPERRFFCSCQTLKSHKSNASKDETAQRCIHFFACICAFASDETLAQEFSDFLNFDSSGLKEIIVPQLGCHSESTVSACESTASKSKKRRKDEVSGAQMNSSLLPQDAVSSNLRKSGLKKPVVASSLKRQACGQLLDEAQVTLSFQDWLASVTERIHQTMHYQFDGKPEPLVFHIPQSFFDALQQRISIGSAKKRLPNSTTAFVRKDALPLGTFSKYTWHITNILQVKQILDTPEMPLEITRSFIQNRDGTYELFKCPKVEVESIAETYGRIEKQPVLRPLELKTFLKVGNTSPDQKEPTPFIIEWIPDILPQSKIGELRIKFEYGHHRNGHVAEYQDQRPPLDQPLELAPLTTITFP

SEQ ID NO: 741416 - protein, 574 aa, Homo sapiens; identical to SEQ ID NO: 741415

SEQ ID NO: 741417 - protein, 574 aa, Homo sapiens; identical to SEQ ID NO: 741415

SEQ ID NO: 741418 - protein, 574 aa, Homo sapiens; identical to SEQ ID NO: 741415

SEQ ID NO: 741419 - protein, 574 aa, Homo sapiens; identical to SEQ ID NO: 741415

SEQ ID NO: 741420 - protein, 574 aa, Homo sapiens; identical to SEQ ID NO: 741415

SEQ ID NO: 741421 - protein, 485 aa, Homo sapiens [sequence omitted]

SEQ ID NO: 741422 - protein, 115 aa, Homo sapiens [sequence omitted]

SEQ ID NO: 741423 - protein, 480 aa, Homo sapiens
MKRSVAVWLLVGLSLGVPQFGKGDICDPNPCENGGICLPGLADGSFSCECPDGFTDPNCSSVVEVASDEEEPTSAGPCTPNPCHNGGTCEISEAYRGDTFIGYVCKCPRGFNGIHCQHNINECEVEPCKNGGICTDLVANYSCECPGEFMGRNCQYKCSGPLGIEGGIISNQQITASSTHRALFGLQKWYPYYARLNKKGLINAWTAAENDRWPWIQINLQRKMRVTGVITQGAKRIGSPEYIKSYKIAYSNDGKTWAMYKVKGTNEDMVFRGNIDNNTPYANSFTPPIKAQYVRLYPQVCRRHCTLRMELLGCELSGCSEPLGMKSGHIQDYQITASSIFRTLNMDMFTWEPRKARLDKQGKVNAWTSGHNDQSQWLQVDLLVPTKVTGIITQGAKDFGHVQFVGSYKLAYSNDGEHWTVYQDEKQRKDKVFQGNFDNDTHRKNVIDPPIYARHIRILPWSWYGRITLRSELLGCTEEE

SEQ ID NO: 741424 - protein, 480 aa, Homo sapiens; identical to SEQ ID NO: 741423

SEQ ID NO: 741425 - protein, 470 aa, Homo sapiens
MKRSVAVWLLVGLSLGVPQFGKGDICDPNPCENGGICLPGLADGSFSCECPDGFTDPNCSSVVEVGPCTPNPCHNGGTCEISEAYRGDTFIGYVCKCPRGFNGIHCQHNINECEVEPCKNGGICTDLVANYSCECPGEFMGRNCQYKCSGPLGIEGGIISNQQITASSTHRALFGLQKWYPYYARLNKKGLINAWTAAENDRWPWIQINLQRKMRVTGVITQGAKRIGSPEYIKSYKIAYSNDGKTWAMYKVKGTNEDMVFRGNIDNNTPYANSFTPPIKAQYVRLYPQVCRRHCTLRMELLGCELSGCSEPLGMKSGHIQDYQITASSIFRTLNMDMFTWEPRKARLDKQGKVNAWTSGHNDQSQWLQVDLLVPTKVTGIITQGAKDFGHVQFVGSYKLAYSNDGEHWTVYQDEKQRKDKVFQGNFDNDTHRKNVIDPPIYARHIRILPWSWYGRITLRSELLGCTEEE

SEQ ID NO: 741426 - protein, 257 aa, Homo sapiens [sequence omitted]

SEQ ID NO: 741427 - protein, 257 aa, Homo sapiens [sequence omitted]

SEQ ID NO: 741428 - protein, 438 aa, Homo sapiens
MKRSVAVWLLVGLSLGVPQFGKGDICDPNPCENGGICLPGLADGSFSCECPDGFTDPNCSSVVEVASDEEEPTSAGPCTPNPCHNGGTCEISEAYRGDTFIGYVCKCPRGFNGIHCQHNINECEVEPCKNGGICTDLVANYSCECPGEFMGRNCQYKCSGPLGIEGGIISNQQITASSTHRALFGLQKWYPYYARLNKKGLINAWTAAENDRWPWIQINLQRKMRVTGVITQGAKRIGSPEYIKSYKIAYSNDGKTWAMYKVKGTNEDMVFRGNIDNNTPYANSFTPPIKAQYVRLYPQVCRRHCTLRMELLGCELSGCSEPLGMKSGHIQDYQITASSIFRTLNMDMFTWEPRKARLDKQGKVNAWTSGHNDQSQWLQVDLLVPTKVTGIITQGAKDFGHVQFVGSYKLAYSIRILPWSWYGRITLRSELLGCTEEE

SEQ ID NO: 741429 - protein, 66 aa, Homo sapiens
  misc_feature (15)..(15): Xaa can be any naturally occurring amino acid
VEHAPYPTSAKRHQXPLVFQGNFDNDTHRKNVIDPPIYARHIRILPWSWYGRITLRSELLGCTEEE

SEQ ID NO: 741430 - protein, 159 aa, Homo sapiens
YSYEGQCRLLGCKHQAPERQLQPSTLSLRQAAHLPSPGGCSCSQRDGQPGLQRAGIVIAVTGENRALSSGNRFLSSSWSWELGWNWVRTSFPATQAQRESQKYRGHKLSPFPSDSQIRRREAQSQLGKPWGLAVESNFNEMRRMPKVQSQRASLDSQAF

SEQ ID NO: 741431 - protein, 237 aa, Homo sapiens
QAGTVREALIRSEEAPARAQAAGMAGPGWGPPRLDGFILTERLGSGTYATVYKAYAKKDTREVVAIKCVAKKSLNKASVENLLTEIEILKGIRHPHIVQLKDFQWDSDNIYLIMEFCAGGDLSRFIHTRRILPEKVARVFMQQLASALQFLHERNISHLDLKPQNILLSSLEKPHLKLADFGFAQHMSPWDEKHVLRGSPLYMAPEMVCQRQYDARVDLWSMGVILYGETSFPCFSP

SEQ ID NO: 741432 - protein, 249 aa, Homo sapiens
GAGGSVEPPSARPAPQPAGTAARSEEAPARAQAAGMAGPGWGPPRLDGFILTERLGSGTYATVYKAYAKKDTREVVAIKCVAKKSLNKASVENLLTEIEILKGIRHPHIVQLKDFQWDSDNIYLIMEFCAGGDLSRFIHTRRILPEKVARVFMQQLASALQFLHERNISHLDLKPQNILLSSLEKPHLKLADFGFAQHMSPWDEKHVLRGSPLYMAPEMVCQRQYDARVDLWSMGVILYGETSFPCFSP

SEQ ID NO: 741433 - protein, 198 aa, Homo sapiens [sequence omitted]

SEQ ID NO: 741434 - protein, 494 aa, Homo sapiens
LVLASRFWDRSEEAPARAQAAGMAGPGWGPPRLDGFILTERLGSGTYATVYKAYAKKDTREVVAIKCVAKKSLNKASVENLLTEIEILKGIRHPHIVQLKDFQWDSDNIYLIMEFCAGGDLSRFIHTRRILPEKVARVFMQQLASALQFLHERNISHLDLKPQNILLSSLEKPHLKLADFGFAQHMSPWDEKHVLRGSPLYMAPEMVCQRQYDARVDLWSMGVILYEALFGQPPFASRSFSELEEKIRSNRVIELPLRPLLSRDCRDLLQRLLERDPSRRISFQDFFAHPWVDLEHMPSGESLGRATALVVQAVKKDQEGDSAAALSLYCKALDFFVPALHYEVDAQRKEAIKAKVGQYVSRAEELKAIVSSSNQALLRQGTSARDLLREMARDKPRLLAALEVASAAMAKEEAAGGEQDALDLYQHSLGELLLLLAAEPPGRRRELLHTEVQNLMARAEYLKEQVKMRESRWEADTLDKEGLSESVRSSCTLQ

SEQ ID NO: 741435 - protein, 494 aa, Homo sapiens; identical to SEQ ID NO: 741434

SEQ ID NO: 741436 - protein, 249 aa, Homo sapiens; identical to SEQ ID NO: 741432

SEQ ID NO: 741437 - protein, 171 aa, Homo sapiens
MKWPTAALASRLLGWTVLRPPYPRVPSLPQVTLHPTDGLMAVLYTGGEGRTLGEQHFFHETFVTRWLLGPVPVRFGACSPLSFLAPRRGQGAPAGYFCACPRPASRQLCPGLPFPGPLIPTQLLFALEWGTPTPLSDHPPHSMHSAPQNPPVFLGTHTCPPSWYFRLIPQA

SEQ ID NO: 741438 - protein, 113 aa, Homo sapiens
MGATLGLGSVGSVALCLWLSSPPAGVCLLSRLLCRPPCPCICPSLSLLLGTALWLVSPSFTLSLARHCAVARVSASHPLCCLHIPQMRESRWEADTLDKEGLSESVRSSCTLQ

SEQ ID NO: 741439 - protein, 149 aa, Homo sapiens
VSLRGSCSSASALQFLHERNISHLDLKPQNILLSSLEKPHLKLADFGFAQHMSPWDENTQEGSLVLISPTSVPSGPHTSHSAGLVLEFEPGTGRGRLGDSLTQCPLGHPLLGLPCRRGALGKLFPLSGPGSPHLFNGADTFTAHSMGHL

SEQ ID NO: 741440 - protein, 456 aa, Homo sapiens
MSPQRISNQLHGTIAVVRPGSQACPADRGPANGTPPPLPARSSPPSPAYERGLSLDSFLRASRPSAMTHEAPKLSPKVDRLCLLNRPLSLHLQSPHSSPLAPAAAPSDPRLQDLKAREAEAWEEPTELLGLPSALAGMQDLRLEGALHLLLAQQQLRARARAGSVRPRGQPTPGEMLPSLPVGSDSEGPENEGTRAALAAAGLSGGRHTQPAGPGRAQRTEAAATQDCALDKPLDLSEWGRARGQDTPKPAGQHGSLSPAAAHTASPEPPTQSGPLTRSPQALSNGTKGTRVPEQEEASTPMDPSRPLPGSQLSLSSPGSTEDEDTGRPLPPPHPQPPPHPQPPDLDGHPEPSKAEVLRPESDELDETDTPGSEVGLSSQAEATTSTTGEGPECICTQEHGQGPPRKRKRASEPGDKASKKPSRGRRKLTATEGPGSPRDAEDHSPSPNSSPWEET

SEQ ID NO: 741441 - protein, 382 aa, Homo sapiens
MAVLFLLLFLCGTPQAADNMQAIYVALGEAVELPCPSPPTLHGDEHLSWFCSPAAGSFTTLVAQVQVGRPAPDPGKPGRESRLRLLGNYSLWLEGSKEEDAGRYWCAVLGQHHNYQNWRVYDVLVLKGSQLSARAADGSPCNVLLCSVVPSRRMDSVTWQEGKGPVRGRVQSFWGSEAALLLVCPGEGLSEPRSRRPRIIRCLMTHNKGVSFSLAASIDASPALCAPSTGWDMPWILMLLLTMGQGVVILALSIVLWRQRVRGAPGRGNRMRCYNCGGSPSSSCKEAVTTCGEGRPQPGLEQIKLPGNPPVTLIHQHPACVAAHHCNQVETESVGDVTYPAHRDCYLGDLCNSAVASHVAPAGILAAAATALTCLLPGLWSG

SEQ ID NO: 741442 - protein, 112 aa, Homo sapiens
HGKSLFEPLQLMWNQKSKKVIFRVAWAGSFSLQDRKVVVTLSLVDMLLGFIAPAFPSPPEPLVTPDQRVWAFIWTLLPPWGHQVLEQENLAGSPHGSLIPPPVPMWNSPGCR

SEQ ID NO: 741443 - protein, 276 aa, Homo sapiens
MDSSREPTLGRLDAAGFWQVWQRFDADEKGYIEEKELDAFFLHMLMKLGTDDTVMKANLHKVKQQFMTTQDASKDGRIRMKELAGMFLSEDENFLLLFRRENPLDSSVEFMQIWRKYDADSSGFISAAELRNFLRDLFLHHKKAISEAKLEEYTGTMMKIFDRNKDGRLDLNDLARILALQENFLLQFKMDACSTEERKRDFEKIFAYYDVSKTGALEGPEVDGFVKDMMELVQPSISGVDLDKFREILLRHCDVNKDGKIQKSELALCLGLKINP

SEQ ID NO: 741444 - protein, 179 aa, Homo sapiens
MDSSREPTLGRLDAAGFWQVWQRFDADEKGYIEEKELDAFFLHMLMKLGTDDTVMKANLHKVKQQFMTTQDASKDGRIRMKELAGMFLSEDENFLLLFRRENPLDSSVEFMQIWRKYDADSSGFISAAELRNFLRDLFLHHKKAISEAKLEEYTGTMMKIFDRNKDGRLDLNDLARCHI

SEQ ID NO: 741445 - protein, 121 aa, Homo sapiens
MRMDTVMKANLHKVKQQFMTTQDASKDGRIRMKELAGMFLSEDENFLLLFRRENPLDSSVEFMQIWRKYDADSSGFISAAELRNFLRDLFLHHKKAISEAKLEEYTGTMDSGSSGKLPSPI

SEQ ID NO: 741446 - protein, 159 aa, Homo sapiens
LPPGCISRPDSGPTPGPNNVFGLSSCPAPSGPGRPTTSLSQAPQAQLRPRGGLSRLSSWPSDDICRPQMASGRWAPLGPAWASRRPPQAQIVPKSVSPGGLCRPGLLPLEGLHGPGLGLGLTADSPRPASSRLTAASPVQSSCLSATSAGPAPACQWPL

SEQ ID NO: 741447 - protein, 104 aa, Homo sapiens
REFGPRASNLEREVRTFSSLEWPSRCPLRAAHQGCAFVSTKPQPLSLLPLKAQNNTAQPCVSSVCRQFPPALQQPRPGSLWREWWRSTGILAAAVLGTDPGAWK

SEQ ID NO: 741448 - protein, 164 aa, Homo sapiens
MRFKSNKSVHYKPYQIGVVKMLSELSLVSIENVEISMKLACILGIHILLDLLLLCAINDELKAFANCRNEIRFQTGSVVGDVDFICPICPISQLEVSLALVCICALPFTKGRPRETPEMAPVSCVSSAAVSTWARQRYDRYLSDENKSLYIQLSTWVEYFRGIK

SEQ ID NO: 741449 - protein, 532 aa, Homo sapiens
MLLDAGPQFPAIGVGSFARHHHHSAAAAAAAAAEMQDRELSLAAAQNGFVDSAAAHMGAFKLNPGAHELSPGQSSAFTSQGPGAYPGSAAAAAAAAALGPHAAHVGSYSGPPFNSTRDFLFRSRGFGDSAPGGGQHGLFGPGAGGLHHAHSDAQGHLLFPGLPEQHGPHGSQNVLNGQMRLGLPGEVFGRSEQYRQVASPRTDPYSAAQLHNQYGPMNMNMGMNMAAAAAHHHHHHHHHPGAFFRYMRQQCIKQELICKWIDPEQLSNPKKSCNKTFSTMHELVTHVSVEHVGGPEQSNHVCFWEECPREGKPFKAKYKLVNHIRVHTGEKPFPCPFPGCGKVFARSENLKIHKRTHTGEKPFQCEFEGCDRRFANSSDRKKHMHVHTSDKPYLCKMCDKSYTHPSSLRKHMKVHESSPQGSESSPAASSGYESSTPPGLVSPSAEPQSSSNLSPAAAAAAAAAAAAAAAVSAVHRGGGSGSGGAGGGSGGGSGSGGGGGGAGGGGGGSSGGGSGTAGGHSGLSSNFNEWYV

SEQ ID NO: 741450 - protein, 181 aa, Homo sapiens
MDVSLEEREKPFQCEFEGCDRRFANSSDRKKHMHVHTSDKPYLCKMCDKSYTHPSSLRKHMKVHESSPQGSESSPAASSGYESSTPPGLVSPSAEPQSSSNLSPAAAAAAAAAAAAAAAVSAVHRGGGSGSGGAGGGSGGGSGSGGGGGGAGGGGGGSSGGGSGTAGGHSGLSSNFNEWYV

SEQ ID NO: 741451 - protein, 603 aa, Homo sapiens
MLLDAGPQFPAIGVGSFARHHHHSAAAAAAAAAEMQDRELSLAAAQNGFVDSAAAHMGAFKLNPGAHELSPGQSSAFTSQGPGAYPGSAAAAAAAAALGPHAAHVGSYSGPPFNSTRDFLFRSRGFGDSAPGGGQHGLFGPGAGGLHHAHSDAQGHLLFPGLPEQHGPHGSQNVLNGQMRLGLPGEVFGRSEQYRQVASPRTDPYSAAQLHNQYGPMNMNMGMNMAAAAAHHHHHHHHHPGAFFRYMRQQCIKQELICKWIDPEQLSNPKKSCNKTFSTMHELVTHVSVEHVGGPEQSNHVCFWEECPREGKPFKAKYKLVNHIRVHTGEKPFPCPFPGCGKVFARSENLKIHKRTHTGEKPFQCEFEGCDRRFANSSDRKKHMHVHTSDKPYLCKMCDKSYTHPSSLRKHMKVPPRRPGGGRGRPRRRCSTGPDHLSRPGRVPRGQGGGGNISGGALPQGPGPTAAALTPSPLWSPLPAFVLQVHESSPQGSESSPAASSGYESSTPPGLVSPSAEPQSSSNLSPAAAAAAAAAAAAAAAVSAVHRGGGSGSGGAGGGSGGGSGSGGGGGGAGGGGGGSSGGGSGTAGGHSGLSSNFNEWYV

SEQ ID NO: 741452 - protein, 149 aa, Homo sapiens
MHVHTSDKPYLCKMCDKSYTHPSSLRKHMKVHESSPQGSESSPAASSGYESSTPPGLVSPSAEPQSSSNLSPAAAAAAAAAAAAAAAVSAVHRGGGSGSGGAGGGSGGGSGSGGGGGGAGGGGGGSSGGGSGTAGGHSGLSSNFNEWYV

SEQ ID NO: 741453 - protein, 149 aa, Homo sapiens; identical to SEQ ID NO: 741452

SEQ ID NO: 741454 - protein, 541 aa, Homo sapiens
MLLDAGPQFPAIGVGSFARHHHHSAAAAAAAAAEMQDRELSLAAAQNGFVDSAAAHMGAFKLNPGAHELSPGQSSAFTSQGPGAYPGSAAAAAAAAALGPHAAHVGSYSGPPFNSTRDFLFRSRGFGDSAPGGGQHGLFGPGAGGLHHAHSDAQGHLLFPGLPEQHGPHGSQNVLNGQMRLGLPGEVFGRSEQYRQVASPRTDPYSAAQLHNQYGPMNMNMGMNMAAAAAHHHHHHHHHPGAFFRYMRQQCIKQELICKWIDPEQLSNPKKSCNKTFSTMHELVTHVSVEHVGGPEQSNHVCFWEECPREGKPFKAKYKLVNHIRVHTGEKPFPCPFPGCGKVFARSENLKIHKRTHTGEKPFQCEFEGCDRRFANSSDRKKHMHVHTSDKPYLCKMCDKSYTHPSSLRKHMKVHESSPQGSESSPAASSGYESSTPPGLVSPSAEPQSSSNLSPAAAAAAAAAAAAAAAVSAVHRGGGSGSGGAGGGSGGGSGSGGGGGGAGGGGGGSSGGGSGTAGGHSGLSSNFNEWHEEQKYPFRSL

SEQ ID NO: 741455 - protein, 220 aa, Homo sapiens [sequence omitted]

SEQ ID NO: 741456 - protein, 544 aa, Homo sapiens
MLLDAGPQFPAIGVGSFARHHHHSAAAAAAAAAEMQDRELSLAAAQNGFVDSAAAHMGAFKLNPGAHELSPGQSSAFTSQGPGAYPGSAAAAAAAAALGPHAAHVGSYSGPPFNSTRDFLFRSRGFGDSAPGGGQHGLFGPGAGGLHHAHSDAQGHLLFPGLPEQHGPHGSQNVLNGQMRLGLPGEVFGRSEQYRQVASPRTDPYSAAQLHNQYGPMNMNMGMNMAAAAAHHHHHHHHHPGAFFRYMRQQCIKQELICKWIDPEQLSNPKKSCNKTFSTMHELVTHVSVEHVGGPEQSNHVCFWEECPREGKPFKAKYKLVNHIRVHTGEKPFPCPFPGCGKVFARSENLKIHKRTHTGEKPFQCEFEGCDRRFANSSDRKKHMHVHTSDKPYLCKMCDKSYTHPSSLRKHMKSPLVPPPGFVLQVHESSPQGSESSPAASSGYESSTPPGLVSPSAEPQSSSNLSPAAAAAAAAAAAAAAAVSAVHRGGGSGSGGAGGGSGGGSGSGGGGGGAGGGGGGSSGGGSGTAGGHSGLSSNFNEWYV

SEQ ID NO: 741457 - protein, 118 aa, Homo sapiens
NAKDTLWLTPLHRAAASRNEKVLGLLLAHSADVNARDKLWQTPLHVAAANRATKCAEALAPLLSSLNVADRSGRSALHHAVHSGHLETVNLLLNKGASLNVCDKKERQPLHWAAFLDR

SEQ ID NO: 741458 - protein, 83 aa, Homo sapiens
GANVNQPNDKGFTPLHVAAVSTNGALCLELLVNNGADVNYQSKEGKSPLHMAAIHGRFTRSQILIQNGSEIDCADKFGNTPLH

SEQ ID NO: 741459 - protein, 130 aa, Homo sapiens
NAKDTLWLTPLHRAAASRNEKVLGLLLAHSADVNARDKLWQTPLHVAAANRATKCAEALAPLLSSLNVADRSGRSALHHAVHSGHLEVRTVPIQAQLGLSLFLPSYSRFPASGPSSLKEKQPGWLYKHLS

SEQ ID NO: 741460 - protein, 130 aa, Homo sapiens; identical to SEQ ID NO: 741459

SEQ ID NO: 741461 - protein, 126 aa, Homo sapiens
NAKDTLWLTPLHRAAASRNEKVLGLLLAHSADVNARDKLWQTPLHVAAANRATKCAEALAPLLSSLNVADRSGRSALHHAVHSGHLETVNLLLNKGASLNVCDKKERQPLHWAAFLGPPSALVLDR

SEQ ID NO: 741462 - protein, 87 aa, Homo sapiens
IDEPNAFGNTALHIACYLGQDAVAIELVNAGANVNQPNDKGFTPLHVAAVSTNGALCLELLVNNGADVNYQVPEGIRLRPVGSETWI

SEQ ID NO: 741463 - protein, 78 aa, Homo sapiens
YSSFHFLLFYLLLPLSLLSPAPQQKVLGLLLAHSADVNARDKLWQTPLHVAAANRATKCAEALAPLLSSLNVADRSGR

SEQ ID NO: 741464 - protein, 116 aa, Homo sapiens
PLFSRSQNGRSTNSLHCTSGKAADTQCQPMKAAWNGAVPCKGTGAELPKTMRVYFFHQCDLNVRHRVKGDYFGAVKFSEYPAGFWTCMGLLAPLFCPILLYGMGTSSSNACTLIVS

SEQ ID NO: 741465 - protein, 111 aa, Homo sapiens
MVWAKRHFWCGKLQRTQAEVEGWGTVTGGEAGEEGRAEASDPRGLPSWESPGRSFQECDRDCIFEKNYPGGGLGLRLLWECSIASSPLLCFTTLVTCFARRNVISLFNSHL

SEQ ID NO: 741466 - protein, 269 aa, Homo sapiens
TRGQEPGPRRMWPRPRAPPETSGAHRGLGKILRDLTAQVFHPWPPPQVMPEAQGTVSTLRPCPWLWIGGPHQRPGLSPQVVDAGPLGSMGWCRVDPTVACVRHVAVGQFLAGGDPSPDTCRAPSQTLEAWEGLWMPPYTPPRLLSLWFLDRTFRHHETKFAQALPSPWENPAGHGKEECCPPARPDQSRPTCQARPASSWGTREPQASRQEKPPTAEGLVSGGELLLGGVTTGRGSGWGIFNDVVASGHRPLPPPILSCPPHLVTQTVA

SEQ ID NO: 741467 - protein, 73 aa, Homo sapiens
FSFNSMRGGLLLGLVLRGPDEQTLAPVTLQRTPFKVRVAAFGSLGGVETAPSASDKCGPVPEHHPRHQEPIVG

SEQ ID NO: 741468 - protein, 628 aa, Homo sapiens
MAILPLLLCLLPLAPASSPPQSATPSPCPRRCRCQTQSLPLSVLCPGAGLLFVPPSLDRRAAELRLADNFIASVRRRDLANMTGLLHLSLSRNTIRHVAAGAFADLRALRALHLDGNRLTSLGEGQLRGLVNLRHLILSNNQLAALAAGALDDCAETLEDLDLSYNNLEQLPWEALGRLGNVNTLGLDHNLLASVPAGAFSRLHKLARLDMTSNRLTTIPPDPLFSRLPLLARPRGSPASALVLAFGGNPLHCNCELVWLRRLAREDDLEACASPPALGGRYFWAVGEEEFVCEPPVVTHRSPPLAVPAGRPAALRCRAVGDPEPRVRWVSPQGRLLGNSSRARAFPNGTLELLVTEPGDGGIFTCIAANAAGEATAAVELTVGPPPPPQLANSTSCDPPRDGDPDALTPPSAASASAKVADTGPPTDRGVQVTEHGATAALVQWPDQRPIPGIRMYQIQYNSSADDILVYRMIPAESRSFLLTDLASGRTYDLCVLAVYEDSATGLTATRPVGCARFSTEPALRPCGAPHAPFLGGTMIIALGGVIVASVLVFIFVLLMRYKVHGGQPPGKAKIPAPVSSVCSQTNGALGPTPTPAPPAPEPAALRAHTVVQLDCEPWGPGHEPVGP

SEQ ID NO: 741469 - protein, 104 aa, Homo sapiens
TAAVELTVGPPPPPQLANSTSCDPPRDGDPDALTPPSAASASAKVADTGPPTDRGVQVTEHGATAALVQWPDQRPIPGIRMYQIQYNSSADDILVYRCRVQALG

SEQ ID NO: 741470 - protein, 151 aa, Homo sapiens
ARLLLHARPGGGGHSNQRKMSLEQEEETQPGRLLGRRDAVPAFIEPNVRFWITERQVRPGPGATRGREGAGRAAWSRADPGDLGQATWAPPVSVSSSRSCAGNAHHRPSPLRAREGTQGKSKLPDAHDHNVTLQIALSEGPSPRRWLLPTA

SEQ ID NO: 741471 - protein, 356 aa, Homo sapiens
ARLLLHARPGGGGHSNQRKMSLEQEEETQPGRLLGRRDAVPAFIEPNVRFWITERQSFIRRFLQWTELLDPTNVFISVESIENSRQLLCTNEDVSSPASADQRIQEAWKRSLATVHPDSSNLIPKLFRPAAFLPFMAPTVFLSMTPLKGIKSVILPQVFLCAYMAAFNSINGNRSYTCKPLERSLLMAGAVASSTFLGVIPQFVQMKYGLTGPWIKRLLPVIFLVQASGMNVYMSRSLESIKGIAVMDKEGNVLGHSRIAGTKAVRETLASRIVLFGTSALIPEVFTYFFKRTQYFRKNPGSLWILKLSCTVLAMGLMVPFSFSIFPQIGQIQYCSLEEKIQSPTEETEIFYHRGV

SEQ ID NO: 741472 - protein, 356 aa, Homo sapiens; identical to SEQ ID NO: 741471

SEQ ID NO: 741473 - protein, 151 aa, Homo sapiens; identical to SEQ ID NO: 741470

SEQ ID NO: 741474 - protein, 151 aa, Homo sapiens; identical to SEQ ID NO: 741470

SEQ ID NO: 741475 - protein, 347 aa, Homo sapiens
ARLLLHARPGGGGHSNQRKMSLEQEEETQPGRLLGRRDAVPAFIEPNVRFWITERQSFIRRFLQWTELLDPTNVFISVESIENSRQLLCTNEDVSSPASADQRATVHPDSSNLIPKLFRPAAFLPFMAPTVFLSMTPLKGIKSVILPQVFLCAYMAAFNSINGNRSYTCKPLERSLLMAGAVASSTFLGVIPQFVQMKYGLTGPWIKRLLPVIFLVQASGMNVYMSRSLESIKGIAVMDKEGNVLGHSRIAGTKAVRETLASRIVLFGTSALIPEVFTYFFKRTQYFRKNPGSLWILKLSCTVLAMGLMVPFSFSIFPQIGQIQYCSLEEKIQSPTEETEIFYHRGV

SEQ ID NO: 741476 - protein, 221 aa, Homo sapiens
MAPTVFLSMTPLKGIKSVILPQVFLCAYMAAFNSINGNRSYTCKPLERSLLMAGAVASSTFLGVIPQFVQMKYGLTGPWIKRLLPVIFLVQASGMNVYMSRSLESIKGIAVMDKEGNVLGHSRIAGTKAVRETLASRIVLFGTSALIPEVFTYFFKRTQYFRKNPGSLWILKLSCTVLAMGLMVPFSFSIFPQIGQIQYCSLEEKIQSPTEETEIFYHRGV

SEQ ID NO: 741477 - protein, 356 aa, Homo sapiens; identical to SEQ ID NO: 741471

SEQ ID NO: 741478 - protein, 151 aa, Homo sapiens; identical to SEQ ID NO: 741470

SEQ ID NO: 741479 - protein, 333 aa, Homo sapiens
ARLLLHARPGGGGHSNQRKMSLEQEEETQPGRLLGRRDAVPAFIEPNVRFWITERQSFIRRFLQWTELLDPTNVFISVESIENSRQLLCTNEDVSSPASADQRIQEAWKRSLATVHPDSSNLIPKLFRPAAFLPFMAPTVFLSMTPLKGIKSVILPQVFLCAYMAAFNSINGNRSYTCKPLERSLLMAGAVASSTFLGVIPQFVQMKYGLTGPWIKRLLPVIFLVQASGMNVYMSRSLESIKGIAVMDKEGNVLGHSRIAGTKAVRETLASRIVLFGTSALIPEVFTYFFKRTQYFRKNPGSLWILKLSCTVLAMGLMVPFSFSIFPQIGQVT

SEQ ID NO: 741480 - protein, 356 aa, Homo sapiens; identical to SEQ ID NO: 741471

SEQ ID NO: 741481 - protein, 338 aa, Homo sapiens
ARLLLHARPGGGGHSNQRKMSLEQEEETQPGRLLGRRDAVPAFIEPNVRFWITERQSFIRRFLQWTELLDPTNVFISVESIENSRQLLCTNEDVSSPASADQRIQEAWKRSLATVHPDSSNLIPKLFRPAAFLPFMAPTVFLSMTPLKGIKSVILPQVFLCAYMAAFNSINGNRSYTCKPLERSLLMAGAVASSTFLGVIPQFVQMKYGLTGPWIMSRSLESIKGIAVMDKEGNVLGHSRIAGTKAVRETLASRIVLFGTSALIPEVFTYFFKRTQYFRKNPGSLWILKLSCTVLAMGLMVPFSFSIFPQIGQIQYCSLEEKIQSPTEETEIFYHRGV

SEQ ID NO: 741482 - protein, 333 aa, Homo sapiens; identical to SEQ ID NO: 741479

SEQ ID NO: 741483 - protein, 342 aa, Homo sapiens
ARLLLHARPGGGGHSNQRKMSLEQEEETQPGRLLGRRDAVPAFIEPNVRFWITERQSFIRRFLQWTELLDPTNVFISVESIENSRQLLCTNEDVSSPASADQRIQEAWKRSLATVHPDSSNLIPKLFRPAAFLPFMAPTVFLSMTPLKGIKSVILPQVFLCAYMAAFNSINGNRSYTCKPLERSLLMAGAVASSTFLGVIPQFVQMKYGLTGPWIKRLLPVIFLVQASGMNVYMSRSLESIKGIAVMDKEGNVLGHSRIAGTKAVRETLASRIVLFGTSALIPEVFTYFFKRTQYFRKNPGSLWILKLSCTVLAMGLMVPFSFSIFPQIGQIQYCSLEEREF

SEQ ID NO: 741484 - protein, 143 aa, Homo sapiens
MRDADADAGGGADGGDGRGGHSCRGGVDTAAAPAGGAPPAHAPGPGRDAASAARGSRMRPHIFTLSVPFPTPLEAEIAHGSLAPDAEPHQRVVGKDLTVSGRILVVRWKAEDCRLLRISVINFLDQLSLVVRTMQRFGPPVSR

SEQ ID NO: 741485 - protein, 143 aa, Homo sapiens; identical to SEQ ID NO: 741484

SEQ ID NO: 741486 - protein, 143 aa, Homo sapiens; identical to SEQ ID NO: 741484

SEQ ID NO: 741487 - protein, 131 aa, Homo sapiens
MQTQAEALTAGMAGVATAAAGAWTQPQLRPVELPQRTRQVRAETPRLRPGGHECGRTYSPSACLSRPPWRRKSPMGPWHQMPSPTKGWLGRISHRWKAEDCRLLRISVINFLDQLSLVVRTMQRFGPPVSR

SEQ ID NO: 741488 - protein, 143 aa, Homo sapiens; identical to SEQ ID NO: 741484

SEQ ID NO: 741489 - protein, 131 aa, Homo sapiens; identical to SEQ ID NO: 741487

SEQ ID NO: 741490 - protein, 207 aa, Homo sapiens
MSSDRQRSDDESPSTSSGSSDADQRDPAAPEPEEQEERKPSATQQKKNTKLSSKTTAKLSTSAKRIQKELAEITLDPPPNCSAGPKGDNIYEWRSTILGPPGSVYEGGVFFLDITFSSDYPFKPPKVTFRTRIYHCNINSQGVICLDILKDNWSPALTISKVLLSICSLLTDCNPADPLVGSIATQYLTNRAEHDRIARQWTKRYAT

SEQ ID NO: 741491 - protein, 101 aa, Homo sapiens
LREKNHTFPSSRGFLLVPCFLQANSKMFSLFFLSFFLFFFFFQKRCGGKVFQNQRLSTQQYKYKFFIPASRIPPLQPCLLTGIMKQLNSGVKKFHPVVEVQ

SEQ ID NO: 741492 - protein, 241 aa, Homo sapiens
EGRCSRIAKNAEGASGKTLLIYHGYTFPRDNFTKMSSDRQRSDDESPSTSSGSSDADQRDPAAPEPEEQEERKPSATQQKKNTKLSSKTTAKLSTSAKRIQKELAEITLDPPPNCSAGPKGDNIYEWRSTILGPPGSVYEGGVFFLDITFSSDYPFKPPKVTFRTRIYHCNINSQGVICLDILKDNWSPALTISKVLLSICSLLTDCNPADPLVGSIATQYLTNRAEHDRIARQWTKRYAT

SEQ ID NO: 741493 - protein, 207 aa, Homo sapiens; identical to SEQ ID NO: 741490

SEQ ID NO: 741494 - protein, 267 aa, Homo sapiens
QPCRVPAALFVLAARGRTRAPPGEGRCGERARERAGTARARRASAARAPPPVFQEITSAKMSSDRQRSDDESPSTSSGSSDADQRDPAAPEPEEQEERKPSATQQKKNTKLSSKTTAKLSTSAKRIQKELAEITLDPPPNCSAGPKGDNIYEWRSTILGPPGSVYEGGVFFLDITFSSDYPFKPPKVTFRTRIYHCNINSQGVICLDILKDNWSPALTISKVLLSICSLLTDCNPADPLVGSIATQYLTNRAEHDRIARQWTKRYAT

SEQ ID NO: 741495 - protein, 240 aa, Homo sapiens
FVRGGVGVGGGGSWLQRSLNFHRYSFPRDNFTKMSSDRQRSDDESPSTSSGSSDADHRDPAAPEPEEQEERKPSATQQKKNTKLSSKTTVFLFTSAKRIQKELAEITLDPPPNCSAGPKGDNIYEWRSTILGPPGSVYEGGVFFLDITFSSDYPFKPPKVTFRTRIYHCNINSQGVICLDILKDNWSPALTISKVLLSICSLLTDCNPADPLVGSIATQYLTNRAEHDRIARQWTKRYAT

SEQ ID NO: 741496 - protein, 297 aa, Homo sapiens
MSSDRQRSDDESPSTSSGSSDADQRDPAAPEPEEQEERKPSATQQKKNTKLSSKTTAKLSTSAKRIQKELAEITLDPPPNCSFPRDNFTKMSSDRQRSDDESPSTSSGSSDADQRDPAAPEPEEQEERKPSATQQKKNTKLSSKTTAKLSTSAKRIQKELAEITLDPPPNCSAGPKGDNIYEWRSTILGPPGSVYEGGVFFLDITFSSDYPFKPPKVTFRTRIYHCNINSQGVICLDILKDNWSPALTISKVLLSICSLLTDCNPADPLVGSIATQYLTNRAEHDRIARQWTKRYAT

SEQ ID NO: 741497 - protein, 207 aa, Homo sapiens; identical to SEQ ID NO: 741490

SEQ ID NO: 741498 - protein, 207 aa, Homo sapiens; identical to SEQ ID NO: 741490

SEQ ID NO: 741499 - protein, 207 aa, Homo sapiens; identical to SEQ ID NO: 741490

SEQ ID NO: 741500 - protein, 207 aa, Homo sapiens; identical to SEQ ID NO: 741490

SEQ ID NO: 741501 - protein, 103 aa, Homo sapiens
  misc_feature (2)..(2): Xaa can be any naturally occurring amino acid
  misc_feature (9)..(9): Xaa can be any naturally occurring amino acid
  misc_feature (15)..(15): Xaa can be any naturally occurring amino acid
  misc_feature (18)..(18): Xaa can be any naturally occurring amino acid
WXFWHEHGXHTFHQXIQXKPPKVTFRTRIYHCNINSQGVICLDILKDNWSPALTISKVLLSICSLLTDCNPADPLVGSIATQYLTNRAEHDRIARQWTKRYAT

SEQ ID NO: 741502 - protein, 207 aa, Homo sapiens; identical to SEQ ID NO: 741490

SEQ ID NO: 741503 - protein, 238 aa, Homo sapiens
MDLLNYQYLDKMNNNIGILCYDSFPRDNFTKMSSDRQRSDDESPSTSSGSSDADQRDPAAPEPEEQEERKPSATQQKKNTKLSSKTTAKLSTSAKRIQKELAEITLDPPPNCSAGPKGDNIYEWRSTILGPPGSVYEGGVFFLDITFSSDYPFKPPKVTFRTRIYHCNINSQGVICLDILKDNWSPALTISKVLLSICSLLTDCNPADPLVGSIATQYLTNRAEHDRIARQWTKRYAT

SEQ ID NO: 741504 - protein, 248 aa, Homo sapiens
MKSYGQVHAVTGNDNYITNAAWLRVIKTSLIGSFPRDNFTKMSSDRQRSDDESPSTSSGSSDADQRDPAAPEPEEQEERKPSATQQKKNTKLSSKTTAKLSTSAKRIQKELAEITLDPPPNCSAGPKGDNIYEWRSTILGPPGSVYEGGVFFLDITFSSDYPFKPPKVTFRTRIYHCNINSQGVICLDILKDNWSPALTISKVLLSICSLLTDCNPADPLVGSIATQYLTNRAEHDRIARQWTKRYAT

SEQ ID NO: 741505 - protein, 149 aa, Homo sapiens
TNGRRCEIRKKVICSDSLFYHRYSAGPKGDNIYEWRSTILGPPGSVYEGGVFFLDITFSSDYPFKPPKVTFRTRIYHCNINSQGVICLDILKDNWSPALTISKVLLSICSLLTDCNPADPLVGSIATQYLTNRAEHDRIARQWTKRYAT

SEQ ID NO: 741506 - protein, 207 aa, Homo sapiens; identical to SEQ ID NO: 741490

SEQ ID NO: 741507 - protein, 207 aa, Homo sapiens; identical to SEQ ID NO: 741490

SEQ ID NO: 741508 - protein, 207 aa, Homo sapiens; identical to SEQ ID NO: 741490

SEQ ID NO: 741509 - protein, 78 aa, Homo sapiens
VRYRQSRLEQSGGVICLDILKDNWSPALTISKVLLSICSLLTDCNPADPLVGSIATQYLTNRAEHDRIARQWTKRYAT

SEQ ID NO: 741510 - protein, 207 aa, Homo sapiens; identical to SEQ ID NO: 741490

SEQ ID NO: 741511 - protein, 462 aa, Homo sapiens [sequence omitted]

SEQ ID NO: 741512 - protein, 208 aa, Homo sapiens [sequence omitted]

SEQ ID NO: 741513 - protein, 360 aa, Homo sapiens
MLKSLLRYQSGGGSVSENHMRKKLYENGVTDSLKSNFALLLKLSEELLDKWLSYPETQHVPLSQHMLGFAMKSVTQMVMGSTFEDDQEVIRFQKNHGTVWSEIGKGFLDGSLDKNMTRKKQYEDALMQLESVLRNIIKERKGRNFSQHIFIDSLVQGNLNDQQILEDSMIFSLASCIITAKLCTWAICFLTTSEEVQKKLYEEINQVFGNGPVTPEKIEQLRYCQHVLCETVRTAKLTPVSAQFQDIEGKIDRFIIPRETLVLYALGVVLQDPNTWPSPHKFDPDRFDDELVMKTFSSLGFSGTQECPELRFAYMVTTVLLSVLVKRLHLLSVEGQVIETKYELVTSSREEAWITVSKRY

SEQ ID NO: 741514 - protein, 501 aa, Homo sapiens
MLDFAIFAVTFLLALVGAVLYLYPASRQAAGIPGITPTEEKDGNLPDIVNSGSLHEFLVNLHERYGPVVSFWFGRRLVVSLGTVDVLKQHINPNKTLDPFETMLKSLLRYQSGGGSVSENHMRKKLYENGVTDSLKSNFALLLKLSEELLDKWLSYPETQHVPLSQHMLGFAMKSVTQMVMGSTFEDDQEVIRFQKNHGTVWSEIGKGFLDGSLDKNMTRKKQYEDESRSVARLECSGAISAISNLRLPGSSNSPASASRVAGTTALMQLESVLRNIIKERKGRNFSQHIFIDSLVQGNLNDQQILEDSMIFSLASCIITAKLCTWAICFLTTSEEVQKKLYEEINQVFGNGPVTPEKIEQLRYCQHVLCETVRTAKLTPVSAQFQDIEGKIDRFIIPRETLVLYALGVVLQDPNTWPSPHKFDPDRFDDELVMKTFSSLGFSGTQECPELRFAYMVTTVLLSVLVKRLHLLSVEGQVIETKYELVTSSREEAWITVSKRY

SEQ ID NO: 741515 - protein, 462 aa, Homo sapiens [sequence omitted]

SEQ ID NO: 741516 - protein, 462 aa, Homo sapiens [sequence omitted]

SEQ ID NO: 741517 - protein, 234 aa, Homo sapiens [sequence omitted]

SEQ ID NO: 741518 - protein, 295 aa, Homo sapiens
MLKSLLRYQSGGGSVSENHMRKKLYENGVTDSLKSNFALLLKLSEELLDKWLSYPETQHVPLSQHMLGFAMKSVTQMVMGSTFEDDQEVIRFQKNHGTILEDSMIFSLASCIITAKLCTWAICFLTTSEEVQKKLYEEINQVFGNGPVTPEKIEQLRYCQHVLCETVRTAKLTPVSAQFQDIEGKIDRFIIPRETLVLYALGVVLQDPNTWPSPHKFDPDRFDDELVMKTFSSLGFSGTQECPELRFAYMVTTVLLSVLVKRLHLLSVEGQVIETKYELVTSSREEAWITVSKRY

SEQ ID NO: 741519 - protein, 462 aa, Homo sapiens [sequence omitted]

SEQ ID NO: 741520 - protein, 298 aa, Homo sapiens [sequence omitted]

SEQ ID NO: 741521 - protein, 299 aa, Homo sapiens
MWLPWALLLLWVPGCFALSKCRTVAGPVGGSLSVQCPYEKEHRTLNKYWCRPPQIFLCDKIVETKGSAGKRNGRVSIRDSPANLSFTVTLENLTEEDAGTYWCGVDTPWLRDFHDPVVEVEVSVFPASTSMTPASITAAKTSTITTAFPPVSSTTLFAVGATHSASIQEETEEVVNSQLPLLLSLLALLLLLLVGASLLAWRMFQKWIKAGDHSELSQNPKQAATQSELHYANLELLMWPLQEKPAPPREVEVEYSTVASPREELHYASVVFDSNTNRIAAQRPREEEPDSDYSVIRKT

SEQ ID NO: 741522 - protein, 299 aa, Homo sapiens; identical to SEQ ID NO: 741521

SEQ ID NO: 741523 - protein, 169 aa, Homo sapiens
MTPASITAAKTSTITTAFPPVSSTTLFAVGATHSASIQEETEEVVNSQLPLLLSLLALLLLLLVGASLLAWRMFQKWIKAGDHSELSQNPKQAATQSELHYANLELLMWPLQEKPAPPREVEVEYSTVASPREELHYASVVFDSNTNRIAAQRPREEEPDSDYSVIRKT

SEQ ID NO: 741524 - protein, 150 aa, Homo sapiens
MWLPWALLLLWVPASTSMTPASITAAKTSTITTAFPPVSSTTLFAVGATHSASIQEETEEVVNSQLPLLLSLLALLLLLLVGASLLAWRMFQKWIKAGDHSELSQNPKQASPREELHYASVVFDSNTNRIAAQRPREEEPDSDYSVIRKT

SEQ ID NO: 741525 - protein, 169 aa, Homo sapiens; identical to SEQ ID NO: 741523

SEQ ID NO: 741526 - protein, 103 aa, Homo sapiens
MWLPWALLLLWVPAGDHSELSQNPKQAATQSELHYANLELLMWPLQEKPAPPREVEVEYSTVASPREELHYASVVFDSNTNRIAAQRPREEEPDSDYSVIRKT

SEQ ID NO: 741527 - protein, 130 aa, Homo sapiens
MTGSPLPAPVQALHPGNSEAMLLSSPPLHSCCLWVLFLSWSLLGLVSPVLSSSGVLISSFLIRPFGVSLLVVPDIGRQLGAVPGGAALAASSWHHRVPGFPATPASLSLLLLGSGPTGSVHGGGYTQLFP

SEQ ID NO: 741528 - protein, 130 aa, Homo sapiens; identical to SEQ ID NO: 741527

SEQ ID NO: 741529 - protein, 963 aa, Homo sapiens
QTRPAPETAPARARDTLSAMTVSGPGTPEPRPATPGASSVEQLRKEGNELFKCGDYGGALAAYTQALGLDATPQDQAVLHRNRAACHLKLEDYDKAETEASKAIEKDGGDVKALYRRSQALEKLGRLDQAVLDLQRCVSLEPKNKVFQEALRNIGGQIQEKVRYMSSTDAKVEQMFQILLDPEEKGTEKKQKASQNLVVLAREDAGAEKIFRSNGVQLLQRLLDMGETDLMLAALRTLVGICSEHQSRTVATLSILGTRRVVSILGVESQAVSLAACHLLQVMFDALKEGVKKGFRGKEGAIIVDPARELKVLISNLLDLLTEVGVSGQGRDNALTLLIKAVPRKSLKDPNNSLTLWVIDQGLKKILEVGGSLQDPPGELAVTANSRMSASILLSKLFDDLKCDAERENFHRLCENYIKSWFEGQGLAGKLRAIQTVSCLLQGPCDAGNRALELSGVMESVIALCASEQEEEQLVAVEALIHAAGKAKRASFITANGVSLLKDLYKCSEKDSIRIRALVGLCKLGSAGGTDFSMKQFAEGSTLKLAKQCRKWLCNDQIDAGTRRWAVEGLAYLTFDADVKEEFVEDAAALKALFQLSRLEERSVLFAVASALVNCTNSYDYEEPDPKMVELAKYAKQHVPEQHPKDKPSFVRARVKKLLAAGVVSAMVCMVKTESPVLTSSCRELLSRVFLALVEEVEDRGTVVAQGGGRALIPLALEGTDVGQTKAAQALAKLTITSNPEMTFPGERIYEVVRPLVSLLHLNCSGLQNFEALMALTNLAGISERLRQKILKEKAVPMIEGYMFEEHEMIRRAATECMCNLAMSKEVQDLFEAQGNDRLKLLVLYSGEDDELLQRAAAGGLAMLTSMRPTLCSRIPQVTTHWLEILQALLLSSNQELQHRGAVVVLNMVEASREIASTLMESEMMEILSVLAKGDHSPVTRAAAACLDKAVEYGLIQPNQDGE

SEQ ID NO: 741530 - protein, 929 aa, Homo sapiens
MTASSVEQLRKEGNELFKCGDYGGALAAYTQALGLDATPQDQAVLHRNRAACHLKLEDYDKAETEASKAIEKDGGDVKALYRRSQALEKLGRLDQAVLDLQRCVSLEPKNKVFQEALRNIGGQIQEKVRYMSSTDAKVEQMFQILLDPEEKGTEKKQKASQNLVVLAREDAGAEKIFRSNGVQLLQRLLDMGETDLMLAALRTLVGICSEHQSRTVATLSILGTRRVVSILGVESQAVSLAACHLLQVMFDALKEGVKKGFRGKEGAIIVDPARELKVLISNLLDLLTEVGVSGQGRDNALTLLIKAVPRKSLKDPNNSLTLWVIDQGLKKILEVGGSLQDPPGELAVTANSRMSASILLSKLFDDLKCDAERENFHRLCENYIKSWFEGQGLAGKLRAIQTVSCLLQGPCDAGNRALELSGVMESVIALCASEQEEEQLVAVEALIHAAGKAKRASFITANGVSLLKDLYKCSEKDSIRIRALVGLCKLGSAGGTDFSMKQFAEGSTLKLAKQCRKWLCNDQIDAGTRRWAVEGLAYLTFDADVKEEFVEDAAALKALFQLSRLEERSVLFAVASALVNCTNSYDYEEPDPKMVELAKYAKQHVPEQHPKDKPSFVRARVKKLLAAGVVSAMVCMVKTESPVLTSSCRELLSRVFLALVEEVEDRGTVVAQGGGRALIPLALEGTDVGQTKAAQALAKLTITSNPEMTFPGERIYEVVRPLVSLLHLNCSGLQNFEALMALTNLAGISERLRQKILKEKAVPMIEGYMFEEHEMIRRAATECMCNLAMSKEVQDLFEAQGNDRLKLLVLYSGEDDELLQRAAAGGLAMLTSMRPTLCSRIPQVTTHWLEILQALLLSSNQELQHRGAVVVLNMVEASREIASTLMESEMMEILSVLAKGDHSPVTRAAAACLDKAVEYGLIQPNQDGE

SEQ ID NO: 741531 - protein, 349 aa, Homo sapiens
MSCSNVETTGAPWRPTLRPWVWTRRPRTRPFCTGTGPPATSSWKITTKQKQRHPKVGEWWALVWSCRASVVGKDSGTAAPSHSPPLAPETHLPSFFPTASGLSFSAATLTFSEAEAPSPTFVPPTFFWPFLEIFPYCSCLETVASWVLTALLFVLTIEKDGGDVKALYRRSQALEKLGRLDQAVLDLQRCVSLEPKNKVFQEALRNIGGQIQEKVRYMSSTDAKVEQMFQILLDPEEKGTEKKQKASQNLVVLAREDAGAEKIFRSNGVQLLQRLLDMGETDLMLAALRTLVGICSEHQSRVGGVERLVTASVPLSVCPSIPPSTHLSIRPSARPSIHPLFHPLPLTLF

SEQ ID NO: 741532 - protein, 947 aa, Homo sapiens
AGTVRNSGIARARDTLSAMTASSVEQLRKEGNELFKCGDYGGALAAYTQALGLDATPQDQAVLHRNRAACHLKLEDYDKAETEASKAIEKDGGDVKALYRRSQALEKLGRLDQAVLDLQRCVSLEPKNKVFQEALRNIGGQIQEKVRYMSSTDAKVEQMFQILLDPEEKGTEKKQKASQNLVVLAREDAGAEKIFRSNGVQLLQRLLDMGETDLMLAALRTLVGICSEHQSRTVATLSILGTRRVVSILGVESQAVSLAACHLLQVMFDALKEGVKKGFRGKEGAIIVDPARELKVLISNLLDLLTEVGVSGQGRDNALTLLIKAVPRKSLKDPNNSLTLWVIDQGLKKILEVGGSLQDPPGELAVTANSRMSASILLSKLFDDLKCDAERENFHRLCENYIKSWFEGQGLAGKLRAIQTVSCLLQGPCDAGNRALELSGVMESVIALCASEQEEEQLVAVEALIHAAGKAKRASFITANGVSLLKDLYKCSEKDSIRIRALVGLCKLGSAGGTDFSMKQFAEGSTLKLAKQCRKWLCNDQIDAGTRRWAVEGLAYLTFDADVKEEFVEDAAALKALFQLSRLEERSVLFAVASALVNCTNSYDYEEPDPKMVELAKYAKQHVPEQHPKDKPSFVRARVKKLLAAGVVSAMVCMVKTESPVLTSSCRELLSRVFLALVEEVEDRGTVVAQGGGRALIPLALEGTDVGQTKAAQALAKLTITSNPEMTFPGERIYEVVRPLVSLLHLNCSGLQNFEALMALTNLAGISERLRQKILKEKAVPMIEGYMFEEHEMIRRAATECMCNLAMSKEVQDLFEAQGNDRLKLLVLYSGEDDELLQRAAAGGLAMLTSMRPTLCSRIPQVTTHWLEILQALLLSSNQELQHRGAVVVLNMVEASREIASTLMESEMMEILSVLAKGDHSPVTRAAAACLDKAVEYGLIQPNQDGE

SEQ ID NO: 741533 - protein, 710 aa, Homo sapiens
MVRNSGIARARDTLSAMTASSVEQLRKEGNELFKCGDYGGALAAYTQALGLDATPQDQAVLHRNRAACHLKLEDYDKAETEASKAIEKDGGDVKALYRRSQALEKLGRLDQAVLDLQRCVSLEPKNKVFQEALRNIGGQIQEKVRYMSSTDAKVEQMFQILLDPEEKGTEKKQKASQNLVVLAREDAGAEKIFRSNGVQLLQRLLDMGETDLMLAALRTLVGICSEHQSRTVATLSILGTRRVVSILGVESQAVSLAACHLLQVMFDALKEGVKKGFRGKEGAIIVDPARELKVLISNLLDLLTEVGVSGQGRDNALTLLIKAVPRKSLKDPNNSLTLWVIDQGLKKILEVGGSLQDPPGELAVTANSRMSASILLSKLFDDLKCDAERENFHRLCENYIKSWFEGQGLAGKLRAIQTVSCLLQGPCDAGNRALELSGVMESVIALCASEQEEEQLVAVEALIHAAGKAKRASFITANGVSLLKDLYKCSEKDSIRIRALVGLCKLGSAGGTDFSMKQFAEGSTLKLAKQCRKWLCNDQIDAGTRRWAVEGLAYLTFDADVKEEFVEDAAALKALFQLSRLEERSVLFAVASALVNCTNSYDYEEPDPKMVELAKYAKQHVPEQHPKDKPSFVRARVKKLLAAGVVSAMVCMVKTESPVLTSSCRELLSRVFLALVEEVEDRGTVVAQGGGRVSWFTHPFLMAEPSAYKT

SEQ ID NO: 741534 - protein, 947 aa, Homo sapiens; identical to SEQ ID NO: 741532

SEQ ID NO: 741535 - protein, 1047 aa, Homo sapiens
MVRNSGIARARDTLSAMTASSVEQLRKEGNELFKCGDYGGALAAYTQALGLDATPQDQAVLHRNRAACHLKLEDYDKAETEASKAIEKDGGDVKALYRRSQALEKLGRLDQAVLDLQRCVSLEPKNKVFQEALRNIGGQIQEKVRYMSSTDAKVEQMFQILLDPEEKGTEKKQKASQNLVVLAREDAGAEKIFRSNGVQLLQRLLDMGETDLMLAALRTLVGICSEHQSRTVATLSILGTRRVVSILGVESQAVSLAACHLLQVMFDALKEGVKKGFRGKEGAIIVGEWKQVWGLLDVTVMEGMGLSQPGQFFGDQTCSCRLFGIRFGDIILLRFSATKVPQDKAGAQSGAWDADPPFPVSPWFVGEVEEVKLGWAAVEPTDVFLLLPDPARELKVLISNLLDLLTEVGVSGQGRDNALTLLIKAVPRKSLKDPNNSLTLWVIDQGLKKILEVGGSLQDPPGELAVTANSRMSASILLSKLFDDLKCDAERENFHRLCENYIKSWFEGQGLAGKLRAIQTVSCLLQGPCDAGNRALELSGVMESVIALCASEQEEEQLVAVEALIHAAGKAKRASFITANGVSLLKDLYKCSEKDSIRIRALVGLCKLGSAGGTDFSMKQFAEGSTLKLAKQCRKWLCNDQIDAGTRRWAVEGLAYLTFDADVKEEFVEDAAALKALFQLSRLEERSVLFAVASALVNCTNSYDYEEPDPKMVELAKYAKQHVPEQHPKDKPSFVRARVKKLLAAGVVSAMVCMVKTESPVLTSSCRELLSRVFLALVEEVEDRGTVVAQGGGRALIPLALEGTDVGQTKAAQALAKLTITSNPEMTFPGERIYEVVRPLVSLLHLNCSGLQNFEALMALTNLAGISERLRQKILKEKAVPMIEGYMFEEHEMIRRAATECMCNLAMSKEVQDLFEAQGNDRLKLLVLYSGEDDELLQRAAAGGLAMLTSMRPTLCSRIPQVTTHWLEILQALLLSSNQELQHRGAVVVLNMVEASREIASTLMESEMMEILSVLAKGDHSPVTRAAAACLDKAVEYGLIQPNQDGE

SEQ ID NO: 741536 - protein, 1016 aa, Homo sapiens
MSCSNVETTGAPWRPTLRPWVWTRRPRTRPFCTGTGPPATSSWKITTKQKQRHPKVGEWWALVWSCRASVVGKDSGTAAPSHSPPLAPETHLPSFFPTASGLSFSAATLTFSEAEAPSPTFVPPTFFWPFLEIFPYCSCLETVASWVLTALLFVLTIEKDGGDVKALYRRSQALEKLGRLDQAVLDLQRCVSLEPKNKVFQEALRNIGGQIQEKVRYMSSTDAKVEQMFQILLDPEEKGTEKKQKASQNLVVLAREDAGAEKIFRSNGVQLLQRLLDMGETDLMLAALRTLVGICSEHQSRTVATLSILGTRRVVSILGVESQAVSLAACHLLQVMFDALKEGVKKGFRGKEGAIIVDPARELKVLISNLLDLLTEVGVSGQGRDNALTLLIKAVPRKSLKDPNNSLTLWVIDQGLKKILEVGGSLQDPPGELAVTANSRMSASILLSKLFDDLKCDAERENFHRLCENYIKSWFEGQGLAGKLRAIQTVSCLLQGPCDAGNRALELSGVMESVIALCASEQEEEQLVAVEALIHAAGKAKRASFITANGVSLLKDLYKCSEKDSIRIRALVGLCKLGSAGGTDFSMKQFAEGSTLKLAKQCRKWLCNDQIDAGTRRWAVEGLAYLTFDADVKEEFVEDAAALKALFQLSRLEERSVLFAVASALVNCTNSYDYEEPDPKMVELAKYAKQHVPEQHPKDKPSFVRARVKKLLAAGVVSAMVCMVKTESPVLTSSCRELLSRVFLALVEEVEDRGTVVAQGGGRALIPLALEGTDVGQTKAAQALAKLTITSNPEMTFPGERIYEVVRPLVSLLHLNCSGLQNFEALMALTNLAGISERLRQKILKEKAVPMIEGYMFEEHEMIRRAATECMCNLAMSKEVQDLFEAQGNDRLKLLVLYSGEDDELLQRAAAGGLAMLTSMRPTLCSRIPQVTTHWLEILQALLLSSNQELQHRGAVVVLNMVEASREIASTLMESEMMEILSVLAKGDHSPVTRAAAACLDKAVEYGLIQPNQDGE

SEQ ID NO: 741537 - protein, 799 aa, Homo sapiens
MSSTDAKVEQMFQILLDPEEKGTEKKQKASQNLVVLAREDAGAEKIFRSNGVQLLQRLLDMGETDLMLAALRTLVGICSEHQSRTVATLSILGTRRVVSILGVESQAVSLAACHLLQVMFDALKEGVKKGFRGKEGAIIVDPARELKVLISNLLDLLTEVGVSGQGRDNALTLLIKAVPRKSLKDPNNSLTLWVIDQGLKKILEVGGSLQDPPGELAVTANSRMSASILLSKLFDDLKCDAERENFHRLCENYIKSWFEGQGLAGKLRAIQTVSCLLQGPCDAGNRALELSGVMESVIALCASEQEEEQLVAVEALIHAAGKAKRASFITANGVSLLKDLYKCSEKDSIRIRALVGLCKLGSAGGTDFSMKQFAEGSTLKLAKQCRKWLCNDQIDAGTRRWAVEGLAYLTFDADVKEEFVEDAAALKALFQLSRLEERSVLFAVASALVNCTNSYDYEEPDPKMVELAKYAKQHVPEQHPKDKPSFVRARVKKLLAAGVVSAMVCMVKTESPVLTSSCRELLSRVFLALVEEVEDRGTVVAQGGGRALIPLALEGTDVGQTKAAQALAKLTITSNPEMTFPGERIYEVVRPLVSLLHLNCSGLQNFEALMALTNLAGISERLRQKILKEKAVPMIEGYMFEEHEMIRRAATECMCNLAMSKEVQDLFEAQGNDRLKLLVLYSGEDDELLQRAAAGGLAMLTSMRPTLCSRIPQVTTHWLEILQALLLSSNQELQHRGAVVVLNMVEASREIASTLMESEMMEILSVLAKGDHSPVTRAAAACLDKAVEYGLIQPNQDGE

SEQ ID NO: 741538 - protein, 506 aa, Homo sapiens
MESVIALCASEQEEEQLVAVEALIHAAGKAKRASFITANGVSLLKDLYKCSEKDSIRIRALVGLCKLGSAGGTDFSMKQFAEGSTLKLAKQCRKWLCNDQIDAGTRRWAVEGLAYLTFDADVKEEFVEDAAALKALFQLSRLEERSVLFAVASALVNCTNSYDYEEPDPKMVELAKYAKQHVPEQHPKDKPSFVRARVKKLLAAGVVSAMVCMVKTESPVLTSSCRELLSRVFLALVEEVEDRGTVVAQGGGRALIPLALEGTDVGQTKAAQALAKLTITSNPEMTFPGERIYEVVRPLVSLLHLNCSGLQNFEALMALTNLAGISERLRQKILKEKAVPMIEGYMFEEHEMIRRAATECMCNLAMSKEVQDLFEAQGNDRLKLLVLYSGEDDELLQRAAAGGLAMLTSMRPTLCSRIPQVTTHWLEILQALLLSSNQELQHRGAVVVLNMVEASREIASTLMESEMMEILSVLAKGDHSPVTRAAAACLDKAVEYGLIQPNQDGE

SEQ ID NO: 741539 - protein, 812 aa, Homo sapiens
PRNSGQTHREVRYMSSTDAKVEQMFQILLDPEEKGTEKKQKASQNLVVLAREDAGAEKIFRSNGVQLLQRLLDMGETDLMLAALRTLVGICSEHQSRTVATLSILGTRRVVSILGVESQAVSLAACHLLQVMFDALKEGVKKGFRGKEGAIIVDPARELKVLISNLLDLLTEVGVSGQGRDNALTLLIKAVPRKSLKDPNNSLTLWVIDQGLKKILEVGGSLQDPPGELAVTANSRMSASILLSKLFDDLKCDAERENFHRLCENYIKSWFEGQGLAGKLRAIQTVSCLLQGPCDAGNRALELSGVMESVIALCASEQEEEQLVAVEALIHAAGKAKRASFITANGVSLLKDLYKCSEKDSIRIRALVGLCKLGSAGGTDFSMKQFAEGSTLKLAKQCRKWLCNDQIDAGTRRWAVEGLAYLTFDADVKEEFVEDAAALKALFQLSRLEERSVLFAVASALVNCTNSYDYEEPDPKMVELAKYAKQHVPEQHPKDKPSFVRARVKKLLAAGVVSAMVCMVKTESPVLTSSCRELLSRVFLALVEEVEDRGTVVAQGGGRALIPLALEGTDVGQTKAAQALAKLTITSNPEMTFPGERIYEVVRPLVSLLHLNCSGLQNFEALMALTNLAGISERLRQKILKEKAVPMIEGYMFEEHEMIRRAATECMCNLAMSKEVQDLFEAQGNDRLKLLVLYSGEDDELLQRAAAGGLAMLTSMRPTLCSRIPQVTTHWLEILQALLLSSNQELQHRGAVVVLNMVEASREIASTLMESEMMEILSVLAKGDHSPVTRAAAACLDKAVEYGLIQPNQDGE

SEQ ID NO: 741540 - protein, 828 aa, Homo sapiens
ISAFFVVRKTWNLPECPAIEEWLNKWVRYMSSTDAKVEQMFQILLDPEEKGTEKKQKASQNLVVLAREDAGAEKIFRSNGVQLLQRLLDMGETDLMLAALRTLVGICSEHQSRTVATLSILGTRRVVSILGVESQAVSLAACHLLQVMFDALKEGVKKGFRGKEGAIIVDPARELKVLISNLLDLLTEVGVSGQGRDNALTLLIKAVPRKSLKDPNNSLTLWVIDQGLKKILEVGGSLQDPPGELAVTANSRMSASILLSKLFDDLKCDAERENFHRLCENYIKSWFEGQGLAGKLRAIQTVSCLLQGPCDAGNRALELSGVMESVIALCASEQEEEQLVAVEALIHAAGKAKRASFITANGVSLLKDLYKCSEKDSIRIRALVGLCKLGSAGGTDFSMKQFAEGSTLKLAKQCRKWLCNDQIDAGTRRWAVEGLAYLTFDADVKEEFVEDAAALKALFQLSRLEERSVLFAVASALVNCTNSYDYEEPDPKMVELAKYAKQHVPEQHPKDKPSFVRARVKKLLAAGVVSAMVCMVKTESPVLTSSCRELLSRVFLALVEEVEDRGTVVAQGGGRALIPLALEGTDVGQTKAAQALAKLTITSNPEMTFPGERIYEVVRPLVSLLHLNCSGLQNFEALMALTNLAGISERLRQKILKEKAVPMIEGYMFEEHEMIRRAATECMCNLAMSKEVQDLFEAQGNDRLKLLVLYSGEDDELLQRAAAGGLAMLTSMRPTLCSRIPQVTTHWLEILQALLLSSNQELQHRGAVVVLNMVEASREIASTLMESEMMEILSVLAKGDHSPVTRAAAACLDKAVEYGLIQPNQDGE

SEQ ID NO: 741541 - protein, 947 aa, Homo sapiens; identical to SEQ ID NO: 741532

SEQ ID NO: 741542 - protein, 947 aa, Homo sapiens; identical to SEQ ID NO: 741532

SEQ ID NO: 741543 - protein, 318 aa, Homo sapiens
RSRGRVLMDEEKLLAAGVVSAMVCMVKTESPVLTSSCRELLSRVFLALVEEVEDRGTVVAQGGGRALIPLALEGTDVGQTKAAQALAKLTITSNPEMTFPGERIYEVVRPLVSLLHLNCSGLQNFEALMALTNLAGISERLRQKILKEKAVPMIEGYMFEEHEMIRRAATECMCNLAMSKEVQDLFEAQGNDRLKLLVLYSGEDDELLQRAAAGGLAMLTSMRPTLCSRIPQVTTHWLEILQALLLSSNQELQHRGAVVVLNMVEASREIASTLMESEMMEILSVLAKGDHSPVTRAAAACLDKAVEYGLIQPNQDGE

SEQ ID NO: 741544 - protein, 947 aa, Homo sapiens; identical to SEQ ID NO: 741532

SEQ ID NO: 741545 - protein, 282 aa, Homo sapiens
MARYELVVFLALVEEVEDRGTVVAQGGGRALIPLALEGTDVGQTKAAQALAKLTITSNPEMTFPGERIYEVVRPLVSLLHLNCSGLQNFEALMALTNLAGISERLRQKILKEKAVPMIEGYMFEEHEMIRRAATECMCNLAMSKEVQDLFEAQGNDRLKLLVLYSGEDDELLQRAAAGGLAMLTSMRPTLCSRIPQVTTHWLEILQALLLSSNQELQHRGAVVVLNMVEASREIASTLMESEMMEILSVLAKGDHSPVTRAAAACLDKAVEYGLIQPNQDGE

SEQ ID NO: 741546 - protein, 369 aa, Homo sapiens
MVRNSGIARARDTLSAMTASSVEQLRKEGNELFKCGDYGGALAAYTQALGLDATPQDQAVLHRNRAACHLKLEDYDKAETEASKAIEKDGGDVKALYRRSQALEKLGRLDQAVLDLQRCVSLEPKNKVFQEALRNIGGQIQEKVRYMSSTDAKVEQMFQILLDPEEKGTEKKQKASQNLVVLAREDAGAEKIFRSNGVQLLQRLLDMGETDLMLAALRTLVGICSEHQSRTVATLSILGTRRVVSILGVESQAVSLAACHLLQVMFDALKEGVKKGFRGKEGAIIVDPARELKVLISNLLDLLTEVGVSGQGRDNALTLLIKAVPRKSLKDPNNSLTLWVIDQGLKKILEVGGSLQDPPGELAVTANSR

SEQ ID NO: 741547 - protein, 347 aa, Homo sapiens
AGTVRNSGIARARDTLSAMTASSVEQLRKEGNELFKCGDYGGALAAYTQALGLDATPQDQAVLHRNRAACHLKLEDYDKAETEASKAIEKDGGDVKALYRRSQALEKLGRLDQAVLDLQRCVSLEPKNKVFQEALRNIGGQIQEKVRYMSSTDAKVEQMFQILLDPEEKGTEKKQKASQNLVVLAREDAGAEKIFRSNGVQLLQRLLDMGETDLMLAALRTLVGICSEHQSRTVATLSILGTRRVVSILGVESQAVSLAACHLLQVMFDALKEGVKKGFRGKEGAIIVDPARELKVLISNLLDLLTEVGVSGQGRDNALTLLIKAVPRKSLKDPNNSLTLWVIDQGR

SEQ ID NO: 741548 - protein, 361 aa, Homo sapiens
MVRNSGIARARDTLSAMTASSVEQLRKEGNELFKCGDYGGALAAYTQALGLDATPQDQAVLHRNRAACHLKLEDYDKAETEASKAIEKDGGDVKALYRRSQALEKLGRLDQAVLDLQRCVSLEPKNKVFQEALRNIGGQIQEKVRYMSSTDAKVEQMFQILLDPEEKGTEKKQKASQNLVVLAREDAGAEKIFRSNGVQLLQRLLDMGETDLMLAALRTLVGICSEHQSRTVATLSILGTRRVVSILGVESQAVSLAACHLLQVMFDALKEGVKKGFRGKEGAIIVDPARELKVLISNLLDLLTEVGVSGQGRDNALTLLIKAVPRKSLKDPNNSLTLWVIDQGGGAAGGRGGSDPCSRQG

SEQ ID NO: 741549 - protein, 116 aa, Homo sapiens
RAAVTVVQKKGPSELRLQPAWTKQWNMGLSNPTKMESEGVVPGPKAHAHATYCGTESKDGSSFGWWWLACPILLPILACCPRMSSVLSQRPRSVTQPCLASTACSLTQRGPFSVLL

SEQ ID NO: 741550 - protein, 65 aa, Homo sapiens
MTKGRSQPGQAALLTTLPKEEALVEKHFHLQFSPRSAERNSAECNATVKDHFLQSPGPREGVEDP

SEQ ID NO: 741551 - protein, 111 aa, Homo sapiens
TTKFAAASTASRVRRRRPQKTPPTSRVRRQRPKKTAPTSRVRRQRPKKAALASRVRRRRPQKTALVSRIRSCRLQKTALANRVRRRRPQKTAPTGPGQRTNVDAAANLVVV

SEQ ID NO: 741552 - protein, 437 aa, Homo sapiens
MRFVVALVLLNVAAAGAVPLLATESVKQEEAGVRPSAGNVSTHPSLSQRPGGSTKSHPEPQTPKDSPSKSSAEAQTPEDTPNKSGAEAKTQKDSSNKSGAEAKTQKGSTSKSGSEAQTTKDSTSKSHPELQTPKDSTGKSGAEAQTPEDSPNRSGAEAKTQKDSPSKSGSEAQTTKDVPNKSGADGQTPKDGSSKSGAEDQTPKDVPNKSGAEKQTPKDGSNKSGAEEQGPIDGPSKSGAEEQTSKDSPNKVVPEQPSRKDHSKPISNPSDNKELPKADTNQLADKGKLSPHAFKTESGEETDLISPPQEEVKSSEPTEDVEPKEAEDDDTGPEEGSPPKEEKEKMSGSASSENREGTLSDSTGSEKDDLYPNGSGNGSAESSHFFAYLVTAAILVAVLYIAHHNKRKIIAFVLEGKRSKVTRRPKASDYQRLDQKS

SEQ ID NO: 741553 - protein, 464 aa, Homo sapiens
MRRQRFAGDRMDLFPHGRDQSTARLCTARREPRKKQRIETQAHDGGGQEEPAPSDLTSAASARGEGAPALPVRSRKYEAEGTKNGGPDCCGCGGDEKPGRRGSLPTRRPEAKQPKASADISSCPLNPALRLGGSGRLRDARSRGGTGEGPRARISREHERAEALSEQDAVRGCLGPPERRSGGSRAALGHRKRQARRSWSTAFCRKRLHPPQLEPTAWRLYQVASGDQTPKDVPNKSGAEKQTPKDGSNKSGAEEQGPIDGPSKSGAEEQTSKDSPNKVVPEQPSRKDHSKPISNPSDNKELPKADTNQLADKGKLSPHAFKTESGEETDLISPPQEEVKSSEPTEDVEPKEAEDDDTGPEEGSPPKEEKEKMSGSASSENREGTLSDSTGSEKDDLYPNGSGNGSAESSHFFAYLVTAAILVAVLYIAHHNKRKIIAFVLEGKRSKVTRRPKASDYQRLDQKS

SEQ ID NO: 741554 - protein, 107 aa, Homo sapiens
MSEVGLPACELGADLSGSAVHVLSVPRTLSDSTGSEKDDLYPNGSGNGSAESSHFFAYLVTAAILVAVLYIAHHNKRKIIAFVLEGKRSKVTRRPKASDYQRLDQKS

SEQ ID NO: 741555 - protein, 82 aa, Homo sapiens
RSRGSLMLGSEKDDLYPNGSGNGSAESSHFFAYLVTAAILVAVLYIAHHNKRKIIAFVLEGKRSKVTRRPKASDYQRLDQKS

SEQ ID NO: 741556 - protein, 437 aa, Homo sapiens; identical to SEQ ID NO: 741552

SEQ ID NO: 741557 - protein, 437 aa, Homo sapiens; identical to SEQ ID NO: 741552

SEQ ID NO: 741558 - protein, 104 aa, Homo sapiens
DAWVEPTRRTTRAQPLAMLSYLLSMVTFLRTSRVQFLLAERFSFSMPYGCDSNEGSHSFSWLPLAVTLYMLGFALKEESRKKGWFQKPRGSAVDAYILSRSPQS

SEQ ID NO: 741559 - protein, 265 aa, Homo sapiens
MRFVVALVLLNVAAAGAVPLLATESVKQEEAGVRPSAGNVSTHPSLSQRPGGSTKSHPEPQTPKDSPSKSSAEAQTPEDTPNKSGAEAKTQKDSSNKSGAEAKTQKGSTSKSGSEAQTTKDSTSKSHPELQTPKDSTGKSGAEAQTPEDSPNRSGAEAKTQKDSPSKSGSEAQTTKDVPNKSGADGQTPKDGSSKSGAEDQTPKDVPNKSGAEKQTPKDGSNKSGAEEQGPIDGPSKSGAEEQTLQTRQSLNSNDFMTPLPSKHS

SEQ ID NO: 741560 - protein, 455 aa, Homo sapiens
MRFVVALVLLNVAAAGAVPLLATESVKQEEAGVRPSAGNVSTHPSLSQRPGGSTKSHPEPQTPKDSPSKSSAEAQTPEDTPNKSGAEAKTQKDSSNKSGAEAKTQKGSTSKSGSEAQTTKDSTSKSHPELQTPKDSTGKSGAEAQTPEDSPNRSGAEAKTQKDSPSKSGSEAQTTKDVPNKSGADGQTPKDGSSKSGAEDQTPKDVPNKSGAEKQTPKDGSNKSGAEEQGPIDGPSKSGAEEQTSKDSPNKVVPEQPSRKDHSKPISNPSDNKELPKADTNQLADKGKLSPHAFKTESGEETDLISPPQEEVKSSEPTEDVEPKEAEDDDTGPEEGSPPKEEKEKMSGSASSENREGTLSDSTGSEKDDLYPNGSGNGSAESSHFFAYLVTAAILVAVLYIAHHNKRKIIAFVLEGKRSKVTRRPKASDYQRLDQKYVLILNVFPAPPKRSFLPS

SEQ ID NO: 741561 - protein, 379 aa, Homo sapiens
MRFVVALVLLNVAAAGAVPLLATESVKQEEAGVRPSAGNVSTHPSLSQRPGGSTKSHPEPQTPKDSPSKSSAEAQTPEDTPNKSGAEAKTQKDSSNKSGAEAKTQKGSTSKSGSEAQTTKDSTSKSHPELQTPKDSTGKSGAEAQTPEDSPNRSGAEAKTQKDSPSKSGSEAQTTKDVPNKSGADGQTPKDGSSKSGAEDQTPKDVPNKSGAEKQTPKDGSNKSGAEEQGPIDGPSKSGAEEQTSKDSPNKEEVKSSEPTEDVEPKEAEDDDTGPEEGSPPKEEKEKMSGSASSENREGTLSDSTGSEKDDLYPNGSGNGSAESSHFFAYLVTAAILVAVLYIAHHNKRKIIAFVLEGKRSKVTRRPKASDYQRLDQKS

SEQ ID NO: 741562 - protein, 437 aa, Homo sapiens; identical to SEQ ID NO: 741552

SEQ ID NO: 741563 - protein, 437 aa, Homo sapiens; identical to SEQ ID NO: 741552

SEQ ID NO: 741564 - protein, 437 aa, Homo sapiens; identical to SEQ ID NO: 741552

SEQ ID NO: 741565 - protein, 437 aa, Homo sapiens; identical to SEQ ID NO: 741552

SEQ ID NO: 741566 - protein, 125 aa, Homo sapiens
MRFVVALVLLNVAAAGAVPLLATESVKQEEAGVRPSAGNVSTHPSLSQRPGGSTKSHPEPQTPKDSPSKSSAEAQTPEDTPNKSGAEAKTQKDSSNKSGAEAKTQKGSTSKSGSEAQTTKDSTGV

SEQ ID NO: 741567 - protein, 114 aa, Homo sapiens
MPVIPASQLLWRLKQENHLNLGDGGCGEPRSRHCTPAWATRTKLHLRKKERKKAKQKQSMPEVYSKPLTVGVLKSTWWMKEETKFRGLGRITECGEMFPKGTSSHAANVLSGEY

SEQ ID NO: 741568 - protein, 270 aa, Homo sapiens
GLKGASMGGAQLELPSGARPGVCVRRSFRAHAGDQPRRPPGPIPVPGTMKQESAAPNTPPTSQSPTPSAQFPRNDGDPQALWIFGYGSLVWRPDFAYSDSRVGFVRGYSRRFWQGDTFHRGSDKMPGRVVTLLEDHEGCTWGVAYQVQGEQVSKALKYLNVREAVLGGYDTKEVTFYPQDAPDQPLKALAYVATPQNPGYLGPAPEEAIATQILACRGFSGHNLEYLLRLADFMQLCGPQAQDEHLAAIVDAVGTMLPCFCPTEQALALV

SEQ ID NO: 741569 - protein, 270 aa, Homo sapiens; identical to SEQ ID NO: 741568

SEQ ID NO: 741570 - protein, 152 aa, Homo sapiens
NISSLPEPGRVVTLLEDHEGCTWGVAYQVQGEQVSKALKYLNVREAVLGGYDTKEVTFYPQDAPDQPLKALAYVATPQNPGYLGPAPEEAIATQILACRGFSGHNLEYLLRLADFMQLCGPQAQDEHLAAIVDAVGTMLPCFCPTEQALALV

SEQ ID NO: 741571 - protein, 270 aa, Homo sapiens; identical to SEQ ID NO: 741568

SEQ ID NO: 741572 - protein, 1857 aa, Homo sapiens
MEQLTTLPRPGDPGAMEPWALPTWHSWTPGRGGEPSSAAPSIADTPPAALQLQELRSEESSKPKGDGSSRPVGGTDPEGAEACLPSLGQQASSSGPACQRPEDEEVEAFLKAKLNMSFGDRPNLELLRALGELRQRCAILKEENQMLRKSSFPETEEKVRRLKRKNAELAVIAKRLEERARKLQETNLRVVSAPLPRPGTSLELCRKALARQRARDLSETASALLAKDKQIAALQRECRELQARLTLVGKEGPQWLHVRDFDRLLRESQREVLRLQRQIALRNQRETLPLPPSWPPGPALQARAGAPAPGAPGEATPQEDADNLPVILGEPEKEQRVQQLESELSKKRKKCESLEQEARKKQRRCEELELQLRQAQNENARLVEENSRLSGRATEKEQVEWENAELRGQLLGVTQERDSALRKSQGLQSKLESLEQVLKHMREVAQRRQQLEVEHEQARLSLREKQEEVRRLQQAQAEAQREHEGAVQLLESTLDSMQARVRELEEQCRSQTEQFSLLAQELQAFRLHPGPLDLLTSALDCGSLGDCPPPPCCCSIPQPCRGSGPKDLDLPPGSPGRCTPKSSEPAPATLTGVPRRTAKKAESLSNSSHSESIHNSPKSCPTPEVDTASEVEELEADSVSLLPAAPEGSRGGARIQVFLARYSYNPFEGPNENPEAELPLTAGEYIYIYGNMDEDGFFEGELMDGRRGLVPSNFVERVSDDDLLTSLPPELADLSHSSGPELSFLSVGGGGSSSGGQSSVGRSQPRPEEEDAGDELSLSPSPEGLGEPPAVPYPRRLVVLKQLAHSVVLAWEPPPEQVELHGFHICVNGELRQALGPGAPPKAVLENLDLWAGPLHISVQALTSRGSSDPLRCCLAVGARAGVVPSQLRVHRLTATSAEITWVPGNSNLAHAIYLNGEECPPASPSTYWATFCHLRPGTPYQAQVEAQLPPQGPWEPGWERLEQRAATLQFTTLPAGPPDAPLDVQIEPGPSPGILIISWLPVTIDAAGTSNGVRVTGYAIYADGQKIMEVASPTAGSVLVELSQLQLLQVCREVVVRTMSPHGESADSIPAPITPALAPASLPARVSCPSPHPSPEARAPLASASPGPGDPSSPLQHPAPLGTQEPPGAPPASPSREMAKGSHEDPPAPCSQEEAGAAVLGTSEERTASTSTLGEKDPGPAAPSLAKQEAEWTAGEACPASSSTQGARAQQAPNTEMCQGGDPGSGLRPRAEKEDTAELGVHLVNSLVDHGRNSDLSDIQEEEEEEEEEEEEELGSRTCSFQKQVAGNSIRENGAKSQPDPFCETDSDEEILEQILELPLQQFCSKKLFSIPEEEEEEEEDEEEEKSGAGCSSRDPGPPEPALLGLGCDSGQPRRPGQCPLSPESSRAGDCLEDMPGLVGGSSRRRGGGSPEKPPSRRRPPDPREHCSRLLSNNGPQASGRLGPTRERGGLPVIEGPRTGLEASGRGRLGPSRRCSRGRALEPGLASCLSPKCLEISIEYDSEDEQEAGSGGISITSSCYPGDGEAWGTATVGRPRGPPKANSGPKPYPRLPAWEKGEPERRGRSATGRAKEPLSRATETGEARGQDGSGRRGPQKRGVRVLRPSTAELVPARSPSETLAYQHLPVRIFVALFDYDPVSMSPNPDAGEEELPFREGQILKVFGDKDADGFYQGEGGGRTGYIPCNMVAEVAVDSPAGRQQLLQRGYLSPDILLEGSGNGPFVYSTAHTTGPPPKPRRSKKAESEGPAQPCPGPPKLVPSADLKAPHSMVAAFDYNPQESSPNMDVEAELPFRAGDVITVFGGMDDDGFYYGELNGQRGLVPSNFLEGPGPEAGGLDREPRTPQAESQRTRRRRVQC

SEQ ID NO: 741573 - protein, 1976 aa, Homo sapiens
MEQLTTLPRPGDPGAMEPWALPTWHSWTPGRGGEPSSAAPSIADTPPAALQLQELRSEESSKPKGDGSSRPVGGTDPEGAEACLPSLGQQASSSGPACQRPEDEEVEAFLKAKLNMSFGDRPNLELLRALGELRQRCAILKEENQMLRKSSFPETEEKVRRLKRKNAELAVIAKRLEERARKLQETNLRVEGPQWLHVRDFDRLLRESQREVLRLQRQIALRNQRETLPLPPSWPPGPALQARAGAPAPGAPGEATPQEDADNLPVILGEPEKEQRVQQLESELSKKRKKCESLEQEARKKQRRCEELELQLRQAQNENARLVEENSRLSGRATEKEQVEWENAELRGQLLGVTQERDSALRKSQGLQSKLESLEQVLKHMREVAQRRQQLEVEHEQARLSLREKQEEVRRLQQAQAEAQREHEGAVQLLESTLDSMQARVRELEEQCRSQTEQFSLLAQELQAFRLHPGPLDLLTSALDCGSLGDCPPPPCCCSIPQPCRGSGPKDLDLPPGSPGRCTPKSSEPAPATLTGVPRRTAKKAESLSNSSHSESIHNSPKSCPTPEVDTASEVEELEADSVSLLPAAPEGSRGGARIQVFLARYSYNPFEGPNENPEAELPLTAGEYIYIYGNMDEDGFFEGELMDGRRGLVPSNFVERVSDDDLLTSLPPELADLSHSSGPELSFLSVGGGGSSSGGQSSVGRSQPRPEEEDAGDELSLSPSPEGLGEPPAVPYPRRLVVLKQLAHSVVLAWEPPPEQVELHGFHICVNGELRQALGPGAPPKAVLENLDLWAGPLHISVQALTSRGSSDPLRCCLAVGARAGVVPSQLRVHRLTATSAEITWVPGNSNLAHAIYLNGEECPPASPSTYWATFCHLRPGTPYQAQVEAQLPPQGPWEPGWERLEQRAATLQFTTLPAGPPDAPLDVQIEPGPSPGILIISWLPVTIDAAGTSNGVRVTGYAIYADGQKIMEVASPTAGSVLVELSQLQLLQVCREVVVRTMSPHGESADSIPAPITPALAPASLPARVSCPSPHPSPEARAPLASASPGPGDPSSPLQHPAPLGTQEPPGAPPASPSREMAKGSHEDPPAPCSQEEAGAAVLGTSEERTASTSTLGEKDPGPAAPSLAKQEAEWTAGEACPASSSTQGARAQQAPNTEMCQGGDPGSGLRPRAEKEDTAELGVHLVNSLVDHGRNSDLSDIQEEEEEEEEEEEEELGSRTCSFQKQVAGNSIRENGAKSQPDPFCETDSDEEILEQILELPLQQFCSKKLFSIPEEEEEEEEDEEEEKSGAGCSSRDPGPPEPALLGLGCDSGQPRRPGQCPLSPESSRAGDCLEDMPGLVGGSSRRRGGGSPEKPPSRRRPPDPREHCSRLLSNNGPQASGRLGPTRERGGLPVIEGPRTGLEASGRGRLGPSRRCSRGRALEPGLASCLSPKCLEISIEYDSEDEQEAGSGGISITSSCYPGDGEAWGTATVGRPRGPPKANSGPKPYPRLPAWEKGEPERRGRSATGRAKEPLSRATETGEARGQDGSGRRGPQKRGVRVLRPSTAELVPARSPSETLAYQHLPVRIFVALFDYDPVSMSPNPDAGEEELPFREGQILKVFGDKDADGFYQGEGGGRTGYIPCNMVAEVAVDSPAGRQQLLQRGYLSPDILLEGSGMTCCCPSPTSHQPPSNSILTLSNCCVWGAPTYPDSSRALEPALNPAAEWSDCTWAGRVEWASVAEGNTAMQPGILGPGGWVGLLSGMGDECPYETSSVTQHGPERKLQSPSPVSPTSPASLSLCFSGSGNGPFVYSTAHTTGPPPKPRRSKKAESEGPAQPCPGPPKLVPSADLKAPHSMVAAFDYNPQESSPNMDVEAELPFRAGDVITVFGGMDDDGFYYGELNGQRGLVPSNFLEGPGPEAGGLDREPRTPQAESQDWGCTTQGSPGPPGGPCTPSSGSAPRIERGEPQGRSEKVWGFFSKGKQLLRRLGSGKKE

SEQ ID NO: 741574 - protein, 1838 aa, Homo sapiens
MEQLTTLPRPGDPGAMEPWALPTWHSWTPGRGGEPSSAAPSIADTPPAALQLQELRSEESSKPKGDGSSRPVGGTDPEGAEACLPSLGQQASSSGPACQRPEDEEVEAFLKAKLNMSFGDRPNLELLRALGELRQRCAILKEENQMLRKSSFPETEEKVRRLKRKNAELAVIAKRLEERARKLQETNLRVEGPQWLHVRDFDRLLRESQREVLRLQRQIALRNQRETLPLPPSWPPGPALQARAGAPAPGAPGEATPQEDADNLPVILGEPEKEQRVQQLESELSKKRKKCESLEQEARKKQRRCEELELQLRQAQNENARLVEENSRLSGRATEKEQVEWENAELRGQLLGVTQERDSALRKSQGLQSKLESLEQVLKHMREVAQRRQQLEVEHEQARLSLREKQEEVRRLQQAQAEAQREHEGAVQLLESTLDSMQARVRELEEQCRSQTEQFSLLAQELQAFRLHPGPLDLLTSALDCGSLGDCPPPPCCCSIPQPCRGSGPKDLDLPPGSPGRCTPKSSEPAPATLTGVPRRTAKKAESLSNSSHSESIHNSPKSCPTPEVDTASEVEELEADSVSLLPAAPEGSRGGARIQVFLARYSYNPFEGPNENPEAELPLTAGEYIYIYGNMDEDGFFEGELMDGRRGLVPSNFVERVSDDDLLTSLPPELADLSHSSGPELSFLSVGGGGSSSGGQSSVGRSQPRPEEEDAGDELSLSPSPEGLGEPPAVPYPRRLVVLKQLAHSVVLAWEPPPEQVELHGFHICVNGELRQALGPGAPPKAVLENLDLWAGPLHISVQALTSRGSSDPLRCCLAVGARAGVVPSQLRVHRLTATSAEITWVPGNSNLAHAIYLNGEECPPASPSTYWATFCHLRPGTPYQAQVEAQLPPQGPWEPGWERLEQRAATLQFTTLPAGPPDAPLDVQIEPGPSPGILIISWLPVTIDAAGTSNGVRVTGYAIYADGQKIMEVASPTAGSVLVELSQLQLLQVCREVVVRTMSPHGESADSIPAPITPALAPASLPARVSCPSPHPSPEARAPLASASPGPGDPSSPLQHPAPLGTQEPPGAPPASPSREMAKGSHEDPPAPCSQEEAGAAVLGTSEERTASTSTLGEKDPGPAAPSLAKQEAEWTAGEACPASSSTQGARAQQAPNTEMCQGGDPGSGLRPRAEKEDTAELGVHLVNSLVDHGRNSDLSDIQEEEEEEEEEEEEELGSRTCSFQKQVAGNSIRENGAKSQPDPFCETDSDEEILEQILELPLQQFCSKKLFSIPEEEEEEEEDEEEEKSGAGCSSRDPGPPEPALLGLGCDSGQPRRPGQCPLSPESSRAGDCLEDMPGLVGGSSRRRGGGSPEKPPSRRRPPDPREHCSRLLSNNGPQASGRLGPTRERGGLPVIEGPRTGLEASGRGRLGPSRRCSRGRALEPGLASCLSPKCLEISIEYDSEDEQEAGSGGISITSSCYPGDGEAWGTATVGRPRGPPKANSGPKPYPRLPAWEKGEPERRGRSATGRAKEPLSRATETGEARGQDGSGRRGPQKRGVRVLRPSTAELVPARSPSETLAYQHLPVRIFVALFDYDPVSMSPNPDAGEEELPFREGQILKVFGDKDADGFYQGEGGGRTGYIPCNMVAEVAVDSPAGRQQLLQRGYLSPDILLEGSAHTTGPPPKPRRSKKAESEGPAQPCPGPPKLVPSADLKAPHSMVAAFDYNPQESSPNMDVEAELPFRAGDVITVFGGMDDDGFYYGELNGQRGLVPSNFLEGPGPEAGGLDREPRTPQAESQDWGCTTQGSPGPPGGPCTPSSGSAPRIERGEPQGRSEKVWGFFSKGKQLLRRLGSGKKE

SEQ ID NO: 741575 - protein, 418 aa, Homo sapiens
MEQLTTLPRPGDPGAMEPWALPTWHSWTPGRGGEPSSAAPSIADTPPAALQLQELRSEESSKPKGDGSSRPVGGTDPEGAEACLPSLGQQASSSGPACQRPEDEEVEAFLKAKLNMSFGDRPNLELLRALGELRQRCAILKEENQMLRKSSFPETEEKVRRLKRKNAELAVIAKRLEERARKLQETNLRVEGPQWLHVRDFDRLLRESQREVLRLQRQIALRNQRETLPLPPSWPPGPALQARAGAPAPGAPGEATPQEDADNLPVILGEPEKEQRVQQLESELSKKRKKCESLEQEARKKQRRCEELELQLRQAQNENARLVEENSRLSGRATEKEQVEWENAELRGQLLGVTQERDSALRKSQGLQSKLESLEQVLKHMREVAQRRQQLEVEHEQARLSLREKQEEVRRLQQVGRQ

SEQ ID NO: 741576 - protein, 1797 aa, Homo sapiens
MEQLTTLPRPGDPGAMEPWALPTWHSWTPGRGGEPSSAAPSIADTPPAALQLQELRSEESSKPKGDGSSRPVGGTDPEGAEACLPSLGQQASSSGPACQRPEDEEVEAFLKAKLNMSFGDRPNLELLRALGELRQRCAILKEENQMLRKSSFPETEEKVRRLKRKNAELAVIAKRLEERARKLQETNLRVEGPQWLHVRDFDRLLRESQREVLRLQRQIALRNQRETLPLPPSWPPGPALQARAGAPAPGAPGEATPQEDADNLPVILGEPEKEQRVQQLESELSKKRKKCESLEQEARKKQRRCEELELQLRQAQNENARLVEENSRLSGRATEKEQVEWENAELRGQLLGVTQERDSALRKSQGLQSKLESLEQVLKHMREVAQRRQQLEVEHEQARLSLREKQEEVRRLQQAQAEAQREHEGAVQLLESTLDSMQARVRELEEQCRSQTEQFSLLAQELQAFRLHPGPLDLLTSALDCGSLGDCPPPPCCCSIPQPCRGSGPKDLDLPPGSPGRCTPKSSEPAPATLTGVPRRTAKKAESLSNSSHSESIHNSPKSCPTPEVDTASEVEELEADSVSLLPAAPEGSRGGARIQVFLARYSYNPFEGPNENPEAELPLTAGEYIYIYGNMDEDGFFEGELMDGRRGLVPSNFVERVSDDDLLTSLPPELADLSHSSGPELSFLSVGGGGSSSGGQSSVGRSQPRPEEEDAGDELSLSPSPEGLGEPPAVPYPRRLVVLKQLAHSVVLAWEPPPEQVELHGFHICVNGELRQALGPGAPPKAVLENLDLWAGPLHISVQALTSRGSSDPLRCCLAVGARAGVVPSQLRVHRLTATSAEITWVPGNSNLAHAIYLNGEECPPASPSTYWATFCHLRPGTPYQAQVEAQLPPQGPWEPGWERLEQRAATLQFTTLPAGPPDAPLDVQIEPGPSPGILIISWLPVTIDAAGTSNGVRVTGYAIYADGQKIMEVASPTAGSVLVELSQLQLLQVCREVVVRTMSPHGESADSIPAPITPALAPASLPARVSCPSPHPSPEARAPLASASPGPGDPSSPLQHPAPLGTQEPPGAPPASPSREMAKGSHEDPPAPCSQEEAGAAVLGTSEERTASTSTLGEKDPGPAAPSLAKQEAEWTAGEACPASSSTQGARAQQAPNTEMCQGGDPGSGLRPRAEKEDTAELGVHLVNSLVDHGRNSDLSDIQEEEEEEEEEEEEELGSRTCSFQKQVAGNSIRENGAKSQPDPFCETDSDEEILEQILELPLQQFCSKKLFSIPEEEEEEEEDEEEEKSGAGCSSRDPGPPEPALLGLGCDSGQPRRPGQCPLSPESSRAGDCLEDMPGLVGGSSRRRGGGSPEKPPSRRRPPDPREHCSRLLSNNGPQASGRLGPTRERGGLPVIEGPRTGLEASGRGRLGPSRRCSRGRALEPGLASCLSPKCLEISIEYDSEDEQEAGSGGISITSSCYPGDGEAWGTATVGRPRGPPKANSGPKPYPRLPAWEKGEPERRGRSATGRAKEPLSRATETGEARGQDGSGRRGPQKRGVRVLRPSTAELVPARSPSETLAYQHLPVRIFVALFDYDPVSMSPNPDAGEEELPFREGQILKVFGDKDADGFYQGEGGGRTGYIPCNMVAEVAVDSPAGRQQLLQRGYLSPDILLEGSGNGPFVYSTAHTTGPPPKPRRSKKAESEGPAQPCPGPPKLVPSADLKAPHSMVAAFDYNPQESSPNMDVEAELPFRAGDVITVFGGMDDDGFYYGELNGQRGLVPSNFLEGPGPEAGGLDREPRTPQAESQRTRRRRVQC

SEQ ID NO: 741577 - protein, 1976 aa, Homo sapiens; identical to SEQ ID NO: 741573

SEQ ID NO: 741578 - protein, 88 aa, Homo sapiens
DTAELGVHLVNSLVDHGRNSDLSDIQEEEEEEEEEEEEELGSRTCSFQKQVAGNSIRENGAKVNGVGMGCWAPGLKLRGLPTVCQQVL

SEQ ID NO: 741579 - protein, 258 aa, Homo sapiens
CCPHARGALDWRSMAQEEGGSLPEVRARVRAAHGIPDLAQKLHFYDRWAPDYDQDVATLLYRAPRLAVDCLTQALPGPPHSALILDVACGTGLVAAELRAPGFLQLHGVDGSPGMLEQAQAPGLYQRLSLCTLGQEPLPSPEGTFDAVLIVGALSDGQVPCNAIPELHVTKPGGLVCLTTRTNWSNLQYKEALEATLDRLEQAGMWEGLVAWPVDRLWTAGSWLPPSWRWYPASLPRMASSPALSTCTESGRRPRLRK

SEQ ID NO: 741580 - protein, 143 aa, Homo sapiens
HSAPPGVLVASYTHFCSSDLCNSASSSSVLLNSLPPQAAPVPGDRQCPTCVQPLGTCSSGSPRMTCPRGATHCYDGYIHLSGGGLSTKMSIQGCVAQPSSFLLNHTRQIGIFSAREKRDVQPPASQHEGGRLGAWSVSLGGWG

SEQ ID NO: 741581 - protein, 134 aa, Homo sapiens
HSAPPGVLVASYTHFCSSDLCNSASSSSVLLNSLPPQAAPVPGDRQCPTCVQPLGTCSSGSPRMTCPRGATHCYDGYIHLSGGGLSTKMSIQGCVAQPSSFLLNHTRQIGIFSAREKRDVQPPASQHEGVEVPH

SEQ ID NO: 741582 - protein, 134 aa, Homo sapiens; identical to SEQ ID NO: 741581

SEQ ID NO: 741583 - protein, 100 aa, Homo sapiens
HSAPPGVLVASYTHFCSSDLCNSASSSSVLLNSLPPQAAPVPGDRQCPTCVQPLGTCSSGSPRMTCPRGATHCYDGYIHLSGGGLSTKMSIQGCVPNLPA

SEQ ID NO: 741584 - protein, 50 aa, Homo sapiens
RGRACSLGGGTVGGGGDQGSVLGVLGWVSRLGPRRRSRALFPGSAGSRGD

SEQ ID NO: 741585 - protein, 99 aa, Homo sapiens
GSTVAPALAVAVGEGRAAPFLRLIRLSRGLSESPGVRGFGGCVTVAKHSHRPGPQLGACAQEPAVCSWSSPTVEQPRGRGPGNRRGGCAVHTQRVVRAT

SEQ ID NO: 741586 - protein, 303 aa, Homo sapiens
RAGAGRGVPGRGVVRTGPGLGRPREAWACQAVPSGSRPPSSSVEFRPGPAHSSALGAPSTCGRPGSAILRRLAIPNAMAAVAVLRAFGASGPMCLRRGPWAQLPARFCSRDPAGAGRRESEPRPTSARQLDGIRNIVLSNPKKRNTLSLAMLKSLQSDILHDADSNDLKVIIISAEGPVFSSGHDLKELTEEQGRDYHAEVFQTCSKVMMHIRNHPVPVIAMVNGLATAAGCQLVASCDIAVASDKSSFATPGVNVGLFCSTPGVALARAVPRKSLALSPRLEYSGAISAHCNVQGILLPQPP

SEQ ID NO: 741587 - protein, 415 aa, Homo sapiens
RAGAGRGVPGRGVVRTGPGLGRPREAWACQAVPSGSRPPSSSVEFRPGPAHSSALGAPSTCGRPGSAILRRLAIPNAMAAVAVLRAFGASGPMCLRRGPWAQLPARFCSRDPAGAGRRESEPRPTSARQLDGIRSAPGRAGSSRWCRVGVRAPPLTRGGPGEPEPRLRPWGGNSPCPGPGPGSETRRNIVLSNPKKRNTLSLAMLKSLQSDILHDADSNDLKVIIISAEGPVFSSGHDLKELTEEQGRDYHAEVFQTCSKLATAAGCQLVASCDIAVASDKSSFATPGVNVGLFCSTPGVALARAVPRKVALEMLFTGEPISAQEALLHGLLSKVVPEAELQEETMRIARKIASLSRPVVSLGKATFYKQLPQDLGTAYYLTSQAMVDNLALRDGQEGITAFLQKRKPVWSHEPV

SEQ ID NO: 741588 - protein, 380 aa, Homo sapiens
RAGAGRGVPGRGVVRTGPGLGRPREAWACQAVPSGSRPPSSSVEFRPGPAHSSALGAPSTCGRPGSAILRRLAIPNAMAAVAVLRAFGASGPMCLRRGPWAQLPARFCSRDPAGAGRRESEPRPTSARQLDGIRNIVLSNPKKRNTLSLAMLKSLQSDILHDADSNDLKVIIISAEGPVFSSGHDLKELTEEQGRDYHAEVFQTCSKVMMHIRNHPVPVIAMVNGLATAAGCQLVASCDIAVASDKSSFATPGVNVGLFCSTPGVALARAVPRKVALEMLFTGEPISAQEALLHGLLSKVVPEAELQEETMRIARKIASLSRPVVSLGKATFYKQLPQDLGTAYYLTSQAMVDNLALRDGQEGITAFLQKRKPVWSHEPV

SEQ ID NO: 741589 - protein, 433 aa, Homo sapiens
RAGAGRGVPGRGVVRTGPGLGRPREAWACQAVPSGSRPPSSSVEFRPGPAHSSALGAPSTCGRPGSAILRRLAIPNAMAAVAVLRAFGASGPMCLRRGPWAQLPARFCSRDPAGAGRRESEPRPTSARQLDGIRSAPGRAGSSRWCRVGVRAPPLTRGGPGEPEPRLRPWGGNSPCPGPGPGSETRRNIVLSNPKKRNTLSLAMLKSLQSDILHDADSNDLKVIIISAEGPVFSSGHDLKELTEEQGRDYHAEVFQTCSKVMMHIRNHPVPVIAMVNGLATAAGCQLVASCDIAVASDKSSFATPGVNVGLFCSTPGVALARAVPRKVALEMLFTGEPISAQEALLHGLLSKVVPEAELQEETMRIARKIASLSRPVVSLGKATFYKQLPQDLGTAYYLTSQAMVDNLALRDGQEGITAFLQKRKPVWSHEPV

SEQ ID NO: 741590 - protein, 56 aa, Homo sapiens
AEWWLGMEAKAAPKPAASGACSVSAEETEKWMEEAMHMILCYAQCFHVGHVISPTE

SEQ ID NO: 741591 - protein, 197 aa, Homo sapiens
AEWWLGMEAKAAPKPAASGACSVSAEETEKWMEEAMHMAKEALENTEVPVGCLMVYNNEVVGKGRNEVNQTKNATRHAEMVAIDQVLDWCRQSGKSPSEVFEHTVLYVTVEPCIMCAAALRLMKIPLVVYGCQNERFGGCGSVLNIASADLPNTGRPFQCIPGYRAEEAVEMLKTFYKQENPNAPKSKVRKKECQKS

SEQ ID NO: 741592 - protein, 100 aa, Homo sapiens
PMEDDEDRDEDEEDEEDKEEVWMKLPQIESKYKISYSIVSFQDQEKLGDSHLVSTAFPQYHVKVLAFILFHLFHFESCLLAPAQLPRDNSLGPRAAPEWD

SEQ ID NO: 741593 - protein, 103 aa, Homo sapiens
MGQSYSQLGIMCIIHTWNTVWYHYSILQMKKMRLPKVMSFRGRVSPHLTLGQSDLLTESVIFRLDHRTVGFCGPVRETGGYQAGRQGLQPDQPGACYKATLDE

SEQ ID NO: 741594 - protein, 133 aa, Homo sapiens
KNGSNSTVLFKQGIYFLFLFYPFHDLVLFQALSQSQMDLNSPEQRQPRATQLSCPLCGITLSLCPTESPPHFPFPALLPFCKCKTSFPLNCITEIASERAFLQLISSVSNSSSILHPKSSCHCLQNLKLIPKL

SEQ ID NO: 741595 - protein, 66 aa, Homo sapiens
LQIPGVAGLKAEMRGLLTWELFIANAAWLQFLRPAAVGPACKRTVTTPRRCSPPGVTLLQKTQLPK

SEQ ID NO: 741596 - protein, 1214 aa, Homo sapiens
AAAGEGWGAPTQSEPRRGRLRLTQRFPRAASAHPRPHQPPPGGCTRAGEEGATVRVGGAGWVPEVTSSAVEAGAAEAELRSCWVHRPLPSAREVTNVKDVAEVFQKWLKIEGKKCHCLSEKTKQNMGNTTTKFRKALINGDENLACQIYENNPQLKESLDPNTSYGEPYQHNTPLHYAARHGMNKILGTFLGRDGNPNKRNVHNETSMHLLCMGPQIMISEGALHPRLARPTEDDFRRADCLQMILKWKGAKLDQGEYERAAIDAVDNKKNTPLHYAAASGMKACVELLVKHGGDLFAENENKDTPCDCAEKQHHKDLALNLESQMVFSRDPEAEEIEAEYAALDKREPYEGLRPQDLRRLKDMLIVETADMLQAPLFTAEALLRAHDWDREKLLEAWMSNPENCCQRSGVQMPTPPPSGYNAWDTLPSPRTPRTTRSSVTSPDEISLSPGDLDTSLCDICMCSISVFEDPVDMPCGHDFCRGCWESFLNLKIQEGEAHNIFCPAYDCFQLVPVDIIESVVSKEMDKRYLQFDIKAFVENNPAIKWCPTPGCDRAVRLTKQGSNTSGSDTLSFPLLRAPAVDCGKGHLFCWECLGEAHEPCDCQTWKNWLQKITEMKPEELVGVSEAYEDAANCLWLLTNSKPCANCKSPIQKNEGCNHMQCAKCKYDFCWICLEEWKKHSSSTGGYYRCTRYEVIQHVEEQSKEMTVEAEKKHKRFQELDRFMHYYTRFKNHEHSYQLEQRLLKTAKEKMEQLSRALKETEGGCPDTTFIEDAVHVLLKTRRILKCSYPYGFFLEPKSTKKEIFELMQTDLEMVTEDLAQKVNRPYLRTPRHKIIKAACLVQQKRQEFLASVARGVAPADSPEAPRRSFAGGTWDWEYLGFASPEEYAEFQYRRRHRQRRRGDVHSLLSNPPDPDEPSESTLDIPEGGSSSRRPGTSVVSSASMSVLHSSSLRDYTPASRSENQDSLQALSSLDEDDPNILLAIQLSLQESGLALDEETRDFLSNEASLGAIGTSLPSRLDSVPRNTDSPRAALSSSELLELGDSLMRLGAENDPFSTDTLSSHPLSEARSDFCPSSSDPDSAGQDPNINDNLLGNIMAWFHDMNPQSIALIPPATTEISADSQLPCIKDGSEGVKDVELVLPEDSMFEDASVSEGRGTQIEENPLEENILAGEAASQAGDSGNEAANRGDGSDVSSQTPQTSSDWLEQVHLV

SEQ ID NO: 741597 - protein, 1241 aa, Homo sapiens
AAAGEGWGAPTQSEPRRGRLRLTQRFPRAASAHPRPHQPPPGGCTRAGEEGATVRVGGAGWVPEVTSSAVEAGAAEAELRSCWVHRPLPSAREVTNVKDVAEVFQKWLKIEGKKCHCLSEKTKQNMGNTTTKFRKALINGDENLACQIYENNPQLKESLDPNTSYGEPYQHNTPLHYAARHGMNKILGTFLGRDGNPNKRNVHNETSMHLLCMGPQIMISEGALHPRLARPTEDDFRRADCLQMILKWKGAKLDQGEYERAAIDAVDNKKNTPLHYAAASGMKACVELLVKHGGDLFAENENKDTPCDCAEKQHHKDLALNLESQMVFSRDPEAEEIEAEYAALDKREYLTALKVIAGLFSLKMEQFIFATGKRKPYEGLRPQDLRRLKDMLIVETADMLQAPLFTAEALLRAHDWDREKLLEAWMSNPENCCQRSGVQMPTPPPSGYNAWDTLPSPRTPRTTRSSVTSPDEISLSPGDLDTSLCDICMCSISVFEDPVDMPCGHDFCRGCWESFLNLKIQEGEAHNIFCPAYDCFQLVPVDIIESVVSKEMDKRYLQFDIKAFVENNPAIKWCPTPGCDRAVRLTKQGSNTSGSDTLSFPLLRAPAVDCGKGHLFCWECLGEAHEPCDCQTWKNWLQKITEMKPEELVGVSEAYEDAANCLWLLTNSKPCANCKSPIQKNEGCNHMQCAKCKYDFCWICLEEWKKHSSSTGGYYRCTRYEVIQHVEEQSKEMTVEAEKKHKRFQELDRFMHYYTRFKNHEHSYQLEQRLLKTAKEKMEQLSRALKETEGGCPDTTFIEDAVHVLLKTRRILKCSYPYGFFLEPKSTKKEIFELMQTDLEMVTEDLAQKVNRPYLRTPRHKIIKAACLVQQKRQEFLASVARGVAPADSPEAPRRSFAGGTWDWEYLGFASPEEYAEFQYRRRHRQRRRGDVHSLLSNPPDPDEPSESTLDIPEGGSSSRRPGTSVVSSASMSVLHSSSLRDYTPASRSENQDSLQALSSLDEDDPNILLAIQLSLQESGLALDEETRDFLSNEASLGAIGTSLPSRLDSVPRNTDSPRAALSSSELLELGDSLMRLGAENDPFSTDTLSSHPLSEARSDFCPSSSDPDSAGQDPNINDNLLGNIMAWFHDMNPQSIALIPPATTEISADSQLPCIKDGSEGVKDVELVLPEDSMFEDASVSEGRGTQIEENPLEENILAGEAASQAGDSGNEAANRGDGSDVSSQTPQTSSDWLEQVHLV

SEQ ID NO: 741598 - protein, 1214 aa, Homo sapiens; identical to SEQ ID NO: 741596

SEQ ID NO: 741599 - protein, 1002 aa, Homo sapiens
IFTLVKFCSFPFEDHLQTICSNETSMHLLCMGPQIMISEGALHPRLARPTEDDFRRADCLQMILKWKGAKLDQGEYERAAIDAVDNKKNTPLHYAAASGMKACVELLVKHGGDLFAENENKDTPCDCAEKQHHKDLALNLESQMVFSRDPEAEEIEAEYAALDKREPYEGLRPQDLRRLKDMLIVETADMLQAPLFTAEALLRAHDWDREKLLEAWMSNPENCCQRSGVQMPTPPPSGYNAWDTLPSPRTPRTTRSSVTSPDEISLSPGDLDTSLCDICMCSISVFEDPVDMPCGHDFCRGCWESFLNLKIQEGEAHNIFCPAYDCFQLVPVDIIESVVSKEMDKRYLQFDIKAFVENNPAIKWCPTPGCDRAVRLTKQGSNTSGSDTLSFPLLRAPAVDCGKGHLFCWECLGEAHEPCDCQTWKNWLQKITEMKPEELVGVSEAYEDAANCLWLLTNSKPCANCKSPIQKNEGCNHMQCAKCKYDFCWICLEEWKKHSSSTGGYYRCTRYEVIQHVEEQSKEMTVEAEKKHKRFQELDRFMHYYTRFKNHEHSYQLEQRLLKTAKEKMEQLSRALKETEGGCPDTTFIEDAVHVLLKTRRILKCSYPYGFFLEPKSTKKEIFELMQTDLEMVTEDLAQKVNRPYLRTPRHKIIKAACLVQQKRQEFLASVARGVAPADSPEAPRRSFAGGTWDWEYLGFASPEEYAEFQYRRRHRQRRRGDVHSLLSNPPDPDEPSESTLDIPEGGSSSRRPGTSVALSSLDEDDPNILLAIQLSLQESGLALDEETRDFLSNEASLGAIGTSLPSRLDSVPRNTDSPRAALSSSELLELGDSLMRLGAENDPFSTDTLSSHPLSEARSDFCPSSSDPDSAGQDPNINDNLLGNIMAWFHDMNPQSIALIPPATTEISADSQLPCIKDGSEGVKDVELVLPEDSMFEDASVSEGRGTQIEENPLEENILAGEAASQAGDSGNEAANRGDGSDVSSQTPQTSSDWLEQVHLV

SEQ ID NO: 741600 - protein, 1214 aa, Homo sapiens; identical to SEQ ID NO: 741596

SEQ ID NO: 741601 - protein, 1014 aa, Homo sapiens
IFTLVKFCSFPFEDHLQTICSNETSMHLLCMGPQIMISEGALHPRLARPTEDDFRRADCLQMILKWKGAKLDQGEYERAAIDAVDNKKNTPLHYAAASGMKACVELLVKHGGDLFAENENKDTPCDCAEKQHHKDLALNLESQMVFSRDPEAEEIEAEYAALDKREPYEGLRPQDLRRLKDMLIVETADMLQAPLFTAEALLRAHDWDREKLLEAWMSNPENCCQRSGVQMPTPPPSGYNAWDTLPSPRTPRTTRSSVTSPDEISLSPGDLDTSLCDICMCSISVFEDPVDMPCGHDFCRGCWESFLNLKIQEGEAHNIFCPAYDCFQLVPVDIIESVVSKEMDKRYLQFDIKAFVENNPAIKWCPTPGCDRAVRLTKQGSNTSGSDTLSFPLLRAPAVDCGKGHLFCWECLGEAHEPCDCQTWKNWLQKITEMKPEELVGVSEAYEDAANCLWLLTNSKPCANCKSPIQKNEGCNHMQCAKCKYDFCWICLEEWNQHVEEQSKEMTVEAEKKHKRFQELDRFMHYYTRFKNHEHSYQLEQRLLKTAKEKMEQLSRALKETEGGCPDTTFIEDAVHVLLKTRRILKCSYPYGFFLEPKSTKKEIFELMQTDLEMVTEDLAQKVNRPYLRTPRHKIIKAACLVQQKRQEFLASVARGVAPADSPEAPRRSFAGGTWDWEYLGFASPEEYAEFQYRRRHRQRRRGDVHSLLSNPPDPDEPSESTLDIPEGGSSSRRPGTSVVSSASMSVLHSSSLRDYTPASRSENQDSLQALSSLDEDDPNILLAIQLSLQESGLALDEETRDFLSNEASLGAIGTSLPSRLDSVPRNTDSPRAALSSSELLELGDSLMRLGAENDPFSTDTLSSHPLSEARSDFCPSSSDPDSAGQDPNINDNLLGNIMAWFHDMNPQSIALIPPATTEISADSQLPCIKDGSEGVKDVELVLPEDSMFEDASVSEGRGTQIEENPLEENILAGEAASQAGDSGNEAANRGDGSDVSSQTPQTSSDWLEQVHLV

SEQ ID NO: 741602 - protein, 798 aa, Homo sapiens
IFTLVKFCSFPFEDHLQTICSNETSMHLLCMGPQIMISEGALHPRLARPTEDDFRRADCLQMILKWKGAKLDQGEYERAAIDAVDNKKNTPLHYAAASGMKACVELLVKHGGDLFAENENKDTPCDCAEKQHHKDLALNLESQMVFSRDPEAEEIEAEYAALDKREPYEGLRPQDLRRLKDMLIVETADMLQAPLFTAEALLRAHDWDREKLLEAWMSNPENCCQRSGVQMPTPPPSGYNAWDTLPSPRTPRTTRSSVTSPDEISLSPGDLDTSLCDICMCSISVFEDPVDMPCGHDFCRGCWESFLNLKIQEGEAHNIFCPAYDCFQLVPVDIIESVVSKEMDKRYLQFDIKAFVENNPAIKWCPTPGCDRAVRLTKQGSNTSGSDTLSFPLLRAPAVDCGKGHLFCWECLGEAHEPCDCQTWKNWLQKITEMKPEELVGVSEAYEDAANCLWLLTNSKPCANCKSPIQKNEGCNHMQCAKCKYDFCWICLEEWKKHSSSTGGYYRCTRYEVIQHVEEQSKEMTVEAEKKHKRFQELDRFMHYYTRFKNHEHSYQLEQRLLKTAKEKMEQLSRALKETEGGCPDTTFIEDAVHVLLKTRRILKCSYPYGFFLEPKSTKKEIFELMQTDLEMVTEDLAQKVNRPYLRTPRHKIIKAACLVQQKRQEFLASVARGVAPADSPEAPRRSFAGGTWDWEYLGFASPEEYAEFQYRRRHRQRRRGDVHSLLSNPPDPDEPSESTLDIPEGGSSSRRPGTSVVSSASMSVLHSSSLRDYTPASRSENQDSLQALSSLDEDDPQ

SEQ ID NO: 741603 - protein, 349 aa, Homo sapiens
AAAGEGWGAPTQSEPRRGRLRLTQRFPRAASAHPRPHQPPPGGCTRAGEEGATVRVGGAGWVPEVTSSAVEAGAAEAELRSCWVHRPLPSAREVTNVKDVAEVFQKWLKIEGKKCHCLSEKTKQNMGNTTTKFRKALINGDENLACQIYENNPQLKESLDPNTSYGEPYQHNTPLHYAARHGMNKILGTFLGRDGNPNKRNVHNETSMHLLCMGPQIMISEGALHPRLARPTEDDFRRADCLQMILKWKGAKLDQGEYERAAIDAVDNKKNTPLHYAAASGMKACVELLVKHGGDLFAENENKDTPCDCAEKQHHKDLALNLESQMVFSRDPEAEEIEAEYAALDKREY

SEQ ID NO: 741604 - protein, 1032 aa, Homo sapiens
IFTLVKFCSFPFEDHLQTICSNETSMHLLCMGPQIMISEGALHPRLARPTEDDFRRADCLQMILKWKGAKLDQGEYERAAIDAVDNKKNTPLHYAAASGMKACVELLVKHGGDLFAENENKDTPCDCAEKQHHKDLALNLESQMVFSRDPEAEEIEAEYAALDKREPYEGLRPQDLRRLKDMLIVETADMLQAPLFTAEALLRAHDWDREKLLEAWMSNPENCCQRSGVQMPTPPPSGYNAWDTLPSPRTPRTTRSSVTSPDEISLSPGDLDTSLCDICMCSISVFEDPVDMPCGHDFCRGCWESFLNLKIQEGEAHNIFCPAYDCFQLVPVDIIESVVSKEMDKRYLQFDIKAFVENNPAIKWCPTPGCDRAVRLTKQGSNTSGSDTLSFPLLRAPAVDCGKGHLFCWECLGEAHEPCDCQTWKNWLQKITEMKPEELVGVSEAYEDAANCLWLLTNSKPCANCKSPIQKNEGCNHMQCAKCKYDFCWICLEEWKKHSSSTGGYYRCTRYEVIQHVEEQSKEMTVEAEKKHKRFQELDRFMHYYTRFKNHEHSYQLEQRLLKTAKEKMEQLSRALKETEGGCPDTTFIEDAVHVLLKTRRILKCSYPYGFFLEPKSTKKEIFELMQTDLEMVTEDLAQKVNRPYLRTPRHKIIKAACLVQQKRQEFLASVARGVAPADSPEAPRRSFAGGTWDWEYLGFASPEEYAEFQYRRRHRQRRRGDVHSLLSNPPDPDEPSESTLDIPEGGSSSRRPGTSVVSSASMSVLHSSSLRDYTPASRSENQDSLQALSSLDEDDPNILLAIQLSLQESGLALDEETRDFLSNEASLGAIGTSLPSRLDSVPRNTDSPRAALSSSELLELGDSLMRLGAENDPFSTDTLSSHPLSEARSDFCPSSSDPDSAGQDPNINDNLLGNIMAWFHDMNPQSIALIPPATTEISADSQLPCIKDGSEGVKDVELVLPEDSMFEDASVSEGRGTQIEENPLEENILAGEAASQAGDSGNEAANRGDGSDVSSQTPQTSSDWLEQVHLV

SEQ ID NO: 741605 - protein, 1214 aa, Homo sapiens; identical to SEQ ID NO: 741596

SEQ ID NO: 741606 - protein, 723 aa, Homo sapiens
IFTLVKFCSFPFEDHLQTICSNETSMHLLCMGPQIMISEGALHPRLARPTEDDFRRADCLQMILKWKGAKLDQGEYERAAIDAVDNKKNTPLHYAAASGMKACVELLVKHGGDLFAENENKDTPCDCAEKQHHKDLALNLESQMVFSRDPEAEEIEAEYAALDKREPYEGLRPQDLRRLKDMLIVETADMLQAPLFTAEALLRAHDWDREKLLEAWMSNPENCCQRSGVQMPTPPPSGYNAWDTLPSPRTPRTTRSSVTSPDEISLSPGDLDTSLCDICMCSISVFEDPVDMPCGHDFCRGCWESFLNLKIQEGEAHNIFCPAYDCFQLVPVDIIESVVSKEMDKRYLQFDIKAFVENNPAIKWCPTPGCDRAVRLTKQGSNTSGSDTLSFPLLRAPAVDCGKGHLFCWECLGEAHEPCDCQTWKNWLQKITEMKPEELVGVSEAYEDAANCLWLLTNSKPCANCKSPIQKNEGCNHMQCAKCKYDFCWICLEEWKKHSSSTGGYYRCTRYEVIQHVEEQSKEMTVEAEKKHKRFQELDRFMHYYTRFKNHEHSYQLEQRLLKTAKEKMEQLSRALKETEGGCPDTTFIEDAVHVLLKTRRILKCSYPYGFFLEPKSTKKEIFELMQTDLEMVTEDLAQKVNRPYLRTPRHKIIKAACLVQQKRQEFLASVARGVAPADSPEAPRRRNMLNFSIGGGTDNVVEEMFTVYSVILQTLMSQVKAL

SEQ ID NO: 741607 - protein, 1026 aa, Homo sapiens
IFTLVKFCSFPFEDHLQTICSNETSMHLLCMGPQIMISEGALHPRLARPTEDDFRRADCLQMILKWKGAKLDQGEYERAAIDAVDNKKNTPLHYAAASGMKACVELLVKHGGDLFAENENKDTPCDCAEKQHHKDLALNLESQMVFSRDPEAEEIEAEYAALDKREPYEGLRPQDLRRLKDMLIVETADMLQAPLFTAEALLRAHDWDREKLLEAWMSNPENCCQRSGVQMPTPPPSGYNAWDTLPSPRTPRTTRSSVTSPDEISLSPGDLDTSLCDICMCSISVFEDPVDMPCGHDFCRGCWESFLNLKIQEGEAHNIFCPAYDCFQLVPVDIIESVVSKEMDKRYLQFDIKAFVENNPAIKWCPTPGCDRAVRLTKQGSNTSGSDTLSFPLLRAPAVDCGKGHLFCWECLGEAHEPCDCQTWKNWLQKITEMKPEELVGVSEAYEDAANCLWLLTNSKPCANCKSPIQKNEGCNHMQCAKCKYDFCWICLEEWKKHSSSTGGYYRCTRYEVIQHVEEQSKEMTVEAEKKHKRFQELDRFMHYYTRFKNHEHSYQLEQRLLKTAKEKMEQLSRALKETEGGCPDTTFIEDAVHVLLKTRRILKCSYPYGFFLEPKSTKKEIFELMQTDLEMVTEDLAQKVNRPYLRTPRHKIIKAACLVQQKRQEFLASVARGVAPADSPEAPRRSFAGGTWDWEYLGFASPEYRRRHRQRRRGDVHSLLSNPPDPDEPSESTLDIPEGGSSSRRPGTSVVSSASMSVLHSSSLRDYTPASRSENQDSLQALSSLDEDDPNILLAIQLSLQESGLALDEETRDFLSNEASLGAIGTSLPSRLDSVPRNTDSPRAALSSSELLELGDSLMRLGAENDPFSTDTLSSHPLSEARSDFCPSSSDPDSAGQDPNINDNLLGNIMAWFHDMNPQSIALIPPATTEISADSQLPCIKDGSEGVKDVELVLPEDSMFEDASVSEGRGTQIEENPLEENILAGEAASQAGDSGNEAANRGDGSDVSSQTPQTSSDWLEQVHLV

SEQ ID NO: 741608 - protein, 1032 aa, Homo sapiens; identical to SEQ ID NO: 741604

SEQ ID NO: 741609 - protein, 274 aa, Homo sapiens
MHLCGGNGLLTQTDPKEQQRQLKKQKNRAAAQRSRQKHTDKADALHQQHESLEKDNLALRKEIQSLQAELAWWSRTLHVHERLCPMDCASCSAPGLLGCWDQAEGLLGPGPQGQHGCREQLELFQTPGSCYPAQPLSPGPQPHDSPSLLQCPLPSLSLGPAVVAEPPVQLSPSPLLFASHTGSSLQGSSSKLSALQPSLTAQTAPPQPLELEHPTRGKLGSSPDNPSSALGLARLQSREHKPALSAATWQGLVVDPSPHPLLAFPLLSSAQVHF

SEQ ID NO: 741610 - protein, 176 aa, Homo sapiens
MHLCGGNGLLTQTDPKEQQRQLKKQKNRAAAQRSRQKHTDKADALHQQHESLEKDNLALRKEIQSLQAELAWWSRTLHVHERLCPMDCASCSAPGLLGCWDQAEGLLGPGPQGQHGCREQLELFQTPGSCYPAQPLSPGPQPHDSPLYLTAPTPVWPPGPHHPQTPPKQFPHCSLD

SEQ ID NO: 741611 - protein, 282 aa, Homo sapiens
GDRRSELQPLHRPGILPQGICSTSLWKKTTSPCGRRSSPCRPSWRGGAGPCTCMSACAPWIVPPAQLQGSWAAGTRLRGSWALAHRDNMAAGSSWSCSRPRVPVTQLSRSLQVHSLMILPASSSAPCPHCPLAPLWLLNLLSSCPPALSCLPRTLVPACRGLPLSSVPSSPASRPKLPLHSPSSWSIPPEGSWGPLPTTLPLPWGLHVCRAGSTNLLSQQPLGKGWLWIPALTLSWPFLCSPLLKSTSNLVFGAGLAPSLGSGSSLSTRASPPSLLGAALRG

SEQ ID NO: 741612 - protein, 274 aa, Homo sapiens; identical to SEQ ID NO: 741609

SEQ ID NO: 741613 - protein, 91 aa, Homo sapiens
HTPTQEEERRGDKPWHDEPGLMDEAGRRSCRASSLCPVSLLGSPLPSLAGCHGQELSAFLCATTYPFSEKPVLRKDLINSFTLRCKRLMRP

SEQ ID NO: 741614 - protein, 129 aa, Homo sapiens
SVEEAEVPKPLPPASKDEDEDIQSILRTRQERRQRRQVVEAAQAPIQERLEAEEGRNSLSPVQATQKPLVSKKELEIPPRRRLSREQRGPWALEEESLVGREPEERKKGVPEKSPVLEKSSMPKKMARS

SEQ ID NO: 741615 - protein, 454 aa, Homo sapiens
SVEEAEVPKPLPPASKDEDEDIQSILRTRQERRQRRQVVEAAQAPIQERLEAEEGRNSLSPVQATQKPLVSKKELEIPPRRRLSREQRGPWALEEESLVGREPEERKKGVPEKSPVLEKSSMPKKTAPEKSLVSDKTSISEKVLASEKTSLSEKIAVSEKRNSSEKKSVLEKTSVSEKSLAPGMALGSGRRLVSEKASIFEKALASEKSPTADAKPAPKRATASEQPLAQEPPASGGSPATTKEQRGRALPGKNLPSLAKQGASDPPTVASRLPPVTLQVKIPSKEEEADMSSPTQRTYSSSLKRSSPRTISFRMKPKKENSETTLTRSASMKLPDNTVKLGEKLERYHTAIRRSESVKSRGLPCTELFVAPVGVASKRHLFEKELAGQSRAEPASSRKENLRLSGVVTSRLNLWISRTQESGDQDPQEAQKASSATERTQWGQKSDSSLDAEV

SEQ ID NO: 741616 - protein, 454 aa, Homo sapiens; identical to SEQ ID NO: 741615

SEQ ID NO: 741617 - protein, 454 aa, Homo sapiens; identical to SEQ ID NO: 741615

SEQ ID NO: 741618 - protein, 401 aa, Homo sapiens
SVEEAEVPKPLPPASKDEDEDIQSILRTRQERRQRRQVVEAAQAPIQERLEAEEGRNSLSPVQATQKPLVSKKELEIPPRRRLSREQRGPWALEEESLVGREPEERKKGVPEKSPVLEKSSMPKKTAPEKSLVSDKTSISEKVLASEKTSLSEKIAVSEKRNSSEKKSVLEKTSVSEKSLAPGMALGSGRRLVSEKASIFEKALASEKSPTADAKPAPKRATASEQPLAQEPPASGGSPATTKEQRGRALPGKNLPSLAKQGASDPPTVASRLPPVTLQVKIPSKEEEADMSSPTQRTYSSSLKRSSPRTISFRMKPKKENSETTLTRSASMKLPDNTVKLGEKLERYHTAIRRSESVKSRGLPCTELFVAPVGVASKRHLFEKELAGQSRAEPASSRKGL

SEQ ID NO: 741619 - protein, 125 aa, Homo sapiens
MPGPCLSQQHPFLSLSLFPFCLWICLARSLGSGIFARLSQLLPSPASWGWDFLTLRQAQQMLGPSLCPGHSTSAHQHYGAYVLPRDLCSFLLTSTVRARRPSRTPESPVSSAPSKCLFVYDVPLL

SEQ ID NO: 741620 - protein, 208 aa, Homo sapiens
YLSGPVLSGLYSRARTLEIRTPRRHRKHHLQPRGLSGDRNLTPRWTLRCDKPRQDRPASLRLKGPPSCQAPASHSSTLSSHCPCSLFACGSVWPGPWGQEYLQDSASSFPAQPLGAGTFSPCGRHNRCWDPVSAQVTAQVHISTMGPMSCPETSAPSCSHPQSGHGAPQELQSHLSHRLPASASLSMMSPFSEAWTHPSLSLGPAPSH

SEQ ID NO: 741621 - protein, 454 aa, Homo sapiens; identical to SEQ ID NO: 741615

SEQ ID NO: 741622 - protein, 179 aa, Homo sapiens
SPSIPDTPLTCANSSLPHRCDKPRQDRPASLRLKGPPSCQAPASHSSTLSSHCPCSLFACGSVWPGPWGQEYLQDSASSFPAQPLGAGTFSPCGRHNRCWDPVSAQVTAQVHISTMGPMSCPETSAPSCSHPQSGHGAPQELQSHLSHRLPASASLSMMSPFSEAWTHPSLSLGPAPSH

SEQ ID NO: 741623 - protein, 454 aa, Homo sapiens; identical to SEQ ID NO: 741615

SEQ ID NO: 741624 - protein, 507 aa, Homo sapiens
SVEEAEVPKPLPPASKDEDEDIQSILRTRQERRQRRQVVEAAQAPIQERLEAEEGRNSLSPVQATQKPLVSKKELEIPPRRRLSREQRGPWALEEESLVGREPEERKKGVPEKSPVLEKSSMPKKTAPEKSLVSDKTSISEKVLASEKTSLSEKIAVSEKRNSSEKKSVLEKTSVSEKSLAPGMALGSGRRLVSEKASIFEKALASEKSPTADAKPAPKRATASEQPLAQEPPASGGSPATTKEQRGRALPGKNLPSLAKQGASDPPTVASRLPPVTLQVKIPSKEEEADMSSPTQRTYSSSLKRSSPRTISFRMKPKKENSETTLTRSASMKLPDNTVKLGEKLERYHTAIRRSESVKSRGLPCTELFVAPVGVASKRHLFEKELAGQSRAEPASSRKENLRLSGVVTSRLNLWISRTQESGDQDPQEAQKASSATERTQWGQKSDSSLDAEVNGGEEPGPTAEGHGVLWETPSSPCAHTNWPAIAQSTQNAPIPAHADWSEPTVR

SEQ ID NO: 741625 - protein, 48 aa, Homo sapiens
GVSRALWSLVLVSGLHPDTLNQEAQKASSATERTQWGQKSDSSLDAEV

SEQ ID NO: 741626 - protein, 202 aa, Homo sapiens
GWGWMDRWMDGWTDGVGEGRKGGRKEGILAPSLRALVGRAETGHSAQPGHPHEGSQVTLVAQIALRTWRDRPESGSPPLPLSSLLFPQAWEQSIPQPCHLPYSSLFHSFPFLAPSALPVFPECLRGERDPHLPKEMSFWGTTSHRSPPHPTTPPTWPLAKSQAELATGKAEPQERHSTIYTLLYILFLLYIHSVHVGVNAVK

SEQ ID NO: 741627 - protein, 202 aa, Homo sapiens; identical to SEQ ID NO: 741626

SEQ ID NO: 741628 - protein, 104 aa, Homo sapiens
MSLCSRVTVLSPGTVPEFSKLKPGLHSPSQTPAELSNHPLLPSLQEPWHPCSGESLKSNLKVPTVFPQIWVSMSMGHQSGEPHACPCLAQDCHSVRFHIALLDP

SEQ ID NO: 741629 - protein, 107 aa, Homo sapiens
IPNLPTTHGHRKASHDLAPLPGQTHHLSLCSSAVLNLCFSRTSRSQNTPYFFTFACPHPLLKTGSPYCAFVEIRKRCHIPLVRLDSRPHSSLDWHHTALTNLHTIST

SEQ ID NO: 741630 - protein, 113 aa, Homo sapiens
TSIVFSTLAVPFYILTNNAQGFQFLHILTNICSFLVFIFNRSSPNGCEVISHYGFGSHFSSDVGHLFMYSLVKCLSCLENCLFKSFVIMVFFLMLAIILVSLVGLRCYFPQYI

SEQ ID NO: 741631 - protein, 271 aa, Homo sapiens
MEDSHKSTTSETAPQPGSAVQGAHISHIAQQVSSLSESEESQDSSDSIGSSQKAHGILARRPSYRKILKDLSSEDTRGRKGDGENSGVSAAVTSMSVPTPIYQTSSGQYIAIAPNGALQLASPGTDGVQGLQTLTMTNSGSTQQGTTILQYAQTSDGQQILVPSNQVVVQTASGDMQTYQIRTTPSATSLPQTVVMTSPVTLTSQTTKTDDPQLKREIRLMKNREAARECRRKKKEYVKCLENRVAVLENQNKTLIEELKTLKDLYSNKSV

SEQ ID NO: 741632 - protein, 271 aa, Homo sapiens; identical to SEQ ID NO: 741631

SEQ ID NO: 741633 - protein, 271 aa, Homo sapiens; identical to SEQ ID NO: 741631

SEQ ID NO: 741634 - protein, 271 aa, Homo sapiens; identical to SEQ ID NO: 741631

SEQ ID NO: 741635 - protein, 271 aa, Homo sapiens; identical to SEQ ID NO: 741631

SEQ ID NO: 741636 - protein, 129 aa, Homo sapiens
HTDGKAGSFAISGHHWVQRLADLGLNPGFSEPSFPHLCLSLKHLRITSKVFRFNVSSVEKNRTNLFRAEFRVLRVPNPSSKRNEQRIELFQVTPLSEQKPHRRESWFLCHIRAPLGAAFGRPGFESWLL

SEQ ID NO: 741637 - protein, 410 aa, Homo sapiens
MHLQRALVVLALLNFATVSLSLSTCTTLDFGHIKKKRVEAIRGQILSKLRLTSPPEPTVMTHVPYQVLALYNSTRELLEEMHGEREEGCTQENTESEYYAKEIHKFDMIQGLAEHNELAVCPKGITSKVFRFNVSSVEKNRTNLFRAEFRVLRVPNPSSKRNEQRIELFQILRPDEHIAKQRYIGGKNLPTRGTAEWLSFDVTDTVREWLLRRESNLGLEISIHCPCHTFQPNGDILENIHEVMEIKFKGVDNEDDHGRGDLGRLKKQKDHHNPHLILMMIPPHRLDNPGQGGQRKKRALDTNYCFRNLEENCCVRPLYIDFRQDLGWKWVHEPKGYYANFCSGPCPYLRSADTTHSTVLGLYNTLNPEASASPCCVPQDLEPLTILYYVGRTPKVEQLSNMVVKSCKCS

SEQ ID NO: 741638 - protein, 377 aa, Homo sapiens
MHLQRALVVLALLNFATVSLSLSTCTTLDFGHIKKKRVEAIRGQILSKLRLTSPPEPTVMTHVPYQVLALYNSTRELLEEMHGEREEGCTQENTESEYYAKEIHKFDMIQGLAEHNELAVCPKGITSKVFRFNVSSVEKNRTNLFRAEFRVLRVPNPSSKRNEQRIELFQILRPDEHIAKQRYIGGKNLPTRGTAEWLSFDVTDTVREWLLRRESNLGLEISIHCPCHTFQPNGDILENIHEVMEIKFKGVDNEDDHGRGDLGRLKKQKDHHNPHLILMMIPPHRLDNPGQGGQRKKRALDTNYCFRNLEENCCVRPLYIDFRQDLGWKWVHEPKGYYANFCSGPCPYLRSADTTHSTVWSRLMPSEALGLTDQTTC

SEQ ID NO: 741639 - protein, 257 aa, Homo sapiens
MHLQRALVVLALLNFATVSLSLSTCTTLDFGHIKKKRVEAIRGQILSKLRLTSPPEPTVMTHVPYQVLALYNSTRELLEEMHGEREEGCTQENTESEYYAKEIHKFDMIQGLAEHNELAVCPKGITSKVFRFNVSSVEKNRTNLFRAEFRVLRVPNPSSKRNEQRIELFQILRPDEHIAKQRYIGGKNLPTRGTAEWLSFDVTDTVREWLLRRESNLGLEISIHCPCHTFQPNGDILEIDRGRGERRDPEGRQEMVD

SEQ ID NO: 741640 - protein, 399 aa, Homo sapiens
SDPDKERKAPENHADTIGSGRAIPIKQGMLLKRSGKWLKTWKKKYVTLCSNGVLTYYSSLGDYMKNIHKKEIDLRTSTIKVPGKWPSLATSACAPISSSKSNGLSKDMDTGLGDSICFSPGISSTTSPKLNPPPSPHANKKKHLKKKSTNNFMIVSATGQTWHFEATTYEERDAWVQAIQSQILASLQSCKSSKSKSQLTSQSEAMALQSIQNMRGNAHCVDCETQNPKWASLNLGVLMCIECSGIHRSFGTRLSRVRSLELDDWPVELRKVMSSIGNELANSIWEGSSQGQTKPSIKSTREEKEWWIRSKYEEKLFLAPLPCTELSLGQQLLRATTDEDLQTAILLLAHGSREEVNETCGEGDGCTALHLACRKGNVVLEQLLTGWTSWPEMPTGTQR

SEQ ID NO: 741641 - protein, 399 aa, Homo sapiens; identical to SEQ ID NO: 741640

SEQ ID NO: 741642 - protein, 154 aa, Homo sapiens
MGGQRELGAEMELDVIGLCSQLEVSFPPSLHTERNLCSLALTAGLWHLVTSILVLALHRGRFFFTLQHCWASLPSHGSVGEICYAVPPSGRLVLRGALLQRRQPSICGELAKIQSDLLRAPQRPSLFGAVSLGSLSECTFYLKYTNTKSQLSWF

SEQ ID NO: 741643 - protein, 1205 aa, Homo sapiens
MRKPRRKSRQNAEGRRSPSPYSLKCSPTRETLTYAQAQRIVEVDIDGRLHRISIYDPLKIITEDELTAQDITECNSNKENSEQPQFPGKSKKPSSKGKKKESCSKHASGTSFHLPQPSFRMVDSGIQPEAPPLPAAYYRYIEKPPEDLDAEVEYDMDEEDLAWLDMVNEKRRVDGHSLVSADTFELLVDRLEKESYLESRSSGAQQSLIDEDAFCCVCLDDECHNSNVILFCDICNLAVHQECYGVPYIPEGQWLCRCCLQSPSRPVDCILCPNKGGAFKQTSDGHWAHVVCAIWIPEVCFANTVFLEPIEGIDNIPPARWKLTCYICKQKGLGAAIQCHKVNCYTAFHVTCAQRAGLFMKIEPMRETSLNGTIFTVRKTAYCEAHSPPGAATARRKGDSPRSISETGDEEGLKEGDGEEEEEEEVEEEEQEAQGGVSGSLKGVPKKSKMSLKQKIKKEPEEAGQDTPSTLPMLAVPQIPSYRLNKICSGLSFQRKNQFMQRLHNYWLLKRQARNGVPLIRRLHSHLQSQRNAEQREQDEKTSAVKEELKYWQKLRHDLERARLLIELIRKREKLKREQVKVQQAAMELELMPFNVLLRTTLDLLQEKDPAHIFAEPVNLSEVPDYLEFISKPMDFSTMRRKLESHLYRTLEEFEEDFNLIVTNCMKYNAKDTIFHRAAVRLRDLGGAILRHARRQAENIGYDPERGTHLPESPKLEDFYRFSWEDVDNILIPENRAHLSPEVQLKELLEKLDLVSAMRSSGARTRRVRLLRREINALRQKLAQPPPPQPPSLNKTVSNGELPAGPQGDAAVLEQALQEEPEDDGDRDDSKLPPPPTLEPTGPAPSLSEQESPPEPPTLKPINDSKPPSRFLKPRKVEEDELLEKSPLQLGNEPLQRLLSDNGINRLSLMAPDTPAGTPLSGVGRRTSVLFKKAKNGVKLQRSPDRVLENGEDHGVAGSPASPASIEEERHSRKRPRSRSCSESEGERSPQQEEETGMTNGFGKHTESGSDSECSLGLSGGLAFEACSGLTPPKRSRGKPALSRVPFLEGVNGDSDYNGSGRSLLLPFEDRGDLEPLELVWAKCRGYPSYPALIIDPKMPREGLLHNGVPIPVPPLDVLKLGEQKQAEAGEKLFLVLFFDNKRTWQWLPRDKVLPLGVEDTVDKLKMLEGRKTSIRKSVQVAYDRAMIHLSRVRGPHSFVTSSYL

SEQ ID NO: 741644 - protein, 758 aa, Homo sapiens
  misc_feature (4)..(4): Xaa can be any naturally occurring amino acid
  misc_feature (8)..(8): Xaa can be any naturally occurring amino acid
MSSXMPEXDDLSRDAEEQRAAKHTSSPMLLSTIPLQLNKICSGLSFQRKNQFMQRLHNYWLLKRQARNGVPLIRRLHSHLQSQRNAEQREQDEKTSAVKEELKYWQKLRHDLERARLLIELIRKREKLKREQVKVQQAAMELELMPFNVLLRTTLDLLQEKDPAHIFAEPVNLSEVPDYLEFISKPMDFSTMRRKLESHLYRTLEEFEEDFNLIVTNCMKYNAKDTIFHRAAVRLRDLGGAILRHARRQAENIGYDPERGTHLPESPKLEDFYRFSWEDVDNILIPENRAHLSPEVQLKELLEKLDLVSAMRSSGARTRRVRLLRREINALRQKLAQPPPPQPPSLNKTVSNGELPAGPQGDAAVLEQALQEEPEDDGDRDDSKLPPPPTLEPTGPAPSLSEQESPPEPPTLKPINDSKPPSRFLKPRKVEEDELLEKSPLQLGNEPLQRLLSDNGINRLSLMAPDTPAGTPLSGVGRRTSVLFKKAKNGVKLQRSPDRVLENGEDHGVAGSPASPASIEEERHSRKRPRSRSCSESEGERSPQQEEETGMTNGFGKHTESGSDSECSLGLSGGLAFEACSGLTPPKRSRGKPALSRVPFLEGVNGDSDYNGSGRSLLLPFEDRGDLEPLELVWAKCRGYPSYPALIIDPKMPREGLLHNGVPIPVPPLDVLKLGEQKQAEAGEKLFLVLFFDNKRTWQWLPRDKVLPLGVEDTVDKLKMLEGRKTSIRKSVQVAYDRAMIHLSRVRGPHSFVTSSYL

SEQ ID NO: 741645 - protein, 751 aa, Homo sapiens
MNQVWIGCTGCNLGCPLTLSFTSVCLYSRLNKICSGLSFQRKNQFMQRLHNYWLLKRQARNGVPLIRRLHSHLQSQRNAEQREQDEKTSAVKEELKYWQKLRHDLERARLLIELIRKREKLKREQVKVQQAAMELELMPFNVLLRTTLDLLQEKDPAHIFAEPVNLSEVPDYLEFISKPMDFSTMRRKLESHLYRTLEEFEEDFNLIVTNCMKYNAKDTIFHRAAVRLRDLGGAILRHARRQAENIGYDPERGTHLPESPKLEDFYRFSWEDVDNILIPENRAHLSPEVQLKELLEKLDLVSAMRSSGARTRRVRLLRREINALRQKLAQPPPPQPPSLNKTVSNGELPAGPQGDAAVLEQALQEEPEDDGDRDDSKLPPPPTLEPTGPAPSLSEQESPPEPPTLKPINDSKPPSRFLKPRKVEEDELLEKSPLQLGNEPLQRLLSDNGINRLSLMAPDTPAGTPLSGVGRRTSVLFKKAKNGVKLQRSPDRVLENGEDHGVAGSPASPASIEEERHSRKRPRSRSCSESEGERSPQQEEETGMTNGFGKHTESGSDSECSLGLSGGLAFEACSGLTPPKRSRGKPALSRVPFLEGVNGDSDYNGSGRSLLLPFEDRGDLEPLELVWAKCRGYPSYPALIIDPKMPREGLLHNGVPIPVPPLDVLKLGEQKQAEAGEKLFLVLFFDNKRTWQWLPRDKVLPLGVEDTVDKLKMLEGRKTSIRKSVQVAYDRAMIHLSRVRGPHSFVTSSYL

SEQ ID NO: 741646 - protein, 1018 aa, Homo sapiens
MRKPRRKSRQNAEGRRSPSPYSLKCSPTRETLTYAQAQRIVEVDIDGRLHRISIYDPLKIITEDELTAQDITECNSNKENSEQPQFPGKSKKPSSKGKKKESCSKHASGTSFHLPQPSFRMVDSGIQPEAPPLPAAYYRYIEKPPEDLDAEVEYDMDEEDLAWLDMVNEKRRVDGHSLVSADTFELLVDRLEKESYLESRSSGAQQSLIDEDAFCCVCLDDECHNSNVILFCDICNLAVHQECYGVPYIPEGQWLCRCCLQSPSRPVDCILCPNKGGAFKQTSDGHWAHVVCAIWIPEVCFANTVFLEPIEGIDNIPPARWKLTCYICKQKGLGAAIQCHKVNCYTAFHVTCAQRAGLFMKIEPMRETSLNGTIFTVRKTAYCEAHSPPGAATARRKGDSPRSISETGDEEGLKEGDGEEEEEEEVEEEEQEAQGGVSGSLKGVPKKSKMSLKQKIKKEPEEAGQDTPSTLPMLAVPQIPSYRLNKICSGLSFQRKNQFMQRLHNYWLLKRQARNGVPLIRRLHSHLQSQRNAEQREQDEKTSAVKEELKYWQKLRHDLERARLLIELIRKREKLKREQVKVQQAAMELELMPFNVLLRTTLDLLQEKDPAHIFAEPVNLSEVPDYLEFISKPMDFSTMRRKLESHLYRTLEEFEEDFNLIVTNCMKYNAKDTIFHRAAVRLRDLGGAILRHARRQAENIGYDPERGTHLPESPKLEDFYRFSWEDVDNILIPENRAHLSPEVQLKELLEKLDLVSAMRSSGARTRRVRLLRREINALRQKLAQPPPPQPPSLNKTVSNGELPAGPQGDAAVLEQALQEEPEDDGDRDDSKLPPPPTLEPTGPAPSLSEQESPPEPPTLKPINDSKPPSRFLKPRKVEEDELLEKSPLQLGNEPLQRASVALPPSRRAQRSLFCPCQMYGRQLPPLMVGQGLGFLPTKGKAPVLTNRMVLLAGLLCAKNSHPRSLRGYFTEEPVRSRNSCGAWAQLRRLPRWQEVLGSFLRGCLARSILLPLTTPQGG

SEQ ID NO: 741647 - protein, 106 aa, Homo sapiens
MESPNLLPSALYPLPGFAGPGQVGPQEPEPPVRPTTAQPLTVLAFQQWLPRDKVLPLGVEDTVDKLKMLEGRKTSIRKSVQVAYDRAMIHLSRVRGPHSFVTSSYL

SEQ ID NO: 741648 - protein, 1205 aa, Homo sapiens; identical to SEQ ID NO: 741643

SEQ ID NO: 741649 - protein, 1205 aa, Homo sapiens; identical to SEQ ID NO: 741643

SEQ ID NO: 741650 - protein, 100 aa, Homo sapiens
TRLPSNVSTTAAATLAAAAASAECGACWGHTDPDPSSSSPPWTQDPEPTEGMGKTSRAPQVGGPIPWGQACLGTSLQIPGCPVFWGNWAGNASTKLHCCL

SEQ ID NO: 741651 - protein, 89 aa, Homo sapiens
  misc_feature (23)..(23): Xaa can be any naturally occurring amino acid
  misc_feature (25)..(25): Xaa can be any naturally occurring amino acid
  misc_feature (28)..(28): Xaa can be any naturally occurring amino acid
PFFFSPPGGGAPPFFGGGKPKFXGXFFXPPFPGTCVDPRRRFLGGVCDRLRPRGHEERRTSGTGARSPSRSGPGKARDRAGAVPRVPPR

SEQ ID NO: 741652 - protein, 160 aa, Homo sapiens
MSPPLLLLPLLLLLPLLNVEPAGATLIRIPLRQVHPGRRTLNLLRGWGKPAELPKLGAPSPGDKPASVPLSKFLDAQYFGEIGLGTPPQNFTVAFDTGSSNLWVPSRRCHFFSVPCWFHHRFNPNASSSFKPSGTKFAIQYGTGRVDGILSEDKLTVSGL

SEQ ID NO: 741653 - protein, 103 aa, Homo sapiens
SRGSPLSKLHAGLGSSTHNACSPPPCGCQTKPPATFITKWHALLPGILFPSFTTKSFSAPSFFLASFTKSHWNLDSVSSFASSGPVFWGNWAGNASTKLHCCL

SEQ ID NO: 741654 - protein, 356 aa, Homo sapiens
MSPPLLLLPLLLLLPLLNVEPAGATLIRIPLRQVHPGRRTLNLLRGWGKPAELPKLGAPSPGDKPASVPLSKFLDAQYFGEIGLGTPPQNFTVAFDTGSSNLWVPSRRCHFFSVPCWFHHRFNPNASSSFKPSGTKFAIQYGTGRVDGILSEDKLTIGGIKGASVIFGEALWESSLVFTVSRPDGILGLGFPILSVEGVRPPLDVLVEQGLLDKPVFSFYFNRDPEVADGGELVLGGSDPAHYIPPLTFVPVTVPAYWQIHMERVKVGSRLTLCAQGCAAILDTGTPVIVGPTEEIRALHAAIGGIPLLAGEYIIRCSEIPKLPAVSLLIGGVWFNLTAQDYVIQVGVRHNDATVM

SEQ ID NO: 741655 - protein, 231 aa, Homo sapiens
MSPPLLLLPLLLLLPLLNVEPAGATLIRIPLRQVHPGRRTLNLLRGWGKPAELPKLGAPSPGDKPASVPLSKFLDAQYFGEIGLGTPPQNFTVAFDTGSSNLWVPSRRCHFFSVPCWFHHRFNPNASSSFKPSGTKFAIQYGTGRVDGILSEDKLTIGGIKGASVIFGEALWESSLVFTVSRPDGILGLGFPILSVEGVRPPLDVLVEQGLLDKPVFSFYFNRCWGGCTYL

SEQ ID NO: 741656 - protein, 75 aa, Homo sapiens
IGGIKGASVIFGEALWESSLVFTVSRPDGILGLGFPILSVEGVRPPLDVLVEQGLLDKPVFSFYFNRCWGGCTYL

SEQ ID NO: 741657 - protein, 125 aa, Homo sapiens
MCWLVPIMPSSPLTEPRAERSPSSYRLCYSPSPRLHLPRRCSGRGDSGGLRLSQKVRARGSSRTWRPSLPFRDRVTKALSGQVAAQGPHYWLPAPSPVLLSLHLRLSLSSGGSSRCPCPLVFTPL

SEQ ID NO: 741658 - protein, 655 aa, Homo sapiens
MPEDRNSGGCPAGALASTPFIPKTTYRRIKRCFSFRKGIFGQKLEDTVRYEKRYGNRLAPMLVEQCVDFIRQRGLKEEGLFRLPGQANLVKELQDAFDCGEKPSFDSNTDVHTVASLLKLYLRELPEPVIPYAKYEDFLSCAKLLSKEEEAGVKELAKQVKSLPVVNYNLLKYICRFLDEVQSYSGVNKMSVQNLATVFGPNILRPKVEDPLTIMEGTVVVQQLMSVMISKHDCLFPKDAELQSKPQDGVSNNNEIQKKATMGQLQNKENNNTKDSPSRQCSWDKSESPQRSSMNNGSPTALSGSKTNSPKNSVHKLDVSRSPPLMVKKNPAFNKGSGIVTNGSFSSSNAEGLEKTQTTPNGSLQARRSSSLKVSGTKMGTHSVQNGTVRMGILNSDTLGNPTNVRNMSWLPNGYVTLRDNKQKEQAGELGQHNRLSTYDNVHQQFSMMNLDDKQSIDSATWSTSSCEISLPENSNSCRSSTTTCPEQDFFGGNFEDPVLDGPPQDDLSHPRDYESKSDHRSVGGRSSRATSSSDNSETFVGNSSSNHSALHSLVSSLKQEMTKQKIEYESRIKSLEQRNLTLETEMMSLHDELDQERKKFTMIEIKMRNAERAKEDAEKRNDMLQKEMEQFFSTFGELTVEPRRTERGNTIWIQ

SEQ ID NO: 741659 - protein, 92 aa, Homo sapiens
  misc_feature (70)..(70): Xaa can be any naturally occurring amino acid
  misc_feature (82)..(82): Xaa can be any naturally occurring amino acid
MEENNDSTENPQQGQGRQNAIKCGWLRKQGGFVKTWHTRWFVLKGDQLYYFKDEDETKPLEYLTTSGDSXWLVHSWGKIPQXSSWGRSRGAF

SEQ ID NO: 741660 - protein, 655 aa, Homo sapiens; identical to SEQ ID NO: 741658

SEQ ID NO: 741661 - protein, 653 aa, Homo sapiens
MTANHESYLLMASTQNDMEDWVKSIRRVIWGPFGGGIFGQKLEDTVRYEKRYGNRLAPMLVEQCVDFIRQRGLKEEGLFRLPGQANLVKELQDAFDCGEKPSFDSNTDVHTVASLLKLYLRELPEPVIPYAKYEDFLSCAKLLSKEEEAGVKELAKQVKSLPVVNYNLLKYICRFLDEVQSYSGVNKMSVQNLATVFGPNILRPKVEDPLTIMEGTVVVQQLMSVMISKHDCLFPKDAELQSKPQDGVSNNNEIQKKATMGQLQNKENNNTKDSPSRQCSWDKSESPQRSSMNNGSPTALSGSKTNSPKNSVHKLDVSRSPPLMVKKNPAFNKGSGIVTNGSFSSSNAEGLEKTQTTPNGSLQARRSSSLKVSGTKMGTHSVQNGTVRMGILNSDTLGNPTNVRNMSWLPNGYVTLRDNKQKEQAGELGQHNRLSTYDNVHQQFSMMNLDDKQSIDSATWSTSSCEISLPENSNSCRSSTTTCPEQDFFGGNFEDPVLDGPPQDDLSHPRDYESKSDHRSVGGRSSRATSSSDNSETFVGNSSSNHSALHSLVSSLKQEMTKQKIEYESRIKSLEQRNLTLETEMMSLHDELDQERKKFTMIEIKMRNAERAKEDAEKRNDMLQKEMEQFFSTFGELTVEPRRTERGNTIWIQ

SEQ ID NO: 741662 - protein, 232 aa, Homo sapiens
MEENNDSTENPQQGQGRQNAIKCGWLRKQGGFVKTWHTRWFVLKGDQLYYFKDEDETKPLGTIFLPGNKVSEHPCNEENPGKFLFEVVPGGDRDRMTANHESYLLMASTQNDMEDWVKSIRRVIWGPFGGGIFGQKLEDTVRYEKRYGNRLAPMLVEQCVDFIRQRGLKEEGLFRLPGQANLVKELQDAFDCGEKPSFDSNTDVHTVASLLKLYLRELPEPVIPYITSTMCT

SEQ ID NO: 741663 - protein, 112 aa, Homo sapiens
MEENNDSTENPQQGQGRQNAIKCGWLRKQGGFVKTWHTRWFVLKGDQLYYFKDEDETKPLGTIFLPGNKVSEHPCNEENPGKFLFEVVPEVYFSIQSASCKEVSSFGEEVLK

SEQ ID NO: 741664 - protein, 748 aa, Homo sapiens
MEENNDSTENPQQGQGRQNAIKCGWLRKQGGFVKTWHTRWFVLKGDQLYYFKDEDETKPLGTIFLPGNKVSEHPCNEENPGKFLFEVVPGGDRDRMTANHESYLLMASTQNDMEDWVKSIRRVIWGPFGGGIFGQKLEDTVRYEKRYGNRLAPMLVEQCVDFIRQRGLKEEGLFRLPGQANLVKELQDAFDCGEKPSFDSNTDVHTVASLLKLYLRELPEPVIPYAKYEDFLSCAKLLSKEEEAGVKELAKQVKSLPVVNYNLLKYICRFLDEVQSYSGVNKMSVQNLATVFGPNILRPKVEDPLTIMEGTVVVQQLMSVMISKHDCLFPKDAELQSKPQDGVSNNNEIQKKATMGQLQNKENNNTKDSPSRQCSWDKSESPQRSSMNNGSPTALSGSKTNSPKNSVHKLDVSRSPPLMVKKNPAFNKGSGIVTNGSFSSSNAEGLEKTQTTPNGSLQARRSSSLKVSGTKMGTHSVQNGTVRMGILNSDTLGNPTNVRNMSWLPNGYVTLRDNKQKEQAGELGQHNRLSTYDNVHQQFSMMNLDDKQSIDSATWSTSSCEISLPENSNSCRSSTTTCPEQDFFGGNFEDPVLDGPPQDDLSHPRDYESKSDHRSVGGRSSRATSSSDNSETFVGNSSSNHSALHSLVSSLKQEMTKQKIEYESRIKSLEQRNLTLETEMMSLHDELDQERKKFTMIEIKMRNAERAKEDAEKRNDMLQKEMEQFFSTFGELTVEPRRTERGNTIWIQ

SEQ ID NO: 741665 - protein, 663 aa, Homo sapiens
MFVQGGDRDRMTANHESYLLMASTQNDMEDWVKSIRRVIWGPFGGGIFGQKLEDTVRYEKRYGNRLAPMLVEQCVDFIRQRGLKEEGLFRLPGQANLVKELQDAFDCGEKPSFDSNTDVHTVASLLKLYLRELPEPVIPYAKYEDFLSCAKLLSKEEEAGVKELAKQVKSLPVVNYNLLKYICRFLDEVQSYSGVNKMSVQNLATVFGPNILRPKVEDPLTIMEGTVVVQQLMSVMISKHDCLFPKDAELQSKPQDGVSNNNEIQKKATMGQLQNKENNNTKDSPSRQCSWDKSESPQRSSMNNGSPTALSGSKTNSPKNSVHKLDVSRSPPLMVKKNPAFNKGSGIVTNGSFSSSNAEGLEKTQTTPNGSLQARRSSSLKVSGTKMGTHSVQNGTVRMGILNSDTLGNPTNVRNMSWLPNGYVTLRDNKQKEQAGELGQHNRLSTYDNVHQQFSMMNLDDKQSIDSATWSTSSCEISLPENSNSCRSSTTTCPEQDFFGGNFEDPVLDGPPQDDLSHPRDYESKSDHRSVGGRSSRATSSSDNSETFVGNSSSNHSALHSLVSSLKQEMTKQKIEYESRIKSLEQRNLTLETEMMSLHDELDQERKKFTMIEIKMRNAERAKEDAEKRNDMLQKEMEQFFSTFGELTVEPRRTERGNTIWIQ

SEQ ID NO: 741666 - protein, 709 aa, Homo sapiens
MEENNDSTENPQQGQGRQNAIKCGWLRKQGGFVKTWHTRWFVLKGDQLYYFKDEDETKPLGTIFLPGNKVSEHPCNEENPGKFLFEVVPGGDRDRMTANHESYLLMASTQNDMEDWVKSIRRVIWGPFGGGIFGQKLEDTVRYEKRYGNRLAPMLVEQCVDFIRQRGLKEEGLFRLPGQANLVKELQDAFDCGEKPSFDSNTDVHTVASLLKLYLRELPEPVIPYAKYEDFLSCAKLLSKEEEAGVKELAKQVKSLPVVNYNLLKYICRFLDEVQSYSGVNKMSVQNLATVFGPNILRPKVEDPLTIMEGTVVVQQLMSVMISKHDCLFPKDAELQSKPQDGVSNNNEIQKKATMGQLQNKENNNTKDSPSRQCSWDKSESPQRSSMNNGSPTALSGSKTNSPKNSVHKLDVSRSPPLMVKKNPAFNKGSGIVTNGSFSSSNAEGLEKTQTTPNGSLQARRSSSLKVSGTKMGTHSVQNGTVRMGILNSDTLGNPTNVRNMSWLPNGYVTLRDNKQKEQAGELGQHNRLSTYDNVHQQFSMMNLDDKQSIDSATWSTSSCEISLPENSNSCRSSTTTCPEQDFFGGNFEDPVLDGPPQDDLSHPRDYESKSDHRSVGGRSSRATSSSDNSETFVGNSSSNHSALHSLVSSLKQEMTKQKIEYESRIKSLEQRNLTLETEMMSLHDELDQERKKFTMIEIKMRNAGREKK

SEQ ID NO: 741667 - protein, 275 aa, Homo sapiens [sequence omitted]

SEQ ID NO: 741668 - protein, 96 aa, Homo sapiens
SRGLGLNRRGFLKCMWQHSPAPGGNQQGSGGARRPGELSRLRRGPERSLAGVAGWLGESPQLPIAGAALSAAYFLRNPRCGAAQCIEFNTSPCCGK

SEQ ID NO: 741669 - protein, 797 aa, Homo sapiens
MKTRGFSFPRQRQVLFLFLFWGVSLAGSGFGRYSVTEETEKGSFVVNLAKDLGLAEGELAARGTRVVSDDNKQYLLLDSHTGNLLTNEKLDREKLCGPKEPCMLYFQILMDDPFQIYRAELRVRDINDHSPVFRHKEMVLKISENTAEGTAFRLERAQDPDEGHNSIQNYTISSNSFFHIKISGSDEGMIYPELVLDKALDREEQEELSLTLTALDGGSPSRSGTSTIRIVVLDVNDNAPQFAQALYETQAPENSPVGSLIVKVSAGDADSGVNAEVSYSFFDASEDILTTFQINPFSGEIFLRELLDYELVNSYKINIQAMDGGGLSARCTVLIKVLDSNDNPPELIISSLSNSVAENSPGIVLAVFKIKDRDSGENGKTICYVQDNLPFFLKPSVDNFYILMTEGALDRESKAEYNITITVTDLGTPRLKTEHSITLQVSDVNDNAPAFTQTSYTLFVRENNSPALHIGSVSATDRDSGTNAQVTYSLLPPQDPHLPLASLVSINADNGHLFALRSLDYEALQAFDFRVGASDRGSPALSSEALVRVLVLDANDNSPFVLYPLQNGSAPCTELVPRAAEPGYLVTKVVAVDGDSGQNAWLSYQLLKATEPGLFGVWAHNGEVRTARLLSERDAAKHRLVVLVKDNGEPPRSATATLHVLLVDGFSQPYLPLPEAAPAQAQADLLTVYLVVALASVSSLFLLSVLLFVAVRLCRRSRAASVGRCSVPEGPFPGHLVDVSGTGTLFQSYQYEVCLTGGSETGEFKFLKPITPHLPPHRGGKEIEENSTLPNSFGFNY

SEQ ID NO: 741670 - protein, 140 aa, Homo sapiens
MKTRGFSFPRQRQVLFLFLFWGVSLAGSGFGRYSVTEETEKGSFVVNLAKDLGLAEGELAARGTRVVSDDNKQYLLLDSHTGNLLTNEKLDREKLCGPKEPCMLYFQILMDDPFQIYRAETGEITWAREAEVAVSRDLAL

SEQ ID NO: 741671 - protein, 623 aa, Homo sapiens
METVSEAGTHQEWSFQQIWEKIASDLTRSQDLVINSSQFSKEGDFPCQTEARTICNSHKTEIFPRAIGYKPSFSDVSLFDFHQQLHSGEKSHTCDECGKNFCYISALRIHQRVHMGEKCYKCDVCGKEFSQSSHLQTHQRVHTGEKPFKCVECGKGFSRRSALNVHHKLHTGEKPYNCEECGKAFIHDSQLQEHQRIHTGEKPFKCDICGKSFCGRSRLNRHSMVHTAEKPFRCDTCDKSFRQRSALNSHRMIHTGEKPYKCEECGKGFICRRDLYTHHMVHTGEKPYNCKECGKSFRWASCLLKHQRVHSGEKPIQCEECGKGFYTISQCYSHQRSHSGEKPYKCVECGKGYKRRLDLDFHQRVHTGEKLYNCKECGKSFSRAPCLLKHERLHSGEKPFQCEECGKRFTQNSHLHSHQRVHTGEKPYKCEKCGKGHNSKFNLDMHQKVHTGERPYNCKECGKSFGWASCLLKHQRLHSGEKPFKCEECGKRFTQNSQLHSHQRVHTGEKPYKCDECGKGFSWSSTRLTHQRRHSRETPLKCEQHGKNIVQNSFSEVQEKVHSVEKPYKCEDCGKGYNRRLNLDMHQRVHMGEKTWKCRECDMCFSQASSLRLHQNVHVGEKP

SEQ ID NO: 741672 - protein, 208 aa, Homo sapiens
MASELEPEVQAIDRSLLECSAEEIAGKWLQATDLTREVYQHLAHYVPKIYCRGPNPFPQKEDMLAQHVLLGPMEWYLCGEDPAFGFPKLEQANKPSHLCGRVFKVGEPTYSCRDCAVDPTCVLCMECFLGSIHRDHRYRMTTSGGGGFCDCGDTEAWKEGPYCQKHELNTSEIEEEEDPLVHLSEDVIARTYNIFAITFRYAVEILTW

SEQ ID NO: 741673 - protein, 102 aa, Homo sapiens [sequence omitted]

SEQ ID NO: 741674 - protein, 613 aa, Homo sapiens
RGLRIPTWALQELAGRVTRRGPETGEGRREPGGSASPMRAAFPAGGAGGSVEPPSARPAPQPAGTAARSEEAPARAQAAGMAGPGWGPPRLDGFILTERLGSGTYATVYKAYAKKDTREVVAIKCVAKKSLNKASVENLLTEIEILKGIRHPHIVQLKDFQWDSDNIYLIMEFCAGGDLSRFIHTRRILPEKVARVFMQQLASALQFLHERNISHLDLKPQNILLSSLEKPHLKLADFGFAQHMSPWDEKHVLRGSPLYMAPEMVCQRQYDARVDLWSMGVILYGGDLFSLLLTLRPTVSSGKASLGHFWRVLMKTDCWPRAPAEGRQARLDPFPPSLRSASLPQKPSSGSPPLPPGRFSELEEKIRSNRVIELPLRPLLSRDCRDLLQRLLERDPSRRISFQDFFAHPWVDLEHMPSGESLGRATALVVQAVKKDQEGDSAAALSLYCKALDFFVPALHYEVDAQRKEAIKAKVGQYVSRAEELKAIVSSSNQALLRQGTSARDLLREMARDKPRLLAALEVASAAMAKEEAAGGEQDALDLYQHSLGELLLLLAAEPPGRRRELLHTEVQNLMARAEYLKEQVKMRESRWEADTLDKEGLSESVRSSCTLQ

SEQ ID NO: 741675 - protein, 425 aa, Homo sapiens
RGLRIPTWALQELAGRVTRRGPETGEGRREPGGSASPMRAAFPAGGAGGSVEPPSARPAPQPAGTAARSEEAPARAQAAGMAGPGWGPPRLDGFILTERLGSGTYATVYKAYAKKDTREVVAIKCVAKKSLNKASVENLLTEIEILKGIRHPHIVQLKDFQWDSDNIYLIMEFCAGGDLSRFIHTRRILPEKVARVFMQQLASALQFLHERNISHLDLKPQNILLSSLEKPHLKLADFGFAQHMSPWDEKHVLRGSPLYMAPEMVCQRQYDARVDLWSMGVILYGGDLFSLLLTLRPTVSSGKASLGHFWRVLMKTDCWPRAPAEGRQARLDPFPPSLRSASLPQKPSSGSPPLPPGRSRSWKRRSVATGSSSSPCGPCSPETAGTYCSGSWSGTPAVASPSRTFLRTPGWTWSTCPVGRVWGEQ

SEQ ID NO: 741676 - protein, 613 aa, Homo sapiens; identical to SEQ ID NO: 741674

SEQ ID NO: 741677 - protein, 165 aa, Homo sapiens [sequence omitted]

SEQ ID NO: 741678 - protein, 165 aa, Homo sapiens [sequence omitted]

SEQ ID NO: 741679 - protein, 613 aa, Homo sapiens; identical to SEQ ID NO: 741674

SEQ ID NO: 741680 - protein, 613 aa, Homo sapiens; identical to SEQ ID NO: 741674

SEQ ID NO: 741681 - protein, 167 aa, Homo sapiens
AAPRCPFPARPSPPATAMEVTRPAHTCAQRGWLGDLPGSSCTCPDFLSPVHVCAQGPKSSYHISTPFSLLMRQGQPGPFKGRGLGTRGGVPEAPALLTPPSSTSDFTGGYRLGRSASTSGVRQVVLHTPRPCSQPRDALSQVRLGFSFICEGAGGEGLNMQRKAIKG

SEQ ID NO: 741682 - protein, 464 aa, Homo sapiens
MAMTAGTTTTFPMSNHTRERVTVAKLTLENFYSNLILQHEERETRQKKLEVAMEEEGLADEEKKLRRSQHARKETEFLRLKRTRLGLDDFESLKVIGRGAFGEVRLVQKKDTGHIYAMKILRKSDMLEKEQVAHIRAERDILVEADGAWVVKMFYSFQDKRNLYLIMEFLPGGDMMTLLMKKDTLTEEETQFYISETVLAIDAIHQLGFIHRDIKPDNLLLDAKGHVKLSDFGLCTGLKKAHRTEFYRNLTHNPPSDFSFQNMNSKRKAETWKKNRRQLAYSTVGTPDYIAPEVFMQTGYNKLCDWWSLGVIMYEMLIGYPPFCSETPQETYRKVMNWKETLVFPPEVPISEKAKDLILRFCIDSENRIGNSGVEEIKGHPFFEGVDWEHIRERPAAIPIEIKSIDDTSNFDDFPESDILQPVPNTTEPDYKSKDWVFLNYTYKRFEGLTQRGSIPTYMKAGKL

SEQ ID NO: 741683 - protein, 464 aa, Homo sapiens; identical to SEQ ID NO: 741682

SEQ ID NO: 741684 - protein, 412 aa, Homo sapiens
MEEEGLADEEKKLRRSQHARKETEFLRLKRTRLGLDDFESLKVIGRGAFGEVRLVQKKDTGHIYAMKILRKSDMLEKEQVAHIRAERDILVEADGAWVVKMFYSFQDKRNLYLIMEFLPGGDMMTLLMKKDTLTEEETQFYISETVLAIDAIHQLGFIHRDIKPDNLLLDAKGHVKLSDFGLCTGLKKAHRTEFYRNLTHNPPSDFSFQNMNSKRKAETWKKNRRQLAYSTVGTPDYIAPEVFMQTGYNKLCDWWSLGVIMYEMLIGYPPFCSETPQETYRKVMNWKETLVFPPEVPISEKAKDLILRFCIDSENRIGNSGVEEIKGHPFFEGVDWEHIRERPAAIPIEIKSIDDTSNFDDFPESDILQPVPNTTEPDYKSKDWVFLNYTYKRFEGLTQRGSIPTYMKAGKL

SEQ ID NO: 741685 - protein, 425 aa, Homo sapiens
MAMTAGTTTTFPMSNHTRERVTVAKLTLENFYSNLILQHEERETRQKKLEVAMEEEGLADEEKKLRRSQHARKETEFLRLKRTRLGLDDFESLKVIGRGAFGEVRLVQKKDTGHIYAMKILRKSDMLEKEQVAHIRAERDILVEADGAWVVKMFYSFQDKRNLYLIMEFLPGGDMMTLLMKKDTLTEEETQFYISETVLAIDAIHQLGFIHRDIKPDNLLLDAKGHVKLSDFGLCTGLKKAHRTEFYRNLTHNPPSDFSFQNMNSKRKAETWKKNRRQLAYSTVGTPDYIAPEVFMQTGYNKLCDWWSLGVIMYEMLIGYPPFCSETPQETYRKVMNWKETLVFPPEVPISEKAKDLILRFCIDSENRIGNSGVEEIKGHPFFEGVDWEHIRERPAAIPIEIKSIAKYHRTGLQIQRLGFSQLYL

SEQ ID NO: 741686 - protein, 464 aa, Homo sapiens; identical to SEQ ID NO: 741682

SEQ ID NO: 741687 - protein, 464 aa, Homo sapiens; identical to SEQ ID NO: 741682

SEQ ID NO: 741688 - protein, 148 aa, Homo sapiens
MEPEAFEICPYDPHHRIPLSRFQYHLASCRRKNPKKAKKMATCKYNACHVVPIKNLEEHEAVCVNRSAVEEEDTENPLKVSPPSSEQNDDTQQVSPCLPSPDIWNVDGANCQHVFVLKTFFPQKVVCENDTKESARETSPQKILRPGQ

SEQ ID NO: 741689 - protein, 123 aa, Homo sapiens
MEPEAFEICPYDPHHRIPLSRFQYHLASCRRKNPKKAKKMATCKYNACHVVPIKNLEEHEAVCVNRSAVEEEDTENPLKVSPPSSEQNDDTQQTFFPQKVVCENDTKESARETSPQKILRPGQ

SEQ ID NO: 741690 - protein, 103 aa, Homo sapiens
MEPEAFEICPYDPHHRIPLSRFQYHLASCRRKNPKKAKKMATCKYNACHVVPIKNLEEHEAVCVNRSAVEEEDTENPLKVVCENDTKESARETSPQKILRPGQ

SEQ ID NO: 741691 - protein, 138 aa, Homo sapiens
RGWAGLLCKPLTCSCLSEPGTAPGRAGKNTARSCKKPFFLFFNHSLPGFASPPLACGNVMNGMYGFQPVRARPGMQGAATSRPTASAPPQRHSLGSQSHSLGSLSHSLGSLSRPGRHEHSGPRGLTSAVGDSDGKHSK

SEQ ID NO: 741692 - protein, 76 aa, Homo sapiens
KVTPQRVSFALFYVCFPVLWCCYTGDVESPQTWKLRPLFLNPEQIETSGLECNGAILAHHNLRLLGSSDLLPQPPQ

SEQ ID NO: 741693 - protein, 76 aa, Homo sapiens; identical to SEQ ID NO: 741692

SEQ ID NO: 741694 - protein, 214 aa, Homo sapiens
HLIRHDVPYLFQKYVKESHGKDIRVVVVGGQVIGSMLRCSTEERMQSNCLFGGVGVKCPLTEQGKQLAIQVSNILGMDFCGIDLLIMDDGSFVVCEANANVGFLAFDQACNLDVGGIIADYTMSLLPNRQTGKMAVLPGLSSPREKNEPDGCASAQGVAESVYTINSGSTSSESEPELGEIRDSSASTMGAPPSMLPEPGYNINNRIASELKLK

SEQ ID NO: 741695 - protein, 258 aa, Homo sapiens [sequence omitted]

SEQ ID NO: 741696 - protein, 120 aa, Homo sapiens
DENRPAQCLQQRRGGESGGDVRSSLKDPEKGEANLSTFVRKDTKFLSNSGFLILLITSIKDGVHITMGCDSPPQHCIVSSFSLRIYFSTISFNLIWGINTFAEGEKENIHYEAFPKLGAW

SEQ ID NO: 741697 - protein, 86 aa, Homo sapiens
CGSPKAGGDIQCCPPGCYHHHLPLGFLLMLLPEEWDEITLRFINSLKEKKSEEHVDDVTDPSITPAGQRQSQWDSVYTTGLERDIF

SEQ ID NO: 741698 - protein, 79 aa, Homo sapiens
AYTCCGVKGQDSTGDTNEEIITFIQERRIILGILQKQGASCVYLSCKVPGILSISDEWSVCIGGMHGRDGQHLLPAECC

SEQ ID NO: 741699 - protein, 192 aa, Homo sapiens
MAPKPGAEWSTALSHLVLGVVSLHAAVSTAEASRGAAAGFLLQVLAATTTLAPGLSTHEDCLAGAWVATVIGLPLLAFDFHWVNGDRSSANLLLGGGMVLAVAGGHLGPEGRSVAGQAMLLVVAVTILIVAVFTANTYGMWGGAMLGVAGLLSRLEEDRLLLLPKEDVCRWALAVGSWAYCRALHTQRLQWE

SEQ ID NO: 741700 - protein, 192 aa, Homo sapiens; identical to SEQ ID NO: 741699

SEQ ID NO: 741701 - protein, 192 aa, Homo sapiens; identical to SEQ ID NO: 741699

SEQ ID NO: 741702 - protein, 110 aa, Homo sapiens
RLGDEAWVSFPTALAPATGGTAEEAGPTAVGGALRRLGPPARRCVGTAQPGNCARLASRESCAVAPPGPGFPGQRLPERREQAEAAAWACSASPLSLPQVCAVASGIRKV

SEQ ID NO: 741703 - protein, 110 aa, Homo sapiens
PGPSPLITLLPNHYAHARTHPNRAFSGPRAPPDPTRSYGLQPAPPRCVQWPQGSGKSRTELLLTSSNGDLEPGRTRVPRVGLQVAGFCAFFLSKVEYLLSVSFGHVWGLV

SEQ ID NO: 741704 - protein, 192 aa, Homo sapiens; identical to SEQ ID NO: 741699

SEQ ID NO: 741705 - protein, 111 aa, Homo sapiens
RLGDEAWVSFPTALAPATGGTAEEAGPTAVGGALRRLGPPARRCVGTAQPGNCARLASRESCAVAPPGPGFPGQRLPERREQAEAAAWACSASPLSLPQARTPTWAPGPQG

SEQ ID NO: 741706 - protein, 192 aa, Homo sapiens; identical to SEQ ID NO: 741699

SEQ ID NO: 741707 - protein, 64 aa, Homo sapiens
MLLVVAVTILIVAVFTANTYGMWGGAMLGVAGLLSRLEEDRLLLYAQRLLALPTSCLPLLSADV

SEQ ID NO: 741708 - protein, 206 aa, Homo sapiens
MRLNQNTLLLGKKVVLVPYTSEHVPRYHEWMKSEELQRLTASEPLTLEQEYAMQCSWQEDADKCTFIVLDAEKWQAQPGATEESCMVGDVNLFLTDLEDLTLGEIEVMIAEPSCRGKGLGTEAVLAMLSYGVTTLGLTKFEAKIGQGNEPSIRMFQKLHFEQVATSSVFQEVTLRLTVSESEHQWLLEQTSHVEEKPYRDGSAEPC

SEQ ID NO: 741709 - protein, 134 aa, Homo sapiens
MRLNQNTLLLGKKVVLVPYTSEHVPRYHEWMKSEELQRLTASEPLTLEQEYAMQCSWQEDADKCTFIVLDAEKWQAQPGATEESCMVGDVNLFLTDLEDLTLGEIEVMIAEPSCRGKGLGTEAVLAMLSYGKKV

SEQ ID NO: 741710 - protein, 97 aa, Homo sapiens
CGRGGSRPGLGTWLVGGGRSPFLRGTISSVVGCYHEVESEHLAAGEEGGPCTLHLGACAQVPRVDEIRGAAAFDSLGAADPGAGVCHAVQLAGRCRQ

SEQ ID NO: 741711 - protein, 149 aa, Homo sapiens
MRLNQNTLLLGKKVVLVPYTSEHVPRYHEWMKSEELQRLTASEPLTLEQEYAMQCSWQEDADKCTFIVLDAEKWQAQPGATEESCMVGDVNLFLTDLEDLTLGEIEVMIAGLFHLALPSADSRLSDLLTEPAEAAKGGHSQGSLGGSMW

SEQ ID NO: 741712 - protein, 119 aa, Homo sapiens
MKSEELQRLTASEPLTLEQEYAMQCSWQEDADKCTFIVLDAEKWQAQPGATEESCMVGDVNLFLTDLEDLTLGEIEVMIAGLFHLALPSADSRLSDLLTEPAEAAKGGHSQGSLGGSMW

SEQ ID NO: 741713 - protein, 206 aa, Homo sapiens; identical to SEQ ID NO: 741708

SEQ ID NO: 741714 - protein, 211 aa, Homo sapiens
MQAATMRLNQNTLLLGKKVVLVPYTSEHVPRYHEWMKSEELQRLTASEPLTLEQEYAMQCSWQEDADKCTFIVLDAEKWQAQPGATEESCMVGDVNLFLTDLEDLTLGEIEVMIAEPSCRGKGLGTEAVLAMLSYGVTTLGLTKFEAKIGQGNEPSIRMFQKLHFEQVATSSVFQEVTLRLTVSESEHQWLLEQTSHVEEKPYRDGSAEPC

SEQ ID NO: 741715 - protein, 134 aa, Homo sapiens; identical to SEQ ID NO: 741709

SEQ ID NO: 741716 - protein, 139 aa, Homo sapiens
MRLNQNTLLLGKKVVLVPYTSEHVPRYHEWMKSEELQRLTASEPLTLEQEYAMQCSWQEDADKCTFIVLDAEKWQAQPGATEESCMVGDVNLFLTDLEDLTLGEIEVMIAEPSCRGKGLGTEAVLAMLSYGGDPQTDSE

SEQ ID NO: 741717 - protein, 152 aa, Homo sapiens
MRLNQNTLLLGKKVVLVPYTSEHVPRYHEWMKSEELQRLTASEPLTLEQEYAMQCSWQEDADKCTFIVLDAEKWQAQPGATEESCMVGDVNLFLTDLEDLTLGEIEVMIAEPSCRGKGLGTEAVLAMLSYGVTTLGLTKFEAKWLRAVFFRR

SEQ ID NO: 741718 - protein, 121 aa, Homo sapiens
MVGDVNLFLTDLEDLTLGEIEVMIAEPSCRGKGLGTEAVLAMLSYGVTTLGLTKFEAKIGQGNEPSIRMFQKLHFEQVATSSVFQEVTLRLTVSESEHQWLLEQTSHVEEKPYRDGSAEPC

SEQ ID NO: 741719 - protein, 269 aa, Homo sapiens
MRLNQNTLLLGKKVVLVPYTSEHVPSFPFEGSWCPNFVGSVQPPLLRLACHIHPLLEFEECLVSDCSSALTRDRKEIGQIELTRPAVLVYHEWMKSEELQRLTASEPLTLEQEYAMQCSWQEDADKCTFIVLDAEKWQAQPGATEESCMVGDVNLFLTDLEDLTLGEIEVMIAEPSCRGKGLGTEAVLAMLSYGVTTLGLTKFEAKIGQGNEPSIRMFQKLHFEQVATSSVFQEVTLRLTVSESEHQWLLEQTSHVEEKPYRDGSAEPC

SEQ ID NO: 741720 - protein, 112 aa, Homo sapiens
MRLNQNTLLLGKKVVLVPYTSEHVPRYHEWMKSEELQRLTASEPLTLEQEYAMQCSWQEDADKCTFIVLDAEKWQAQPGATEESCMVGDVNLFLTDLEDLTLGEIEVMIAEW

SEQ ID NO: 741721 - protein, 181 aa, Homo sapiens
CGRGGSRPGLGTWLVGGGRSPFLRGTISSVVGCYHEVESEHLAAGEEGGPCTLHLGACAQVSFPLDMGYHEWMKSEELQRLTASEPLTLEQEYAMQCSWQEDADKCTFIVLDAEKWQAQPGATEESCMVGDVNLFLTDLEDLTLGEIEVMIAEPSCRGKGLGTEAVLAMLSYGGDPQTDSE

SEQ ID NO: 741722 - protein, 176 aa, Homo sapiens
CGRGGSRPGLGTWLVGGGRSPFLRGTISSVVGCYHEVESEHLAAGEEGGPCTLHLGACAQVSFPLDMGYHEWMKSEELQRLTASEPLTLEQEYAMQCSWQEDADKCTFIVLDAEKWQAQPGATEESCMVGDVNLFLTDLEDLTLGEIEVMIAEPSCRGKGLGTEAVLAMLSYGKKV

SEQ ID NO: 741723 - protein, 206 aa, Homo sapiens; identical to SEQ ID NO: 741708

SEQ ID NO: 741724 - protein, 151 aa, Homo sapiens [sequence omitted]

SEQ ID NO: 741725 - protein, 206 aa, Homo sapiens; identical to SEQ ID NO: 741708

SEQ ID NO: 741726 - protein, 197 aa, Homo sapiens
MRLNQNTLLLGKKVVLVPYTSEHVPRYHEWMKSEELQRLTASEPLTLEQEYAMQCSWQEDADKCTFIVLDAEKWQAQPGATEESCMVGDVNLFLTDLEDLTLGEIEVMIAEPSCRGKGLGTEAVLAMLSYGVTTLGLTKFEAKIGQGNEPSIRMFQKLHFEQVATSSVFQEVTLRLTSECGLAPQPSVRPPLSWSQS

SEQ ID NO: 741727 - protein, 97 aa, Homo sapiens; identical to SEQ ID NO: 741710

SEQ ID NO: 741728 - protein, 448 aa, Homo sapiens
MRENVVVSNMERESGKPVAVVAVVTEPWFTQRYREYLQRQKLFDTQHRVEKMPDGSVALPVLGETLPEQHLQELRNRVAPGSPCMLTQLPDPVPSKRAQGCSPAQKLCLEVSRWVEGRGVKWSAELEADLPRSWQRHGNLLLLSEDCFQAKQWKNLGPELWETVALALGVQRLAKRGRVSPDGTRTPAVTLLLGDHGWVEHVDNGIRYKFDVTQCMFSFGNITEKLRVASLSCAGEVLVDLYAGIGYFTLPFLVHAGAAFVHACEWNPHAVVALRNNLEINGVADRCQIHFGDNRKLKLSNIADRVILGLIPSSEEGWPIACQVLRQDAGGILHIHQNVESFPGKNLQALGVSKVEKEHWLYPQQITTNQWKNGATRDSRGKMLSPATKPEWQRWAESAETRIATLLQQVHGKPWKTQILHIQPVKSYAPHVDHIVLDLECCPCPSVG

SEQ ID NO: 741729 - protein, 448 aa, Homo sapiens; identical to SEQ ID NO: 741728

SEQ ID NO: 741730 - protein, 121 aa, Homo sapiens
LFWLGSCPAPGGLCRPKASSSQAFQAQIMLPRGLHRPSYCLTMASPGPGLAFPQPPEAQPLPHSCFPSPRYSLLPDGLDRPNSSFTLDSLGQAHTSSSLSRSSSCLTLASIGPGAESQWSV

SEQ ID NO: 741731 - protein, 91 aa, Homo sapiens
MGLIKELEHSFPSQPGKFLCCSGFGGSSRPGMAGQQYRQSDRGEVGEQSHRMYLFLWVSGGGRGTEILVFQNGVGKRSVDVEGTGPTRTTS

SEQ ID NO: 741732 - protein, 1164 aa, Homo sapiens
PGGRALQLLPPWSGERDRATANERAAKAGRGARARRRSHPRTRGRAATMLNNLTDCEDGDGGANPGDGNPKESSPFINSTDTEKGKEYDGKNMALFEEEMDTSPMVSSLLSGLANYTNLPQGSREHEEAENNEGGKKKPVQAPRMGTFMGVYLPCLQNIFGVILFLRLTWVVGIAGIMESFCMVFICCSCTMLTAISMSAIATNGVVPAGGSYYMISRSLGPEFGGAVGLCFYLGTTFAGAMYILGTIEILLAYLFPAMAIFKAEDASGEAAAMLNNMRVYGTCVLTCMATVVFVGVKYVNKFALVFLGCVILSILAIYAGVIKSAFDPPNFPICLLGNRTLSRHGFDVCAKLAWEGNETVTTRLWGLFCSSRFLNATCDEYFTRNNVTEIQGIPGAASGLIKENLWSSYLTKGVIVERSGMTSVGLADGTPIDMDHPYVFSDMTSYFTLLVGIYFPSVTGIMAGSNRSGDLRDAQKSIPTGTILAIATTSAVYISSVVLFGACIEGVVLRDKFGEAVNGNLVVGTLAWPSPWVIVIGSFFSTCGAGLQSLTGAPRLLQAISRDGIVPFLQVFGHGKANGEPTWALLLTACICEIGILIASLDEVAPILSMFFLMCYMFVNLACAVQTLLRTPNWRPRFRYYHWTLSFLGMSLCLALMFICSWYYALVAMLIAGLIYKYIEYRGAEKEWGDGIRGLSLSAARYALLRLEEGPPHTKNWRPQLLVLVRVDQDQNVVHPQLLSLTSQLKAGKGLTIVGSVLEGTFLENHPQAQRAEESIRRLMEAEKVKGFCQVVISSNLRDGVSHLIQSGGLGGLQHNTVLVGWPRNWRQKEDHQTWRNFIELVRETTAGHLALLVTKNVSMFPGNPERFSEGSIDVWWIVHDGGMLMLLPFLLRHHKVWRKCKMRIFTVAQMDDNSIQMKKDLTTFLYHLRITAEVEVVEMHESDISAYTYEKTLVMEQRSQILKQMHLTKNEREREIQSITDESRGSIRRKNPANTRLRLNVPEETAGDSEEKPEEEVQLIHDQSAPSCPSSSPSPGEEPEGEGETDPEKVHLTWTKDKSVAEKNKGPSPVSSEGIKDFFSMKPEWENLNQSNVRRMHTAVRLNEVIVKKSRDAKLVLLNMPGPPRNRNGDENYMEFLEVLTEHLDRVMLVRGGGREVITIYS

SEQ ID NO: 741733 - protein, 1164 aa, Homo sapiens; identical to SEQ ID NO: 741732

SEQ ID NO: 741734 - protein, 719 aa, Homo sapiens
PGFQYQEIRELFYQGKNNGTFGALPPLSPLQNLVLWQAHSWFCSWYGDLPWKSRQHCSPGISCPHHSRFGEAVNGNLVVGTLAWPSPWVIVIGSFFSTCGAGLQSLTGAPRLLQAISRDGIVPFLQVFGHGKANGEPTWALLLTACICEIGILIASLDEVAPILSMFFLMCYMFVNLACAVQTLLRTPNWRPRFRYYHWTLSFLGMSLCLALMFICSWYYALVAMLIAGLIYKYIEYRGAEKEWGDGIRGLSLSAARYALLRLEEGPPHTKNWRPQLLVLVRVDQDQNVVHPQLLSLTSQLKAGKGLTIVGSVLEGTFLENHPQAQRAEESIRRLMEAEKVKGFCQVVISSNLRDGVSHLIQSGGLGGLQHNTVLVGWPRNWRQKEDHQTWRNFIELVRETTAGHLALLVTKNVSMFPGNPERFSEGSIDVWWIVHDGGMLMLLPFLLRHHKVWRKCKMRIFTVAQMDDNSIQMKKDLTTFLYHLRITAEVEVVEMHESDISAYTYEKTLVMEQRSQILKQMHLTKNEREREIQSITDESRGSIRRKNPANTRLRLNVPEETAGDSEEKPEEEVQLIHDQSAPSCPSSSPSPGEEPEGEGETDPEKVHLTWTKDKSVAEKNKGPSPVSSEGIKDFFSMKPEWENLNQSNVRRMHTAVRLNEVIVKKSRDAKLVLLNMPGPPRNRNGDENYMEFLEVLTEHLDRVMLVRGGGREVITIYS

SEQ ID NO: 741735 - protein, 633 aa, Homo sapiens
RRAGGHCSFFSTCGAGLQSLTGAPRLLQAISRDGIVPFLQVFGHGKANGEPTWALLLTACICEIGILIASLDEVAPILSMFFLMCYMFVNLACAVQTLLRTPNWRPRFRYYHWTLSFLGMSLCLALMFICSWYYALVAMLIAGLIYKYIEYRGAEKEWGDGIRGLSLSAARYALLRLEEGPPHTKNWRPQLLVLVRVDQDQNVVHPQLLSLTSQLKAGKGLTIVGSVLEGTFLENHPQAQRAEESIRRLMEAEKVKGFCQVVISSNLRDGVSHLIQSGGLGGLQHNTVLVGWPRNWRQKEDHQTWRNFIELVRETTAGHLALLVTKNVSMFPGNPERFSEGSIDVWWIVHDGGMLMLLPFLLRHHKVWRKCKMRIFTVAQMDDNSIQMKKDLTTFLYHLRITAEVEVVEMHESDISAYTYEKTLVMEQRSQILKQMHLTKNEREREIQSITDESRGSIRRKNPANTRLRLNVPEETAGDSEEKPEEEVQLIHDQSAPSCPSSSPSPGEEPEGEGETDPEKVHLTWTKDKSVAEKNKGPSPVSSEGIKDFFSMKPEWENLNQSNVRRMHTAVRLNEVIVKKSRDAKLVLLNMPGPPRNRNGDENYMEFLEVLTEHLDRVMLVRGGGREVITIYS

SEQ ID NO: 741736 - protein, 537 aa, Homo sapiens
PGGRALQLLPPWSGERDRATANERAAKAGRGARARRRSHPRTRGRAATMLNNLTDCEDGDGGANPGDGNPKESSPFINSTDTEKGKEYDGKNMALFEEEMDTSPMVSSLLSGLANYTNLPQGSREHEEAENNEGGKKKPVQAPRMGTFMGVYLPCLQNIFGVILFLRLTWVVGIAGIMESFCMVFICCSCTMLTAISMSAIATNGVVPAGGSYYMISRSLGPEFGGAVGLCFYLGTTFAGAMYILGTIEILLAYLFPAMAIFKAEDASGEAAAMLNNMRVYGTCVLTCMATVVFVGVKYVNKFALVFLGCVILSILAIYAGVIKSAFDPPNFPICLLGNRTLSRHGFDVCAKLAWEGNETVTTRLWGLFCSSRFLNATCDEYFTRNNVTEIQGIPGAASGLIKENLWSSYLTKGVIVERSGMTSVGLADGTPIDMDHPYVFSDMTSYFTLLVGIYFPSVTGIMAGSNRSGDLRDAQKSIPTGTILAIATTSAVCILHSCAGTTLGGGQEGGQLNLLPYLLVQEGWGGGGLNRGDSPL

SEQ ID NO: 741737 - protein, 112 aa, Homo sapiens
NQSNVRRMHTAVRLNEVIVKKSRDAKLVLLNMPGPPRNRNGDENCILELKLGERGRWTSGNLGPVPGMEELSCSCLRISTSDRDTGARGPLAAERDPNFVGREGDRVFLLDR

SEQ ID NO: 741738 - protein, 129 aa, Homo sapiens
MSSDRQRSDDESPSTSSGSSDADQRDPAAPEPEEQEERKPSATQQKKNTKLSSKTTAKLSTSAKRIQKELAEITLDPPPNCSAGPKGDNIYEWRSTILGPPGSVYEGGVFFLDITFSSDYPFKPPKVTF

SEQ ID NO: 741739 - protein, 254 aa, Homo sapiens
RGGGGGQLCSRRAPASPVSASRGGAGWAARITWRPARRALPAAPARPSPQRAAELRGRRRRPWLASAGAEICCTSWGFVYLFVFSLGFLFFSVILDKMSVRDIKIERGTLVAWELCRSFPRDNFTKMSSDRQRSDDESPSTSSGSSDADQRDPAAPEPEEQEERKPSATQQKKNTKLSSKTTAKLSTSAKRIQKELAEITLDPPPNCSAGPKGDNIYEWRSTILGPPGSVYEGGVFFLDITFSSDYPFKPPKVT

SEQ ID NO: 741740 - protein, 151 aa, Homo sapiens
  misc_feature (85)..(85): Xaa can be any naturally occurring amino acid
  misc_feature (109)..(109): Xaa can be any naturally occurring amino acid
  misc_feature (121)..(121): Xaa can be any naturally occurring amino acid
  misc_feature (140)..(140): Xaa can be any naturally occurring amino acid
  misc_feature (143)..(143): Xaa can be any naturally occurring amino acid
MSSDRQRSDDESPSTSSGSSDADQRDPAAPEPEEQEERKPSATQQKKNTKLSSKTTAKLSTSAKRIQKELAEITLDPPPNCRRMXLLFWFQIVENTKRLMYVWICVQQXRQLCFFTALQVXKQKCRSELDMGVLFSIVYXWIXDILDLCSD

SEQ ID NO: 741741 - protein, 130 aa, Homo sapiens
MSSDRQRSDDESPSTSSGSSDADQRDPAAPEPEEQEERKPSATQQKKNTKLSSKTTAKLSTSAKRIQKELAEITLDPPPNCRGCPCPLLVTTCANSESLERKISKSCIECKDIQIENEELVLSVSSSLSI

SEQ ID NO: 741742 - protein, 325 aa, Homo sapiens
TFSPAEKFPCGQPSSFVLHPKSTWEWVVEQVAEGVLRCPALPIHTRGSELHSLREAWGYVAGPWILCLLQPFSSPQVGFLRFLFLVSTFDWKNNPLFVNLNNELTVEEQVEIRSGFLAARAQLPVMVIVTPQDRKNSVWTQDGPSAQILQQLVVLAAEALPMLEKQLMDPRGPGDIRTVFRPPLDIYDVLIRLSPRHIPRHRQAVDSPAASFCRGLLSQPGPSSLMPVLGYDPPQLYLTQLREAFGDLALFFYDQHGGEVIGVLWKPTSFQPQPFKASSTKGRMVMSRGGELVMVPNVEAILEDFAVLGEGLVQTVEARSERWTV

SEQ ID NO: 741743 - protein, 566 aa, Homo sapiens
MGPAPAGEQLRGATGEPEVMEPALEGTGKEGKKASSRKRTLAEPPAKGLLQPVKLSRAELYKEPTNEELNRLRETEILFHSSLLRLQVEELLKEVRLSEKKKDRIDAFLREVNQRVVRVPSVPETELTDQAWLPAGVRVPLHQVPYAVKGCFRFLPPAQVTVVGSYLLGTCIRPDINVDVALTMPRVKVQGLGDRGPPPDYLQILDPSFLSAACQGIEVRILNQKSRPLQASRRQLRSLGPVAVLLELCSPDMRTGPSVANRGSGTSVSRGALALSPWFHLGPQLHKHLCAWPSLLPWPLQEILQDKDGLNQRYFRKRALYLAHLAHHLAQDPLFGSVCFSYTNGCHLKPSLLLRPRGERHNWAEGIAWDGKSGGEGTEARRPQVWGDRMGSPLAPRAPAESQHSLSLAGKDERLVTVRLHPCPPPDFFRPCRLLPTKNNVRSAWYRGQSPAGDGSPEPPTPRYNTWVLQDTVLESHLQLLSTILSSAQGLKDGVALLKVWLRQRELDKGQGGFTGFLVSMLVVFLVSTRKIHTTMSGYQDLCLDLACPSLQCQAFRWDPAKMWPF

SEQ ID NO: 741744 - protein, 1146 aa, Homo sapiens
MGPAPAGEQLRGATGEPEVMEPALEGTGKEGKKASSRKRTLAEPPAKGLLQPVKLSRAELYKEPTNEELNRLRETEILFHSSLLRLQVEELLKEVRLSEKKKDRIDAFLREVNQRVVRVPSVPETELTDQAWLPAGVRVPLHQVPYAVKGCFRFLPPAQVTVVGSYLLGTCIRPDINVDVALTMPREILQDKDGLNQRYFRKRALYLAHLAHHLAQDPLFGSVCFSYTNGCHLKPSLLLRPRGKDERLVTVRLHPCPPPDFFRPCRLLPTKNNVRSAWYRGQSPAGDGSPEPPTPRYNTWVLQDTVLESHLQLLSTILSSAQGLKDGVALLKVWLRQRELDKGQGGFTGFLVSMLVVFLVSTRKIHTTMSGYQVLRSVLQFLATTDLTVNGISLCLSSDPSLPALADFHQAFSVVFLDSSGHLNLCADVTASTYHQVQHEARLSMMLLDSRADDGFHLLLMTPKPMIRAFDHVLHLRPLSRLQAACHRLKLWPELQDNGGDYVSAALGPLTTLLEQGLGARLNLLAHSRPPVPEWDISQDPPKHKDSGTLTLGLLLRPEGLTSVLELGPEADQPEAAKFRQFWGSRSELRRFQDGAIREAVVWEAASMSQKRLIPHQVVTHLLALHADIPETCVHYVGGPLDALIQGLKETSSTGEEALVAAVRCYDDLSRLLWGLEGLPLTVSAVQGAHPVLRYTEVFPPTPVRPAFSFYETLRERSSLLPRLDKPCPAYVEPMTVVCHLEGSGQWPQDAEAVQRVRAAFQLRLAELLTQQHGLQCRATATHTDVLKDGFVFRIRVAYQREPQILKEVQSPEGMISLRDTAASLRLERDTRQLPLLTSALHGLQQQHPAFSGVARLAKRWVRAQLLGEGFADESLDLVAAALFLHPEPFTPPSSPQVGFLRFLFLVSTFDWKNNPLFVNLNNELTVEEQVEIRSGFLAARAQLPVMVIVTPQDRKNSVWTQDGPSAQILQQLVVLAAEALPMLEKQLMDPRGPGDIRTVFRPPLDIYDVLIRLSPRHIPRHRQAVDSPAASFCRGLLSQPGPSSLMPVLGYDPPQLYLTQLREAFGDLALFFYDQHGGEVIGVLWKPTSFQPQPFKASSTKGRMVMSRGGELVMVPNVEAILEDFAVLGEGLVQTVEARSERWTV

SEQ ID NO: 741745 - protein, 1198 aa, Homo sapiens
MGPAPAGEQLRGATGEPEVMEPALEGTGKEGKKASSRKRTLAEPPAKGLLQPVKLSRAELYKEPTNEELNRLRETEILFHSSLLRLQVEELLKEVRLSEKKKDRIDAFLREVNQRVVRVPSVPETELTDQAWLPAGVRVPLHQVPYAVKGCFRFLPPAQVTVVGSYLLGTCIRPDINVDVALTMPREILQDKDGLNQRYFRKRALYLAHLAHHLAQDPLFGSVCFSYTNGCHLKPSLLLRPRGERHTLAEGIAWDGKSGGEGTEARRPQVWGDRMGSPLAPRAPAESQHSLSLAGKDERLVTVRLHPCPPPDFFRPCRLLPTKNNVRSAWYRGQSPAGDGSPEPPTPRYNTWVLQDTVLESHLQLLSTILSSAQGLKDGVALLKVWLRQRELDKGQGGFTGFLVSMLVVFLVSTRKIHTTMSGYQVLRSVLQFLATTDLTVNGISLCLSSDPSLPALADFHQAFSVVFLDSSGHLNLCADVTASTYHQVQHEARLSMMLLDSRADDGFHLLLMTPKPMIRAFDHVLHLRPLSRLQAACHRLKLWPELQDNGGDYVSAALGPLTTLLEQGLGARLNLLAHSRPPVPEWDISQDPPKHKDSGTLTLGLLLRPEGLTSVLELGPEADQPEAAKFRQFWGSRSELRRFQDGAIREAVVWEAASMSQKRLIPHQVVTHLLALHADIPETCVHYVGGPLDALIQGLKETSSTGEEALVAAVRCYDDLSRLLWGLEGLPLTVSAVQGAHPVLRYTEVFPPTPVRPAFSFYETLRERSSLLPRLDKPCPAYVEPMTVVCHLEGSGQWPQDAEAVQRVRAAFQLRLAELLTQQHGLQCRATATHTDVLKDGFVFRIRVAYQREPQILKEVQSPEGMISLRDTAASLRLERDTRQLPLLTSALHGLQQQHPAFSGVARLAKRWVRAQLLGEGFADESLDLVAAALFLHPEPFTPPSSPQVGFLRFLFLVSTFDWKNNPLFVNLNNELTVEEQVEIRSGFLAARAQLPVMVIVTPQDRKNSVWTQDGPSAQILQQLVVLAAEALPMLEKQLMDPRGPGDIRTVFRPPLDIYDVLIRLSPRHIPRHRQAVDSPAASFCRGLLSQPGPSSLMPVLGYDPPQLYLTQLREAFGDLALFFYDQHGGEVIGVLWKPTSFQPQPFKASSTKGRMVMSRGGELVMVPNVEAILEDFAVLGEGLVQTVEARSERWTV

SEQ ID NO: 741746 - protein, 1130 aa, Homo sapiens
MGPAPAGEQLRGATGEPEVMEPALEGTGKEGKKASSRKRTLAEPPAKGLLQPVKLSRAELYKEPTNEELNRLRETEILFHSSLLRLQVEELLKEVRLSEKKKDRIDAFLREVNQRVVRVPSVPETELTDQAWLPAGVRVPLHQVPYAVKGCFRFLPPAQVTVVGSYLLGTCIRPDINVDVALTMPREILQDKDGLNQRYFRKRALYLAHLAHHLAQDPLFGSVCFSYTNGCHLKPSLLLRPRGKDERLVTVRLHPCPPPDFFRPCRLLPTKNNVRSAWYRGQSPAGDGSPEPPTPRYNTWVLQDTVLESHLQLLSTILSSAQGLKDGPGWVYWVPCLHAGCLPCVYTQDPYHHEWLPGPEKCLQFLATTDLTVNGISLCLSSDPSLPALADFHQAFSVVFLDSSGHLNLCADVTASTYHQVQHEARLSMMLLDSRADDGFHLLLMTPKPMIRAFDHVLHLRPLSRLQAACHRLKLWPELQDNGGDYVSAALGPLTTLLEQGLGARLNLLAHSRPPVPEWDISQDPPKHKDSGTLTLGLLLRPEGLTSVLELGPEADQPEAAKFRQFWGSRSELRRFQDGAIREAVVWEAASMSQKRLIPHQVVTHLLALHADIPETCVHYVGGPLDALIQGLKETSSTGEEALVAAVRCYDDLSRLLWGLEGLPLTVSAVQGAHPVLRYTEVFPPTPVRPAFSFYETLRERSSLLPRLDKPCPAYVEPMTVVCHLEGSGQWPQDAEAVQRVRAAFQLRLAELLTQQHGLQCRATATHTDVLKDGFVFRIRVAYQREPQILKEVQSPEGMISLRDTAASLRLERDTRQLPLLTSALHGLQQQHPAFSGVARLAKRWVRAQLLGEGFADESLDLVAAALFLHPEPFTPPSSPQVGFLRFLFLVSTFDWKNNPLFVNLNNELTVEEQVEIRSGFLAARAQLPVMVIVTPQDRKNSVWTQDGPSAQILQQLVVLAAEALPMLEKQLMDPRGPGDIRTVFRPPLDIYDVLIRLSPRHIPRHRQAVDSPAASFCRGLLSQPGPSSLMPVLGYDPPQLYLTQLREAFGDLALFFYDQHGGEVIGVLWKPTSFQPQPFKASSTKGRMVMSRGGELVMVPNVEAILEDFAVLGEGLVQTVEARSERWTV

SEQ ID NO: 741747 - protein, 1134 aa, Homo sapiens
MGPAPAGEQLRGATGEPEVMEPALEGTGKEGKKASSRKRTLAEPPAKGLLQPVKLSRAELYKEPTNEELNRLRETEILFHSSLLRLQVEELLKEVRLSEKKKDRIDAFLREVNQRVVRVPSVPETELTDQAWLPAGVRVPLHQVPYAVKGCFRFLPPAQVTVVGSYLLGTCIRPDINVDVALTMPREILQDKDGLNQRYFRKRALYLAHLAHHLAQDPLFGSVCFSYTNGCHLKPSLLLRPRGKDERLVTVRLHPCPPPDFFRPCRLLPTKNNVRSAWYRGQSPAGDGSPEPPTPRYNTWVLQDTVLESHLQLLSTILSSAQGLKDGVALLKVWLRQRELDKGQGGFTGFLVSMLVVFLVSTRKIHTTMSGYQVLRSVLQFLATTDLTVNGISLCLSSDPSLPALADFHQAFSVVFLDSSGHLNLCADVTASTYHQVQHEARLSMMLLDSRADDGFHLLLMTPKPMIRAFDHVLHLRPLSRLQAACHRLKLWPELQDNGGDYVSAALGPLTTLLEQGLGARLNLLAHSRPPVPEWDISQDPPKHKDSGTLTLGLLLRPEGLTSVLELGPEADQPEAAKFRQFWGSRSELRRFQDGAIREAVVWEAASMSQKRLIPHQVVTHLLALHADIPETCVHYVGGPLDALIQGLKETSSTGEEALVAAVRCYDDLSRLLWGLEGLPLTVSAVQGAHPVLRYTEVFPPTPVRPAFSFYETLRERSSLLPRLDKPCPAYVEPMTVVCHLEGSGQWPQDAEAVQRVRAAFQLRLAELLTQQHGLQCRATATHTDVLKDGFVFRIRVAYQREPQILKEVQSPEGMISLRDTAASLRLERDTRQLPLLTSALHGLQQQHPAFSGVARLAKRWVRAQLLGEGFADESLDLVAAALFLHPEPFTPPSSPQVGFLRFLFLVSTFDWKNNPLFVNLNNELTAARAQLPVMVIVTPQDRKNSVWTQDGPSAQILQQLVVLAAEALPMLEKQLMDPRGPGDIRTVFRPPLDIYDVLIRLSPRHIPRHRQAVDSPAASFCRGLLSQPGPSSLMPVLGYDPPQLYLTQLREAFGDLALFFYDQHGGEVIGVLWKPTSFQPQPFKASSTKGRMVMSRGGELVMVPNVEAILEDFAVLGEGLVQTVEARSERWTV

SEQ ID NO: 741748 - protein, 1146 aa, Homo sapiens; identical to SEQ ID NO: 741744

SEQ ID NO: 741749 - protein, 1146 aa, Homo sapiens; identical to SEQ ID NO: 741744

SEQ ID NO: 741750 - protein, 978 aa, Homo sapiens
MGPAPAGEQLRGATGEPEVMEPALEGTGKEGKKASSRKRTLAEPPAKGLLQPVKLSRAELYKEPTNEELNRLRETEILFHSSLLRLQVEELLKEVRLSEKKKDRIDAFLREVNQRVVRVPSVPETELTDQAWLPAGVRVPLHQVPYAVKGCFRFLPPAQVTVVGSYLLGTCIRPDINVDVALTMPREILQDKDGLNQRYFRKRALYLAHLAHHLAQDPLFGSVCFSYTNGCHLKPSLLLRPRGKDERLVTVRLHPCPPPDFFRPCRLLPTKNNVRSAWYRGQSPAGDGSPEPPTPRYNTWVLQDTVLESHLQLLSTILSSAQGLKDGVALLKVWLRQRELDKGQGGFTGFLVSMLVVFLVSTRKIHTTMSGYQVLRSVLQFLATTDLTVNGISLCLSSDPSLPALADFHQAFSVVFLDSSGHLNLCADVTASTYHQVQHEARLSMMLLDSRADDGFHLLLMTPKPMIRAFDHVLHLRPLSRLQAACHRLKLWPELQDNGGDYVSAALGPLTTLLEQGLGARLNLLAHSRPPVPEWDISQDPPKHKDSGTLTLGLLLRPEGLTSVLELGPEADQPEAAKFRQFWGSRSELRRFQDGAIREAVVWEAASMSQKRLIPHQVVTHLLALHADIPETCVHYVGGPLDALIQGLKETSSTGEEALVAAVRCYDDLSRLLWGLEGLPLTVSAVQGAHPVLRYTEVFPPTPVRPAFSFYETLRERSSLLPRLDKPCPAYVEPMTVVCHLEGSGQWPQDAEAVQRVRAAFQLRLAELLTQQHGLQCRATATHTDVLKDGFVFRIRVAYQREPQILKEVQSPEGMISLRDTAASLRLERDTRQLPLLTSALHGLQQQHPAFSGVARLAKRWVRAQLLGEGFADESLDLVAAALFLHPEPFTPPSSPQVGFLRFLFLVSTFDWKNNPLFVNLNNGAHCGGAGGDPQWLPGSSGTAPRHGHCYPPRPQKLCVDTGWTLSPDPAAACGPGS

SEQ ID NO: 741751 - protein, 1146 aa, Homo sapiens; identical to SEQ ID NO: 741744

SEQ ID NO: 741752 - protein, 1146 aa, Homo sapiens; identical to SEQ ID NO: 741744

SEQ ID NO: 741753 - protein, 193 aa, Homo sapiens
  misc_feature (5)..(6): Xaa can be any naturally occurring amino acid
RLVRXXVWICRPRASILQQLVVLAAEALPMLEKQLMDPRGPGDIRTVFRPPLDIYDVLIRLSPRHIPRHRQAVDSPAASFCRGLLSQPGPSSLMPVLGYDPPQLYLTQLREAFGDLALFFYDQHGGEVIGVLWKPTSFQPQPFKASSTKGRMVMSRGGELVMVPNVEAILEDFAVLGEGLVQTVEARSERWTV

SEQ ID NO: 741754 - protein, 430 aa, Homo sapiens
MGPAPAGEQLRGATGEPEVMEPALEGTGKEGKKASSRKRTLAEPPAKGLLQPVKLSRAELYKEPTNEELNRLRETEILFHSSLLRLQVEELLKEVRLSEKKKDRIDAFLREVNQRVVRVPSVPETELTDQAWLPAGVRVPLHQVPYAVKGCFRFLPPAQVTVVGSYLLGTCIRPDINVDVALTMPREILQDKDGLNQRYFRKRALYLAHLAHHLAQDPLFGSVCFSYTNGCHLKPSLLLRPRGKDERLVTVRLHPCPPPDFFRPCRLLPTKNNVRSAWYRGQSPAGDGSPEPPTPRYNTWVLQDTVLESHLQLLSTILSSAQGLKDGVALLKVWLRQRELDKGQGGFTGFLVSMLVVFLVSTRKIHTTMSGYQVLRSVLQFLATTDLTVNGISLCLSSDPSLPALADFHQAFPRAKFLDLKAKIPYNEVV

SEQ ID NO: 741755 - protein, 150 aa, Homo sapiens
ELFPCLRHFGLRFYAYNPLAGGLLTGKYKYEDKDGKQPVGRFFGNTWAEMYRNRYWKEHHFEGIALVEKALQAAYGASAPSMTSATLRWMYHHSQLQGAHGDAVILGMSSLEQLEQNLAAAEEGPLEPAVVDAFNQAWHLVAHECPNYFR

SEQ ID NO: 741756 - protein, 201 aa, Homo sapiens
MSGKSLLLKVILLGDGGVGKSSLMNRYVTNKFDSQAFHTIGVEFLNRDLEVDGRFVTLQIWDTAGQERFKSLRTPFYRGADCCLLTFSVDDRQSFENLGNWQKEFIYYADVKDPEHFPFVVLGNKVDKEDRQVTTEEAQTWCMENGDYPYLETSAKDDTNVTVAFEEAVRQVLAVEEQLEHCMLGHTIDLNSGSKAGSSCC

SEQ ID NO: 741757 - protein, 182 aa, Homo sapiens
QADRLALYDFVVEETKKKRSDSQIIENDSDLFVDLAAKINQDNSRKSPKSYLEILAEVRDYKRRRQSYRAKNVHITKKSYTEVIRDVINVHMEELSNHWQEEQEKAEDDAEKNEERRSASVDSRQSGGSYLDAECSRHRRDRSRSPHKRKRNKDKDKNCESRRRKERDGERHHSHKRRKQKI

SEQ ID NO: 741758 - protein, 182 aa, Homo sapiens; identical to SEQ ID NO: 741757

SEQ ID NO: 741759 - protein, 182 aa, Homo sapiens; identical to SEQ ID NO: 741757

SEQ ID NO: 741760 - protein, 195 aa, Homo sapiens
QADRLALYDFVVEETKKKRSDSQIIENDSDLFVDLAAKINQDNSRKSPKSYLEILAEVRDYKRRRQSYRAKNVHITKKSYTEVIRDVINVHMEELSNHWQEEQEKAEDDAEKNEERRSASVDSRQSGGSYLDAECSRHRRDRSRSPHKRKRNKDKDKNCESRRRKESQVWWFAPEIQLLGRLRQESLESGRRRLQ

SEQ ID NO: 741761 - protein, 1256 aa, Homo sapiens
MSKVIQKKNHWTSRVHECTVKRGPQGELGVTVLGGAEHGEFPYVGAVAAVEAAGLPGGGEGPRLGEGELLLEVQGVRVSGLPRYDVLGVIDSCKEAVTFKAVRQGGRLNKDLRHFLNQRFQKGFPDHELQQTIRDNLYRHAVPCTTRSPREGEVPGVDYNFLTVKEFLDLEQSGTLLEVGTYEGNYYGTPKPPSQPVSGKVITTDALHSLQSGSKQSTPKRTKSYNDMQNAGIVHAENEEEDDVPEMNSSFTADSGEQEEHTLQETALPPVNSSIIAAPITDPSQKFPQYLPLSAEDNLGPLPENWEMAYTENGEVYFIDHNTKTTSWLDPRCLNKQQKPLEECEDDEGVHTEELDSELELPAGWEKIEDPVYGIYYVDHINRKTQYENPVLEAKRKKQLEQQQQQQQQQQQQQQQQQQQQTEEWTEDHSALVPPVIPNHPPSNPEPAREVPLQGKPFFTRNPSELKGKFIHTKLRKSSRGFGFTVVGGDEPDEFLQIKSLVLDGPAALDGKMETGDVIVSVNDTCVLGHTHAQVVKIFQSIPIGASVDLELCRGYPLPFDPDDPNTSLVTSVAILDKEPIIVNGQETYDSPASHSSKTGKVNGMKDARPSSPADVASNSSHGYPNDTVSLASSIATQPELITVHIVKGPMGFGFTIADSPGGGGQRVKQIVDSPRCRGLKEGDLIVEVNKKNVQALTHNQVVDMLVECPKGSEVTLLVQRGGLPVPKKSPKSQPLERKDSQNSSQHSVSSHRSLHTASPSHSTQVLPEFPPAEAQAPDQTDSSGQKKPDPFKIWAQSRSMYENRPMSPSPASGLSKGEREREINSTNFGECPIPDYQEQDIFLWRKETGFGFRILGGNEPGEPIYIGHIVPLGAADTDGRLRSGDELICVDGTPVIGKSHQLVVQLMQQAAKQGHVNLTVRRKVVFAVPKTENEVPSPASSHHSSNQPASLTEEKRTPQGSQNSLNTVSSGSGSTSGIGSGGGGGSGVVSTVVQPYDVEIRRGENEGFGFVIVSSVSRPEAGTTFAGNACVAMPHKIGRIIEGSPADRCGKLKVGDRILAVNGCSITNKSHSDIVNLIKEAGNTVTLRIIPGDESSNATLLTNAEKIATITTTHTPSQQGTQETRNTTKPKQESQFEFKAPQATQEQDFYTVELERGAKGFGFSLRGGREYNMDLYVLRLAEDGPAERCGKMRIGDEILEINGETTKNMKHSRAIELIKNGGRRVRLFLKRGDGSVPEYGGSNYENIPSFPGMTP

SEQ ID NO: 741762 - protein, 1463 aa, Homo sapiens
MSKVIQKKNHWTSRVHECTVKRGPQGELGVTVLGGAEHGEFPYVGAVAAVEAAGLPGGGEGPRLGEGELLLEVQGVRVSGLPRYDVLGVIDSCKEAVTFKAVRQGGRLNKDLRHFLNQRFQKGFPDHELQQTIRDNLYRHAVPCTTRSPREGEVPGVDYNFLTVKEFLDLEQSGTLLEVGTYEGNYYGTPKPPSQPVSGKVITTDALHSLQSGSKQSTPKRTKSYNDMQNAGIVHAENEEEDDVPEMNSSFTADSGEQEEHTLQETALPPVNSSIIAAPITDPSQKFPQYLPLSAEDNLGPLPENWEMAYTENGEVYFIDHNTKTTSWLDPRCLNKQQKPLEECEDDEGVHTEELDSELELPAGWEKIEDPVYGIYYVDHINRKTQYENPVLEAKRKKQLEQQQQQQQQQQQQQQQQQQQQTEEWTEDHSALVPPVIPNHPPSNPEPAREVPLQGKPFFTRNPSELKGKFIHTKLRKSSRGFGFTVVGGDEPDEFLQIKSLVLDGPAALDGKMETGDVIVSVNDTCVLGHTHAQVVKIFQSIPIGASVDLELCRGYPLPFDPDDPNTSLVTSVAILDKEPIIVNGQETYDSPASHSSKTGKVNGMKDARPSSPADVASNSSHGYPNDTVSLASSIATQPELITVHIVKGPMGFGFTIADSPGGGGQRVKQIVDSPRCRGLKEGDLIVEVNKKNVQALTHNQVVDMLVECPKGSEVTLLVQRGGLPVPKKSPKSQPLERKDSQNSSQHSVSSHRSLHTASPSHSTQVLPEFPPAEAQAPDQTDSSGQKKPDPFKIWAQSRSMYENRLPDYQEQDIFLWRKETGFGFRILGGNEPGEPIYIGHIVPLGAADTDGRLRSGDELICVDGTPVIGKSHQLVVQLMQQAAKQGHVNLTVRRKVVFAVPKTENEVPSPASSHHSSNQPASLTEEKRTPQGSQNSLNTVSSGSGSTSGIGSGGGGGSGVVSTVVQPYDVEIRRGENEGFGFVIVSSVSRPEAGTTFAGNACVAMPHKIGRIIEGSPADRCGKLKVGDRILAVNGCSITNKSHSDIVNLIKEAGNTVTLRIIPGDESSNATLLTNAEKIATITTTHTPSQQGTQETRNTTKPKQESQFEFKAPQATQEQDFYTVELERGAKGFGFSLRGGREYNMDLYVLRLAEDGPAERCGKMRIGDEILEINGETTKNMKHSRAIELIKNGGRRVRLFLKRGDGSVPEYDPSSDRHGPATGPQGVPEVRAGPDRRQHPSLESSYPPDLHKSSPHGEKRAHARDPKGSREYSRQPNEHHTWNGTSRKPDSGACRPKDRAPEGRRDAQAERAAAANGPKRRSPEKRREGTRSADNTLERREKHEKRRDVSPERRRERSPTRRRDGSPSRRRRSLERLLEQRRSPERRRGGSPERRAKSTDRRRARSPERRRERSLDKRNREDRASHREREEANLKQDAGRSSRHPPEQRRRPYKECSTDLSI

SEQ ID NO: 741763 - protein, 1521 aa, Homo sapiens
MSKVIQKKNHWTSRVHECTVKRGPQGELGVTVLGGAEHGEFPYVGAVAAVEAAGLPGGGEGPRLGEGELLLEVQGVRVSGLPRYDVLGVIDSCKEAVTFKAVRQGGRLNKDLRHFLNQRFQKGFPDHELQQTIRDNLYRHAVPCTTRSPREGEVPGVDYNFLTVKEFLDLEQSGTLLEVGTYEGNYYGTPKPPSQPVSGKVITTDALHSLQSGSKQSTPKRTKSYNDMQNAGIVHAENEEEDDVPEMNSSFTADSGEQEEHTLQETALPPVNSSIIAAPITDPSQKFPQYLPLSAEDNLGPLPENWEMAYTENGEVYFIDHNTKTTSWLDPRCLNKQQKPLEECEDDEGVHTEELDSELELPAGWEKIEDPVYGIYYVDHINRKTQYENPVLEAKRKKQLEQQQQQQQQQQQQQQQQQQQQTEEWTEDHSALVPPVIPNHPPSNPEPAREVPLQGKPFFTRNPSELKGKFIHTKLRKSSRGFGFTVVGGDEPDEFLQIKSLVLDGPAALDGKMETGDVIVSVNDTCVLGHTHAQVVKIFQSIPIGASVDLELCRGYPLPFDPDDPNTSLVTSVAILDKEPIIVNGQETYDSPASHSSKTGKVNGMKDARPSSPADVASNSSHGYPNDTVSLASSIATQPELITVHIVKGPMGFGFTIADSPGGGGQRVKQIVDSPRCRGLKEGDLIVEVNKKNVQALTHNQVVDMLVECPKGSEVTLLVQRGGLPVPKKSPKSQPLERKDSQNSSQHSVSSHRSLHTASPSHSTQVLPEFPPAEAQAPDQTDSSGQKKPDPFKIWAQSRSMYENRPMSPSPASGLSKGEREREINSTNFGECPIPDYQEQDIFLWRKETGFGFRILGGNEPGEPIYIGHIVPLGAADTDGRLRSGDELICVDGTPVIGKSHQLVVQLMQQAAKQGHVNLTVRRKVVFAVPKTENEVPSPASSHHSSNQPASLTEEKRTPQGSQNSLNTVSSGSGSTSGIGSGGGGGSGVVSTVVQPYDVEIRRGENEGFGFVIVSSVSRPEAGTTFAGNACVAMPHKIGRIIEGSPADRCGKLKVGDRILAVNGCSITNKSHSDIVNLIKEAGNTVTLRIIPGDESSNATLLTNAEKIATITTTHTPSQQGTQETRNTTKPKQESQFEFKAPQATQEQDFYTVELERGAKGFGFSLRGGREYNMDLYVLRLAEDGPAERCGKMRIGDEILEINGETTKNMKHSRAIELIKNGGRRVRLFLKRGDGSVPEYAMIPPNIAACMRNEKLGEACFYLMGHESNYDPSSDRHGPATGPQGVPEVRAGPDRRQHPSLESSYPPDLHKSSPHGEKRAHARDPKGSREYSRQPNEHHTWNGTSRKPDSGACRPKDRAPEGRRDAQAERAAAANGPKRRSPEKRREGTRSADNTLERREKHEKRRDVSPERRRERSPTRRRDGSPSRRRRSLERLLEQRRSPERRRGGSPERRAKSTDRRRARSPERRRERSLDKRNREDRASHREREEANLKQDAGRSSRHPPEQRRRPYKECSTDLSI

SEQ ID NO: 741764 - protein, 1160 aa, Homo sapiens
MSKVIQKKNHWTSRVHECTVKRGPQGELGVTVLGGAEHGEFPYVGAVAAVEAAGLPGGGEGPRLGEGELLLEVQGVRVSGLPRYDVLGVIDSCKEAVTFKAVRQGGRLNKDLRHFLNQRFQKGFPDHELQQTIRDNLYRHAVPCTTRSPREGEVPGVDYNFLTVKEFLDLEQSGTLLEVGTYEGNYYGTPKPPSQPVSGKVITTDALHSLQSGSKQSTPKRTKSYNDMQNAGIVHAENEEEDDVPEMNSSFTADSGEQEEHTLQETALPPVNSSIIAAPITDPSQKFPQYLPLSAEDNLGPLPENWEMAYTENGEVYFIDHNTKTTSWLDPRCLNKQQKPLEECEDDEGVHTEELDSELELPAGWEKIEDPVYGIYYVDHINRKTQYENPVLEAKRKKQLEQQQQQQQQQQQQQQQQQQQQTEEWTEDHSALVPPVIPNHPPSNPEPAREVPLQGKPFFTRNPSELKGKFIHTKLRKSSRGFGFTVVGGDEPDEFLQIKSLVLDGPAALDGKMETGDVIVSVNDTCVLGHTHAQVVKIFQSIPIGASVDLELCRGYPLPFDPDDPNTSLVTSVAILDKEPIIVNGQETYDSPASHSSKTGKVNGMKDARPSSPADVASNSSHGYPNDTVSLASSIATQPELITVHIVKGPMGFGFTIADSPGGGGQRVKQIVDSPRCRGLKEGDLIVEVNKKNVQALTHNQVVDMLVECPKGSEVTLLVQRGGLPVPKKSPKSQPLERKDSQNSSQHSVSSHRSLHTASPSHSTQVLPEFPPAEAQAPDQTDSSGQKKPDPFKIWAQSRSMYENRLPDYQEQDIFLWRKETGFGFRILGGNEPGEPIYIGHIVPLGAADTDGRLRSGDELICVDGTPVIGKSHQLVVQLMQQAAKQGHVNLTVRRKVVFAVPKTENEVPSPASSHHSSNQPASLTEEKRTPQGSQNSLNTVSSGSGSTSGIGSGGGGGSGVVSTVVQPYDVEIRRGENEGFGFVIVSSVSRPEAGTTFESSNATLLTNAEKIATITTTHTPSQQGTQETRNTTKPKQESQFEFKAPQATQEQDFYTVELERGAKGFGFSLRGGREYNMDLYVLRLAEDGPAERCGKMRIGDEILEINGETTKNMKHSRAIELIKNGGRRVRLFLKRGDGSVPEYGGSNYENIPSFPGMTP

SEQ ID NO: 741765 - protein, 607 aa, Homo sapiens
MKTNYARFPGPNRNMPKTENEVPSPASSHHSSNQPASLTEEKRTPQGSQNSLNTVSSGSGSTSGIGSGGGGGSGVVSTVVQPYDVEIRRGENEGFGFVIVSSVSRPEAGTTFAGNACVAMPHKIGRIIEGSPADRCGKLKVGDRILAVNGCSITNKSHSDIVNLIKEAGNTVTLRIIPGDESSNATLLTNAEKIATITTTHTPSQQGTQETRNTTKPKQESQFEFKAPQATQEQDFYTVELERGAKGFGFSLRGGREYNMDLYVLRLAEDGPAERCGKMRIGDEILEINGETTKNMKHSRAIELIKNGGRRVRLFLKRGDGSVPEYAMIPPNIAACMRNEKLGEACFYLMGHNQNYDPSSDRHGPATGPQGVPEVRAGPDRRQHPSLESSYPPDLHKSSPHGEKRAHARDPKGSREYSRQPNEHHTWNGTSRKPDSGACRPKDRAPEGRRDAQAERAAAANGPKRRSPEKRREGTRSADNTLERREKHEKRRDVSPERRRERSPTRRRDGSPSRRRRSLERLLEQRRSPERRRGGSPERRAKSTDRRRARSPERRRERSLDKRNREDRASHREREEANLKQDAGRSSRHPPEQRRRPYKECSTDLSI

SEQ ID NO: 741766 - protein, 443 aa, Homo sapiens
MSSLGSSFLYALSLFAESSNATLLTNAEKIATITTTHTPSQQGTQETRNTTKPKQESQFEFKAPQATQEQDFYTVELERGAKGFGFSLRGGREYNMDLYVLRLAEDGPAERCGKMRIGDEILEINGETTKNMKHSRAIELIKNGGRRVRLFLKRGDGSVPEYAMIPPNIAACMRNEKLGEACFYLMGHESNYDPSSDRHGPATGPQGVPEVRAGPDRRQHPSLESSYPPDLHKSSPHGEKRAHARDPKGSREYSRQPNEHHTWNGTSRKPDSGACRPKDRAPEGRRDAQAERAAAANGPKRRSPEKRREGTRSADNTLERREKHEKRRDVSPERRRERSPTRRRDGSPSRRRRSLERLLEQRRSPERRRGGSPERRAKSTDRRRARSPERRRERSLDKRNREDRASHREREEANLKQDAGRSSRHPPEQRRRPYKECSTDLSI

SEQ ID NO: 741767 - protein, 1260 aa, Homo sapiens
MSKVIQKKNHWTSRVHECTVKRGPQGELGVTVLGGAEHGEFPYVGAVAAVEAAGLPGGGEGPRLGEGELLLEVQGVRVSGLPRYDVLGVIDSCKEAVTFKAVRQGGRLNKDLRHFLNQRFQKGFPDHELQQTIRDNLYRHAVPCTTRSPREGEVPGVDYNFLTVKEFLDLEQSGTLLEVGTYEGNYYGTPKPPSQPVSGKVITTDALHSLQSGSKQSTPKRTKSYNDMQNAGIVHAENEEEDDVPEMNSSFTADSGEQEEHTLQETALPPVNSSIIAAPITDPSQKFPQYLPLSAEDNLGPLPENWEMAYTENGEVYFIDHNTKTTSWLDPRCLNKQQKPLEECEDDEGVHTEELDSELELPAGWEKIEDPVYGIYYVDHINRKTQYENPVLEAKRKKQLEQQQQQQQQQQQQQQQQQQQQTEEWTEDHSALVPPVIPNHPPSNPEPAREVPLQGKPFFTRNPSELKGKFIHTKLRKSSRGFGFTVVGGDEPDEFLQIKSLVLDGPAALDGKMETGDVIVSVNDTCVLGHTHAQVVKIFQSIPIGASVDLELCRGYPLPFDPDDPNTSLVTSVAILDKEPIIVNGQETYDSPASHSSKTGKVNGMKDARPSSPADVASNSSHGYPNDTVSLASSIATQPELITVHIVKGPMGFGFTIADSPGGGGQRVKQIVDSPRCRGLKEGDLIVEVNKKNVQALTHNQVVDMLVECPKGSEVTLLVQRGGLPVPKKSPKSQPLERKDSQNSSQHSVSSHRSLHTASPSHSTQVLPEFPPAEAQAPDQTDSSGQKKPDPFKIWAQSRSMYENRPMSPSPASGLSKGEREREINSTNFGECPIPDYQEQDIFLWRKETGFGFRILGGNEPGEPIYIGHIVPLGAADTDGRLRSGDELICVDGTPVIGKSHQLVVQLMQQAAKQGHVNLTVRRKVVFAVPKTENEVPSPASSHHSSNQPASLTEEKRTPQGSQNSLNTVSSGSGSTSGIGSGGGGGSGVVSTVVQPYDVEIRRGENEGFGFVIVSSVSRPEAGTTFAGNACVAMPHKIGRIIEGSPADRCGKLKVGDRILAVNGCSITNKSHSDIVNLIKEAGNTVTLRIIPGDESSNATLLTNAEKIATITTTHTPSQQGTQETRNTTKPKQESQFEFKAPQATQEQDFYTVELERGAKGFGFSLRGGREYNMDLYVLRLAEDGPAERCGKMRIGDEILEINGETTKNMKHSRAIELIKNGGRRVRLFLKRGDGSVPEYGAVVGSAVAPGCGLSGLLPS

SEQ ID NO: 741768 - protein, 110 aa, Homo sapiens
MFSLVWGPGEKFRKEREEKRGMKGSALELLLTKRKPKTRWNKKGFACPCQVWKCVSLSVVMETPGSFFANLVGPFFLIIKGSLLTALLNCHWHYPKETNCRNCSYAGAYK

SEQ ID NO: 741769 - protein, 85 aa, Homo sapiens
SSNQPASLTEEKRTPQGSQNSLNTVSSGSGSTSGIGSGGGGGSGVVSTVVQPYDVEIRRGENEGFGFVIVSSVSRPEAGTTFGEC

SEQ ID NO: 741770 - protein, 1521 aa, Homo sapiens; identical to SEQ ID NO: 741763

SEQ ID NO: 741771 - protein, 550 aa, Homo sapiens
MSHGPSPRLAESPQLSKGSLLTILGSPSPERMGPADSLPPTPPSGTPSPGPPPALPLPPAPALLADGDWESREELRLRELEEARARAAQMEKTMRWWSDCTANWREKWSKVRAERNRAREEVRQLRQRLDALTKELAGARRERQEAQGECEARGRELARLRGARGVADQTRDGPEPEAEREPVRDVGSERPPGSQELELVESLLKSMPEESEDCWEARSLGAGGPRGSSGRQERSRLPWEDTAATEEEASKLTALRLRLDESQKVLLKEREDKLALSRNIEKLEGELSQWKIKYEELSKTKQEMLKQLSILKEAHQDELGRMSEDLEDELGARSSMDRKMAELRGEMERLQAENAAEWGRRERLETEKLGLERENKKLRAQVGDLEEALARRRRQTASALDCDLRASQAALFEKNKELADLKHVHGKLKKQFQEKVAELAHANRRVEQHEAEVKKLRLRVEELKKELAQAEDELDEAHNQARKLQRSLDEQTEQSENLQVQLEHLQSRLRRQQQNAPLFGKIRSARFGTEEAEDGTSDLDEDEDLQIQVA

SEQ ID NO: 741772 - protein, 550 aa, Homo sapiens; identical to SEQ ID NO: 741771

SEQ ID NO: 741773 - protein, 550 aa, Homo sapiens; identical to SEQ ID NO: 741771

SEQ ID NO: 741774 - protein, 550 aa, Homo sapiens; identical to SEQ ID NO: 741771

SEQ ID NO: 741775 - protein, 276 aa, Homo sapiens
GTVQLRPPPEGELSQWKIKYEELSKTKQEMLKQLSILKEAHQDELGRMSEDLEDELGARSSMDRKMAELRGEMERLQAENAAEWGRRERLETEKLGLERENKKLRAQVGDLEEALARRRRQTASALDCDLRASQAALFEKNKELADLKHVHGKLKKQFQEKVAELAHANRRVEQHEAEVKKLRLRVEELKKELAQAEDELDEAHNQARKLQRSLDEQTEQSENLQVQLEHLQSRLRRQQQNAPLFGKIRSARFGTEEAEDGTSDLDEDEDLQIQVA

SEQ ID NO: 741776 - protein, 174 aa, Homo sapiens
SGKERHPASLELPDLVGLPGMAPKLILIPSSLPPHPCALEELADLKHVHGKLKKQFQEKVAELAHANRRVEQHEAEVKKLRLRVEELKKELAQAEDELDEAHNQARKLQRSLDEQTEQSENLQVQLEHLQSRLRRQQQNAPLFGKIRSARFGTEEAEDGTSDLDEDEDLQIQVA

SEQ ID NO: 741777 - protein, 120 aa, Homo sapiens
GREESRLWQGLVQSEPRHCISLSGWLAGPWAGWRQQSHLPTPCGKEAYVLYIYIHTRARARAHPEVFGPIWFYKYRTAPRPSPDDLTHPGLHAGLGMLGAVVGAPPWAASLGFAVHHTMQ

SEQ ID NO: 741778 - protein, 141 aa, Homo sapiens
LRLRELEEARARAAQMEKTMRWWSDCTANWREKWSKVRAERNRAREEVRQLRQRLDALTKELAGARRERQEAQGECEARGRELARLRGARGVADQTRDGPEPEAEREPVRDVGSERPPGSQVRGAGGAFALQSRSGRGRLS

SEQ ID NO: 741779 - protein, 72 aa, Homo sapiens
SQWDVSRNDVRNIKNQFFREIICFSFLLLVFDSIFNLSGLQHLPTDPHIMAPTLASSHIFSLSPFGSQGAIA

SEQ ID NO: 741780 - protein, 141 aa, Homo sapiens [sequence omitted]

SEQ ID NO: 741781 - protein, 471 aa, Homo sapiens
MDILCEENTSLSSTTNSLMQLNDDTRLYSNDFNSGEANTSDAFNWTVDSENRTNLSCEGCLSPSCLSLLHLQEKNWSALLTAVVIILTIAGNILVIMAVSLEKKLQNATNYFLMSLAIADMLLGFLVMPVSMLTILYGYRWPLPSKLCAVWIYLDVLFSTASIMHLCAISLDRYVAIQNPIHHSRFNSRTKAFLKIIAVWTISVGISMPIPVFGLQDDSKVFKEGSCLLADDNFVLIGSFVSFFIPLTIMVITYFLTIKSLQKEATLCVSDLGTRAKLASFSFLPQSSLSSEKLFQRSIHREPGSYTGRRTMQSISNEQKACKVLGIVFFLFVVMWCPFFITNIMAVICKESCNEDVIGALLNVFVWIGYLSSAVNPLVYTLFNKTYRSAFSRYIQCQYKENKKPLQLILVNTIPALAYKSSQLQMGQKKNSKQDAKTTDNDCSMVALGKQHSEEASKDNSDGVNEKVSCV

SEQ ID NO: 741782 - protein, 264 aa, Homo sapiens [sequence omitted]

SEQ ID NO: 741783 - protein, 189 aa, Homo sapiens
MAPSAEERTTIHEMFLSTLDPKTISFRSRVLPSNAVWMENSKLKSLEICHPQERNIFNRIFGGFLMRKAYELAWATACSFGGSRPFVVAVDDIMFQKPVEVGSLLFLSSQVCFTQNNYIQVRVHSEVASLQEKQHTTTNVFHFTFMSEKEVPLVFPKTYGESMLYLDGQRHFNSMSGPATLRKDYLVEP

SEQ ID NO: 741784 - protein, 269 aa, Homo sapiens
VSCVGKTSMEVKMQMFQLHGDEFCPVLDATFVMVARDSENEGPAFVNPLIPESPEEEELFRQGELNKGRRIAFSSTSLLKMAPSAEERTTIHEMFLSTLDPKTISFRSRVLPSNAVWMENSKLKSLEICHPQERNIFNRIFGGFLMRKAYELAWATACSFGGSRPFVVAVDDIMFQKPVEVGSLLFLSSQVCFTQNNYIQVRVHSEVASLQEKQHTTTNVFHFTFMSEKEVPLVFPKTYGESMLYLDGQRHFNSMSGPATLRKDYLVEP

SEQ ID NO: 741785 - protein, 136 aa, Homo sapiens
MYLGLCAHRLVYPDTLLKETKDWQQLWSPRRGNGTAARGMLKCPSVPFSVHTVVWCPKADGCDHVNQLLCESVPLGYSQTFTEERQEQVFFNCTCLTPLIELGPSLSVFCLLLPSPAWFAYFPFSSHLTSSPSSPQ

SEQ ID NO: 741786 - protein, 136 aa, Homo sapiens; identical to SEQ ID NO: 741785

SEQ ID NO: 741787 - protein, 127 aa, Homo sapiens [sequence omitted]

SEQ ID NO: 741788 - protein, 116 aa, Homo sapiens
FFFKTLTVTQAGVQWCDLGSLQSLPPGLKGFSSLSLLSSWDQRCTSPHPANFIFLVEMGFRHVGQTDLELLASSDLLTSASQSAGITGMSHCTWLVLFMLCLRETAQWSAHKGVQT

SEQ ID NO: 741789 - protein, 457 aa, Homo sapiens
MGSGLDFAETSCAQPVVSTQSDKEPGITASATDTDNANGEEVPHTQEISVSWEGEAAPEIRTSKLGQPDPAPSKKKSNRLTLSKRKKEAQDEKVEKTQGGHEHRQEDRLKKTVQDHSQIRDQQKGEISGFGQCLVWVQCSFPNCGKWRRLCGNIDPSVLPDNWSCDQNTDVQYNRCDIPEETWTGLESDVAYASYIPGSIIWAKQYGYPWWPGMIESDPDLGEYFLFTSHLDSLPSKYHVTFFGETVSRAWIPVNMLKNFQELSLELSVMKKRRNDCSQKLGVALMMAQEAEQISIQERVNLFGFWSRFNGSNSNGERKDLQLSGLNSPGSCLEKKEKEEELEKEEGEKTALKKKFKAPQSKALAASFSEGKEVRTVPKNLGLSACKGACPSSAKEEPRHREPLTQEAGSVPLEDEASSDLDLEQLMEDVGRELGQSGELQHSNSDGEDFPVALFGK

SEQ ID NO: 741790 - protein, 648 aa, Homo sapiens
MTTLQNKEECGKGPKRIFAPPAQKSYSLLPCSPNSPKEETPGISSPETEARISLPKASLKKKEEKATMKNVPSREQEKKRKAQINKQAEKKEKEKSSLTNAEFEEIVQIVLQKSLQECLGMGSGLDFAETSCAQPVVSTQSDKEPGITASATDTDNANGEEVPHTQEISVSWEGEAAPEIRTSKLGQPDPAPSKKKSNRLTLSKRKKEAQDEKVEKTQGGHEHRQEDRLKKTVQDHSQIRDQQKGEISGFGQCLVWVQCSFPNCGKWRRLCGNIDPSVLPDNWSCDQNTDVQYNRCDIPEETWTGLESDVAYASYIPGSIIWAKQYGYPWWPGMIESDPDLGEYFLFTSHLDSLPSKYHVTFFGETVSRAWIPVNMLKNFQELSLELSVMKKRRNDCSQKLGVALMMAQEAEQISIQERVNLFGFWSRFNGSNSNGERKDLQLSGLNSPGSCLEKKEKEEELEKEEGEKTDPILPIRKRVKIQTQKTKPRGLGGDAGTADGRGRTLQRKIMKRSLGRKSTAPPAPRMGRKEGQGNSDSDQPGPKKKFKAPQSKALAASFSEGKEVRTVPKNLGLSACKGACPSSAKEEPRHREPLTQEAGSVPLEDEASSDLDLEQLMEDVGRELGQSGELQHSNSDGEDFPVALFGK

SEQ ID NO: 741791 - protein, 106 aa, Homo sapiens
  misc_feature (1)..(1): Xaa can be any naturally occurring amino acid
  misc_feature (11)..(12): Xaa can be any naturally occurring amino acid
XLPPKSQRALXXAKLFLKKGKEVRTVPKNLGLSACKGACPSSAKEEPRHREPLTQEAGSVPLEDEASSDLDLEQLMEDVGRELGQSGELQHSNSDGEDFPVALFGK

SEQ ID NO: 741792 - protein, 477 aa, Homo sapiens
MGSGLDFAETSCAQPVVSTQSDKEPGITASATDTDNANGEEVPHTQEISVSWEGEAAPEIRTSKLGQPDPAPSKKKSNRLTLSKRKKEAQDEKVEKTQGGHEHRQEDRLKKTVQDHSQIRDQQKGEISGFGQCLVWVQCSFPNCGKWRRLCGNIDPSVLPDNWSCDQNTDVQYNRCDIPEETWTGLESDVAYASYIPGSIIWAKQYGYPWWPGMIESDPDLGEYFLFTSHLDSLPSKYHVTFFGETVSRAWIPVNMLKNFQELSLELSVMKKRRNDCSQKLGVALMMAQEAEQISIQERVNLFGFWSRFNGSNSNGERKDLQLSGLNSPGSCLEKKEKEEELEKEEGEKTDPILPIRKRVKIQTQKTKPRGPKKKFKAPQSKALAASFSEGKEVRTVPKNLGLSACKGACPSSAKEEPRHREPLTQEAGSVPLEDEASSDLDLEQLMEDVGRELGQSGELQHSNSDGEDFPVALFGK

SEQ ID NO: 741793 - protein, 577 aa, Homo sapiens
MTTLQNKEECGKGPKRIFAPPAQKSYSLLPCSPNSPKEETPGISSPETEARISLPKASLKKKEEKATMKNVPSREQEKKRKAQINKQAEKKEKEKSSLTNAEFEEIVQIVLQKSLQECLGMGSGLDFAETSCAQPVVSTQSDKEPGITASATDTDNANGEEVPHTQEISVSWEGEAAPEIRTSKLGQPDPAPSKKKSNRLTLSKRKKEAQDEKVEKTQGGHEHRQEDRLKKTVQDHSQIRDQQKGEISGFGQCLVWVQCSFPNCGKWRRLCGNIDPSVLPDNWSCDQNTDVQYNRCDIPEETWTGLESDVAYASYIPGSIIWAKQYGYPWWPGMIESDPDLGEYFLFTSHLDSLPSKYHVTFFGETVSRAWIPVNMLKNFQELSLELSVMKKRRNDCSQKLGVALMMAQEAEQISIQERVNLFGFWSRFNGSNSNGERKDLQLSGLNSPGSCLEKKEKEEELEKEEGEKTALKKKFKAPQSKALAASFSEGKEVRTVPKNLGLSACKGACPSSAKEEPRHREPLTQEAGSVPLEDEASSDLDLEQLMEDVGRELGQSGELQHSNSDGEDFPVALFGK

SEQ ID NO: 741794 - protein, 244 aa, Homo sapiens
MIESDPDLGEYFLFTSHLDSLPSKYHVTFFGETVSRAWIPVNMLKNFQELSLELSVMKKRRNDCSQKLGVALMMAQEAEQISIQERVNLFGFWSRFNGSNSNGERKDLQLSGLNSPGSCLEKKEKEEELEKEEGEKTALKKKFKAPQSKALAASFSEGKEVRTVPKNLGLSACKGACPSSAKEEPRHREPLTQEAGSVPLEDEASSDLDLEQLMEDVGRELGQSGELQHSNSDGEDFPVALFGK

SEQ ID NO: 741795 - protein, 244 aa, Homo sapiens; identical to SEQ ID NO: 741794

SEQ ID NO: 741796 - protein, 273 aa, Homo sapiens
MLKNFQELSLELSVMKKRRNDCSQKLGVALMMAQEAEQISIQERVNLFGFWSRFNGSNSNGERKDLQLSGLNSPGSCLEKKEKEEELEKEEGEKTDPILPIRKRVKIQTQKTKPRGLGGDAGTADGRGRTLQRKIMKRSLGRKSTAPPAPRMGRKEGQGNSDSDQPGPKKKFKAPQSKALAASFSEGKEVRTVPKNLGLSACKGACPSSAKEEPRHREPLTQEAGSVPLEDEASSDLDLEQLMEDVGRELGQSGELQHSNSDGEDFPVALFGK

SEQ ID NO: 741797 - protein, 237 aa, Homo sapiens
VSWFPQERVNLFGFWSRFNGSNSNGERKDLQLSGLNSPGSCLEKKEKEEELEKEEGEKTDPILPIRKRVKIQTQKTKPRGLGGDAGTADGRGRTLQRKIMKRSLGRKSTAPPAPRMGRKEGQGNSDSDQPGPKKKFKAPQSKALAASFSEGKEVRTVPKNLGLSACKGACPSSAKEEPRHREPLTQEAGSVPLEDEASSDLDLEQLMEDVGRELGQSGELQHSNSDGEDFPVALFGK

SEQ ID NO: 741798 - protein, 159 aa, Homo sapiens
MTTLQNKEECGKGPKRIFAPPAQKSYSLLPCSPNSPKEETPGISSPETEARISLPKASLKKKEEKATMKNVPSREQEKKRKAQINKQAEKKEKEKSSLTNAEFEEIVQIVLQKSLQECLGMGSGLDFAETSCAQPVVSTQSDKEPGITASATDTDNANG

SEQ ID NO: 741799 - protein, 435 aa, Homo sapiens
MSNKDRHIDSSCSSFIKTEPSSPASLTDSVNHHSPGGSSDASGSYSSTMNGHQNGLDSPPLYPSAPILGGSGPVRKLYDDCSSTIVEDPQTKCEYMLNSMPKRLCLVCGDIASGYHYGVASCEACKAFFKRTIQGNIEYSCPATNECEITKRRRKSCQACRFMKCLKVGMLKEGVRLDRVRGGRQKYKRRIDAENSPYLNPQLVQPAKKPYNKIVSHLLVAEPEKIYAMPDPTVPDSDIKALTTLCDLADRELVVIIGWAKHIPGFSTLSLADQMSLLQSAWMEILILGVVYRSLSFEDELVYADDYIMDEDQSKLAGLLDLNNAILQLVKKYKSMKLEKEEFVTLKAIALANSDSMHIEDVEAVQKLQDVLHEALQDYEAGQHMEDPRRAGKMLMTLPLLRQTSTKAVQHFYNIKLEGKVPMHKLFLEMLEAKV

SEQ ID NO: 741800 - protein, 435 aa, Homo sapiens; identical to SEQ ID NO: 741799

SEQ ID NO: 741801 - protein, 297 aa, Homo sapiens
MSNKDRHIDSSCSSFIKTEPSSPASLTDSVNHHSPGGSSDASGSYSSTMNGHQNGLDSPPLYPSAPILGGSGPVRKLYDDCSSTIVEDPQTKCEYMLNSMPKRLCLVCGDIASGYHYGVASCEACKAFFKRTIQGNIEYSCPATNECEITKRRRKSCQACRFMKCLKVGMLKEGVRLDRVRGGRQKYKRRIDAENSPYLNPQLVQPAKKPYNKIVSHLLVAEPEKIYAMPDPTVPDSDIKALTTLCDLADRELVVIIGWAKHIPGLLHAVPGGPDEPSAECLDGNFDPWCRIPVSFV

SEQ ID NO: 741802 - protein, 435 aa, Homo sapiens; identical to SEQ ID NO: 741799

SEQ ID NO: 741803 - protein, 435 aa, Homo sapiens; identical to SEQ ID NO: 741799

SEQ ID NO: 741804 - protein, 207 aa, Homo sapiens
MPDPTVPDSDIKALTTLCDLADRELVVIIGWAKHIPGFSTLSLADQMSLLQSAWMEILILGVVYRSLSFEDELVYADDYIMDEDQSKLAGLLDLNNAILQLVKKYKSMKLEKEEFVTLKAIALANSDSMHIEDVEAVQKLQDVLHEALQDYEAGQHMEDPRRAGKMLMTLPLLRQTSTKAVQHFYNIKLEGKVPMHKLFLEMLEAKV

SEQ ID NO: 741805 - protein, 79 aa, Homo sapiens
SGSPSPRSEIMEKKGKSQKEIKSMRTQQAQQEPELTPETCRSGARSPTNQTTEARAGGLAWSHSGHSGRRSVMLLNDGG

SEQ ID NO: 741806 - protein, 101 aa, Homo sapiens
VSREGQRPKSHPSGAPLEWGRRTGNHHKHAPPPSQEKQQLSASLTELHYLQAERVVQEGVWDSFENTFLESTLLTTEHDLVENKHPRVLLWYMFMILMLLV

SEQ ID NO: 741807 - protein, 117 aa, Homo sapiens
ITKEKEADSIVFTAYKYHTGCYSMHALQSVSKTRADITDGNKVPCCPVGTHDFLLCSTAARDVPFPMGKRLGCTYVLKLFNSWKFACSVASAALLSFFFFLREKEHYPNCQVWKEKK

SEQ ID NO: 741808 - protein, 48 aa, Homo sapiens
MLDASLGSALGMCILYGISHRQLPCEHDDKPLPALLGLIPVSIRCIPT

SEQ ID NO: 741809 - protein, 226 aa, Homo sapiens
RGRGRWAQEARPGAPRAGSGAAGAGAGMAWPCISRLCCLARRWNQLDRSDVAVPLTLHGYSDLDSEEPGTGGAASRRGQPPAGARDSGRDVPLTQYQRDFGLWTTPAGPKDPPPGRGPGAGGRRGKSSAQSSAPPAPGARGVYVLPIGDADAAAAVTTSYRQEFQAWTGVKPSRSTKTKPARVITTHTSGWDSSPGAGFQVPEVRKKFTPNPSAIFQASAPRILNV

SEQ ID NO: 741810 - protein, 188 aa, Homo sapiens
RGGGDAGRRRRGRERRAPGAGRRAPGLAWRGPVSAASRRGQPPAGARDSGRDVPLTQYQRDFGLWTTPAGPKDPPPGRGPGAGGRRGKSSAQSSAPPAPGARGVYVLPIGDADAAAAVTTSYRQEFQAWTGVKPSRSTKTKPARVITTHTSGWDSSPGAGFQVPEVRKKFTPNPSAIFQASAPRILNV

SEQ ID NO: 741811 - protein, 272 aa, Homo sapiens
RGRGRWAQEARPGAPRAGSGAAGAGAGMAWPCISRLCCLARRWNQLDRSDVAVPLTLHGYSDLDSEEPGTGGAASRRGQPPAGARDSGRDVPLTQYQRDFGLWTTPAGPKDPPPGRGPGAGGRRGKSSAQSSAPPAPGARGVYVLPIGDADAAAAVTTSYRQEFQAWTGVKPSRSTKTKPARVITTHTSGWDSSPGAGFQVPEVRKKFTPNPSAIFQASAPRILKAVTRAKVLVWSRCTDGLGTPSSASSILLRSLWKAPAFVNCHLAVSQF

SEQ ID NO: 741812 - protein, 204 aa, Homo sapiens
RGRGRWAQEARPGAPRAGSGAAGAGAGMAWPCISRLCCLARRWNQLDRSDVAVPLTLHGYSDLDSEEPGTGGAASRRGQPPAGARDSGRDVPLTQYQRDFGLWTTPAGPKDPPPGRGPGAGGRRGKSSAQSSAPPAPGARGVYVLPIGDADAAAAVTTSYRYGLGRDRNESPPCGGRTRRPGSLRSLPSVRALVVRTERRVPCG

SEQ ID NO: 741813 - protein, 226 aa, Homo sapiens; identical to SEQ ID NO: 741809

SEQ ID NO: 741814 - protein, 209 aa, Homo sapiens
RGRGRWAQEARPGAPRAGSGAAGAGAGMAWPCISRLCCLARRWNQLDRSDVAVPLTLHGYSDLDSEEPGTGGAASRRGQPPAGARDSGRDVPLTQYQRDFGLWTTPAGPKDPPPGRGPGAGGRRGKSSAQSSAPPAPGARGVYVLPIGDADAAAAVTTSYRQEFQAWTGVKPSRSTKTKPARVITTHTSGWDSSPGAGFQASAPRILNV

SEQ ID NO: 741815 - protein, 299 aa, Homo sapiens
RGRGRWAQEARPGAPRAGSGAAGAGAGMAWPCISRLCCLARRWNQLDRSDVAVPLTLHGYSDLDSEEPGTGGAASRRGQPPAGARDSGRDVPLTQYQRDFGLWTTPAGPKDPPPGRGPGAGGRRGKSSAQSSAPPAPGARGVYVLPIGDADAAAAVTTSYRYGLGRDRNESPPCGGRTRRPGARGMGWAAERRRLEPGSHATSELPAASEVTPVWSVGTAGGAFAAPCPDSVLEHPRAGSAPLPSQPPSWGQPSEWPAFSRVGTGLPLTPTAGPSRARGARRPCPPALSGHCLVCGRWW

SEQ ID NO: 741816 - protein, 35 aa, Homo sapiens
MVQPCSQLLSWAGSVYNFSGRQCKVLVDLQFWGLE

SEQ ID NO: 741817 - protein, 85 aa, Homo sapiens
PPQPPASSCSCFSSSSSRSEWALDLSTSLCPRTVNCGGEKRNLSSQRAFRWSRTPQRKTHAAPRGADAATLDIAAQLGLPVSRAA

SEQ ID NO: 741818 - protein, 214 aa, Homo sapiens
FPRECSRIFGEDGLTLKLFLKRTAPFSILWTLTNYLYLLALKKLTATDVSALFCCNKAFVFLLSWIVLKDRFMGVRIVAAIMAITGIVMMAYADNFHADSIIGVAFAVGSASTSALYKVLFKMFLGSANFGEAAHFVSTLGFFNLIFISFTPVILYFTKVEHWSSFAALPWGCLCGDGQGCGWPSTSWVNVGVVLTYPILISIGDSGSAFLEMQ

SEQ ID NO: 741819 - protein, 124 aa, Homo sapiens
FPRECSRIFGEDGLTLKLFLKRTAPFSILWTLTNYLYLLALKKLTATDVSALFCCNKAFVFLLSWIVLKDRFMGVRVMAYLIQCAMPAFFITPWLQESLSALFRGVAVKLFSLVLSTNRNLKTH

SEQ ID NO: 741820 - protein, 108 aa, Homo sapiens
MAITGIVMMAYADNFHADSIIGVAFAVGSASTSALYKVLFKMFLGSANFGEAAHFVSTLGFFNLIFISFTPVILYFTKVGALVLFCCSAMGLSLWGWAGLWLAFNILG

SEQ ID NO: 741821 - protein, 82 aa, Homo sapiens
  misc_feature (5)..(5): Xaa can be any naturally occurring amino acid
  misc_feature (19)..(19): Xaa can be any naturally occurring amino acid
ASSQXASARADPALGPGPXSLSCLSSLAWPSLPADPQEGSKRMQDLLHSSHPGPGSQNRMRQAPEAAVLRKVAGIPADNAPP

SEQ ID NO: 741822 - protein, 37 aa, Homo sapiens
MWLALMSGSSHSTLITPPRLSNPSLFAADVTRSCERP

SEQ ID NO: 741823 - protein, 1033 aa, Homo sapiens
GRDRSRSPGGGPSRCRRPGVAHHPEPTGRRCLLRPQGAPGALKGEAAGTPLLGEEAASPPRMRPEGAGMELGGGEERLPEESRREHWQLLGNLKTTVEGLVSTNSPNVWSKYGGLERLCRDMQSILYHGLIRDQACRRQTDYWQFVKDIRWLSPHSALHVEKFISVHENDQSSADGASERAVAELWLQHSLQYHCLSAQLRPLLGDRQYIRKFYTDAAFLLSDAHVTAMLQCLEAVEQNNPRLLAQIDASMFARKHESPLLVTKSQSLTALPSSTYTPPNSYAQHSYFGSFSSLHQSVPNNGSERRSTSFPLSGPPRKPQESRGHVSPAEDQTIQAPPVSVSALARDSPLTPNEMSSSTLTSPIEASWVSSQNDSPGDASEGPEYLAIGNLDPRGRTASCQSHSSNAESSSSNLFSSSSSQKPDSAASSLGDQEGGGESQLSSVLRRSSFSEGQTLTVTSGAKKSHIRSHSDTSIASRGAPESCNDKAKLRGPLPYSGQSSEVSTPSSLYMEYEGGRYLCSGEGMFRRPSEGQSLISYLSEQDFGSCADLEKENAHFSISESLIAAIELMKCNMMSQCLEEEEVEEEDSDREIQELKQKIRLRRQQIRTKNLLPMYQEAEHGSFRVTSSSSQFSSRDSAQLSDSGSADEVDEFEIQDADIRRNTASSSKSFVSSQSFSHCFLHSTSAEAVAMGLLKQFEGMQLPAASELEWLVPEHDAPQKLLPIPDSLPISPDDGQHADIYKLRIRVRGNLEWAPPRPQIIFNVHPAPTRKIAVAKQNYRCAGCGIRTDPDYIKRLRYCEYLGKYFCQCCHENAQMAIPSRVLRKWDFSKYYVSNFSKDLLIKIWNDPLFNVQDINSALYRKVKLLNQVRLLRVQLCHMKNMFKTCRLAKELLDSFDTVPGHLTEDLHLYSLNDLTATRKGELGPRLAELTRAGATHVERCMLCQAKGFICEFCQNEDDIIFPFELHKCRTCEECKACYHKACFKSGSCPRCERLQARREALARQSLESYLSDYEEEPAEALALEAAVLEAT

SEQ ID NO: 741824 - protein, 686 aa, Homo sapiens
HEANNGSERRSTSFPLSGPPRKPQESRGHVSPAEDQTIQAPPVSVSALARDSPLTPNEMSSSTLTSPIEASWVSSQNDSPGDASEGPEYLAIGNLDPRGRTASCQSHSSNAESSSSNLFSSSSSQKPDSAASSLGDQEGGGESQLSSVLRRSSFSEGQTLTVTSGAKKSHIRSHSDTSIASRGAPESCNDKAKLRGPLPYSGQSSEVSTPSSLYMEYEGGRYLCSGEGMFRRPSEGQSLISYLSEQDFGSCADLEKENAHFSISESLIAAIELMKCNMMSQCLEEEEVEEEDSDREIQELKQKIRLRRQQIRTKNLLPMYQEAEHGSFRVTSSSSQFSSRDSAQLSDSGSADEVDEFEIQDGSEGSNLTHISKNGLSVSLASMFSDADIRRNTASSSKSFVSSQSFSHCFLHSTSAEAVAMGLLKQFEGMQLPAASELEWLVPEHDAPQKLLPIPDSLPISPDDGQHADIYKLRIRVRGNLEWAPPRPQIIFNVHPAPTRKIAVAKQNYRCAGCGIRTDPDYIKRLRYCEYLGKYFCQCCHENAQMAIPSRVLRKWDFSKYYVSNFSKDLLIKIWNDPLFNVQDINSALYRKVKLLNQVRLLRVQLCHMKNMFKTCRLAKELLDSFDTVPGHLTEDLHLYSLNDLTATRKGELGPRLAELTRAGATHVERCMVRKSHCSMQLSPCF

SEQ ID NO: 741825 - protein, 1001 aa, Homo sapiens
GRDRSRSPGGGPSRCRRPGVAHHPEPTGRRCLLRPQGAPGALKGEAAGTPLLGEEAASPPRMRPEGAGMELGGGEERLPEESRREHWQLLGNLKTTVEGLVSTNSPNVWSKYGGLERLCRDMQSILYHGLIRDQACRRQTDYWQFVKDIRWLSPHSALHVEKFISVHENDQSSADGASERAVAELWLQHSLQYHCLSAQLRPLLGDRQYIRKFYTDAAFLLSDAHVTAMLQCLEAVEQNNPRLLAQIDASMFARKHESPLLVTKSQSLTALPSSTYTPPNSYAQHSYFGSFSSLHQSVPNNGSERRSTSFPLSGPPRKPQESRGHVSPAEDQTIQAPPVSVSALARDSPLTPNEMSSSTLTSPIEASWVSSQNDSPGDASEGPEYLAIGNLDPRGRTASCQSHSSNAESSSSNLFSSSSSQKPDSAASSLGDQEGGGESQLSSVLRRSSFSEGQTLTVTSGAKKSHIRSHSDTSIASRGAPEGGRYLCSGEGMFRRPSEGQSLISYLSEQDFGSCADLEKENAHFSISESLIAAIELMKCNMMSQCLEEEEVEEEDSDREIQELKQKIRLRRQQIRTKNLLPMYQEAEHGSFRVTSSSSQFSSRDSAQLSDSGSADEVDEFEIQDADIRRNTASSSKSFVSSQSFSHCFLHSTSAEAVAMGLLKQFEGMQLPAASELEWLVPEHDAPQKLLPIPDSLPISPDDGQHADIYKLRIRVRGNLEWAPPRPQIIFNVHPAPTRKIAVAKQNYRCAGCGIRTDPDYIKRLRYCEYLGKYFCQCCHENAQMAIPSRVLRKWDFSKYYVSNFSKDLLIKIWNDPLFNVQDINSALYRKVKLLNQVRLLRVQLCHMKNMFKTCRLAKELLDSFDTVPGHLTEDLHLYSLNDLTATRKGELGPRLAELTRAGATHVERCMLCQAKGFICEFCQNEDDIIFPFELHKCRTCEECKACYHKACFKSGSCPRCERLQARREALARQSLESYLSDYEEEPAEALALEAAVLEAT

SEQ ID NO: 741826 - protein, 1001 aa, Homo sapiens; identical to SEQ ID NO: 741825

SEQ ID NO: 741827 - protein, 737 aa, Homo sapiens
HEANNGSERRSTSFPLSGPPRKPQESRGHVSPAEDQTIQAPPVSVSALARDSPLTPNEMSSSTLTSPIEASWVSSQNDSPGDASEGPEYLAIGNLDPRGRTASCQSHSSNAESSSSNLFSSSSSQKPDSAASSLGDQEGGGESQLSSVLRRSSFSEGQTLTVTSGAKKSHIRSHSDTSIASRGAPESCNDKAKLRGPLPYSGQSSEVSTPSSLYMEYEGGRYLCSGEGMFRRPSEGQSLISYLSEQDFGSCADLEKENAHFSISESLIAAIELMKCNMMSQCLEEEEVEEEDSDREIQELKQKIRLRRQQIRTKNLLPMYQEAEHGSFRVTSSSSQFSSRDSAQLSDSGSADEVDEFEIQDADIRRNTASSSKSFVSSQSFSHCFLHSTSAEAVAMGLLKQFEGMQLPAASELEWLVPEHDAPQKLLPIPDSLPISPDDGQHADIYKLRIRVRGNLEWAPPRPQIIFNVHPAPTRKIAVAKQNYRCAGCGIRTDPDYIKRLRYCEYLGKYFCQCCHENAQMAIPSRVLRKWDFSKYYVSNFSKDLLIKIWNDPLFNVQDINSALYRKVKLLNQVRLLRVQLCHMKNMFKTCRLAKELLDSFDTVPGHLTEDLHLYSLNDLTATRKGELGPRLAELTRAGATHVERCMLCQAKGFICEFCQNEDDIIFPFELHKCRTCEECKACYHKACFKSGSCPRCERLQARREALARQSLESYLSDYEEEPAEALALEAAVLEAT

SEQ ID NO: 741828 - protein, 342 aa, Homo sapiens [sequence omitted]

SEQ ID NO: 741829 - protein, 1001 aa, Homo sapiens; identical to SEQ ID NO: 741825

SEQ ID NO: 741830 - protein, 678 aa, Homo sapiens
GRDRSRSPGGGPSRCRRPGVAHHPEPTGRRCLLRPQGAPGALKGEAAGTPLLGEEAASPPRMRPEGAGMELGGGEERLPEESRREHWQLLGNLKTTVEGLVSTNSPNVWSKYGGLERLCRDMQSILYHGLIRDQACRRQTDYWQFVKDIRWLSPHSALHVEKFISVHENDQSSADGASERAVAELWLQHSLQYHCLSAQLRPLLGDRQYIRKFYTDAAFLLSDAHVTAMLQCLEAVEQNNPRLLAQIDASMFARKHESPLLVTKSQSLTALPSSTYTPPNSYAQHSYFGSFSSLHQSVPNNGSERRSTSFPLSGPPRKPQESRGHVSPAEDQTIQAPPVSVSALARDSPLTPNEMSSSTLTSPIEASWVSSQNDSPGDASEGPEYLAIGNLDPRGRTASCQSHSSNAESSSSNLFSSSSSQKPDSAASSLGDQEGGGESQLSSVLRRSSFSEGQTLTVTSGAKKSHIRSHSDTSIASRGAPEGGRYLCSGEGMFRRPSEGQSLISYLSEQDFGSCADLEKENAHFSISESLIAAIELMKCNMMSQCLEEEEVEEEDSDREIQELKQKIRLRRQQIRTKNLLPMYQEAEHGSQWSLWMLLFPHFPNFSIRPGAQTSGSSAVRCFYVVLLFFYHARNTHPRVAPFPASEIPAFQARQSGSRLESQHFGRPRRVDHLRPGV

SEQ ID NO: 741831 - protein, 170 aa, Homo sapiens
GVNAKGQQVFLKDIWPTRDEIQAVERQYVIPGMFKEVYQKIETVNESWNALATPSDKLFFWNSKSTYIKSPPFFENLTLDLQPPKSIVDAYVLLNLGDSVTTDHISPAGNIARNSPAARYLTNRGFERQLTQENTDLCLSPPLLTSLSSPLKLWGQLFCHGEQCLGDLEK

SEQ ID NO: 741832 - protein, 314 aa, Homo sapiens
MSRVPAFLSAAEVEEHLRSSSLLIPPLETALANFSSGPEGGVMQPVRTVVPVTKHRGYLGVMPAYSAAEDALTTKLVTFYEDRGITSVVPSHQATVLLFEPSNGTLLAVMDGNVITAKRTAAVSAIATKFLKPPSSEVLCILGAGVQAYSHYEIFTEQFSFKEVRIWNRTKENAEKFADTVQGEVRVCSSVQEAVAGADVIITVTLATEPILFGEWVKPGAHINAVGASRPDWRELDDELMKEAVLYVDSQEAALKESGDVLLSGAEIFAELGEVIKGVKPAHCEKTTVFKSLGMAVEDTVAAKLIYDSWSSGK

SEQ ID NO: 741833 - protein, 314 aa, Homo sapiens; identical to SEQ ID NO: 741832

SEQ ID NO: 741834 - protein, 272 aa, Homo sapiens
MQPVRTVVPVTKHRGYLGVMPAYSAAEDALTTKLVTFYEDRGITSVVPSHQATVLLFEPSNGTLLAVMDGNVITAKRTAAVSAIATKFLKPPSSEVLCILGAGVQAYSHYEIFTEQFSFKEVRIWNRTKENAEKFADTVQGEVRVCSSVQEAVAGADVIITVTLATEPILFGEWVKPGAHINAVGASRPDWRELDDELMKEAVLYVDSQEAALKESGDVLLSGAEIFAELGEVIKGVKPAHCEKTTVFKSLGMAVEDTVAAKLIYDSWSSGK

SEQ ID NO: 741835 - protein, 359 aa, Homo sapiens
ASAEDAGRRRKGWPGLPSTHCSSLAAASAAAGCASIWLGLLIPTPSPTARRAAARGRVCSLILRGPARGTPGETALANFSSGPEGGVMQPVRTVVPVTKHRGYLGVMPAYSAAEDALTTKLVTFYEDRGITSVVPSHQATVLLFEPSNGTLLAVMDGNVITAKRTAAVSAIATKFLKPPSSEVLCILGAGVQAYSHYEIFTEQFSFKEVRIWNRTKENAEKFADTVQGEVRVCSSVQEAVAGADVIITVTLATEPILFGEWVKPGAHINAVGASRPDWRELDDELMKEAVLYVDSQEAALKESGDVLLSGAEIFAELGEVIKGVKPAHCEKTTVFKSLGMAVEDTVAAKLIYDSWSSGK

SEQ ID NO: 741836 - protein, 321 aa, Homo sapiens
MSRVPAFLSAAEVEEHLRSSSLLIPPLETALANFSSGPEGGVMQPVRTVVPVTKHRGYLGVMPAYSAAEDALTTKLVTFYEDRGITSVVPSHQATVLLFEPSNGTLLAVMDGNVITAKRTAAVSAIATKFLKPPSSEVLCILGAGVQAYSHYEIFTEQFSFKEVRIWNRTKENAEKFADTVQGEVRVCSSVQEAVAGADVIITVTLATEPILFGEWVKPGAHINAVGASRPDWRELDDELMKEAVLYVDSQEAALKESGDVLLSGAEIFAELGEVIKGVKPAHCEKTTVFKSLGMAVEDTVAAKLIYDSWSSAAPISLNLK

SEQ ID NO: 741837 - protein, 165 aa, Homo sapiens
MSRVPAFLSAAEVEEHLRSSSLLIPPLETALANFSSGPEGGVMQPVRTVVPVTKHRGYLGVMPAYSAAEDALTTKLVTFYEDRGITSVVPSHQATVLLFEPSNGTLLAVMDGNVITAKRTAAVSAIATKFLKPPSSEVLCILGAGVQAYSHYEIFTEQFSFKEVI

SEQ ID NO: 741838 - protein, 82 aa, Homo sapiens
YFLCMTKASGLAAILSARQWCGFCDQWDKRRKKGKDVKEKLCPVPVLFPWELDRHSQLGLGVLLSNKSNFQDTNITQDHSVT

SEQ ID NO: 741839 - protein, 116 aa, Homo sapiens
AAVPRKAEVPCAAAEGGRREQSPLLHLDLFNFDCPEAEGSRYVLTSPRSLEACARCAVKPVELLPRALADLVREAPGRSMRVATGLYEAYEAERRAKLQQCRAERERIMREEKRRL

SEQ ID NO: 741840 - protein, 93 aa, Homo sapiens
VRPRGCVLEWVRNIVANRLASDGATWADIFKRFNSGTYNNQWMIVDYKAFIPGGPSPGSRVLTILEQIPGMVVVADKTSELYQKTYWASYNIP

SEQ ID NO: 741841 - protein, 108 aa, Homo sapiens
MAALAHEAVGTRDLLAAGCCCLARWGSMEELGLPPRPHLLPACWGPMEEPGLAPRPRPAAGVGSCSLPRSVLEAAVSQTQLGLPQASEKPNCTCGILPQPLGAGSLCT

SEQ ID NO: 741842 - protein, 178 aa, Homo sapiens
SGGGLGRGGSMEPRAGCRLPVRVEQVVNGALVVTVSCGERSFAGILLDCTKKSGLFGLPPLAPLPQVDESPVNDSHGRAPEEGDAEVMQLGSSSHRTRGCWRVQGRGKQGTRLCASPWEMSRMSVFQEKVTCKNGQGNCYKSNSSMHITDCRLTNGSRYPNCAYRTARRRDSIIVACE

SEQ ID NO: 741843 - protein, 600 aa, Homo sapiens
SGGGLGRGGSMEPRAGCRLPVRVEQVVNGALVVTVSCGERSFAGILLDCTKKSGLFGLPPLAPLPQVDESPVNDSHGRAPEEGDAEVMQLGSSSPPPARGVQPPETTRPEPPPPLVPPLPAGSLPPYPPYFEGAPFPHPLWLRDTYKLWVPQPPPRTIKRTRRRLSRNRDPGRLILSTIRLRPRQVLCEKCKSTLSPPEASPGPPAAPRARRRLGSGPDRELRKPEEPENGEPTAAATARRSKRERREEDRAPAEQVPRSPVIKISYSTPQGKGEVVKIPSRVHGSLEPFRPQQAPQDDGSQDPEVLDRESRDRPSCAPSASIPKLKLTRPVPAGADLPPPKIRLKPHRLGDSEHEPVYRAELVGELNGYLRDSSPAPCADGPAGGLADLSSGSSGEDDDFKSCPQGPQGREGLAFLVSCPEGRADCASESACSSDSLDEARSSGSEGTPADTGDLSPGHGASAPSVSREARQTVPPLTVRLHTQSVSECITEDGRTVAVGDIVWGKIHGFPWWPARVLDISLGQKEDGEPSWREAKVSWFGSPTTSFLSISKLSPFSEFFKLRFNRKKKGMYRKAITEAANAARHVAPEIRELLTQFET

SEQ ID NO: 741844 - protein, 509 aa, Homo sapiens
SGGGLGRGGSMEPRAGCRLPVRVEQVVNGALVVTVSCGERSFAGILLDCTKKSGLFGLPPLAPLPQVDESPVNDSHGRAPEEGDAEVMQLGSSSPPPARGVQPPETTRPEPPPPLVPPLPAGSLPPYPPYFEGAPFPHPLWLRDTYKLWVPQPPPRTIKRTRRRLSRNRDPGRLILSTIRLRPRQVLCEKCKSTLSPPEASPGPPAAPRARRRLGSGPDRELRKPEEPENGEPTAAATARRSKRERREEDRAPAEQVPRSPVIKISYSTPQGKGEVVKIPSRVHGSLEPFRPQQAPQDDGSQDPEVLDRESRDRPSCAPSASIPKLKLTRPVPAGADLPPPKIRLKPHRLGDSEHEPVYRAELVGELNGYLRDSSPAPCADGPAGGLADLSSGSSGEDDDFKSCPQGPQGREGLAFLVSCPEGRADCASESACSSDSLDEARSSGSEGTPADTGDLSPGHGASAPSVSREARQTVPPLTVRLHTQSVSECITEDGRTVAVGDIVWGHRR

SEQ ID NO: 741845 - protein, 561 aa, Homo sapiens
VPSHCGFSLSIARSGLFGLPPLAPLPQVDESPVNDSHGRAPEEGDAEVMQLGSSSPPPARGVQPPETTRPEPPPPLVPPLPAGSLPPYPPYFEGAPFPHPLWLRDTYKLWVPQPPPRTIKRTRRRLSRNRDPGRLILSTIRLRPRQVLCEKCKSTLSPPEASPGPPAAPRARRRLGSGPDRELRKPEEPENGEPTAAATARRSKRERREEDRAPAEQVPRSPVIKISYSTPQGKGEVVKIPSRVHGSLEPFRPQQAPQDDGSQDPEVLDRESRDRPSCAPSASIPKLKLTRPVPAGADLPPPKIRLKPHRLGDSEHEPVYRAELVGELNGYLRDSSPAPCADGPAGGLADLSSGSSGEDDDFKSCPQGPQGREGLAFLVSCPEGRADCASESACSSDSLDEARSSGSEGTPADTGDLSPGHGASAPSVSREARQTVPPLTVRLHTQSVSECITEDGRTVAVGDIVWGKIHGFPWWPARVLDISLGQKEDGEPSWREAKVSWFGSPTTSFLSISKLSPFSEFFKLRFNRKKKGMYRKAITEAANAARHVAPEIRELLTQFET

SEQ ID NO: 741846 - protein, 102 aa, Homo sapiens
AFPQLSQKSLIPPHLPLSQEATSPHPTAGPVAHFCLLYLCRWKCLTKPGSHVEPSGKEAWKTWFLAFQGGNYRGVEMDAEFFIVSAMIGGSRARHIFSGVLP

SEQ ID NO: 741847 - protein, 257 aa, Homo sapiens
MAADGVDERSPLLSASHSGNVTPTAPPYLQESSPRAELPPPYTAIASPDASGIPVINCRVCQSLINLDGKLHQHVVKCTVCNEATPIKNPPTGKKYVRCPCNCLLICKDTSRRIGCPRPNCRRIINLGPVMLISEEQPAQPALPIQPEGTRVVCGHCGNTFLWMELRFNTLAKCPHCKKISSVGSALPRRRCCAYITIGMICIFIGVGLTVGTPDFARRFRATYVSWAIAYLLGLICLIRACYWGAIRVSYPEHSFA

SEQ ID NO: 741848 - protein, 257 aa, Homo sapiens; identical to SEQ ID NO: 741847

SEQ ID NO: 741849 - protein, 166 aa, Homo sapiens
MAADGVDERSPLLSASHSGNVTPTAPPYLQESSPRAELPPPYTAIASPDASGIPVINCRVCQSLINLDGKLHQHVVKCTVCNEATPIKNPPTGKKYVRCPCNCLLICKDTSRRIGCPRPNCRRIINLGPVMLISEEQPAQPALPIQPEGTRVVCGHCGNTFLLLSG

SEQ ID NO: 741850 - protein, 257 aa, Homo sapiens; identical to SEQ ID NO: 741847

SEQ ID NO: 741851 - protein, 127 aa, Homo sapiens [sequence omitted]

SEQ ID NO: 741852 - protein, 172 aa, Homo sapiens
PGGGSSSSCSGSSGSRGSSSSHHSAEAATPARPPQAPPLPQSWLLMGWTNARLCCQHPTPEMSLPPPHRTCKKAAPEWMELRFNTLAKCPHCKKISSVGSALPRRRCCAYITIGMICIFIGVGLTVGTPDFARRFRATYVSWAIAYLLGLICLIRACYWGAIRVSYPEHSFA

SEQ ID NO: 741853 - protein, 493 aa, Homo sapiens
MEKYENLGLVGEGSYGMVMKCRNKDTGRIVAIKKFLESDDDKMVKKIAMREIKLLKQLRHENLVNLLEVCKKKKRWYLVFEFVDHTILDDLELFPNGLDYQVVQKYLFQIINGIGFCHSHNIIHRDIKPENILVSQSGVVKLCDFGFARTLAAPGEVYTDYVATRWYRAPELLVGDVKYGKAVDVWAIGCLVTEMFMGEPLFPGDSDIDQLYHIMMCLGNLIPRHQELFNKNPVFAGVRLPEIKEREPLERRYPKLSEVVIDLAKKCLHIDPDKRPFCAELLHHDFFQMDGFAERFSQELQLKVQKDARNVSLSKKSQNRKKEKEKDDSLVEERKTLVVQDTNADPKIKDYKLFKIKGSKIDGEKAEKGNRASNASCLHDSRTSHNKIVPSTSLKDCSNVSVDHTRNPSVAIPPLTHNLSAVAPSINSGMGTETIPIQGYRVDEKTKKCSIPFVKPNRHSPSGIYNINVTTLVSGPPLSDDSGADLPQMEHQH

SEQ ID NO: 741854 - protein, 500 aa, Homo sapiens [sequence omitted]

SEQ ID NO: 741855 - protein, 139 aa, Homo sapiens
FNPGKNFPVGHRNGADSARIETASEVHLCLQQNPPGWWTQEGARRQESPRTWLHSLGPQGFQEGASLQQKSPEGSFRTHTSTAPTPDTADRASSGRRSPKLMSHSLGLLEAIWPADAGEPPWCLSPLWQGQSPQEEERT

SEQ ID NO: 741856 - protein, 114 aa, Homo sapiens
MLPQNKDQVLPQTSVLPGRPTWGFSQLVDSSPHNLQPLSPHQGLPPSQPPFSSTQSRRPSSPPPASPSPGFQFGSCDSNSDFAPHPYSPSLPSSPTFFHQNYLSLPRPRASSPS

SEQ ID NO: 741857 - protein, 97 aa, Homo sapiens
KSLEPYNKKLGTDTWYYAKRCFLSLLENMSKHTIMLRDSVIQECVQFLEHCELHGRNIPAVIEQPLEEERMHVGKNTVTYESRQLKALIYEIIGWNI

SEQ ID NO: 741858 - protein, 104 aa, Homo sapiens
NKSVLNEHQETSKQCEQKIAIENEWKPADIFSTLGERECDRSSLEAKKAQWRKELDEQVALKKKEKEVSEKWNDPWKKSESDKIIWEKHQILDQSRVRHLNCNF

SEQ ID NO: 741859 - protein, 608 aa, Homo sapiens
NKSVLNEHQETSKQCEQKIAIENEWKPADIFSTLGERECDRSSLEAKKAQWRKELDEQVALKKKEKEVSEKWNDPWKKSESDKIIWEKHQILDQSRLFKHSITVIVARLWWSKLMGHSQLRASQTLEETVLLEHPFSAVKQELQRKWIEELNKQIEDDRQRKIEEKIIYSKGEEHDRWAMHFDSLKSYPGSQSQLFSQSTHKQPEYFCVSPDTQELADVSSVCTPTTGSQVEPSEEEHIAKPIKDVVMANSKKTNFLRSMTALLDPAQIEERDRRRQKQLEHQKAITAQVEEKRRKKQLEEEQRKKEEQEEELRLAQEREEMQKQYEEDILKQKQKEEIMTLKTNELFQTMQRAQELAQRLKQEQRIRELAQKGHDTSRLIKNLGVDTIQMEYNASNISNSRHDSDEISGKMNTYMNSTTSKKDTGVQTDDLNIGIFTNAESHCGSLMERDITNCSSPEISAELIGQFSTKKNKQELTQDKGASLEKENNRCNDQCNQFTRIEKQTKHMKKYPKRPDWNINKPPKRYIPASEKYPKQLQKQREEKKVRRQMELLHLVEKNNPGHLSQNRGISPEIFHSSHQETESKLRWHLVKKEEEPLNIHSFSKER

SEQ ID NO: 741860 - protein, 577 aa, Homo sapiens
NKSVLNEHQETSKQCEQKIAIENEWKPADIFSTLGERECDRSSLEAKKAQWRKELDEQVALKKKEKEVSEKWNDPWKKSESDKIIWEKHQILDQSRETVLLEHPFSAVKQELQRKWIEELNKQIEDDRQRKIEEKIIYSKGEEHDRWAMHFDSLKSYPGSQSQLFSQSTHKQPEYFCVSPDTQELADVSSVCTPTTGSQVEPSEEEHIAKPIKDVVMANSKKTNFLRSMTALLDPAQIEERDRRRQKQLEHQKAITAQVEEKRRKKQLEEEQRKKEEQEEELRLAQEREEMQKQYEEDILKQKQKEEIMTLKTNELFQTMQRAQELAQRLKQEQRIRELAQKGHDTSRLIKNLGVDTIQMEYNASNISNSRHDSDEISGKMNTYMNSTTSKKDTGVQTDDLNIGIFTNAESHCGSLMERDITNCSSPEISAELIGQFSTKKNKQELTQDKGASLEKENNRCNDQCNQFTRIEKQTKHMKKYPKRPDWNINKPPKRYIPASEKYPKQLQKQREEKKVRRQMELLHLVEKNNPGHLSQNRGISPEIFHSSHQETESKLRWHLVKKEEEPLNIHSFSKER

SEQ ID NO: 741861 - protein, 287 aa, Homo sapiens [sequence omitted]

SEQ ID NO: 741862 - protein, 414 aa, Homo sapiens
NKSVLNEHQETSKQCEQKIAIENEWKPADIFSTLGERECDRSSLEAKKAQWRKELDEQVALKKKEKEVSEKWNDPWKKSESDKIIWEKHQILDQSRLFKHSITVIVARLWWSKLMGHSQLRASQTLEETVLLEHPFSAVKQELQRKWIEELNKQIEDDRQRKIEEKIIYSKGEEHDRWAMHFDSLKSYPGSQSQLFSQSTHKQPEYFCVSPDTQELADVSSVCTPTTGSQVEPSEEEHIAKPIKDVVMANSKKTNFLRSMTALLDPAQIEERDRRRQKQLEHQKAITAQVEEKRRKKQLEEEQRKKEEQEEELRLAQEREEMQKQYEEDILKQKQKEEIMTLKTNELFQTMQRAQELAQRLKQEQRIRELAQKGHDTSRLIKNLGVDTIQMEYNASNISNSRHDSDEISGKMMT

SEQ ID NO: 741863 - protein, 287 aa, Homo sapiens
NKSVLNEHQETSKQCEQKIAIENEWKPADIFSTLGERECDRSSLEAKKAQWRKELDEQVALKKKEKEVSEKWNDPWKKSESDKIIWEKHQILDQSRLFKHSITVIVARLWWSKLMGHSQLRASQTLEETVLLEHPFSAVKQELQRKWIEELNKQIEDDRQRKIEEKIIYSKGEEHDRWAMHFDSLKSYPGSQSQLFSQSTHKQPEYFCVSPDTQELADVSSVCTPTTGSQVEPSEEEHIAKPIKDVVMANSKKTNFLRSMTALLDPAQIEERDRRRQKQLEHQVLHC

SEQ ID NO: 741864 - protein, 463 aa, Homo sapiens
MYGNYSHFMKFPAGYGGSPGHTGSTSMSPSAALSTGKPMDSHPSYTDTPVSAPRTLSAVGTPLNALGSPYRVITSAMGPPSGALAAPPGINLVAPPSSQLNVVNSVSSSEDIKPLPGLPGIGNMNYPSTSPGSLVKHICAICGDRSSGKHYGVYSCEGCKGFFKRTIRKDLIYTCRDNKDCLIDKRQRNRCQYCRYQKCLVMGMKREAVQEERQRSRERAESEAECATSGHEDMPVERILEAELAVEPKTESYGDMNMENSTNDPVTNICHAADKQLFTLVEWAKRIPHFSDLTLEDQVILLRAGWNELLIASFSHRSVSVQDGILLATGLHVHRSSAHSAGVGSIFDRVLTELVSKMKDMQMDKSELGCLRAIVLFNPDAKGLSNPSEVETLREKVYATLEAYTKQKYPEQPGRFAKLLLRLPALRSIGLKCLEHLFFFKLIGDTPIDTFLMEMLETPLQIT

SEQ ID NO: 741865 - protein, 463 aa, Homo sapiens; identical to SEQ ID NO: 741864

SEQ ID NO: 741866 - protein, 340 aa, Homo sapiens
MNYPSTSPGSLVKHICAICGDRSSGKHYGVYSCEGCKGFFKRTIRKDLIYTCRDNKDCLIDKRQRNRCQYCRYQKCLVMGMKREAVQEERQRSRERAESEAECATSGHEDMPVERILEAELAVEPKTESYGDMNMENSTNDPVTNICHAADKQLFTLVEWAKRIPHFSDLTLEDQVILLRAGWNELLIASFSHRSVSVQDGILLATGLHVHRSSAHSAGVGSIFDRVLTELVSKMKDMQMDKSELGCLRAIVLFNPDAKGLSNPSEVETLREKVYATLEAYTKQKYPEQPGRFAKLLLRLPALRSIGLKCLEHLFFFKLIGDTPIDTFLMEMLETPLQIT

SEQ ID NO: 741867 - protein, 131 aa, Homo sapiens
MDHHRLFSSSVTMPNSKKSVIQNHLKDYHPSYMLQPNYCPIPPAPEEGSFANSTDQEPTRPQHAGGDVQCSPLLFEKSTDELTGQAKDLEATVREPAASGDVQGPGCSLRRGRWTAWAPALPAGAEPLELR

SEQ ID NO: 741868 - protein, 235 aa, Homo sapiens
MSLGHRASGLQISGRQLCCVNRYSLPALLSRVTVVVIVSMLPEKPWGLGADTEAFFFPFWLCDVQHYPERHGGPERHGRDSRDGWGGYGSDKRMSEGRGLPPPPRGRRDWGDHGRREDDRSWQGTADGGMMDRDHKRWQGGERSMSGHSGPGHMMNRGGMSGRGSFCPRRGLPGATPFPHGGMQGGFGGQSRGSRPQRCPLHSPLLSTWNPVSCLVATRLCSVRSYLKLCKNIFF

SEQ ID NO: 741869 - protein, 215 aa, Homo sapiens
MAETLSGLGDSGAAGAAALSSASSETGTRRLSDLRVIDLRAELRKRNVDSSGNKSVLMERLKKAIEDEGGNPDEIEITSEGNKKTSKRSSKGRKPEEEGVEDNGLEENSGDGQEDVETSLENLQDIDIMDISVLDEAEIDNGSVADCVEDDDADNLQESLSDSRELVEGEMKELPEQLQEHAIEDKETINNLDTSSSDFTILQEIEEPFPWSPEK

SEQ ID NO: 741870 - protein, 594 aa, Homo sapiens
MQPQHEFYGFEFVSSMLLPCGVTLSFVSSSPEDDSDTKRLSKEEKGRSSCGRNFWVSGLSSTTRATDLKNLFSKYGKVVGAKVVTNARSPGARCYGFVTMSTAEEATKCINHLHKTELHGKMISVEKAKNEPVGKKTSDKRDSDGKKEKSSNSDRSTNLKRDDKCDRKDDAKKGDDGSGEKSKDQDDQKPGPSERSRATKSGSRGTERTVVMDKSKGVPVISVKTSGSKERASKSQDRKSASREKRSVVSFDKVKEPRKSRDSESHSRVRERSEREQRMQAQWEREERERLEIARERLAFQRQRLERERMERERLERERMHVEHERRREQERIHREREELRRQQELRYEQERRPAVRRPYDLDRRDDAYWPEAKRAALDERYHSDFNRQDRFHDFDHRDRGRYPDHSVDRREGSRSMMGEREGQHYPERHGGPERHGRDSRDGWGGYGSDKRMSEGRGLPPPPRGRRDWGDHGRREDDRSWQGTADGGMMDRDHKRWQGGERSMSGHSGPGHMMNRGGMSGRGSFCPRRGLPGATPFPHGGMQGGFGGQSRGSRPQRCPLHSPLLSTWNPVSCLVATRLCSVRSYLKLCKNIFF

SEQ ID NO: 741871 - protein, 409 aa, Homo sapiens
WIELGRLATCYPLLQIRSRGTERTVVMDKSKGVPVISVKTSGSKERASKSQDRKSASREKRSVVSFDKVKEPRKSRDSESHSRVRERSEREQRMQAQWEREERERLEIARERLAFQRQRLERERMERERLERERMHVEHERRREQERIHREREELRRQQELRYEQERRPAVRRPYDLDRRDDAYWPEAKRAALDERYHSDFNRQDRFHDFDHRDRGRYPDHSVDRREGSRSMMGEREGQHYPERHGGPERHGRDSRDGWGGYGSDKRMSEGRGLPPPPRGRRDWGDHGRREDDRSWQGTADGGMMDRDHKRWQGGERSMSGHSGPGHMMNRGGMSGRGSFCPRRGLPGATPFPHGGMQGGFGGQSRGSRPQRCPLHSPLLSTWNPVSCLVATRLCSVRSYLKLCKNIFF

SEQ ID NO: 741872 - protein, 526 aa, Homo sapiens
MAETLSGLGDSGAAGAAALSSASSETGTRRLSDLRVIDLRAELRKRNVDSSGNKSVLMERLKKAIEDEGGNPDEIEITSEGNKKTSKRSSKGRKPEEEGVEDNGLEENSGDGQEDVETSLENLQDIDIMDISVLDEAEIDNGSVADCVEDDDADNLQESLSDSRELVEGEMKELPEQLQEHAIEDKETINNLDTSSSDFTILQEIEEPSLEPENEKILDILGETCKSEPVKEESSRLERERMERERLERERMHVEHERRREQERIHREREELRRQQELRYEQERRPAVRRPYDLDRRDDAYWPEAKRAALDERYHSDFNRQDRFHDFDHRDRGRYPDHSVDRREGSRSMMGEREGQHYPERHGGPERHGRDSRDGWGGYGSDKRMSEGRGLPPPPRGRRDWGDHGRREDDRSWQGTADGGMMDRDHKRWQGGERSMSGHSGPGHMMNRGGMSGRGSFCPRRGLPGATPFPHGGMQGGFGGQSRGSRPQRCPLHSPLLSTWNPVSCLVATRLCSVRSYLKLCKNIFF

SEQ ID NO: 741873 - protein, 333 aa, Homo sapiens
MPRAEFRVRERSEREQRMQAQWEREERERLEIARERLAFQRQRLERERMERERLERERMHVEHERRREQERIHREREELRRQQELRYEQERRPAVRRPYDLDRRDDAYWPEAKRAALDERYHSDFNRQDRFHDFDHRDRGRYPDHSVDRREGSRSMMGEREGQHYPERHGGPERHGRDSRDGWGGYGSDKRMSEGRGLPPPPRGRRDWGDHGRREDDRSWQGTADGGMMDRDHKRWQGGERSMSGHSGPGHMMNRGGMSGRGSFCPRRGLPGATPFPHGGMQGGFGGQSRGSRPQRCPLHSPLLSTWNPVSCLVATRLCSVRSYLKLCKNIFF

SEQ ID NO: 741874 - protein, 526 aa, Homo sapiens
MAETLSGLGDSGAAGAAALSSASSETGTRRLSDLRVIDLRAELRKRNVDSSGNKSVLMERLKKAIEDEGGNPDEIEITSEGNKKTSKRSSKGRKPEEEGVEDNGLEENSGDGQEDVETSLENLQDIDIMDISVLDEAEIDNGSVADCVEDDDADNLQESLSDSRELVEGEMKELPEQLQEHAIEDKETINNLDTSSSDFTILQEIEEPSLEPENEKILDILGETCKSEPVKEESFRLERERMERERLERERMHVEHERRREQERIHREREELRRQQELRYEQERRPAVRRPYDLDRRDDAYWPEAKRAALDERYHSDFNRQDRFHDFDHRDRGRYPDHSVDRREGSRSMMGEREGQHYPERHGGPERHGRDSRDGWGGYGSDKRMSEGRGLPPPPRGRRDWGDHGRREDDRSWQGTADGGMMDRDHKRWQGGERSMSGHSGPGHMMNRGGMSGRGSFCPRRGLPGATPFPHGGMQGGFGGQSRGSRPQRCPLHSPLLSTWNPVSCLVATRLCSVRSYLKLCKNIFF

SEQ ID NO: 741875 - protein, 241 aa, Homo sapiens
RILTLLIKKRHSDRSTNLKRDDKCDRKDDAKKGDDGSGEKSKDQDDQKPGPSERSRATKSGSRGTERTVVMDKSKGVPVISVKTSGSKERASKSQDRKSASREKRSVVSFDKVKEPRKSRDSESHSRVRERSEREQRMQAQWEREERERLEIARERLAFQRQRLERERMERERLERERMHVEHERRREQERIHREREELRRQQELATILTLTARTASTTLTTGTAAATPTTRWTGEKVQGQ

SEQ ID NO: 741876 - protein, 129 aa, Homo sapiens
MAETLSGLGDSGAAGAAALSSASSETGTRRLSDLRVIDLRAELRKRNVDSSGNKSVLMERLKKAIEDEGGNPDEIEITSEGNKKTSKRSSKGRKPEEEGVEDNGLEENFASIMNVAEPLVFVQGLITVS

SEQ ID NO: 741877 - protein, 95 aa, Homo sapiens
GMGYCGGCCHSGGEGIRKGPCLQATLREAVQAGMGRGAGGLRSQTNVNLFLGAAAFAPGGAFPGPPHSHTVACRAGLEARAGGAGPSDARFTRRY

SEQ ID NO: 741878 - protein, 948 aa, Homo sapiens
MAETLSGLGDSGAAGAAALSSASSETGTRRLSDLRVIDLRAELRKRNVDSSGNKSVLMERLKKAIEDEGGNPDEIEITSEGNKKTSKRSSKGRKPEEEGVEDNGLEENSGDGQEDVETSLENLQDIDIMDISVLDEAEIDNGSVADCVEDDDADNLQESLSDSRELVEGEMKELPEQLQEHAIEDKETINNLDTSSSDFTILQEIEEPSLEPENEKILDILGETCKSEPVKEESSELEQPFAQDTSSVGPDRKLAEEEDLFDSAHPEEGDLDLASESTAHAQSSKADSLLAVVKREPAEQPGDGERTDCEPVGLEPAVEQSSAASELAEASSEELAEAPTEAPSPEARDSKEDGRKFDFDACNEVPPAPKESSTSEGADQKMSSPEDDSDTKRLSKEEKGRSSCGRNFWVSGLSSTTRATDLKNLFSKYGKVVGAKVVTNARSPGARCYGFVTMSTAEEATKCINHLHKTELHGKMISVEKAKNEPVGKKTSDKRDSDGKKEKSSNSDRSTNLKRDDKCDRKDDAKKGDDGSGEKSKDQDDQKPGPSERSRATKSGSRGTERTVVMDKSKGVPVISVKTSGSKERASKSQDRKSASREKRSVVSFDKVKEPRKSRDSESHSRVRERSEREQRMQAQWEREERERLEIARERLAFQRQRLERERMERERLERERMHVEHERRREQERIHREREELRRQQELRYEQERRPAVRRPYDLDRRDDAYWPEAKRAALDERYHSDFNRQDRFHDFDHRDRGRYPDHSVDRREGSRSMMGEREGQHYPERHGGPERHGRDSRDGWGGYGSDKRMSEGRGLPPPPRGRRDWGDHGRREDDRSWQGTADGGMMDRDHKRWQGGERSMSGHSGPGHMMNRGGMSGRGSFCPRRGLPGATPFPHGGMQGGFGGQSRGSRPQRCPLHSPLLSTWNPVSCLVATRLCSVRSYLKLCKNIFF

SEQ ID NO: 741879 - protein, 948 aa, Homo sapiens; identical to SEQ ID NO: 741878

SEQ ID NO: 741880 - protein, 736 aa, Homo sapiens
MAETLSGLGDSGAAGAAALSSASSETGTRRLSDLRVIDLRAELRKRNVDSSGNKSVLMERLKKAIEDEGGNPDEIEITSEGNKKTSKRSSKGRKPEEEGVEDNGLEENSGDGQEDVETSLENLQDIDIMDISVLDEAEIDNGSVADCVEDDDADNLQESLSDSRELVEGEMKELPEQLQEHAIEDKETINNLDTSSSDFTILQEIEEPSLEPENEKILDILGETCKSEPVKEESSELEQPFAQDTSSVGPDRKLAEEEDLFDSAHPEEGDLDLASESTAHAQSSKADSLLAVVKREPAEQPGDGERTDCEPVGLEPAVEQSSAASELAEASSEELAEAPTEAPSPEARDSKEDGRKFDFDACNEVPPAPKESSTSEGADQKMSSPEDDSDTKRLSKEEKGRSSCGRNFWVSGLSSTTRATDLKNLFSKYGKVVGAKVVTNARSPGARCYGFVTMSTAEEATKCINHLHKTELHGKMISVEKAKNEPVGKKTSDKRDSDGKKEKSSNSDRSTNLKRDDKCDRKDDAKKGDDGSGEKSKDQDDQKPGPSERSRATKSGSRGTERTVVMDKSKGVPVISVKTSGSKERASKSQDRKSASREKRSVVSFDKVKEPRKSRDSESHSRVRERSEREQRMQAQWEREERERLEIARERLAFQRQRLERERMERERLERERMHVEHERRREQERIHREREELRRQQELATILTLTARTASTTLTTGTAAATPTTRWTGEKVQGQ

SEQ ID NO: 741881 - protein, 431 aa, Homo sapiens
TAPGLLLIFDWLFPEITCQAPGNVGERRPSSDHTHTAWASLLRSSWAAPVGPRSLLPAGVYGSADHVVDAQPWSLCDPASYLKSALGPGWGCLGPLLQLYCCASRVRERSEREQRMQAQWEREERERLEIARERLAFQRQRLERERMERERLERERMHVEHERRREQERIHREREELRRQQELRYEQERRPAVRRPYDLDRRDDAYWPEAKRAALDERYHSDFNRQDRFHDFDHRDRGRYPDHSVDRREGSRSMMGEREGQHYPERHGGPERHGRDSRDGWGGYGSDKRMSEGRGLPPPPRGRRDWGDHGRREDDRSWQGTADGGMMDRDHKRWQGGERSMSGHSGPGHMMNRGGMSGRGSFCPRRGLPGATPFPHGGMQGGFGGQSRGSRPQRCPLHSPLLSTWNPVSCLVATRLCSVRSYLKLCKNIFF

SEQ ID NO: 741882 - protein, 863 aa, Homo sapiens
MAETLSGLGDSGAAGAAALSSASSETGTRRLSDLRVIDLRAELRKRNVDSSGNKSVLMERLKKAIEDEGGNPDEIEITSEGNKKTSKRSSKGRKPEEEGVEDNGLEENSGDGQEDVETSLENLQDIDIMDISVLDEAEIDNGSVADCVEDDDADNLQESLSDSRELVEGEMKELPEQLQEHAIEDKETINNLDTSSSDFTILQEIEEPSLEPENEKILDILGETCKSEPVKEESSELEQPFAQDTSSVGPDRKLAEEEDLFDSAHPEEGDLDLASESTAHAQSSKADSLLAVVKREPAEQPGDGERTDCEPVGLEPAVEQSSAASELAEASSEELAEAPTEAPSPEARDSKEDGRKFDFDACNEVPPAPKESSTSEGADQKMSSPEDDSDTKRLSKEEKGRSSCGRNFWVSGLSSTTRATDLKNLFSKYGKVVGAKVVTNARSPGARCYGFVTMSTAEEATKCINHLHKTELHGKMISVEKAKNEPVGKKTSDKRDSDGKKEKSSNSDRSTNLKRDDKCDRKDDAKKGDDGSGEKSKDQDDQKPGPSERSRATKSGSRGTERTVVMDKSKGVPVISVKTSGSKERASKSQDRKSASREKRSVVSFDKVKEPRKSRDSESHSRVRERSEREQRMQAQWEREERERLEIARERLAFQRQRLERERMERERLERERMHVEHERRREQERIHREREELRRQQELRYEQERRPAVRRPYDLDRRDDAYWPEAKRAALDERYHSDFNRQDRFHDFDHRDRGRYPDHSVDRREGSRSMMGEREGQHYPERHGGPERHGRDSRDGWGGYGSDKRMSEGRGLPPPPRGRRDWGDHGRREDDRSWQGTADGGMMDRDHKRWQGGECGHDWPSD

SEQ ID NO: 741883 - protein, 61 aa, Homo sapiens
SHKGDRYIWGGGSLYLCLMSPHRRDDAYWPEAKRAALDERYHSDFNRQDRFHDFDHRDRGR

SEQ ID NO: 741884 - protein, 293 aa, Homo sapiens
MALVSADSRIAELLTELHQLIKQTQEERSRSEHNLVNIQKTHERMQTENKISPYYRTKLRGLYTTAKADAEAECNILRKALDKIAEIKSLLEERRIAAKIAGLYNDSEPPRKTMRRGVLMTLLQQSAMTLPLWIGKPGDKPPPLCGAIPASGDYVARPGDKVAARVKAVDGDEQWILAEVVSYSHATNKYEVDDIDEEGKERHTLSRRRVIPLPQWKANPETDPEALFQKEQLVLALYPQTTCFYRALIHAPPQRPQDDYSVLFEDTSYADGYSPPLNVAQRYVVACKEPKKK

SEQ ID NO: 741885 - protein, 251 aa, Homo sapiens
MALVSADSRIAELLTELHQLIKQTQEERSRSEHNLVNIQKTHERMQTENKISPYYRTKLRGLYTTAKADAEAECKLECNDAISVHCNLCLPGSSDSLASAPNILRKALDKIAEIKSLLEERRIAAKIAGLYNDSEPPRKTMRRGVLMTLLQQSAMTLPLWIGKPGDKPHPLVGGFLASRDYVAELGTVVAGVKGGLGAAGVPGEGEEGMPNSWGDALCKAKETRVGAGYARHRGPERARFQKGLRRSPNAF

SEQ ID NO: 741886 - protein, 105 aa, Homo sapiens
SARDYAHKRKKSVCGSRRAANLRTQVCDHPQTPKKGSRNAPAPLVAVSSPTSLFCPGLGAPVDNGPRVCRFPHCRTSHRAPSADQTNPGRAFAERTQLSEHPEDP

SEQ ID NO: 741887 - protein, 293 aa, Homo sapiens; identical to SEQ ID NO: 741884

SEQ ID NO: 741888 - protein, 316 aa, Homo sapiens
MALVSADSRIAELLTELHQLIKQTQEERSRSEHNLVNIQKTHERMQTENKISPYYRTKLRGLYTTAKADAEAECNILRKALDKIAEIKSLLEERRIAAKIAGLYNDSEPPRKTMRRGVLMTLLQQSAMTLPLWIGKPGDKEGSSCEGGAGAQGLGLTLCSTHRPPPLCGAIPASGDYVARPGDKVAARVKAVDGDEQWILAEVVSYSHATNKYEVDDIDEEGKERHTLSRRRVIPLPQWKANPETDPEALFQKEQLVLALYPQTTCFYRALIHAPPQRPQDDYSVLFEDTSYADGYSPPLNVAQRYVVACKEPKKK

SEQ ID NO: 741889 - protein, 258 aa, Homo sapiens
MALVSADSRIAELLTELHQLIKQTQEERSRSEHNLVNIQKTHERMQTENKISPYYRTKLRGLYTTAKADAEAECNILRKALDKIAEIKSLLEERRIAAKIAGLYNDSEPPRKTMRRGVLMTLLQQSAMTLPLWIGKPGDKPPPLCGAIPASGDYVARPGDKVAARVKAVDGDEQWILAEVVSYSHATNNEALFQKEQLVLALYPQTTCFYRALIHAPPQRPQDDYSVLFEDTSYADGYSPPLNVAQRYVVACKEPKKK

SEQ ID NO: 741890 - protein, 103 aa, Homo sapiens
SARDYAHKRKKSVCGSRRAANLRTQVCDHPQTPKKGSRNAPAPLVAVSSPTSLFCPGLGAPVDNGPRVCRFPHCRTSHRAPSADQTNPGKKSPPSIPRWEHGL

SEQ ID NO: 741891 - protein, 123 aa, Homo sapiens
MGENAENAQALWLVKLGFRQEPERCAKMKTTFPTGQRVTSQRNDYACVQGPPRATTLIKGKKACAVLDVPPIFERRSVIIRRLRKRVRGTRLLPSSQFPARRACFVPDSVGGDGPWPETSGET

SEQ ID NO: 741892 - protein, 147 aa, Homo sapiens
ASLKSLVQEWRWGYGHLAVPTASLDCVAWRWGLSFRVTEAPLGSRPPGAPDLPDSTHPFPLPARHSHQGRPGARIAGRGQATACLPPPSRLACPLACLHAGFQQSQLLQSQVDPVSVLPRCVTLGESTSLSFCFPLYENGTDVTGLL

SEQ ID NO: 741893 - protein, 753 aa, Homo sapiens
VTEKMDVLGTVGSCGAPNFRQVQGGLTVFGMGQPSLSGFRRVLQKLQKDGHRECVIFCVREEPVLFLRADEDFVSYTPRDKQNLHENLQGLGPGVRVESLELAIRKEIHDFAQLSENTYHVYHNTEDLWGEPHAVAIHGEDDLHVTEEVYKRPLFLQPTYRYHRLPLPEQGSPLEAQLDAFVSVLRETPSLLQLRDAHGPPPALVFSCQMGVGRTNLGMVLGTLILLHRSGTTSQPEAAPTQAKPLPMEQFQVIQSFLRMVPQGRRMVEEVVDRAITACAELHDLKEVVLENQKKLEGIRPESPAQGSGSRHSVWQRALWSLERYFYLILFNYYLHEQYPLAFALSFSRWLCAHPELYRLPVTLSSAGPVAPRDLIARGSLREDDLVSPDALSTVREMDVANFRRVPRMPIYGTAQPSAKALGSILAYLTDAKRRLRKVVWVSLREEAVLECDGHTYSLRWPGPPVAPDQLETLEAQLKAHLSEPPPGKEGPLTYRFQTCLTMQEVFSQHRRACPGLTYHRIPMPDFCAPREEDFDQLLEALRAALSKDPGTGFVFSCLSGQGRTTTAMVVAVLAFWHIQGFPEVGEEELVSVPDAKFTKGEFQVVMKVVQLLPDGHRVKKEVDAALDTVSETMTPMHYHLREIIICTYRQAKAAKEAQEMRRLQLRSLQYLERYVCLILFNAYLHLEKADSWQRPFSTWMQEVASKAGIYEILNELGFPELESGEDQPFSRLRYRWQEQSCSLEPSAPEDLL

SEQ ID NO: 741894 - protein, 223 aa, Homo sapiens
MGVMVSLTVSSARRPPPCITRSASGSSCLSGQGRTTTAMVVAVLAFWHIQGFPEVGEEELVSVPDAKFTKGEFQVVMKVVQLLPDGHRVKKEVDAALDTVSETMTPMHYHLREIIICTYRQAKAAKEAQEMRRLQLRSLQYLERYVCLILFNAYLHLEKADSWQRPFSTWMQEVASKAGIYEILNELGFPELESGEDQPFSRLRYRWQEQSCSLEPSAPEDLL

SEQ ID NO: 741895 - protein, 652 aa, Homo sapiens
VTEKMDVLGTVGSCGAPNFRQVQGGLTVFGMGQPSLSGFRRVLQKLQKDGHRECVIFCVREEPVLFLRADEDFVSYTPRDKQNLHENLQGLGPGVRVESLELAIRKEIHDFAQLSENTYHVYHNTEDLWGEPHAVAIHGEDDLHVTEEVYKRPLFLQPTYRYHRLPLPEQGSPLEAQLDAFVSVLRETPSLLQLRDAHGPPPALVFSCQMGVGRTNLGMVLGTLILLHRSGTTSQPEAAPTQAKPLPMEQFQVIQSFLRMVPQGRRMVEEVVDRAITACAELHDLKEVVLENQKKLEGIRPESPAQGSGSRHSVWQRALWSLERYFYLILFNYYLHEQYPLAFALSFSRWLCAHPELYRLPVTLSSAGPVAPRDLIARGSLREDDLVSPDALSTVREMDVANFRRVPRMPIYGTAQPSAKALGSILAYLTDAKRRLRKVVWVSLREEAVLECDGHTYSLRWPGPPVAPDQLETLEAQLKAHLSEPPPGKEGPLTYRFQTCLTMQEVFSQHRRACPGLTYHRIPMPDFCAPREEVRVLLRLRPLGRDRRPPCLPSGLGSGRMKRPQLLYGAREWSHEVFRFGPSGLFTFLPSFVCVYVCLLCVIGYMCVYCYRCVCIGVCILLRMCICVIRCVYMCLLCCRVYVCVLCYGCVL

SEQ ID NO: 741896 - protein, 390 aa, Homo sapiens
VTEKMDVLGTVGSCGAPNFRQVQGGLTVFGMGQPSLSGFRRVLQKLQKDGHRECVIFCVREEPVLFLRADEDFVSYTPRDKQNLHENLQGLGPGVRVESLELAIRKEIHDFAQLSENTYHVYHNTEDLWGEPHAVAIHGEDDLHVTEEVYKRPLFLQPTYRYHRLPLPEQGSPLEAQLDAFVSVLRETPSLLQLRDAHGPPPALVFSCQMGVGRTNLGMVLGTLILLHRSGTTSQPEAAPTQAKPLPMEQFQVIQSFLRMVPQGRRMVEEVIDLLCERQLHPVFWTLMPPSPTWETSGMTTYPAWWGWQDGGGFSRSWRLQGAPLMGRKELPGGERSTEEEACSTCLGTWAGGTEEAKAWSCRSPGISLCPGSPGWPGAPTCCSRSPKEC

SEQ ID NO: 741897 - protein, 92 aa, Homo sapiens
MRKLTLREVNRSQGANLFRSPSSQATDSSSELSGLSGTLTSPETLLLPLLSSQVASKAGIYEILNELGFPELESGEDQPFSRLRYRWQEQSC

SEQ ID NO: 741898 - protein, 634 aa, Homo sapiens
MSLVPATNYIYTPLNQLKGGTIVNVYGVVKFFKPPYLSKGTDYCSVVTIVDQTNVKLTCLLFSGNYEALPIIYKNGDIVRFHRLKIQVYKKETQGITSSGFASLTFEGTLGAPIIPRTSSKYFNFTTEDHKMVEALRVWASTHMSPSWTLLKLCDVQPMQYFDLTCQLLGKAEVDGASFLLKVWDGTRTPFPSWRVLIQDLVLEGDLSHIHRLQNLTIDILVYDNHVHVARSLKVGSFLRIYSLHTKLQSMNSENQTMLSLEFHLHGGTSYGRGIRVLPESNSDVDQLKKDLESANLTANQHSDVICQSEPDDSFPSSGSVSLYEVERCQQLSATILTDHQYLERTPLCAILKQKAPQQYRIRAKLRSYKPRRLFQSVKLHCPKCHLLQEVPHEGDLDIIFQDGATKTPDVKLQNTSLYDSKIWTTKNQKGRKVAVHFVKNNGILPLSNECLLLIEGGTLSEICKLSNKFNSVIPVRSGHEDLELLDLSAPFLIQGTIHHYGCKQCSSLRSIQNLNSLVDKTSWIPSSVAEALGIVPLQYVFVMTFTLDDGTGVLEAYLMDSDKFFQIPASEVLMDDDLQKSVDMIMDMFCPPGIKIDAYPWLECFIKSYNVTNGTDNQICYQIFDTTVAEDVI

SEQ ID NO: 741899 - protein, 130 aa, Homo sapiens
PVNCNAVGLFTTSLNLSSSAFLLPPVPALGIVPLQYVFVMTFTLDDGTGVLEAYLMDSDKFFQIPASEVLMDDDLQKSVDMIMDMFCPPGIKIDAYPWLECFIKSYNVTNGTDNQICYQIFDTTVAEDVI

SEQ ID NO: 741900 - protein, 634 aa, Homo sapiens; identical to SEQ ID NO: 741898

SEQ ID NO: 741901 - protein, 634 aa, Homo sapiens; identical to SEQ ID NO: 741898

SEQ ID NO: 741902 - protein, 634 aa, Homo sapiens; identical to SEQ ID NO: 741898

SEQ ID NO: 741903 - protein, 634 aa, Homo sapiens; identical to SEQ ID NO: 741898

SEQ ID NO: 741904 - protein, 634 aa, Homo sapiens; identical to SEQ ID NO: 741898

SEQ ID NO: 741905 - protein, 634 aa, Homo sapiens; identical to SEQ ID NO: 741898

SEQ ID NO: 741906 - protein, 634 aa, Homo sapiens
MKIVPATNYIYTPLNQLKGGTIVNVYGVVKFFKPPYLSKGTDYCSVVTIVDQTNVKLTCLLFSGNYEALPIIYKNGDIVRFHRLKIQVYKKETQGITSSGFASLTFEGTLGAPIIPRTSSKYFNFTTEDHKMVEALRVWASTHMSPSWTLLKLCDVQPMQYFDLTCQLLGKAEVDGASFLLKVWDGTRTPFPSWRVLIQDLVLEGDLSHIHRLQNLTIDILVYDNHVHVARSLKVGSFLRIYSLHTKLQSMNSENQTMLSLEFHLHGGTSYGRGIRVLPESNSDVDQLKKDLESANLTANQHSDVICQSEPDDSFPSSGSVSLYEVERCQQLSATILTDHQYLERTPLCAILKQKAPQQYRIRAKLRSYKPRRLFQSVKLHCPKCHLLQEVPHEGDLDIIFQDGATKTPDVKLQNTSLYDSKIWTTKNQKGRKVAVHFVKNNGILPLSNECLLLIEGGTLSEICKLSNKFNSVIPVRSGHEDLELLDLSAPFLIQGTIHHYGCKQCSSLRSIQNLNSLVDKTSWIPSSVAEALGIVPLQYVFVMTFTLDDGTGVLEAYLMDSDKFFQIPASEVLMDDDLQKSVDMIMDMFCPPGIKIDAYPWLECFIKSYNVTNGTDNQICYQIFDTTVAEDVI

SEQ ID NO: 741907 - protein, 503 aa, Homo sapiens
MVEALRVWASTHMSPSWTLLKLCDVQPMQYFDLTCQLLGKAEVDGASFLLKVWDGTRTPFPSWRVLIQDLVLEGDLSHIHRLQNLTIDILVYDNHVHVARSLKVGSFLRIYSLHTKLQSMNSENQTMLSLEFHLHGGTSYGRGIRVLPESNSDVDQLKKDLESANLTANQHSDVICQSEPDDSFPSSGSVSLYEVERCQQLSATILTDHQYLERTPLCAILKQKAPQQYRIRAKLRSYKPRRLFQSVKLHCPKCHLLQEVPHEGDLDIIFQDGATKTPDVKLQNTSLYDSKIWTTKNQKGRKVAVHFVKNNGILPLSNECLLLIEGGTLSEICKLSNKFNSVIPVRSGHEDLELLDLSAPFLIQGTIHHYGCKQCSSLRSIQNLNSLVDKTSWIPSSVAEALGIVPLQYVFVMTFTLDDGTGVLEAYLMDSDKFFQIPASEVLMDDDLQKSVDMIMDMFCPPGIKIDAYPWLECFIKSYNVTNGTDNQICYQIFDTTVAEDVI

SEQ ID NO: 741908 - protein, 639 aa, Homo sapiens
MSLVPATNYIYTPLNQLKGGTIVNVYGVVKFFKPPYLSKGTDYCSVVTIVDQTNVKLTCLLFSGNYEALPIIYKNGDIVRFHRLKIQVYKKETQGITSSGFASLTFEGTLGAPIIPRTSSKYFNFTTEDHKMVEALRVWASTHMSPSWTLLKLCDVQPMQYFDLTCQLLGKAEVDGASFLLKVWDGTRTPFPSWRVLIQDLVLEGDLSHIHRLQNLTIDILVYDNHVHVARSLKVGSFLRIYSLHTKLQSMNSENQTMLSLEFHLHGGTSYGRGIRVLPESNSDVDQLKKDLESANLTANQHSDVICQSEPDDSFPSSGSVSLYEVERCQQLSATILTDHQYLERTPLCAILKQKAPQQYRIRAKLRSYKPRRLFQSVKLHCPKCHLLQEVPHEGDLDIIFQDGATKTPDVKLQNTSLYDSKIWTTKNQKGRKVAVHFVKNNGILPLSNECLLLIEGGTLSEICKLSNKFNSVIPVRSGHEDLELLDLSAPFLIQGTIHHYGCKQCSSLRSIQNLNSLVDKTSWIPSSVAEALGIVPLQYVFVMTFTLDDGTGVLEAYLMDSDKFFQIPASEVLMDDDLQKSVDMIMDMFCPPGIKIDAYPWLECFIKSYNVTNGTDNQICYQIFDTTVAEDEALNLEE

SEQ ID NO: 741909 - protein, 32 aa, Homo sapiens
MRVNRDDSGKRGWHTAQTVPKPGLGLPKRPPV

SEQ ID NO: 741910 - protein, 873 aa, Homo sapiens
MHPPPPAAAMDFSQNSLFGYMEDLQELTIIERPVRRSLKTPEEIERLTVDEDLSDIERAVYLLSAGQDVQGTSVIANLPFLMRQNPTETLRRVLPKVREALHVAGVEMQLTAAMSFLTILQDESVSIHAYTHSFLQVILLHLEHRDTGVSNAWLETLLSVIEVLPKETLRHEILNPLVSKAQLSQTVQSRLVSCKILGKLTNKFDAHTIKREILPLVKSLCQDVEYEVRSCMCRQLENIAQGIGTELTKSVVLPELIELSRDEGSSVRLAAFETLVNLLDIFDTDDRSQTILPLVKSFCEKSFKADESILISLSFHLGKLCHGLYGIFTPDQHLRFLEFYKKLCTLGLQQENGHNENQIPPQILEQEKKYISVRKNCAYNFPAMIVFVDPKNFHMELYSTFFCLCHDPEVPVRYTIAICFYEVSKLLNSGVYLIHKELITLLQDESLEVLDALIDHLPEILELMSTGGESSVQENKLSSLPDLIPALTAAEQRAAASLKWRTHEKLLQKYACLPHVISSDQIYYRFLQRMFTIMMTNNVLPVQKAASRTLCIFLRYNRKQEQRHEVIQKLIEQLGQGKSYWNRLRFLDTCEFIIEIFSKSFFCKYFFLPAIELTHDPVANVRMKLCYLLPKVKSTLKIPADKHLLQQLEMCVRKLLCQEKDKDVLAIVKRTVLELDRMEMSMDAFQKKFYEKDLLDQEKEREELLLLEMEQLEKEKQQNDGRPMSDKMFEKKRRDTKTPTQSLPKNIPISVPGPSSVTPSTSKEIKKSKLIRSQSFNNQAFHAKYGNLEKCASKSSTTGYTTSVSGLGKTSVLSLADDSFRTRNASSVPSSFSPNTPLPSTSRGTGNSVDPKSSGSKDTQPRKATLKSRKSNP

SEQ ID NO: 741911 - protein, 121 aa, Homo sapiens
MHPPPPAAAMDFSQNSLFGYMEDLQELTIIERPVRRSLKTPEEIERLTVDEDLSDIERAVYLLSAGQDVQGTSVIANLPFLMRQNPTETLRRVLPKVRQVHEDAHLFIQRVWISHMFVQRV

SEQ ID NO: 741912 - protein, 905 aa, Homo sapiens
MHPPPPAAAMDFSQNSLFGYMEDLQELTIIERPVRRSLKTPEEIERLTVDEDLSDIERAVYLLSAGQDVQGTSVIANLPFLMRQNPTETLRRVLPKVRQSMRMHTYLSREYGSHICLSRGCDSVEENTYWKPCMLQELEMQLTAAMSFLTILQDESVSIHAYTHSFLQVILLHLEHRDTGVSNAWLETLLSVIEVLPKETLRHEILNPLVSKAQLSQTVQSRLVSCKILGKLTNKFDAHTIKREILPLVKSLCQDVEYEVRSCMCRQLENIAQGIGTELTKSVVLPELIELSRDEGSSVRLAAFETLVNLLDIFDTDDRSQTILPLVKSFCEKSFKADESILISLSFHLGKLCHGLYGIFTPDQHLRFLEFYKKLCTLGLQQENGHNENQIPPQILEQEKKYISVRKNCAYNFPAMIVFVDPKNFHMELYSTFFCLCHDPEVPVRYTIAICFYEVSKLLNSGVYLIHKELITLLQDESLEVLDALIDHLPEILELMSTGGESSVQENKLSSLPDLIPALTAAEQRAAASLKWRTHEKLLQKYACLPHVISSDQIYYRFLQRMFTIMMTNNVLPVQKAASRTLCIFLRYNRKQEQRHEVIQKLIEQLGQGKSYWNRLRFLDTCEFIIEIFSKSFFCKYFFLPAIELTHDPVANVRMKLCYLLPKVKSTLKIPADKHLLQQLEMCVRKLLCQEKDKDVLAIVKRTVLELDRMEMSMDAFQKKFYEKDLLDQEKEREELLLLEMEQLEKEKQQNDGRPMSDKMFEKKRRDTKTPTQSLPKNIPISVPGPSSVTPSTSKEIKKSKLIRSQSFNNQAFHAKYGNLEKCASKSSTTGYTTSVSGLGKTSVLSLADDSFRTRNASSVPSSFSPNTPLPSTSRGTGNSVDPKSSGSKDTQPRKATLKSRKSNP

SEQ ID NO: 741913 - protein, 411 aa, Homo sapiens
MHPPPPAAAMDFSQNSLFGYMEDLQELTIIERPVRRSLKTPEEIERLTVDEDLSDIERAVYLLSAGQDVQGTSVIANLPFLMRQNPTETLRRVLPKVREALHVAGVEMQLTAAMSFLTILQDESVSIHAYTHSFLQVILLHLEHRDTGVSNAWLETLLSVIEVLPKETLRHEILNPLVSKAQLSQTVQSRLVSCKILGKLTNKFDAHTIKREILPLVKSLCQDVEYEVRSCMCRQLENIAQGIGTELTKSVVLPELIELSRDEGSSVRLAAFETLVNLLDIFDTDDRSQTILPLVKSFCEKSFKADESILISLSFHLGKLCHGLYGIFTPDQHLRFLEFYKKLCTLGLQQENGHNENQIPPQILEQEKKYISVRKNCAYNFPVINMYLYLLRIFIITLKYVHRWHSKYCHF

SEQ ID NO: 741914 - protein, 135 aa, Homo sapiens
AGRGPGGEKRLCAAGADRGEVPLSASGVWACAAVLAHTCRYSPSVSPLASMGRWWPPPPRLWMSLGLGFRALRPREDLPPSLLLFQVSAWRVCGLHRGTPRGPLLFSRLDCVHVSNISQPLLPTSGLGLHRVSLL

SEQ ID NO: 741915 - protein, 102 aa, Homo sapiens
SGGTDSGDPRRRVPRVPRPERGPGLDCWHVYSSKYTEIKCKDKPSKKITLKSGHDIQSDCLKELKRGHKWIASAVACWLGEQKMRSQISKSFSPRLLARGCM

SEQ ID NO: 741916 - protein, 190 aa, Homo sapiens
LLRLRPTWKALQHPAWPEEKNKQILVLGLDGAGKTSVLHSLASNRVQHSVAPTQGFHAVCINTEDSQMEFLEIGGSKPFRSYWEMYLSKGLLLIFVVDSADHSRLPEAKKYLHQLIAANPVLPLVVFANKQDLEAAYHITDIHEALALSEVGNDRKMFLFGTYLTKNGSEIPSTMQDAKDLIAQLAADVQ

SEQ ID NO: 741917 - protein, 216 aa, Homo sapiens
RPPPLQIMTKQGKETNKEKEQFKGQEEKGENKDSTLTRTPLEPLEKNKQILVLGLDGAGKTSVLHSLASNRVQHSVAPTQGFHAVCINTEDSQMEFLEIGGSKPFRSYWEMYLSKGLLLIFVVDSADHSRLPEAKKYLHQLIAANPVLPLVVFANKQDLEAAYHITDIHEALALSEVGNDRKMFLFGTYLTKNGSEIPSTMQDAKDLIAQLAADVQ

SEQ ID NO: 741918 - protein, 34 aa, Homo sapiens
MPDSGLSFCSLTLRNSFVLYGSSLTVSRPPTVII

SEQ ID NO: 741919 - protein, 103 aa, Homo sapiens
RLEGRIRSWARGRPLVGRVRPRRRPRLTLLRRRQVRHQPDSIILYGQSIGTVPTVDLASRYECAAVVLHSPLTSGMRVAFPDTKTYCFDAFPNIEKVSKITSP

SEQ ID NO: 741920 - protein, 307 aa, Homo sapiens
AFSPDGKALAVGLNDGSFLVVNADTVEDMVSFHHRKEMISDIKFSKDTGKYLAVASHDNFVDIYNVLTSKRVGICKGASSYITHIDWDSRGKLLQVNSGAREQLFFEAPRGKRHIIRPSEIEKIEWDTWTCVLGPTCEGIWPAHSDITDVNAASLTKDCSLLATGDDFGFVKLFSYPVKGQHARFKKYVGHSAHVTNVRWLHNDSVLLTVGGADTALMIWTREFVGTQESKLVDSEESDTDVEEDGGYDSDVAREKAIDYTTKIYAVSIREMEGTKPHQQLKEVSVEERPPVSRAAPQPEKLQKNNI

SEQ ID NO: 741921 - protein, 108 aa, Homo sapiens
ALKFMVELAGRGSGRTGESSELFAPSFCFFSTGMGWNWSLSPNPKANSIMWLLTVPHSPVDASQKKTPPAFPESPAAVPPTTTGGPQTQLCIYTASHHSHSTGAQQAH

SEQ ID NO: 741922 - protein, 47 aa, Homo sapiens
SSKMYKHEKAKGVTRGHTCFSGSQELEKISSLVPFLNPLYPTPNLFP

SEQ ID NO: 741923 - protein, 266 aa, Homo sapiens
GTSSSAAATQRLADYSPPSPALSFAHNGNNNNNGNGYTYTAGGEASVPSPDGCPELQPTFDPAPAPPPGAPLIWAQFERSPGGGPAAPVSSSCSSSASSSASSSSVVFPGGGASAPSNANLGLLVHRRLHPGTSCPRLSPPLHMAPGAGEHHLARRVRSDPGGGGLAYAAYANGLGAQLPGLQPSDTSGSSSSSSSSSSSSSSSSGLRRKGSRDCSVCFESEVIAALVPCGHNLFCMECANRICEKSEPECPVCHTAVTQAIRIFS

SEQ ID NO: 741924 - protein, 266 aa, Homo sapiens; identical to SEQ ID NO: 741923

SEQ ID NO: 741925 - protein, 86 aa, Homo sapiens
RVPQDPLTFQYQKSNVASEARPSKDVTIQPPTRTGEQRVWRDEVTHQGHAVLQSQDPNPGSPQSRPSPPTPWRYVHFTQIPNRLRV

SEQ ID NO: 741926 - protein, 269 aa, Homo sapiens
MNIHMKRKTIKNINTFENRMLMLDGMPAVRVKTELLESEQGSPNVHNYPDMEAVPLLLNNVKGEPPEDSLSVDHFQTQTEPVDLSINKARTSPTAVSSSPVSMTASASSPSSTSTSSSSSSRLASSPTVITSVSSASSSSTVLTPGPLVASASGVGGQQFLHIIHPVPPSSPMNLQSNKLSHVHRIPVVVQSVPVVYTAVRSPGNVNNTIVVPLLEDGRGHGKAQMDPRGLSPRQSKSDSDDDDLPNVTLDSVNETGSTALSIARAVQE

SEQ ID NO: 741927 - protein, 319 aa, Homo sapiens
MNIHMKRKTIKNINTFENRMLMLDGMPAVRVKTELLESEQGSPNVHNYPDMEAVPLLLNNVKGEPPEDSLSVDHFQTQTEPVDLSINKARTSPTAVSSSPVSMTASASSPSSTSTSSSSSSRLASSPTVITSVSSASSSSTVLTPGPLVASASGVGGQQFLHIIHPVPPSSPMNLQSNKLSHVHRIPVVVQSVPVVYTAVRSPGNVNNTIVVPLLEDGRGHGKAQMDPRGLSPRQSKSDSDDDDLPNVTLDSVNETGSTALSIARAVQEVHPSPVSRVRGNRMNNQKFPCSISPFSIESTRRQRRSESPDSRKTAYPQM

SEQ ID NO: 741928 - protein, 301 aa, Homo sapiens
MNIHMKRKTIKNINTFENRMLMLDGMPAVRVDMEAVPLLLNNVKGEPPEDSLSVDHFQTQTEPVDLSINKARTSPTAVSSSPVSMTASASSPSSTSTSSSSSSRLASSPTVITSVSSASSSSTVLTPGPLVASASGVGGQQFLHIIHPVPPSSPMNLQSNKLSHVHRIPVVVQSVPVVYTAVRSPGNVNNTIVVPLLEDGRGHGKAQMDPRGLSPRQSKSDSDDDDLPNVTLDSVNETGSTALSIARAVQEVHPSPVSRVRGNRMNNQKFPCSISPFSIESTRRQRRSESPDSRKTAYPQM

SEQ ID NO: 741929 - protein, 269 aa, Homo sapiens
MEAVPLLLNNVKGEPPEDSLSVDHFQTQTEPVDLSINKARTSPTAVSSSPVSMTASASSPSSTSTSSSSSSRLASSPTVITSVSSASSSSTVLTPGPLVASASGVGGQQFLHIIHPVPPSSPMNLQSNKLSHVHRIPVVVQSVPVVYTAVRSPGNVNNTIVVPLLEDGRGHGKAQMDPRGLSPRQSKSDSDDDDLPNVTLDSVNETGSTALSIARAVQEVHPSPVSRVRGNRMNNQKFPCSISPFSIESTRRQRRSESPDSRKTAYPQM

SEQ ID NO: 741930 - protein, 131 aa, Homo sapiens
MGGSALNQGVLEGDDAPGQSLYERLSQRMLDISGDRGVLKDVIREGAGDLVAPDASVLDASSWVNSSTPKAPASIFTSEPPEPPPPASPSSSLTTPPWTCSSAPPGASELPLPGPQNYPYGFSCVTFCLPS

SEQ ID NO: 741931 - protein, 163 aa, Homo sapiens [sequence omitted]

SEQ ID NO: 741932 - protein, 292 aa, Homo sapiens
MLCVLVRCPIISRSLSLRTQPPAPVSAPSCSLSLQLDAPSCPASSNYVPHLTPHVRAPSCPARSGYMPRLALPHMPHHAQRAPITCRHLAPLQVPNVPCVVPLRVPSCFVRSDYGPHLATHRATSVVPELARARAVGGGWNETMSASSWPQNGMPPSSLYERLSQRMLDISGDRGVLKDVIREGAGDLVAPDASVLDITLWGMELGLLSMQRGELARFLFKPNYAYGTLGSPPLIPPNTTVLFKIELLDFLDCAESDKFCALSAVRCRAQMSALYRETNGLVFLVILLDGLP

SEQ ID NO: 741933 - protein, 125 aa, Homo sapiens
MGGSALNQGVLEGDDAPGQSLYERLSQRMLDISGDRGVLKDVIREGAGDLVAPDASVLDITLWGMELGLLSMQRGELARDHVARLVSNFSAQAILPPWLLKCQDYRSEPPHPATAGILIGIVLNL

SEQ ID NO: 741934 - protein, 302 aa, Homo sapiens
PCLPFSWAPVSSFPLAFWSYPSVQSTGLSNTSLPSPVVALAASFTYSSNRFTTNLLFCVFIYRILPSHMACCLCQFKNSIEAVCKTVKLHCNTACLTNSIHCPEEASVGNPEGAFMKMLQARKQHMSTQLTIESEAPSDSSGINLSGFGGDQLEIQLTEQLRSLIPNEDVRKFMSHVIRTLKMECSETHVQGSCAKLMLRTGLLMKLLSEQQEAKALNVEWDTDQQKTNYINENMEQNEQKEQKSSELMKEVPGDDYKNKLIFAISVTVILIILIIIFCLIEVNSHKRASEKYKDNPSISGA

SEQ ID NO: 741935 - protein, 177 aa, Homo sapiens
MSTQLTIESEAPSDSSGINLSGFGGDQLEIQLTEQLRSLIPNEDVRKFMSHVIRTLKMECSETHVQGSCAKLMLRTGLLMKLLSEQQEAKALNVEWDTDQQKTNYINENMEQNEQKEQKSSELMKEVPGDDYKNKLIFAISVTVILIILIIIFCLIEVNSHKRASEKYKDNPSISGA

SEQ ID NO: 741936 - protein, 290 aa, Homo sapiens
LDLELSITTEPTTEVKPSPTTEETSAQPPDPGLAITPEPTTEIGHSTALEKTRAPHPDQVQTLHRSLTEVTGPPTKLESSQDSLVQSETAPEEQKASTSTNICELCTCGDETLSCVGLSPKQRLRQVPVPEPDTYNGIFTTLNFQGNYISYLDGNVWKAYSWTEKLILSENYLTELPKDSFEGLLYLQYLDLSCNKIRYIERQTFESLPFLQYINLGCNLITKLSLGTFQAWHGMQFLHNLILNRNPLTTVEDPYLFELPALKYLDMGTTHITLTTLKNILTMTVELEKL

SEQ ID NO: 741937 - protein, 151 aa, Homo sapiens
YLDMGTTHITLTTLKNILTMTVELEELILSENYLTELPKDSFEGLLYLQYLDLSCNKIRYIERQTFESLPFLQYINLGCNLITKLSLGTFQAWHGMQFLHNLILNRNPLTTVEDPYLFELPALKYLDMGTTHITLTTLKNILTMTVELEKL

SEQ ID NO: 741938 - protein, 81 aa, Homo sapiens
YYYLLTFIQPRVPKPHPSAQSSLASKMAAGLASQSPEGHEAFLGQECRGSGFAAPGREGRLRQVEIMPLPSILDNRVRPCL

SEQ ID NO: 741939 - protein, 426 aa, Homo sapiens
MLPSASRERPGYRAGVAAPDLLDPKSAAQNSKPRLSFSTKPTVLASRVESDTTINVMKWKTVSTIFLVVVLYLIIGATVFKALEQPHEISQRTTIVIQKQTFISQHSCVNSTELDELIQQIVAAINAGIIPLGNTSNQISHWDLGSSFFFAGTVITTIGFGNISPRTEGGKIFCIIYALLGIPLFGFLLAGVGDQLGTIFGKGIAKVEDTFIKWNVSQTKIRIISTIIFILFGCVLFVALPAIIFKHIEGWSALDAIYFVVITLTTIGFGDYVAGGSDIEYLDFYKPVVWFWILVGLAYFAAVLSMIGDWLRVISKKTKEEVGEFRAHAAEWTANVTAEFKETRRRLSVEIYDKFQRATSIKRKLSAELAGNHNQELTPCRRTLSVNHLTSERDVLPPLLKTESIYLNGLTPHCAGEEIAVIENIK

SEQ ID NO: 741940 - protein, 426 aa, Homo sapiens; identical to SEQ ID NO: 741939

SEQ ID NO: 741941 - protein, 426 aa, Homo sapiens; identical to SEQ ID NO: 741939

SEQ ID NO: 741942 - protein, 426 aa, Homo sapiens; identical to SEQ ID NO: 741939

SEQ ID NO: 741943 - protein, 299 aa, Homo sapiens [sequence omitted]

SEQ ID NO: 741944 - protein, 656 aa, Homo sapiens
AEIQEQLKGETDVETQSNEPLREEDGTDIQSLGRREVKGEDDKDTQELGRKNQGQLGNEFSGKIHIPKGKNQEHIRGEDGAHTQISESGNWGKLTSQIDGEMHSAEWKKDQQIGGENGAEIQIQGKRNLREVGGEDGVKTWAPGKETQSQFRSDLGRKILLSEWKSQKQMGSENGTEIQAPVERNQREPGGEDGVKTQRPKRENEDQLDSEIGGSHSPGRRNWELIGKDVAENQASEKRNQREVGNEDGRMIWRLRGKNWRLRAKKQTVKSKDNGKTRLSEWKRNLRGTTADDGTETQAPAGDDQGQLRVEIDEEIQVQGQGNKNDGGVEDVAELQDIGSQRKCTDEDVGEPRAPRGGNKDLVRGEDAVRDSLQVDCSGSERPTGRKHSLPWPPAFTGYGCGTREQEQAVAVNGFISAPCPEMNPVPHWGEVFLLVGGEGEHLASQGTTPARDHRVGISPASQQAQPESWRRRQRDKGVDPEKAPSLTRQSQNPPSLTAPLGMPSACSCLPCGPAPEAAIILAGPPTALTVLPKGTGLKKSKRLLLESLMRRRIAHLKWGLPRRILESYFLFNFLGSCSLTLAGARLSGLNTGQELQAQQERYCEAQGSPPGLKSPERFQRVQRPDRKSSKLPIQARALERNRPHMSEPIKHFHPA

SEQ ID NO: 741945 - protein, 656 aa, Homo sapiens; identical to SEQ ID NO: 741944

SEQ ID NO: 741946 - protein, 271 aa, Homo sapiens
AEIQEQLKGETDVETQSNEPLREEDGTDIQSLGRREVKGEDDKDTQELGRKNQGQLGNEFSGKIHIPKGKNQEHIRGEDGAHTQISESGNWGKLTSQIDGEMHSAEWKKDQQIGGENGAEIQIQGKRNLREVGGEDGVKTWAPGKETQSQFRSDLGRKILLSEWKSQKQMGSENGTEIQAPVERNQREPGGEDGVKTQRPKRENEDQLDSEIGGSHSPGRRNWELIGKDVAENQASEKRNQREVGNEDGRMIWRLRGKNWRLRAKKQTVKK

SEQ ID NO: 741947 - protein, 183 aa, Homo sapiens
MEGDAETNVLECANQRLVISETDGEILTPGWDTQDRMGVESRTNIQELGNRNQREAGGENLPETQAHMGENQEQLRCKIDAELAKRKHLAPNLSLREPDSTLPPKVGDPRAGEDSIGDHTASQRDLQLQGHCCTGATLPKTESPQGQEAPGNPNGAPQNTRASKKFSIMKHLNFFLFQNGFKK

SEQ ID NO: 741948 - protein, 656 aa, Homo sapiens; identical to SEQ ID NO: 741944

SEQ ID NO: 741949 - protein, 278 aa, Homo sapiens
MELWPCLAAALLLLLLLVQLSRAAEFYAKVALYCALCFTVSAVASLVCLLRHGGRTVENMSIIGWFVRSFKYFYGLRFEVRDPRRLQEARPCVIVSNHQSILDMMGLMEVLPERCVQIAKRELLFLGPVGLIMYLGGVFFINRQRSSTAMTVMADLGERMVRENLKVWIYPEGTRNDNGDLLPFKKGAFYLAVQAQVPIVPVVYSSFSSFYNTKKKFFTSGTVTVQVLEAIPTSGLTAADVPALVDTCHRAMRTTFLHISKTPQENGATAGSGVQPAQ

SEQ ID NO: 741950 - protein, 278 aa, Homo sapiens; identical to SEQ ID NO: 741949

SEQ ID NO: 741951 - protein, 278 aa, Homo sapiens; identical to SEQ ID NO: 741949

SEQ ID NO: 741952 - protein, 246 aa, Homo sapiens
MELWPCLAAALLLLLLLVQLSRAAEFYAKVALYCALCFTVSAVASLVCLLRHGGRTVENMSIIGWFVRSFKYFYGLRFEVRDPRRLQEARPCVIVSNHQSILDMMGLMEVLPERCVQIAKRELLFLGPVGLIMYLGGVFFINRQRSSTAMTVMADLGERMVRENVPIVPVVYSSFSSFYNTKKKFFTSGTVTVQVLEAIPTSGLTAADVPALVDTCHRAMRTTFLHISKTPQENGATAGSGVQPAQ

SEQ ID NO: 741953 - protein, 168 aa, Homo sapiens
MTSRVVLYIFGKFFPKFCLRHCRLPGVKDIKDPLFPLKYRLVMNFLVRIVTVSFMMAIFLKMRLAAVARWWAEPQGPRWPRSRWEDPEARRTLSEPSAQPPGTHQGAAGLQGPAHKLHQGLWERRGLEGQESQTHAPWATGSRESGPAAPAGLEDSVGSALYSVAVFL

SEQ ID NO: 741954 - protein, 278 aa, Homo sapiens; identical to SEQ ID NO: 741949

SEQ ID NO: 741955 - protein, 278 aa, Homo sapiens; identical to SEQ ID NO: 741949

SEQ ID NO: 741956 - protein, 278 aa, Homo sapiens; identical to SEQ ID NO: 741949

SEQ ID NO: 741957 - protein, 278 aa, Homo sapiens; identical to SEQ ID NO: 741949

SEQ ID NO: 741958 - protein, 278 aa, Homo sapiens; identical to SEQ ID NO: 741949

SEQ ID NO: 741959 - protein, 278 aa, Homo sapiens; identical to SEQ ID NO: 741949

SEQ ID NO: 741960 - protein, 374 aa, Homo sapiens
MELWPCLAAALLLLLLLVQLSRAAEFYAKVALYCALCFTVSAVASLVCLLRHGGRTVENMSIIGWFVRSFKYFYGLRFEVRDPRRLQEARPCVIVSNHQSILDMMGRPGLGGGFWGLSGAELSWGCVGLGPGDEDTGLPVPGRARPQYLPQGQTQRLGGHTTRPGSQGEGRVPGRPVGAQQLLFQRTLSPPLSLSLSLCLPGLMEVLPERCVQIAKRELLFLGPVGLIMYLGGVFFINRQRSSTAMTVMADLGERMVRENLKVWIYPEGTRNDNGDLLPFKKGAFYLAVQAQVPIVPVVYSSFSSFYNTKKKFFTSGTVTVQVLEAIPTSGLTAADVPALVDTCHRAMRTTFLHISKTPQENGATAGSGVQPAQ

SEQ ID NO: 741961 - protein, 181 aa, Homo sapiens
PPSPAALAIRGLSARGRSGSGSGSELAAPSGAGPGHGAVAVSGRGAAVAAAAGAAEPRGRVLRQGRPVLRAVLHGVRRGLARLPAAPRRPDGGEHEHHRLVRAKLQVLLRAPLRGAGPAQAAGGPSLCHRLQPPEHPGHDGPHGGPSGALRADRQAGAALPGARGPHHVPRGRLLHQPAAL

SEQ ID NO: 741962 - protein, 181 aa, Homo sapiens; identical to SEQ ID NO: 741961

SEQ ID NO: 741963 - protein, 315 aa, Homo sapiens
MELWPCLAAALLLLLLLVQLSRAAEFYAKVALYCALCFTVSAVASLVCLLRHGGRTVENMSIIGWFVRSFKYFYGLRFEVRDPRRLQEARPCVIVSNHQSILDMMGLMEVLPERCVQIAKRELLFLGPVGLIMYLGGVFFINRQRSSTAMTVMADLGERMVRENLKVWIYPEGTRNDNGDLLPFKKGAFYLAVQAQVPIVPVVYSSFSSFYNTKKKFFTSGTVTVQVLEAIPTRCSWAPGSSPQAASGSLGEEGPGGPGVPDSRTLGHREPGIGACCSCWPGRLCGVSTVLRCCFFINTLLEVAWGAVVTHRAGR

SEQ ID NO: 741964 - protein, 441 aa, Homo sapiens
APPGPRQPGRGVSVWSGYGAGPAAAAAAAAAEADRPGAATAALPRLHAAAAAASSSPARGGGLRPGVGTIPRSAAPLPALRPGAGAGEGTRRLLGVHPPRALPERGGGRGRTSGQRGPRAAARGGGFPKDARRLPAPRCELSLTGSERRVAMPGVTGAPGCPRGPPRWPPRRAVPAPGCRMGCIQSITCKARIRRENIVVYDVCATIDQCPTRIEETSPIVLRYKTPYFKASARVVMPPIPRHETWVVGWIQACNQMEFFNTYSDLGMSSWELPDLREGRVKAISDSDGVSYPWYGNTTETVTLVGPTNKISRFSVSMNDNFYPSVTWAVPVSDSNVPLLTRIKRDQSFTTWLVAMNTTTKEKIILQTIKWRMRVDIEVDPLQLLGQRARLVGRTQQEQPRILSRMEPIPPNALVKPNANDAQVLMWGPKRGPPLVVIPPK

SEQ ID NO: 741965 - protein, 156 aa, Homo sapiens
ARPVLLQPLGLSTPGHSLLAPPGPRQPGRGVSVWSGYGAGPAGAPVAAAAAAASACLLGRPLARRWVRCTRGAAVVQRFMQRRRRRRLLLLPPRRQTDRALPPPPSPGSMPPPLPPPPLRRGAGGSGPGWAPFLAAPLPSLPSARALEPARAPAAS

SEQ ID NO: 741966 - protein, 132 aa, Homo sapiens
ATWSPTQELAAAPYASAVDPLVPSFGVDAAPIRPDSLLFLFPSVCSNHLPRANPSLFLHPALGKSRMGPGALRENCFPWQSWVAALPPTGHRPARCCALGVLPSYHAHGCSPFGLHAIPFCSQTDVYLTSHY

SEQ ID NO: 741967 - protein, 108 aa, Homo sapiens
PVKGGRRAVELGILGRECRPSWEVVPDDLSSLFLHPALGKSRMGPGALRENCFPWQSWVAALPPTGHRPARCCALGVLPSYHAHGCSPFGLHAIPFCSQTDVYLTSHY

SEQ ID NO: 741968 - protein, 133 aa, Homo sapiens
VVGKGDRETGTFSERLGPTSVHSPPLPPFSRLTDSAEQPLPCWMNRHLWKSQLCEMVQPSGGPAADQDVLGEESPLGKQMAEDKASVKAQVTSLLGELQESQSRWECCPLTMHTGALLLGCMLFHFAARPMCI

SEQ ID NO: 741969 - protein, 420 aa, Homo sapiens
MNRHLWKSQLCEMVQPSGGPAADQDVLGEESPLGKPAMLHLPSEQGAPETLQRCLEENQELRDAIRQSNQILRERCEELLHFQASQREEKEFLMCKFQEARKLVERLGLEKLDLKRQKEQALREVEHLKRCQQQMAEDKASVKAQVTSLLGELQESQSRLEAATKECQALEGRARAASEQARQLESEREALQQQHSVQVDQLRMQGQSVEAALRMERQAASEEKRKLAQLQVAYHQLFQEYDNHIKSSVVGSERKRGMQLEDLKQQLQQAEEALVAKQEVIDKLKEEAEQHKIVMETVPVLKAQADIYKADFQAERQAREKLAEKKELLQEQLEQLQREYSKLKASCQESARWAMGPGALRENCFPWQSWVAALPPTGHRPARCCALGVLPSYHAHGCSPFGLHAIPFCSQTDVYLTSHY

SEQ ID NO: 741970 - protein, 156 aa, Homo sapiens
MNRHLWKSQLCEMVQPSGGPAADQDVLGEESPLGKPAMLHLPSEQGAPETLQRCLEENQELRDAIRQSNQILRERCEELLHFQASQREEKEFLMCKFQEARKLVERLGLEKLDLKRQKEHGSAGGGAPEEMPAGKDTGYGERRLRAHRAGSRRDQA

SEQ ID NO: 741971 - protein, 220 aa, Homo sapiens
GAAQLSAGVRHWARDLAAAGLRSRSLPTRLTMRGEQGAAGARVLQFTNCRILRGGKLLREDLWVRGGRILDPEKLFFEERRVADERRDCGGRILAPGFIDVQINGGFGVDFSQATEDVGSGVALVARRILSHGVTSFCPTLVTSPPEVYHKVVPQIPVKSGGPHGAGVLGLHLEGPFISREKRGAHPEAHLRSFEADAFQDLLATQGQGERELGQGAAAG

SEQ ID NO: 741972 - protein, 285 aa, Homo sapiens
GAAQLSAGVRHWARDLAAAGLRSRSLPTRLTMRGEQGAAGARVLQFTNCRILRGGKLLREDLWVRGGRILDPEKLFFEERRVADERRDCGGRILAPGFIDVQINGAARGRQGNPGEELWAPCDTSFSVAAGGFGVDFSQATEDVGSGVALVARRILSHGVTSFCPTLVTSPPEVYHKVVPQIPVKSGGPHGAGVLGLHLEGPFISREKRGAHPEAHLRSFEADAFQDLLATYGPLDNVRIVTLAPELGRSHEVIRALTARGICVSLGEGPARGGPAWGTWARCKV

SEQ ID NO: 741973 - protein, 196 aa, Homo sapiens
GAAQLSAGVRHWARDLAAAGLRSRSLPTRLTMRGEQGAAGARVLQFTNCRILRGGKLLREDLWVRGGRILDPEKLFFEERRVADERRDCGGRILAPGFIDVQINGGFGVDFSQATEDVGSGVALVARRILSHGVTSFCPTLVTSPPEVYHKGCTWRAPSSAGRSGARTPRPTSAPSRPMPSRTCWPPTGPWTMSAS

SEQ ID NO: 741974 - protein, 440 aa, Homo sapiens
GAAQLSAGVRHWARDLAAAGLRSRSLPTRLTMRGEQGAAGARVLQFTNCRILRGGKLLREDLWVRGGRILDPEKLFFEERRVADERRDCGGRILAPGFIDVQINGGFGVDFSQATEDVGSGVALVARRILSHGVTSFCPTLVTSPPEVYHKVVPQIPVKSGGPHGAGVLGLHLEGPFISREKRGAHPEAHLRSFEADAFQDLLATYGPLDNVRIVTLAPELGRSHEVIRALTARGICVSLGHSVADLRAAEDAVWSGATFITHLFNAMLPFHHRDPGIVGLLTSDRLPAGRCIFYGMIADGTHTNPAALRIAHRAHPQGLVLVTDAIPALGLGNGRHTLGQQEVEVDGLTAYVAGTKTLSGSIAPMDVCVRHFLQATGCSMESALEAASLHPAQLLGLEKSKGTLDFGADADFVVLDDSLHVQATYISGELVWQADAARQ

SEQ ID NO: 741975 - protein, 440 aa, Homo sapiens; identical to SEQ ID NO: 741974

SEQ ID NO: 741976 - protein, 470 aa, Homo sapiens
GAAQLSAGVRHWARDLAAAGLRSRSLPTRLTMRGEQGAAGARVLQFTNCRILRGGKLLREDLWVRGGRILDPEKLFFEERRVADERRDCGGRILAPGFIDVQINGGFGVDFSQATEDVGSGVALVARRILSHGVTSFCPTLVTSPPEVYHKVVPQIPVKSGGPHGAGVLGLHLEGPFISREKRGAHPEAHLRSFEADAFQDLLATYGPLDNVRIVTLAPELGRSHEVIRALTARGICVSLGHSVADLRAAEDAVWSGATFITHLFNAMLPFHHRDPGIVGLLTSDRLPAGRCIFYGMIADGTHTNPAALRIAHRAHPQGLVLVTDAIPALGLGNGRHTLGQQEVEVDGLTAYVAGERPDPLGPRSQPACQVAHDPPRACPLCSQGTKTLSGSIAPMDVCVRHFLQATGCSMESALEAASLHPAQLLGLEKSKGTLDFGADADFVVLDDSLHVQATYISGELVWQADAARQ

SEQ ID NO: 741977 - protein, 440 aa, Homo sapiens; identical to SEQ ID NO: 741974

SEQ ID NO: 741978 - protein, 464 aa, Homo sapiens
GAAQLSAGVRHWARDLAAAGLRSRSLPTRLTMRGEQGAAGARVLQFTNCRILRGGKLLREDLWVRGGRILDPEKLFFEERRVADERRDCGGRILAPGFIDVQINGGFGVDFSQATEDVGSGVALVARRILSHGVTSFCPTLVTSPPEVYHKVVPQIPVKSGGPHGAGVLGLHLEGPFISREKRGAHPEAHLRSFEADAFQDLLATYGPLDNVRIVTLAPELGRSHEVIRALTARGICVSLGHSVADLRAAEDAVWSGATFITHLFNAMLPFHHRDPGIVGLLTSDRLPAGRCIFYGMIADGTHTNPAALRIAHRAHPQGKLRQVARTGRMTGLAGSEPLPPPGLVLVTDAIPALGLGNGRHTLGQQEVEVDGLTAYVAGTKTLSGSIAPMDVCVRHFLQATGCSMESALEAASLHPAQLLGLEKSKGTLDFGADADFVVLDDSLHVQATYISGELVWQADAARQ

SEQ ID NO: 741979 - protein, 334 aa, Homo sapiens
GAAQLSAGVRHWARDLAAAGLRSRSLPTRLTMRGEQGAAGARVLQFTNCRILRGGKLLREDLWVRGGRILDPEKLFFEERRVADERRDCGGRILAPGFIDVQINGGFGVDFSQATEDVGSGVALVARRILSHGVTSFCPTLVTSPPEVYHKVVPQIPVKSGGPHGAGVLGLHLEGPFISREKRGAHPEAHLRSFEADAFQDLLATYGPLDNVRIVTLAPELGRSHEVIRALTARGICVSLGHSVADLRAAEDAVWSGATFITHLFNAMLPFHHRDPGIVGLLTSDRRPADRPPCPSPGAGAGHRCHPCLGPGQRPAHAGTAGSGSGRSDGLRGR

SEQ ID NO: 741980 - protein, 409 aa, Homo sapiens
GAAQLSAGVRHWARDLAAAGLRSRSLPTRLTMRGEQGAAGARVLQFTNCRILRGGKLLREDLWVRGGRILDPEKLFFEERRVADERRDCGGRILAPGFIDVQINGGFGVDFSQATEDVGSGVALVARRILSHGVTSFCPTLVTSPPEVYHKVVPQIPVKSGGPHGAGVLGLHLEGPFISREKRGAHPEAHLRSFEADAFQDLLATYGPLDNVRIVTLAPELGRSHEVIRALTARGICVSLGHSVADLRAAEDAVWSGATFITHLFNAMLPFHHRDPGIVGLLTSDRLPAGRCIFYGMIADGTHTNPAALRIAHRAHPQGLVLVTDAIPALGLGNGRHTLGQQEVEVDGLTAYVAGERPDPLGPRSQPACQVAHDPPRACPLCSQGTKTLSGSIAPMDVCVRHFLQATGQ

SEQ ID NO: 741981 - protein, 173 aa, Homo sapiens
MLPFHHRDPGIVGLLTSDRLPAGRCIFYGMIADGTHTNPAALRIAHRAHPQGLVLVTDAIPALGLGNGRHTLGQQEVEVDGLTAYVAGTKTLSGSIAPMDVCVRHFLQATGCSMESALEAASLHPAQLLGLEKSKGTLDFGADADFVVLDDSLHVQATYISGELVWQADAARQ

SEQ ID NO: 741982 - protein, 417 aa, Homo sapiens
GAAQLSAGVRHWARDLAAAGLRSRSLPTRLTMRGEQGAAGARVLQFTNCRILRGGKLLREDLWVRGGRILDPEKLFFEERRVADERRDCGGRILAPGFIDVQINGGFGVDFSQATEDVGSGVALVARRILSHGVTSFCPTLVTSPPEVYHKVVPQIPVKSGGPHGAGVLGLHLEGPFISREKRGAHPEAHLRSFEADAFQDLLATYGPLDNVRIVTLAPELGRSHEVIRALTARGICVSLGHSVADLRAAEDAVWSGATFITHLFNAMLPFHHRDPGIVGLLTSDRLPAGRCIFYGMIADGTHTNPAALRIAHRAHPQGLVLVTDAIPALGLGNGRHTLGQQEVEVDGLTAYVAGCSMESALEAASLHPAQLLGLEKSKGTLDFGADADFVVLDDSLHVQATYISGELVWQADAARQ

SEQ ID NO: 741983 - protein, 394 aa, Homo sapiens
ARLSSRLGFVTGRGIWPPRGSGAARSRHGSRCAASRARRGPACSSSLTAGSCAEGNCSGGFGVDFSQATEDVGSGVALVARRILSHGVTSFCPTLVTSPPEVYHKVVPQIPVKSGGPHGAGVLGLHLEGPFISREKRGAHPEAHLRSFEADAFQDLLATYGPLDNVRIVTLAPELGRSHEVIRALTARGICVSLGHSVADLRAAEDAVWSGATFITHLFNAMLPFHHRDPGIVGLLTSDRLPAGRCIFYGMIADGTHTNPAALRIAHRAHPQGLVLVTDAIPALGLGNGRHTLGQQEVEVDGLTAYVAGTKTLSGSIAPMDVCVRHFLQATGCSMESALEAASLHPAQLLGLEKSKGTLDFGADADFVVLDDSLHVQATYISGELVWQADAARQ

SEQ ID NO: 741984 - protein, 323 aa, Homo sapiens
ARLSSRLGFVTGRGIWPPRGSGAARSRHGSRCAASRARRGPACSSSLTAGSCAEGNCSGGFGVDFSQATEDVGSGVALVARRILSHGVTSFCPTLVTSPPEVYHKVVPQIPVKSGGPHGAGVLGHSVADLRAAEDAVWSGATFITHLFNAMLPFHHRDPGIVGLLTSDRLPAGRCIFYGMIADGTHTNPAALRIAHRAHPQGLVLVTDAIPALGLGNGRHTLGQQEVEVDGLTAYVAGTKTLSGSIAPMDVCVRHFLQATGCSMESALEAASLHPAQLLGLEKSKGTLDFGADADFVVLDDSLHVQATYISGELVWQADAARQ

SEQ ID NO: 741985 - protein, 424 aa, Homo sapiens
GAAQLSAGVRHWARDLAAAGLRSRSLPTRLTMRGEQGAAGARVLQFTNCRILRGGKLLREDLWVRGGRILDPEKLFFEERRVADERRDCGGRILAPGFIDVQINGGFGVDFSQATEDVGSGVALVARRILSHGVTSFCPTLVTSPPEVYHKVVPQIPVKSGGPHGAGVLGLHLEGPFISREKRGAHPEAHLRSFEADAFQDLLATYGPLDNVRIVTLAPELGRSHEVIRALTARGICVSLGHSVADLRAAEDAVWSGATFITHLFNAMLPFHHRDPGIVGLLTSDRLPAGRCIFYGMIADGTHTNPAALRIAHRAHPQGLVLVTDAIPALGLGNGRHTLGQQEVEVDGLTAYVAGERPDPLGPRSQPACQVAHDPPRACPLCSQGTKTLSGSIAPNFVVLDDSLHVQATYISGELVWQADAARQ

SEQ ID NO: 741986 - protein, 131 aa, Homo sapiens
  misc_feature (1)..(1): Xaa can be any naturally occurring amino acid
XIAKFGTGQGLVLVTDAIPALGLGNGRHTLGQQEVEVDGLTAYVAGTKTLSGSIAPMDVCVRHFLQATGCSMESALEAASLHPAQLLGLEKSKGTLDFGADADFVVLDDSLHVQATYISGELVWQADAARQ

SEQ ID NO: 741987 - protein, 346 aa, Homo sapiens
GAAQLSAGVRHWARDLAAAGLRSRSLPTRLTMRGEQGAAGARVLQFTNCRILRGGKLLREDLWVRGGRILDPEKLFFEERRVADERRDCGGRILAPGFIDVQINGGFGVDFSQATEDVGSGVALVARRILSHGVTSFCPTLVTSPPEVYHKVVPQIPVKSGGPHGAGVLGHSVADLRAAEDAVWSGATFITHLFNAMLPFHHRDPGIVGLLTSDRLPAGRCIFYGMIADGTHTNPAALRIAHRAHPQGLVLVTDAIPALGLGNGRHTLGQQEVEVDGLTAYVAGCSMESALEAASLHPAQLLGLEKSKGTLDFGADADFVVLDDSLHVQATYISGELVWQADAARQ

SEQ ID NO: 741988 - protein, 117 aa, Homo sapiens
QGGWVLPSSLLSGGLPAASLSCSPVLPSGRAFWCCRQGQARGCREHCPVPLSICDGSGCLALVVSLGLSFPTSVGLLGSSSGVGGRPHSCPLLIARLCPRLRGARRLPSRPGHLHLG

SEQ ID NO: 741989 - protein, 446 aa, Homo sapiens
GAAQLSAGVRHWARDLAAAGLRSRSLPTRLTMRGEQGAAGARVLQFTNCRILRGGKLLREDLWVRGGRILDPEKLFFEERRVADERRDCGGRILAPGFIDVQINGGFGVDFSQATEDVGSGVALVARRILSHGVTSFCPTLVTSPPEVYHKVVPQIPVKSGGPHGAGVLGLHLEGPFISREKRGAHPEAHLRSFEADAFQDLLATYGPLDNVRIVTLAPELGRSHEVIRALTARGICVSLGHSVADLRAAEDAVWSGATFITHLFNAMLPFHHRDPGIVGLLTSDRLPAGRCIFYGMIADGTHTNPAALRIAHRAHPQGLVLVTDAIPALGLGNGRHTLGQQEVEVDGLTAYVAGTKTLSGSIAPMDVCVRHFLQATGCSMESALEAASLHPAQLLGLEKSKGTLDFGADAAPGGPRSSGRAEAEAPQPEAQAPGSFEGRIAFQGT

SEQ ID NO: 741990 - protein, 283 aa, Homo sapiens
GAAQLSAGVRHWARDLAAAGLRSRSLPTRLTMRGEQGAAGARVLQFTNCRILRGGKLLREDLWVRGGRILDPEKLFFEERRVADERRDCGGRILAPGFIDVQINGGFGVDFSQATEDVGSGVALVARRILSHGVTSFCPTLVTSPPEVYHKVVPQIPVKSGGPHGAGVLGLHLEGPFISREKRGAHPEAHLRSFEADAFQDLLATYGPLDNVRIVTLAPELGRSHEVIRALTARGICVSLGHSVADLRAAEDAVWSGATFITHLFNAMLPFHLDRFHRRSFPA

SEQ ID NO: 741991 - protein, 310 aa, Homo sapiens
EEELRVALEAQSPRRRAGWCSCAGGVLRLGVVTGSRMASDSGNQGTLCTLEFAVQMTCQSCVDAVRKSLQGVAGVQDVEVHLEDQMVLVHTTLPSQEVQALLEGTGRQAVLKGMGSGQLQNLGAAVAILGGPGTVQGVVRFLQLTPERCLIEGTIDGLEPGLHGLHVHQYGDLTNNCNSCGNHFNPDGASHGGPQDSDRHRGDLGNVRADADGRAIFRMEDEQLKVWDVIGRSLIIDEGEDDLGRGGHPLSKITGNSGERLACGIIARSAGLFQNPKQICSCDGLTIWEERGRPIAGKGRKESAQPPAHL

SEQ ID NO: 741992 - protein, 108 aa, Homo sapiens
  misc_feature (1)..(1): Xaa can be any naturally occurring amino acid
XKPGNAVIIYRPPHLKMEDEQLKVWDVIGRSLIIDEGEDDLGRGGHPLSKITGNSGERLACGIIARSAGLFQNPKQICSCDGLTIWEERGRPIAGKGRKESAQPPAHL

SEQ ID NO: 741993 - protein, 310 aa, Homo sapiens; identical to SEQ ID NO: 741991

SEQ ID NO: 741994 - protein, 121 aa, Homo sapiens
EEELRVALEAQSPRRRAGWCSCAGGVLRLGVVTGSRMASDSGNQGTLCTLEFAVQMTCQSCVDAVRKSLQGVAGVQDVEVHLEDQMVLVHTTLPSQEVQALLEGTGRQAVLKGMGSGQLRE

SEQ ID NO: 741995 - protein, 176 aa, Homo sapiens
TELIIDEGEDGPERCLIEGTIDGLEPGLHGLHVHQYGDLTNNCNSCGNHFNPDGASHGGPQDSDRHRGDLGNVRADADGRAIFRMEDEQLKVWDVIGRSLIIDEGEDDLGRGGHPLSKITGNSGERLACGIIARSAGLFQNPKQICSCDGLTIWEERGRPIAGKGRKESAQPPAHL

SEQ ID NO: 741996 - protein, 121 aa, Homo sapiens; identical to SEQ ID NO: 741994

SEQ ID NO: 741997 - protein, 310 aa, Homo sapiens; identical to SEQ ID NO: 741991

SEQ ID NO: 741998 - protein, 121 aa, Homo sapiens; identical to SEQ ID NO: 741994

SEQ ID NO: 741999 - protein, 121 aa, Homo sapiens; identical to SEQ ID NO: 741994

SEQ ID NO: 742000 - protein, 121 aa, Homo sapiens; identical to SEQ ID NO: 741994

SEQ ID NO: 742001 - protein, 121 aa, Homo sapiens; identical to SEQ ID NO: 741994

SEQ ID NO: 742002 - protein, 121 aa, Homo sapiens; identical to SEQ ID NO: 741994

SEQ ID NO: 742003 - protein, 121 aa, Homo sapiens; identical to SEQ ID NO: 741994

SEQ ID NO: 742004 - protein, 121 aa, Homo sapiens; identical to SEQ ID NO: 741994

SEQ ID NO: 742005 - protein, 121 aa, Homo sapiens; identical to SEQ ID NO: 741994

SEQ ID NO: 742006 - protein, 121 aa, Homo sapiens; identical to SEQ ID NO: 741994

SEQ ID NO: 742007 - protein, 539 aa, Homo sapiens
KRRRGCVGQAAPDRRMSLLSLPWLGLRPVAMSPWLLLLLVVGSWLLARILAWTYAFYNNCRRLQCFPQPPKRNWFWGHLGLITPTEEGLKDSTQMSATYSQGFTVWLGPIIPFIVLCHPDTIRSITNASAAIAPKDNLFIRFLKPWLGEGILLSGGDKWSRHRRMLTPAFHFNILKSYITIFNKSANIMLDKWQHLASEGSSRLDMFEHISLMTLDSLQKCIFSFDSHCQERPSEYIATILELSALVEKRSQHILQHMDFLYYLSHDGRRFHRACRLVHDFTDAVIRERRRTLPTQGIDDFFKDKAKSKTLDFIDVLLLSKDEDGKALSDEDIRAEADTFMFGGHDTTASGLSWVLYNLARHPEYQERCRQEVQELLKDRDPKEIEWDDLAQLPFLTMCVKESLRLHPPAPFISRCCTQDIVLPDGRVIPKGITCLIDIIGVHHNPTVWPDPEVYDPFRFDPENSKGRSPLAFIPFSAGPRNCIGQAFAMAEMKVVLALMLLHFRFLPDHTEPRRKLELIMRAEGGLWLRVEPLNVGLQ

SEQ ID NO: 742008 - protein, 282 aa, Homo sapiens
MDFLYYLSHDGRRFHRACRLVHDFTDAVIRERRRTLPTQGIDDFFKDKAKSKTLDFIDVLLLSKDEDGKALSDEDIRAEADTFMFGGHDTTASGLSWVLYNLARHPEYQERCRQEVQELLKDRDPKEIEWDDLAQLPFLTMCVKESLRLHPPAPFISRCCTQDIVLPDGRVIPKGITCLIDIIGVHHNPTVWPDPEVYDPFRFDPENSKGRSPLAFIPFSAGPRNCIGQAFAMAEMKVVLALMLLHFRFLPDHTEPRRKLELIMRAEGGLWLRVEPLNVGLQ

SEQ ID NO: 742009 - protein, 478 aa, Homo sapiens
KRRRGCVGQAAPDRRMSLLSLPWLGLRPVAMSPWLLLLLVVGSWLLARILAWTYAFYNNCRRLQCFPQPPKRNWFWGHLGLITPTEEGLKDSTQMSATYSQGFTVWLGPIIPFIVLCHPDTIRSITNASAAIAPKDNLFIRFLKPWLGEGILLSGGDKWSRHRRMLTPAFHFNILKSYITIFNKSANIMLDKWQHLASEGSSRLDMFEHISLMTLDSLQKCIFSFDSHCQERPSEYIATILELSALVEKRSQHILQHMDFLYYLSHDGRRFHRACRLVHDFTDAVIRERRRTLPTQGIDDFFKDKAKSKTLDFIDVLLLSKDEDGKALSDEDIRAEADTFMFGGHDTTASGLSWVLYNLARHPEYQERCRQEVQELLKDRDPKEIEWDDLAQLPFLTMCVKESLRLHPPAPFISRCCTQDIVLPDGRVIPKGITCLIDIIGVHHNPTVWPDPEVLPSPFTTTTPILYFCVCVCEFQGS

SEQ ID NO: 742010 - protein, 103 aa, Homo sapiens
MVVLPPPLSLRQPAIVPMGADMRSRSRLPAASASGISPRVGSRLSLPRGNLGLGPIARERALLAPAPPAPSLLSWLSQVQGPPGVTWGTTCLKAVNNSWKRSC

SEQ ID NO: 742011 - protein, 94 aa, Homo sapiens
KFSARGGGDKRTEAGAARLPAASASGISPRVGSRLSLPRGNLGLGPIARERALLAPAPPAPSLLSWLSQVQGPPGVTWGTTCLKAVNNSWKRSC

SEQ ID NO: 742012 - protein, 307 aa, Homo sapiens
MTETTKTHVILLACGSFNPITKGHIQMFERARDYLHKTGRFIVIGGIVSPVHDSYGKQGLVSSRHRLIMCQLAVQNSDWIRVDPWECYQDTWQTTCSVLEHHRDLMKRVTGCILSNVNTPSMTPVIGQPQNETPQPIYQNSNVATKPTAAKILGKVGESLSRICCVRPPVERFTFVDENANLGTVMRYEEIELRILLLCGSDLLESFCIPGLWNEADMEVIVGDFGIVVVPRDAADTDRIMNHSSILRKYKNNIMVVKDDINHPMSVVSSTKSRLALQHGDGHVVDYLSQPVIDYILKSQLYINASG

SEQ ID NO: 742013 - protein, 245 aa, Homo sapiens
MEIQELEEIQACQGLWEVFVTLSERARDYLHKTGRFIVIGGIVSPVHDSYGKQGLVSSRHRLIMCQLAVQNSDWIRVDPWECYQDTWQTTCSVLEHHRDLMKRVTGCILSNVNTPSMTPVIGQPQNETPQPIYQNSNVATKPTAAKILGKVGESLSRICCVRPPVERFTFVDENANLGTVMRYEEIELRILLLCGSDLLESFCIPGLWNEADVSSKVIAWHPAGTGRDGKCAFDFGLLSSLLLSF

SEQ ID NO: 742014 - protein, 100 aa, Homo sapiens
DQDEETSGGVPGEQRGIPASACPDGEVQTDLQEDGSNSSRPLFPLRNGAPPRHRLGEEVENGMWQGSLSLQRWPFWPSHPFGTPSRKPMAVALCCIPPGL

SEQ ID NO: 742015 - protein, 87 aa, Homo sapiens
GLTLSPRLECSGAVMAPCNLNLSDSSNPPATGRQSMVNAGLADYSPGDLSEDQFSHLENGTTARPLKKIQKTAPHISMFGCCQSTWI

SEQ ID NO: 742016 - protein, 83 aa, Homo sapiens
TSHLTGNIGFEEQAKEQTSIYTNLKKGTFYVVTKSDLNRSPKGTRALWRNSRLGQRTYEEYFVVTERRCSKADGGVKRTQELA

SEQ ID NO: 742017 - protein, 608 aa, Homo sapiens
SRLFSKALKGDHRCGETETPKSCSEVAGCKAAMRHQGKIPEELSLDDRARTQKKWGRGKWEPEPSSKPPREATLEERHARGEKHLGVEIEKTSGEIIRCEKCKRERELQQSLERERLSLGTSELDMGKGPMYDVEKLVRTRSCRRSPEANPASGEEGWKGDSHRSSPRNPTQELRRPSKSMDKKEDRGPEDQESHAQGAAKAKKDLVEVLPVTEEGLREVKKDTRPMSRSKHGGWLLREHQAGFEKLRRTRGEEKEAEKEKKPCMSGGRRMTLRDDQPAKLEKEPKTRPEENKPERPSGRKPRPMGIIAANVEKHYETGRVIGDGNFAVVKECRHRETRQAYAMKIIDKSRLKGKEDMVDSEILIIQSLSHPNIVKLHEVYETDMEIYLILEYVQGGDLFDAIIESVKFPEPDAALMIMDLCKALVHMHDKSIVHRDLKPENLLVQRNEDKSTTLKLADFGLAKHVVRPIFTVCGTPTYVAPEILSEKGYGLEVDMWAAGVILYILLCGFPPFRSPERDQDELFNIIQLGHFEFLPPYWDNISDAAKDLVSRLLVVDPKKRYTAHQVLQHPWIETAGKTNTVKRQKQVSPSSEGHFRSQHKRVVEQVS

SEQ ID NO: 742018 - protein, 113 aa, Homo sapiens
MWAAGVILYILLCGFPPFRSPERDQDELFNIIQLGHFEFLPPYWDNISDAAKDLVSRLLVVDPKKRYTAHQVLQHPWIETAGKTNTVKRQKQVSPSSEGHFRSQHKRVVEQVS

SEQ ID NO: 742019 - protein, 146 aa, Homo sapiens
MCRYRIKHLWHDNSLEVHVNFNVNRSNPKFPCGSAQEFPNMPVFLFKPKGGFSSSVGYPGRQYYFNSSGSSGYQDYYPHGRPDHYEEAPRNYDTYTAGLSEEEQLERALQASLWDRGNTRNSPPPYGFHLSPEEMRRQRLHRFDSQ

SEQ ID NO: 742020 - protein, 300 aa, Homo sapiens
MQRRSRGINTGLILLLSQIFHVGINNIPPVTLATLALNIWFFLNPQKPLYSSCLSVEKCYQQKDWQRLLLSPLHHADDWHLYFNMASMLWKGINLERRLGSRWFAYVITAFSVLTGVVYLLLQFAVAEFMDEPDFKRSCAVGFSGVLFALKVLNNHYCPGGFVNILGFPVPNRFACWVELVAIHLFSPGTSFAGHLAGILVGLMYTQGPLKKIMEACAGGFSSSVGYPGRQYYFNSSGSSGYQDYYPHGRPDHYEEAPRNYDTYTAGLSEEEQLERALQASLWDRVPCQSPLLWKNSDMT

SEQ ID NO: 742021 - protein, 300 aa, Homo sapiens; identical to SEQ ID NO: 742020

SEQ ID NO: 742022 - protein, 315 aa, Homo sapiens
MQRRSRGINTGLILLLSQIFHVGINNIPPVTLATLALNIWFFLNPQKPLYSSCLSVEKCYQQKDWQRLLLSPLHHADDWHLYFNMASMLWKGINLERRLGSRWFAYVITAFSVLTGVVYLLLQFAVAEFMDEPDFKRSCAVGFSGVLFALKVLNNHYCPGGFVNILGFPVPNRFACWVELVAIHLFSPGTSFAGHLAGILVGLMYTQGPLKKIMEACAGGFSSSVGYPGRQYYFNSSGSSGYQDYYPHGRPDHYEEAPRNYDTYTAGLSEEEQLERALQASLWDRGNTRNSPPPYGFHLSPEEMRRQRLHRFDSQ

SEQ ID NO: 742023 - protein, 143 aa, Homo sapiens
SNQQQNKHSQRVSFPPRTSFAGHLAGILVGLMYTQGPLKKIMEACAGGFSSSVGYPGRQYYFNSSGSSGYQDYYPHGRPDHYEEAPRNYDTYTAGLSEEEQLERALQASLWDRGNTRNSPPPYGFHLSPEEMRRQRLHRFDSQ

SEQ ID NO: 742024 - protein, 198 aa, Homo sapiens
MQRRSRGINTGLILLLSQIFHVGINNIPPVTLATLALNIWFFLNPQKPLYSSCLSVEKCYQQKDWQRLLLSPLHHADDWHLYFNMASMLWKGINLERRLGSRWFAYVITAFSVLTGVVYLLLQFAVAEFMDEPDFKRSCAVGFSGVLFALKVLNNHYCPGGFVNILGFPVPNRFACWVELVAIHLFSPGTTCHFVLKI

SEQ ID NO: 742025 - protein, 88 aa, Homo sapiens
PGSPTLRRDQAQRRPLQPTAQLDPGRAPPSGPPDGSSPLRSLLFGQSYSSRTHSVVNWSSSQRESKTMVNEKRPGDRNLQAHPSTNIH

SEQ ID NO: 742026 - protein, 88 aa, Homo sapiens; identical to SEQ ID NO: 742025

SEQ ID NO: 742027 - protein, 137 aa, Homo sapiens
MRTQVYEGLCKNYFSLAVLQRDRIKLLFFDILVFLSVFLLFLLFLVDIMANNTTSLGSPWPENFWEDLIMSFTVSMAIGLVLGGFIWAVFICLFSPSSDKLPWNKQIPFQENQVSELLLSIPFCNVHHFLWKLRVSW

SEQ ID NO: 742028 - protein, 235 aa, Homo sapiens
MRTQVYEGLCKNYFSLAVLQRDRIKLLFFDILVFLSVFLLFLLFLVDIMANNTTSLGSPWPENFWEDLIMSFTVSMAIGLVLGGFIWAVFICLSRRRRASAPISQWSSSRRSRSSYTHGLNRTGFYRHSGCERRSNLSLASLTFQRQASLEQANSFPRKSSFRASTFHPFLQCPPLPVETESQLVTLPSSNISPTISTSHSLSRPDYWSSNSLRVGLSTPPPPAYESIIKAFPDS

SEQ ID NO: 742029 - protein, 160 aa, Homo sapiens
MAIGLVLGGFIWAVFICLSRRRRASAPISQWSSSRRSRSSYTHGLNRTGFYRHSGCERRSNLSLASLTFQRQASLEQANSFPRKSSFRASTFHPFLQCPPLPVETESQLVTLPSSNISPTISTSHSLSRPDYWSSNSLRVGLSTPPPPAYESIIKAFPDS

SEQ ID NO: 742030 - protein, 162 aa, Homo sapiens
MRTQVYEGLCKNYFSLAVLQRDRIKLLFFDILVFLSVFLLFLLFLVDIMANNTTSLGSPWPENFWEDLIMSFTVSMAIGLVLGGFIWAVFICLSRRRRASAPISQWSSSRRSRSSYTHGLNRTGFYRHSGCERRSNLSLASLTFQRQASLEQANSFPSSCGN

SEQ ID NO: 742031 - protein, 607 aa, Homo sapiens
MILLTFSTGRRLDFVHHSGVFFLQTLLWILCATVCGTEQYFNVEVWLQKYGYLPPTDPRMSVLRSAETMQSALAAMQQFYGINMTGKVDRNTIDWMKKPRCGVPDQTRGSSKFHIRRKRYALTGQKWQHKHITYSIKNVTPKVGDPETRKAIRRAFDVWQNVTPLTFEEVPYSELENGKRDVDITIIFASGFHGDSSPFDGEGGFLAHAYFPGPGIGGDTHFDSDEPWTLGNPNHDGNDLFLVAVHELGHALGLEHSNDPTAIMAPFYQYMETDNFKLPNDDLQGIQKIYGPPDKIPPPTRPLPTVPPHRSIPPADPRKNDRPKPPRPPTGRPSYPGAKPNICDGNFNTLAILRREMFVFKDQWFWRVRNNRVMDGYPMQITYFWRGLPPSIDAVYENSDGNFVFFKGNKYWVFKDTTLQPGYPHDLITLGSGIPPHGIDSAIWWEDVGKTYFFKGDRYWRYSEEMKTMDPGYPKPITVWKGIPESPQGAFVHKENGFTYFYKGKEYWKFNNQILKVEPGYPRSILKDFMGCDGPTDRVKEGHSPPDDVDIVIKLDNTASTVKAIAIVIPCILALCLLVLVYTVFQFKRKGTPRHILYCKRSMQEWV

SEQ ID NO: 742032 - protein, 457 aa, Homo sapiens
MILLTFSTGRRLDFVHHSGVFFLQTLLWILCATVCGTEQYFNVEVWLQKYGYLPPTDPRMSVLRSAETMQSALAAMQQFYGINMTGKVDRNTIDWMKKPRCGVPDQTRGSSKFHIRRKRYALTGQKWQHKHITYSIKNVTPKVGDPETRKAIRRAFDVWQNVTPLTFEEVPYSELENGKRDVDITIIFASGFHGDSSPFDGEGGFLAHAYFPGPGIGGDTHFDSDEPWTLGNPNHDGNDLFLVAVHELGHALGLEHSNDPTAIMAPFYQYMETDNFKLPNDDLQGIQKIYGPPDKIPPPTRPLPTVPPHRSIPPADPRKNDRPKPPRPPTGRPSYPGAKPNICDGNFNTLAILRREMFVFKDQWFWRVRNNRVMDGYPMQITYFWRGLPPSIDAVYENSDGNFVFFKVKGDTLSVIQDGWLYKYHWKWILEQRQSVPVLSRQTEKHKTYEELSSITY

SEQ ID NO: 742033 - protein, 329 aa, Homo sapiens
AQRVHQRLRSERPWLRRGGRKVCFPDVSAGRAARLGGGGSWAERGAAGALAPTRARDPSWDPSPRPPPAPPGPLAGMDSAAAAFALDKPALGPGPPPPPPALGPGDCAQARKNFSVSHLLDLEEVAAAGRLAARPGARAEAREGAAREPSGGSSGSEAAPQDGECPSPGRGSAAKRKKKQRRNRTTFNSSQLQALERVFERTHYPDAFVREELARRVNLSEARVQVWFQNRRAKFRRNERAMLASRSASLLKSYSQEAAIEQPVAPRPTALSPDYLSWTASSPYSTVPPYSPGSSGPATPGVNMANSIASLRLKAKEFSLHHSQVPTVN

SEQ ID NO: 742034 - protein, 99 aa, Homo sapiens
MNHTVQTFFSPVNSGQPPNYEMLKEEHEVAVLGAPHNPAPPTSTVIHIRSETSVPDHVVWSLFNTLFMNPCCLGLHSFAYSVKSRDRKMVGDLTGAQAY

SEQ ID NO: 742035 - protein, 176 aa, Homo sapiens
RVCTPDRESAEAAMVRFKHRYLLCELVSDDPRCRLSLDDRVLSSLVRDTIARVHGTFGAAACSIGFAVRYLNAYTGIVLLRCRKEFYQLVWSALPFITYLENKGHRYPCFFNTLHVGGTIRTCQKFLIQYNRRQLLILLQNCTDEGEREAIQKSVTRSCLLEEEEESGEEAAEAME

SEQ ID NO: 742036 - protein, 176 aa, Homo sapiens; identical to SEQ ID NO: 742035

SEQ ID NO: 742037 - protein, 151 aa, Homo sapiens
RVCTPDRESAEAAMVRFKHRYLLCELVSDDPRCRLSLDDRVLSSLVRDTIARVHGTFGAAACSIGFAVRYLNAYTGIVLLRCRKEFYQLVWSGTIRTCQKFLIQYNRRQLLILLQNCTDEGEREAIQKSVTRSCLLEEEEESGEEAAEAME

SEQ ID NO: 742038 - protein, 110 aa, Homo sapiens
RVCTPDRESAEAAMVRFKHRYLLCELVSDDPRCRLSLDDRVLSSLVRDTIARVHGTFGAAACSIGFAGARALGEEGNPGGWRDVEGAGAGGRKKGHEWPSPCTVFCKVSL

SEQ ID NO: 742039 - protein, 118 aa, Homo sapiens
RVCTPDRESAEAAMVRFKHRYLLCELVSDDPRCRLSLDDRVLSSLVRDTIARVHGTFGAAACSIGFAGARALGEEGNPGGWRDVEGAGAGGRKKGHEWPSPCTVFCKVSFDISMPILE

SEQ ID NO: 742040 - protein, 118 aa, Homo sapiens
  misc_feature (6)..(6): Xaa can be any naturally occurring amino acid
STLLIXHRYLRYLNAYTGIVLLRCRKEFYQLVWSALPFITYLENKGHRYPCFFNTLHVGGTIRTCQKFLIQYNRRQLLILLQNCTDEGEREAIQKSVTRSCLLEEEEESGEEAAEAME

SEQ ID NO: 742041 - protein, 130 aa, Homo sapiens
RVCTPDRESAEAAMVRFKHRYLLCELVSDDPRCRLSLDDRVLSSLVRDTIARVHGTFGAAACSIGFAVRYLNAYTGIVLLRCRKEFYQLVWSALPFITYLENKGHRYPCFFNTLHVGGRSEVVWLLIFNW

SEQ ID NO: 742042 - protein, 126 aa, Homo sapiens
RVCTPDRESAEAAMVRFKHRYLLCELVSDDPRCRLSLDDRVLSSLVRDTIARVHGTFGAAACSIGFAGTIRTCQKFLIQYNRRQLLILLQNCTDEGEREAIQKSVTRSCLLEEEEESGEEAAEAME

SEQ ID NO: 742043 - protein, 67 aa, Homo sapiens
GKGLPKLRGTIRTCQKFLIQYNRRQLLILLQNCTDEGEREAIQKSVTRSCLLEEEEESGEEAAEAME

SEQ ID NO: 742044 - protein, 110 aa, Homo sapiens; identical to SEQ ID NO: 742038

SEQ ID NO: 742045 - protein, 110 aa, Homo sapiens; identical to SEQ ID NO: 742038

SEQ ID NO: 742046 - protein, 87 aa, Homo sapiens
QLPGPSGRCRPRDVTAAEGAGGWAPGEWTVRALPLGPGPWLRPRDGSCSPRAEPVSILDAPWSLKSEKSPYPPTPPCPILGRLGPQS

SEQ ID NO: 742047 - protein, 513 aa, Homo sapiens
MILASVLRSGPGGGLPLRPLLGPALALRARSTSATDTHHVEMARERSKTVTSFYNQSAIDAAAEKPSVRLTPTMMLYAGRSQDGSHLLKSARYLQQELPVRIAHRIKGFRCLPFIIGCNPTILHVHELYIRAFQKLTDFPPIKDQADEAQYCQLVRQLLDDHKDVVTLLAEGLRESRKHIEDEKLVRYFLDKTLTSRLGIRMLATHHLALHEDKPDFVGIICTRLSPKKIIEKWVDFARRLCEHKYGNAPRVRINGHVAARFPFIPMPLDYILPELLKNAMRATMESHLDTPYNVPDVVITIANNDVDLIIRISDRGGGIAHKDLDRVMDYHFTTAEASTQDPRISPLFGHLDMHSGAQSGPMHGPQLWLRVAHVTGLRGVPRWVSAAAVPAGHWHGRLPAAPPHRWPGGKLPDLTPQPLACSPDQPGPHSLQDLPGQAGRPPAPHTAASWVSGTQTDGLTWSWALPCLNRVHCLLASRTWSREVGTLRPPAPVPSFSFLGNPHSDLLLKFTF

SEQ ID NO: 742048 - protein, 335 aa, Homo sapiens
MILASVLRSGPGGGLPLRPLLGPALALRARSTSATDTHHVEMARERSKTVTSFYNQSAIDAAAEKPSVRLTPTMMLYAGRSQDGSHLLKSARYLQQELPVRIAHRIKGFRCLPFIIGCNPTILHVHELYIRAFQKLTDFPPIKDQADEAQYCQLVRQLLDDHKDVVTLLAEGLRESRKHIEDEKLVRYFLDKTLTSRLGIRMLATHHLALHEDKPDFVGIICTRLSPKKIIEKWVDFARRLCEHKYGNAPRVRINGHVAARFPFIPMPLDYILPELLKNAMRISDRGGGIAHKDLDRVMDYHFTTAEASTQDPRISPLFGHLDMHSGAQSGPMHG

SEQ ID NO: 742049 - protein, 209 aa, Homo sapiens
MLATHHLALHEDKPDFVGIICTRLSPKKIIEKWVDFARRLCEHKYGNAPRVRINGHVAARFPFIPMPLDYILPELLKNAMRATMESHLDTPYNVPDVVITIANNDVDLIIRISDRGGGIAHKDLDRVMDYHFTTAEASTQDPRISPLFGHLDMHSGAQSGPMHGGQGGSPMLPRAWFFETSWAEGGLLLGIPGRAGHSGVGHLLLKLFF

SEQ ID NO: 742050 - protein, 228 aa, Homo sapiens
MILASVLRSGPGGGLPLRPLLGPALALRARSTSATDTHHVEMARERSKTVTSFYNQSAIDAAAEKPSVRLTPTMMLYAGRSQDGSHLLKSARYLQQELPVRIAHRIKGFRCLPFIIGCNPTILHVHELYFPVAFQEGWTEFQFGLKEPGGEVQYVPAVSKLLVNPGCGGLCARASGEGNIRDETYVFGKRLDGRCGHSQEEIEIVPEGGALTCFSPLSSGQHFLPVRS

SEQ ID NO: 742051 - protein, 151 aa, Homo sapiens
MILASVLRSGPGGGLPLRPLLGPALALRARSTSATDTHHVEMARERSKTVTSFYNQSAIDAAAEKPSVRLTPTMMLYAGRSQDGSHLLKSARYLQQELPVRIAHRIKGFRCLPFIIGCNPTILHVHELYIRAFQKLTDFPPIKDMRTRPVL

SEQ ID NO: 742052 - protein, 58 aa, Homo sapiens
MFVLCTRAVRTLALLSLLLLLLFSASSVLYDSTEEVDSIGRFHSYSSHKFPEVLPSSV

SEQ ID NO: 742053 - protein, 365 aa, Homo sapiens
MILASVLRSGPGGGLPLRPLLGPALALRARSTSATDTHHVEMARERSKTVTSFYNQSAIDAAAEKPSVRLTPTMMLYAGRSQDGSHLLKSARYLQQELPVRIAHRIKGFRCLPFIIGCNPTILHVHELYIRAFQKLTDFPPIKDQADEAQYCQLVRQLLDDHKDVVTLLAEGLRESRKHIEDEKLVRYFLDKTLTSRLGIRMLATHHLALHEDKPDFVGIICTRLSPKKIIEKWVDFARRLCEHKYGNAPRVRINGHVAARFPFIPMPLDYILPELLKNAMRATMESHLDTPYNVPDVVITIANNDVDLIIRISDRGGGIAHKDLDRVMDYHFTTAEASTQDPRISPLFGHLDMHSGAQSGPMHG

SEQ ID NO: 742054 - protein, 482 aa, Homo sapiens
MILASVLRSGPGGGLPLRPLLGPALALRARSTSATDTHHVEMARERSKTVTSFYNQSAIDAAAEKPSVRLTPTMMLYAGRSQDGSHLLKSARYLQQELPVRIAHRIKGFRCLPFIIGCNPTILHVHELYIRAFQKLTDFPPIKDQADEAQYCQLVRQLLDDHKDVVTLLAEGLRESRKHIEDEKLVRYFLDKTLTSRLGIRMLATHHLALHEDKPDFVGIICTRLSPKKIIEKWVDFARRLCEHKYGNAPRVRINGHVAARFPFIPMPLDYILPELLKNAMRATMESHLDTPYNVPDVVITIANNDVDLIIRISDRGGGIAHKDLDRVMDYHFTTAEASTQDPRISPLFGHLDMHSGAQSGPMHGCSPCRALARTSTCGSATSMAGRKASGSDPTAFGLLTRPAWAAFPAGPPGSGRAAPCSTHCCILGLRDPDRWTYMELGTALPQQGPLPPRLQNLEQGSGHPEASSTSSVILVPGEPPL

SEQ ID NO: 742055 - protein, 365 aa, Homo sapiens; identical to SEQ ID NO: 742053

SEQ ID NO: 742056 - protein, 82 aa, Homo sapiens
TVGVVGRGRPGLGRPMHRWRDGAGSVDSDPYNFLFPAPVDGSCSPRAEPVSILDAPWSLKSEKSPYPPTPPCPILGRLGPQS

SEQ ID NO: 742057 - protein, 68 aa, Homo sapiens
WLVEPGVNRPRTVEPSLGAGPGSARDGSCSPRAEPVSILDAPWSLKSEKSPYPPTPPCPILGRLGPQS

SEQ ID NO: 742058 - protein, 136 aa, Homo sapiens
GATPAYSVRGGPAAHVRSLHHSAGAQTGLASTIWGASGPNQVTRVGGPAGDSVPHPPKPAPGAQAGVARSLAALPGPGFEGAGQAGAAPPPEKDGSCSPRAEPVSILDAPWSLKSEKSPYPPTPPCPILGRLGPQS

SEQ ID NO: 742059 - protein, 87 aa, Homo sapiens; identical to SEQ ID NO: 742046

SEQ ID NO: 742060 - protein, 413 aa, Homo sapiens
MILASVLRSGPGGGLPLRPLLGPALALRARSTSATDTHHVEMARERSKTVTSFYNQSAIDAAAEKPSVRLTPTMMLYAGRSQDGSHLLKSARYLQQELPVRIAHRIKGFRCLPFIIGCNPTILHVHELYIRAFQKLTDFPPIKDQADEAQYCQLVRQLLDDHKDVVTLLAEGLRESRKHIEDEKLVRYFLDKTLTSRLGIRMLATHHLALHEDKPDFVGIICTRLSPKKIIEKWVDFARRLCEHKYGNAPRVRINGHVAARFPFIPMPLDYILPELLKNAMRATMESHLDTPYNVPDVVITIANNDVDLIISTSMAGRKASGSDPTAFGLLTRPAWAAFPAGPPGSGRAAPCSTHCCILGLRDPDRWTYMELGTALPQQGPLPPRLQNLEQGSGHPEASSTSSVILVPGEPPL

SEQ ID NO: 742061 - protein, 282 aa, Homo sapiens
MILASVLRSGPGGGLPLRPLLGPALALRARSTSATDTHHVEMARERSKTVTSFYNQSAIDAAAEKPSVRLTPTMMLYAGRSQDGSHLLKSARYLQQELPVRIAHRIKGFRCLPFIIGCNPTILHVHELYIRAFQKLTDFPPIKDQADEAQYCQLVRQLLDDHKDVVTLLAEGLRESRKHIEDEKLVRYFLDKTLTSRLGIRMLATHHLALHEDKPDFVGIICTRLSPKKIIEKWVDFARRLCEHKYGNAPRVRINGHVAARFPHPEASSTSSVILVPGEPPL

SEQ ID NO: 742062 - protein, 239 aa, Homo sapiens
MILASVLRSGPGGGLPLRPLLGPALALRARSTSATDTHHVEMARERSKTVTSFYNQSAIDAAAEKPSVRLTPTMMLYAGRSQDGSHLLKSARYLQQELPVRIAHRIKGFRCLPFIIGCNPTILHVHELYIRAFQKLTDFPPIKDQADEAQYCQLVRQLLDDHKDVVTLLAEGLRESRKHIEDEKLVRYFLDKTLTSRLGIRMLATHHLALHEDKPDFVGIICTRLSPKKIIEKWVDFAR

SEQ ID NO: 742063 - protein, 93 aa, Homo sapiens
QLPGPSGRCRPRDVTAAEGAGGWAPGEWTVRALPLGPGPWLRPRDGSCSPRAEPVSILDAPWSLKSEKSPYPPTPPSSLCHWTTSCRSCSRMP

SEQ ID NO: 742064 - protein, 143 aa, Homo sapiens
MILASVLRSGPGGGLPLRPLLGPALALRARSTSATDTHHVEMARERSKTVTSFYNQSAIDAAAEKPSVRLTPTMMLYAGRSQDGSHLLKSARYLQQELPVRIAHRIKGFRCLPFIIGCNPTILHVHELYIRAFQKLTDFPPAP

SEQ ID NO: 742065 - protein, 143 aa, Homo sapiens; identical to SEQ ID NO: 742064

SEQ ID NO: 742066 - protein, 125 aa, Homo sapiens
GSGSKGVAWMRGRPGRHVLRPNYNSQDPAGAAAHATSRRRRAQAAGRLASGLFEPFRWDPGPGSGPAVSGATPAYSVRGGPAAHVRSLHHSAGAQTGLASTIWGASGPNQVTRVGGPAGDSVPHP

SEQ ID NO: 742067 - protein, 312 aa, Homo sapiens [sequence omitted]

SEQ ID NO: 742068 - protein, 138 aa, Homo sapiens
GIRAGGESERDAQYEKLRDGDEKNFYELNIGEYSGTAGDSLAGNFHPEVQWWASHQRMKFSTWDRDHDNYEGNCAEEDQSGWWFNRCHSANLNGVYYSGPYTAKTDNGIVWYTWHGWWYSLKSVVMKIRPNDFIPNVI

SEQ ID NO: 742069 - protein, 312 aa, Homo sapiens [sequence omitted]

SEQ ID NO: 742070 - protein, 312 aa, Homo sapiens [sequence omitted]

SEQ ID NO: 742071 - protein, 312 aa, Homo sapiens [sequence omitted]

SEQ ID NO: 742072 - protein, 264 aa, Homo sapiens
MAKVFSFILVTTALTMGREISALEDCAQEQMRLRAQVRLLETRVKQQQVKIKQLLQENEVQFLDKGDENTVVDLGSKRQYADCSEIFNDGYKLSGFYKIKPLQSPAEFSVYCDMSDGGGWTVIQRRSDGSENFNRGWKDYENGFGNFVQKHGEYWLGNKNLHFLTTQEDYTLKIDLADFEKNSRYAQYKNFKVGDEKNFYELNIGEYSGTAGDSLAGNFHPEVQWWASHQRMKFSTWDRDHDNYEGNCAEEDQSGWWFNRFDVL

SEQ ID NO: 742073 - protein, 312 aa, Homo sapiens [sequence omitted]

SEQ ID NO: 742074 - protein, 312 aa, Homo sapiens [sequence omitted]

SEQ ID NO: 742075 - protein, 312 aa, Homo sapiens
MAKVFSFILVTTALIMGREISALEDCAQEQMRLRAQVRLLETRVKQQQVKIKQLLQENEVQFLDKGDENTVVDLGSKRQYADCSEIFNDGYKLSGFYKIKPLQSPAEFSVYCDMSDGGGWTVIQRRSDGSENFNRGWKDYENGFGNFVQKHGEYWLGNKNLHFLTTQEDYTLKIDLADFEKNSRYAQYKNFKVGDEKNFYELNIGEYSGTAGDSLAGNFHPEVQWWASHQRMKFSTWDRDHDNYEGNCAEEDQSGWWFNRCHSANLNGVYYSGPYTAKTDNGIVWYTWHGWWYSLKSVVMKIRPNDFIPNVI

SEQ ID NO: 742076 - protein, 282 aa, Homo sapiens
MRLRAQVRLLETRVKQQQVKIKQLLQENEVQFLDKGDENTVVDLGSKRQYADCSEIFNDGYKLSGFYKIKPLQSPAEFSVYCDMSDGGGWTVIQRRSDGSENFNRGWKDYENGFGNFVQKHGEYWLGNKNLHFLTTQEDYTLKIDLADFEKNSRYAQYKNFKVGDEKNFYELNIGEYSGTAGDSLAGNFHPEVQWWASHQRMKFSTWDRDHDNYEGNCAEEDQSGWWFNRCHSANLNGVYYSGPYTAKTDNGIVWYTWHGWWYSLKSVVMKIRPNDFIPNVI

SEQ ID NO: 742077 - protein, 312 aa, Homo sapiens; identical to SEQ ID NO: 742075

SEQ ID NO: 742078 - protein, 240 aa, Homo sapiens
MLHYLVLKTDCSEIFNDGYKLSGFYKIKPLQSPAEFSVYCDMSDGGGWTVIQRRSDGSENFNRGWKDYENGFGNFVQKHGEYWLGNKNLHFLTTQEDYTLKIDLADFEKNSRYAQYKNFKVGDEKNFYELNIGEYSGTAGDSLAGNFHPEVQWWASHQRMKFSTWDRDHDNYEGNCAEEDQSGWWFNRCHSANLNGVYYSGPYTAKTDNGIVWYTWHGWWYSLKSVVMKIRPNDFIPNVI

SEQ ID NO: 742079 - protein, 312 aa, Homo sapiens [sequence omitted]

SEQ ID NO: 742080 - protein, 349 aa, Homo sapiens
MVSTQSAHYRILGSRVSGWNLSWVSDSLLTLVFSRGNMAKVFSFILVTTALIMGREISALEDCAQEQMRLRAQVRLLETRVKQQQVKIKQLLQENEVQFLDKGDENTVVDLGSKRQYADCSEIFNDGYKLSGFYKIKPLQSPAEFSVYCDMSDGGGWTVIQRRSDGSENFNRGWKDYENGFGNFVQKHGEYWLGNKNLHFLTTQEDYTLKIDLADFEKNSRYAQYKNFKVGDEKNFYELNIGEYSGTAGDSLAGNFHPEVQWWASHQRMKFSTWDRDHDNYEGNCAEEDQSGWWFNRCHSANLNGVYYSGPYTAKTDNGIVWYTWHGWWYSLKSVVMKIRPNDFIPNVI

SEQ ID NO: 742081 - protein, 312 aa, Homo sapiens; identical to SEQ ID NO: 742075

SEQ ID NO: 742082 - protein, 282 aa, Homo sapiens; identical to SEQ ID NO: 742076

SEQ ID NO: 742083 - protein, 294 aa, Homo sapiens
MAKVFSFILVTTALIMGREISALEDCAQEQMRLRAQVRLLETRVKQQQVKIKQLLQENEVQFLDKGDENTVVDLGSKRQYADCSEIFNDGYKLSGFYDGGGWTVIQRRSDGSENFNRGWKDYENGFGNFVQKHGEYWLGNKNLHFLTTQEDYTLKIDLADFEKNSRYAQYKNFKVGDEKNFYELNIGEYSGTAGDSLAGNFHPEVQWWASHQRMKFSTWDRDHDNYEGNCAEEDQSGWWFNRCHSANLNGVYYSGPYTAKTDNGIVWYTWHGWWYSLKSVVMKIRPNDFIPNVI

SEQ ID NO: 742084 - protein, 1227 aa, Homo sapiens
RGQIPGGGEGPQKTLPDHAVPAAFPATDSTSEGKSVRHPKPSTSESKQSTPSETQTVGAHVLQVCSEHTSHSAHPEPALNLTLASKEIPSKLEAQLGQGKGEAKLDLKYVPPRRVEQEGKAAQEGYLGCHKEENLSALEGRDPCGEAHPEATDALGHLLNSDLHHLGVGRGNCEEKRGVNPGEQDSLHTTPKQGSASLGGADNQPTGKISPCAGEKLGERTSSSFSPGDSHVAFIPNNLTDSKPLDVIEEERRLGSGNKDSVMVLVFNPSVGENKTEVPEPLDPQSGRSEARESKEVTTSVAENRNLLENADKIESTSARADSVLNIPAPLHPETTVNMTYQPTTPSSSFQDVSVFGMDAGSPLVVPPPTDSARLLNTSPKVPDKNTCPSGIPKPVFTHSKDTPSSQEGMENYQVEKTEERTETKPIIMPKPKHVRPKIITYIRRNPQALGQVDASLVPVGLPYAPPTCTMPLPHEEKAAGGDLKPSANLYEKFKPDLQKPRVFSSGLMVSGIKPPGHPFSQMSEKFLQEVTDHPGKEEFCSPPYAHYEVPPTFYRSAMLLKPQLGLGAMSRLPSAKSRILIASQRSSASAIHPPGPITTATSLYSSDPSDLKKASSSNAAKSNLPKSGLRPPGYSRLPAAKLAAFGFVRSSSVSSVSSTQSGDSAQPEQGRPATRSTFGNEEQPVLKASLPSKDTPKGAGRVAPPASSSVTAPRRSLLPAPKSTSTPAGTKKDAPKDQDTNKPAVSSPKRVAASTTKLHSPGYPKQRTAAARNGFPPKPDPQAREAERQLVLRLKERCEQQTRQLGVAQGELKRAICGFDALAVATQHFFRKNESALVKEKELSIELANIRDEVAFHTAKCEKLQKEKEELERRFEDEVKRLGWQQQAELQELEERLQLQFEAEMARLQEEHGDQLLSIRCQHQEQVEDLTASHDAALLEMENNHTVAITILQDDHDHKVQELMSTHELEKKELEENFEKLRLSLQDQVDTLTFQSQSLRDRARRFEEALRKNTEEQLEIALAPYQHLEEDMKSLKQVLEMKNQQIHEQEKKILELEKLAEKNIILEEKIQVLQQQNEDLKARIDQNTVVTRQLSEENANLQEYVEKETQEKKRLAEPMKSCFGSSKLGTRPVRLNSRPHLPFTAAPPRGPPLRPESAQHPDDATTRPAGAPASRPPVSTLREHRPGAAGAGPVRMLSSCECILGASSSDPRVRLPWCRHLGMCKW

SEQ ID NO: 742085 - protein, 348 aa, Homo sapiens
MGHCCCKPYNCLQCLDKTNESALVKEKELSIELANIRDEVAFHTAKCEKLQKEKEELERRFEDEVKRLGWQQQAELQELEERLQLQFEAEMARLQEEHGDQLLSIRCQHQEQVEDLTASHDAALLEMENNHTVAITILQDDHDHKVQELMSTHELEKKELEENFEKLRLSLQDQVDTLTFQSQSLRDRARRFEEALRKNTEEQLEIALAPYQHLEEDMKSLKQVLEMKNQQIHEQEKKILELEKLAEKNIILEEKIQVLQQQNEDLKARIDQNTVVTRQLSEENANLQEYVEKETQEKKRLSRTNEELLWKLQTGDPTSPIKLSPTSPVYRGSSSGPSSPARVSTTPR

SEQ ID NO: 742086 - protein, 91 aa, Homo sapiens
HGNKLNYIQRSVFYVKANECPYNPQEDTRYDLPLDWMLRRFAAASEDEGALEQRQGSSKARTMPSSHPRLSNLRHGAQAYPGNPTWRVAPD

SEQ ID NO: 742087 - protein, 314 aa, Homo sapiens
MKMSFALTFRSAKGRWIANPSQPCSKASIGLFVPASPPLDPEKVKELQRFITLSKRLLVMTGAGISTESGIPDYRSEKVGLYARTDRRPIQHGDFVRSAPIRQRYWARNFVGWPQFSSHQPNPAHWALSTWEKLGKLYWLVTQNVDALHTKAGSRRLTELHGCMDRVLCLDCGEQTPRGVLQERFQVLNPTWSAEAHGLAPDGDVFLSEEQVRSFQVPTCVQCGGHLKPDVVFFGDTVNPDKVDFVHKRVKEADSLLVVGSSLQVYSGYRFILTAWEKKLPIAILNIGPTRSDDLACLKLNSRCGELLPLIDPC

SEQ ID NO: 742088 - protein, 121 aa, Homo sapiens
PCSSLPINQLPISQRMKMSFALTFRSAKGRWIANPSQPCSKASIGLFVPASPPLDPEKVKELQRFITLSKRLLVMTGAGISTESGIPDYRGASPELSGPNLRSMWRPSETRCRFLRGHSEP

SEQ ID NO: 742089 - protein, 243 aa, Homo sapiens
VRESLSSPCSRSIVLYRKEIKEALLALGSLESWITAGEHAKEGECPPDKNPCKELCQGDELCPAEQKCCTTGCGRICRDIPKGRKRDCPRVIRKQSCLKRCITDETCPGVKKCCTLGCNKSCVVPISKQKLAEFGGECPADPLPCEELCDGDASCPQGHKCCSTGCGRTCLGDIEGGRGGDCPKVLVGLCIVGCVMDENCQAGEKCCKSGCGRFCVPPVLPPKLTMNPNWTVRSDSELEIPVP

SEQ ID NO: 742090 - protein, 88 aa, Homo sapiens
SARKRDAGAAGLPWEPNRRASPRTVTLRGLQKRENALPIRTHAKSCARAMNCVRLNRSAAPQAVVGSAETFLRGGKEIALGLFGNNPV

SEQ ID NO: 742091 - protein, 101 aa, Homo sapiens
SARKRDAGAAGLPWEPNRRASPRTVTLRGLQKRENALPIRTHAKSCARAMNCVRLNRSAAPQAVVGSAETFLRVCWHEGQNLGILSDIASGIDGSRELPTF

SEQ ID NO: 742092 - protein, 136 aa, Homo sapiens
SARKRDAGAAGLPWEPNRRASPRTVTLRGLQKRENALPIRTHAKSCARAMNCVRLNRSAAPQAVVGSAETFLRQSLVVNVPLTPFRVRSCVMGMHPVPRGINAAAPAVAAPASETLREGGAVIVQKFWWACALLAV

SEQ ID NO: 742093 - protein, 140 aa, Homo sapiens
TAFKILFFLLGVAFNIFPSGITCHHSIQFWCDCFLCSSRVLTAQITCGAFPAPQRAPHSPSTQCVLLPGKPLSLSASFSRGSRCADFQLHSFVFGITFTAFSFYSKTPFNIPFYDQPGQHGETPSLLKIQKLARHGGTCL

SEQ ID NO: 742094 - protein, 155 aa, Homo sapiens
MAKSERRIYSMESMAPEISEDIGCPLAYMRESVCALLINQSFFSCVAEMYIPDMNRPGKAERRAEKGLRPPRKLVGETRRLQSWPTLARWLRRVSFSLYKPPIQAAPEPDPGNWAKSPRLSLGPEGITKGKHGFKFQGIKEKFNVSKKVLKMTFL

SEQ ID NO: 742095 - protein, 158 aa, Homo sapiens
LCLLDQFDACARSGLSEPRSLTLRVPSCGKPLPGPGARLGREVTPCLSFAFAWCWLKMCQEEQTSYMVVQTSEEGLAADAELPGPLLMLAQNCAVMHNLLGPACIFLRKGFAENRQPVRKLAQWSPLNLASQGVRRCWDEEGVYTELTPPTYESDPQS

SEQ ID NO: 742096 - protein, 104 aa, Homo sapiens
MRSSHSTASSRASASTWPHWEPGPDLGLLEKVSPLGTLKDRLVGFVVDFIYSCPNPVFLVSIRPRGRCKEFANRACMTYFLGHGKLFLPPFYPLLQPELPSFFS

SEQ ID NO: 742097 - protein, 434 aa, Homo sapiens
GSGGSRSSAQRLGVAARICQGTSLPRLWQRDPVGIEIQLTRCLFPVMDKLDANVSSEEGFGSVEKVVLLTFLSTVILMAILGNLLVMVAVCWDRQLRKIKTNYFIVSLAFADLLVSVLVMPFGAIELVQDIWIYGEVFCLVRTSLDVLLTTASIFHLCCISLDRYYAICCQPLVYRNKMTPLRIALMLGGCWVIPTFISFLPIMQGWNNIGIIDLIEKRKFNQNSNSTYCVFMVNKPYAITCSVVAFYIPFLLMVLAYYRIYVTAKEHAHQIQMLQRAGASSESRPQSADQHSTHRMRTETKAAKTLCIIMGCFCLCWAPFFVTNIVDPFIDYTVPGQVWTAFLWLGYINSGLNPFLYAFLNKSFRRAFLIILCCDDERYRRPSILGQTVPCSTTTINGSTHVLRDAVECGGQWESQCHPPATSPLVAAQPSDT

SEQ ID NO: 742098 - protein, 387 aa, Homo sapiens
MDKLDANVSSEEGFGSVEKVVLLTFLSTVILMAILGNLLVMVAVCWDRQLRKIKTNYFIVSLAFADLLVSVLVMPFGAIELVQDIWIYGEVFCLVRTSLDVLLTTASIFHLCCISLDRYYAICCQPLVYRNKMTPLRIALMLGGCWVIPTFISFLPIMQGWNNIGIIDLIEKRKFNQNSNSTYCVFMVNKPYAITCSVVAFYIPFLLMVLAYYRIYVTAKEHAHQIQMLQRAGASSESRPQSADQHSTHRMRTETKAAKTLCIIMGCFCLCWAPFFVTNIVDPFIDYTVPGQVWTAFLWLGYINSGLNPFLYAFLNKSFRRAFLIILCCDDERYRRPSILGQTVPCSTTTINGSTHVLRYTVLHRGHHQELEKLPIHNDPESLESCF

SEQ ID NO: 742099 - protein, 359 aa, Homo sapiens
MDKLDANVSSEEGFGSVEKVVLLTFLSTVILMAILGNLLVMVAVCWDRQLRKIKTNYFIVSLAFADLLVSVLVMPFGAIELVQDIWIYGEVFCLVRTSLDVLLTTASIFHLCCISLDRYYAICCQPLVYRNKMTPLRIALMLGGCWVIPTFISFLPIMQGWNNIGIIDLIEKRKFNQNSNSTYCVFMVNKPYAITCSVVAFYIPFLLMVLAYYRIYVTAKEHAHQIQMLQRAGASSESRPQSADQHSTHRMRTETKAAKTLCIIMGCFCLCWAPFFVTNIVDPFIDYTVPGQVWTAFLWLGYINSGLNPFLYAFLNKSFRRAFLIILCCDDERYRRPSILGQTVPCSTTTINGSTHVLR

SEQ ID NO: 742100 - protein, 384 aa, Homo sapiens
MDKLDANVSSEEGFGSVEKVVLLTFLSTVILMAILGNLLVMVAVCWDRQLRKIKTNYFIVSLAFADLLVSVLVMPFGAIELVQDIWIYGEVFCLVRTSLDVLLTTASIFHLCCISLDRYYAICCQPLVYRNKMTPLRIALMLGGCWVIPTFISFLPIMQGWNNIGIIDLIEKRKFNQNSNSTYCVFMVNKPYAITCSVVAFYIPFLLMVLAYYRIYVTAKEHAHQIQMLQRAGASSESRPQSADQHSTHRMRTETKAAKTLCIIMGCFCLCWAPFFVTNIVDPFIDYTVPGQVWTAFLWLGYINSGLNPFLYAFLNKSFRRAFLIILCCDDERYRRPSILGQTVPCSTTTINGSTHVLSSGTETDRKKLWNKEEKIDQTIQMPK

SEQ ID NO: 742101 - protein, 388 aa, Homo sapiens
MDKLDANVSSEEGFGSVEKVVLLTFLSTVILMAILGNLLVMVAVCWDRQLRKIKTNYFIVSLAFADLLVSVLVMPFGAIELVQDIWIYGEVFCLVRTSLDVLLTTASIFHLCCISLDRYYAICCQPLVYRNKMTPLRIALMLGGCWVIPTFISFLPIMQGWNNIGIIDLIEKRKFNQNSNSTYCVFMVNKPYAITCSVVAFYIPFLLMVLAYYRIYVTAKEHAHQIQMLQRAGASSESRPQSADQHSTHRMRTETKAAKTLCIIMGCFCLCWAPFFVTNIVDPFIDYTVPGQVWTAFLWLGYINSGLNPFLYAFLNKSFRRAFLIILCCDDERYRRPSILGQTVPCSTTTINGSTHVLRDAVECGGQWESQCHPPATSPLVAAQPSDT

SEQ ID NO: 742102 - protein, 378 aa, Homo sapiens
MDKLDANVSSEEGFGSVEKVVLLTFLSTVILMAILGNLLVMVAVCWDRQLRKIKTNYFIVSLAFADLLVSVLVMPFGAIELVQDIWIYGEVFCLVRTSLDVLLTTASIFHLCCISLDRYYAICCQPLVYRNKMTPLRIALMLGGCWVIPTFISFLPIMQGWNNIGIIDLIEKRKFNQNSNSTYCVFMVNKPYAITCSVVAFYIPFLLMVLAYYRIYVTAKEHAHQIQMLQRAGASSESRPQSADQHSTHRMRTETKAAKTLCIIMGCFCLCWAPFFVTNIVDPFIDYTVPGQVWTAFLWLGYINSGLNPFLYAFLNKSFRRAFLIILCCDDERYRRPSILGQTVPCSTTTINGSTHVLSGCSPVSSFLLLFCNRPVPV

SEQ ID NO: 742103 - protein, 360 aa, Homo sapiens
MDKLDANVSSEEGFGSVEKVVLLTFLSTVILMAILGNLLVMVAVCWDRQLRKIKTNYFIVSLAFADLLVSVLVMPFGAIELVQDIWIYGEVFCLVRTSLDVLLTTASIFHLCCISLDRYYAICCQPLVYRNKMTPLRIALMLGGCWVIPTFISFLPIMQGWNNIGIIDLIEKRKFNQNSNSTYCVFMVNKPYAITCSVVAFYIPFLLMVLAYYRIYVTAKEHAHQIQMLQRAGASSESRPQSADQHSTHRMRTETKAAKTLCIIMGCFCLCWAPFFVTNIVDPFIDYTVPGQVWTAFLWLGYINSGLNPFLYAFLNKSFRRAFLIILCCDDERYRRPSILGQTVPCSTTTINGSTHVLRF

SEQ ID NO: 742104 - protein, 138 aa, Homo sapiens
HTDTNSTSTASQRHGVGTVRRFKKAPQGASHGSGQETLVSCRLRVASRASGATVVRLLGVMSPGRREARTACVQDSTSWAELGSSGALSRQKVWPKEAAALSVGNVFLTGVGQKVWPKEAAALSVGDVSPTGIFTVGV

SEQ ID NO: 742105 - protein, 206 aa, Homo sapiens
MFPAAAAGAARARGAACGALGCPAERGGGLAGRRGLCAAPGTLNPSPGLCLLRCFRGDGQGAPGRRRARAGRRGAWSLARTLRSEGKARTKKDQMAKQPSDVSSECDREGRQLQPAERPPQLRPGAPTSLQTEPQDRSPAPMSCDKSTQTPSPPCQAFNHYLSAMVVILEDIGDLSLCFGFIFTGLDLYGHHHSQDTEQLNHKDFS

SEQ ID NO: 742106 - protein, 138 aa, Homo sapiens
MAKQPSDVSSECDREGRQLQPAERPPQLRPGAPTSLQTEPQDRSPAPMSCDKSTQTPSPPCQAFNHYLSAMASMRQAEPADMRPEIWIAQELRRIGDEFNAYYARRVFLNNYQAAEDHPRMVILRLLRYIVRLVWRMH

SEQ ID NO: 742107 - protein, 198 aa, Homo sapiens
MAKQPSDVSSECDREGRQLQPAERPPQLRPGAPTSLQTEPQGNPEGNHGGEGDSCPHGSPQGPLAPPASPGPFATRSPLFIFMRRSSLLSRSSSGYFSFDTDRSPAPMSCDKSTQTPSPPCQAFNHYLSAMASMRQAEPADMRPEIWIAQELRRIGDEFNAYYARRVFLNNYQAAEDHPRMVILRLLRYIVRLVWRMH

SEQ ID NO: 742108 - protein, 96 aa, Homo sapiens
PPGLQFVGALRPAPLPLPPPPPPPPPPPPPPLPPLILAATLRTLPHCDRIIAVFGSLRSRRHRLGALSWPLFPQMSDSDSRTEKRKKKRPNGKATF

SEQ ID NO: 742109 - protein, 247 aa, Homo sapiens [sequence omitted]

SEQ ID NO: 742110 - protein, 216 aa, Homo sapiens
MTSAVPVANSVLVVAPHNGYPVTPGIMSHVPLYPNSQPQVHLVPGNPPSLVSNVNGQPVQKALKEGKTLGAIQIIIGLAHIGLGSIMATVLVGEYLSISFYGGFPFWGGLWFIISGSLSVAAENQPYSYCLLSGSLGLNIVSAICSAVGVILFITDLSIPHPYAYPDYYPYAWGVIVPLRMHFLAASTKQMFNNHLLNGEEGEEKGLRRGLSRREN

SEQ ID NO: 742111 - protein, 247 aa, Homo sapiens [sequence omitted]

SEQ ID NO: 742112 - protein, 103 aa, Homo sapiens
REGVFHWCNGLAPPGPGRTSDLPSPGFLRLQDQLGRVKRGEGVEGQVRSQSCPGRPPSLSTSSSREPAAHTLLNAGHPRRLLGFEEQTFFPGLSAFCPNFICF

SEQ ID NO: 742113 - protein, 104 aa, Homo sapiens
MGGSLCCCGEGEGFFYRQNWRFLSLDSWDLIQAAHSTHSAIQLYSMHSGISHLLRKDLSFEKGVKPVAAELPGESSEQVIAIVEVSSRLYFGAITSSTVSCLVS

SEQ ID NO: 742114 - protein, 136 aa, Homo sapiens
MGGSLCCCGEGEGFFYRQNWRFLSLDSWDLIQAAHSTHSAIQLYSMHSGISHLLRKDLSFEKVARDPLLRRLRRNTRDDSDTQQLKAEVQAEEKGVKPVAAELPGESSEQVIAIVEVSSRLYFGAITSSTVSCLVS

SEQ ID NO: 742115 - protein, 101 aa, Homo sapiens
CGGLLGSWLGHRLGREGREDGEPGLRWHQNPASASPGLQEQQRLRPWVCQSPQATWKYETCWAAGETMEMRLEAREDPLQEKGGVGEKQAGGSGWPATKAL

SEQ ID NO: 742116 - protein, 115 aa, Homo sapiens
KPRLSTPCPILSPRLLGEKRQELLAQANKLRTGLFKIDETREKVQVMSLELEDAKKKVAEFQKQCEEYLVIIVQQKREADEQQKVQGPRPPPVPHSHQCRLLRQGTHVPPFLNFL

SEQ ID NO: 742117 - protein, 626 aa, Homo sapiens
GRASRAPALRVGFFSPSCVGRGGAFRVPRSSTRAGAEGRGVAAAAGGSRFSLRPEPEAPGPGEPGGGRASGPGGGWGMARTLRPSPLCPGGGKAQLSSASLLGAGLLLQPPTPPPLLLLLFPLLLFSRLCGALAGPIIVEPHVTAVWGKNVSLKCLIEVNETITQISWEKIHGKSSQTVAVHHPQYGFSVQGEYQGRVLFKNYSLNDATITLHNIGFSDSGKYICKAVTFPLGNAQSSTTVTVLVEPTVSLIKGPDSLIDGGNETVAAICIAATGKPVAHIDWEGDLGEMESTTTSFPNETATIISQYKLFPTRFARGRRITCVVKHPALEKDIRYSFILDIQYAPEVSVTGYDGNWFVGRKGVNLKCNADANPPPFKSVWSRLDGQWPDGLLASDNTLHFVHPLTFNYSGVYICKVTNSLGQRSDQKVIYISDPPTTTTLQPTIQWHPSTADIEDLATEPKKLPFPLSTLATIKDDTIATIIASVVGGALFIVLVSVLAGIFCYRRRRTFRGDYFAKNYIPPSDMQKESQIDVLQQDELDSYPDSVKKENKNPVNNLIRKDYLEEPEKTQWNNVENLNRFERPMDYYEDLKMGMKFVSDEHYDENEDDLVSHVDGSVISRREWYV

SEQ ID NO: 742118 - protein, 666 aa, Homo sapiens
AGESGARSESRFLFPLLRGAAVVRSEFPGVRRGRVPRGGEWRRRRAAPASASAVASATAVSRQPPAFGQVSAGSDGARAGSWGRARRTFHSLRPEPEAPGPGEPGGGRASGPGGGWGMARTLRPSPLCPGGGKAQLSSASLLGAGLLLQPPTPPPLLLLLFPLLLFSRLCGALAGPIIVEPHVTAVWGKNVSLKCLIEVNETITQISWEKIHGKSSQTVAVHHPQYGFSVQGEYQGRVLFKNYSLNDATITLHNIGFSDSGKYICKAVTFPLGNAQSSTTVTVLVEPTVSLIKGPDSLIDGGNETVAAICIAATGKPVAHIDWEGDLGEMESTTTSFPNETATIISQYKLFPTRFARGRRITCVVKHPALEKDIRYSFILDIQYAPEVSVTGYDGNWFVGRKGVNLKCNADANPPPFKSVWSRLDGQWPDGLLASDNTLHFVHPLTFNYSGVYICKVTNSLGQRSDQKVIYISDPPTTTTLQPTIQWHPSTADIEDLATEPKKLPFPLSTLATIKDDTIATIIASVVGGALFIVLVSVLAGIFCYRRRRTFRGDYFAKNYIPPSDMQKESQIDVLQQDELDSYPDSVKKENKNPVNNLIRKDYLEEPEKTQWNNVENLNRFERPMDYYEDLKMGMKFVSDEHYDENEDDLVSHVDGSVISRREWYV

SEQ ID NO: 742119 - protein, 666 aa, Homo sapiens; identical to SEQ ID NO: 742118

SEQ ID NO: 742120 - protein, 534 aa, Homo sapiens
AAARVAVRMAEGWRWCFVRRTPGLLRGPLLPRSFSGNPRALAGPIIVEPHVTAVWGKNVSLKCLIEVNETITQISWEKIHGKSSQTVAVHHPQYGFSVQGEYQGRVLFKNYSLNDATITLHNIGFSDSGKYICKAVTFPLGNAQSSTTVTVLVEPTVSLIKGPDSLIDGGNETVAAICIAATGKPVAHIDWEGDLGEMESTTTSFPNETATIISQYKLFPTRFARGRRITCVVKHPALEKDIRYSFILDIQYAPEVSVTGYDGNWFVGRKGVNLKCNADANPPPFKSVWSRLDGQWPDGLLASDNTLHFVHPLTFNYSGVYICKVTNSLGQRSDQKVIYISDPPTTTTLQPTIQWHPSTADIEDLATEPKKLPFPLSTLATIKDDTIATIIASVVGGALFIVLVSVLAGIFCYRRRRTFRGDYFAKNYIPPSDMQKESQIDVLQQDELDSYPDSVKKENKNPVNNLIRKDYLEEPEKTQWNNVENLNRFERPMDYYEDLKMGMKFVSDEHYDENEDDLVSHVDGSVISRREWYV

SEQ ID NO: 742121 - protein, 378 aa, Homo sapiens
MLFQSDIVILHSWRNETVAAICIAATGKPVAHIDWEGDLGEMESTTTSFPNETATIISQYKLFPTRFARGRRITCVVKHPALEKDIRYSFILDIQYAPEVSVTGYDGNWFVGRKGVNLKCNADANPPPFKSVWSRLDGQWPDGLLASDNTLHFVHPLTFNYSGVYICKVTNSLGQRSDQKVIYISDPPTTTTLQPTIQWHPSTADIEDLATEPKKLPFPLSTLATIKDDTIATIIASVVGGALFIVLVSVLAGIFCYRRRRTFRGDYFAKNYIPPSDMQKESQIDVLQQDELDSYPDSVKKENKNPVNNLIRKDYLEEPEKTQWNNVENLNRFERPMDYYEDLKMGMKFVSDEHYDENEDDLVSHVDGSVISRREWYV

SEQ ID NO: 742122 - protein, 641 aa, Homo sapiens
AGESGARSESRFLFPLLRGAAVVRSEFPGVRRGRVPRGGEWRRRRAAPASASAVASATAVSRQPPAFGQVSAGSDGARAGSWGRARRTFHSLRPEPEAPGPGEPGGGRASGPGGGWGMARTLRPSPLCPGGGKAQLSSASLLGAGLLLQPPTPPPLLLLLFPLLLFSRLCGALAGPIIVEPHVTAVWGKNVSLKCLIEVNETITQISWEKIHGKSSQTVAVHHPQYGFSVQGEYQGRVLFKNYSLNDATITLHNIGFSDSGKYICKAVTFPLGNAQSSTTVTVLVEPTVSLIKGPDSLIDGGNETVAAICIAATGKPVAHIDWEGDLGEMESTTTSFPNETATIISQYKLFPTRFARGRRITCVVKHPALEKDIRYSFILDIQYAPEVSVTGYDGNWFVGRKGVNLKCNADANPPPFKSVWSRLDGQWPDGLLASDNTLHFVHPLTFNYSGVYICKVTNSLGQRSDQKVIYISDPPTTTTLQPTIQWHPSTADIEDLATEPKKLPFPLSTLATIKDDTIATIIASVVGGALFIVLVSVLAGIFCYRRRRTFRGDYFAKNYIPPSDMQKESQIDVLQQDELDSYPDSVKKENKNSTRAEFGTSRTLQITPSTSLELGRFAGWLDPEERQQSLQVWLIGSHIH

SEQ ID NO: 742123 - protein, 420 aa, Homo sapiens
AGESGARSESRFLFPLLRGAAVVRSEFPGVRRGRVPRGGEWRRRRAAPASASAVASATAVSRQPPAFGQVSAGSDGARAGSWGRARRTFHSLRPEPEAPGPGEPGGGRASGPGGGWGMARTLRPSPLCPGGGKAQLSSASLLGAGLLLQPPTPPPLLLLLFPLLLFSRLCGALAGPIIVEPHVTAVWGKNVSLKCLIEVNETITQISWEKIHGKSSQTVAVHHPQYGFSVQGEYQGRVLFKNYSLNDATITLHNIGFSDSGKYICKAVTFPLGNAQSSTTVTVLVEPTVSLIKGPDSLIDGGNETVAAICIAATGKPVAHIDWEGDLGEMESTTTSFPNETATIISQYKLFPTRFARGRRITCVVKHPALEKDIRYSFILDIQYAPEVSVTGYDGNWFVGRKGVNLSTLGDQARQITRSD

SEQ ID NO: 742124 - protein, 666 aa, Homo sapiens; identical to SEQ ID NO: 742118

SEQ ID NO: 742125 - protein, 666 aa, Homo sapiens; identical to SEQ ID NO: 742118

SEQ ID NO: 742126 - protein, 666 aa, Homo sapiens; identical to SEQ ID NO: 742118

SEQ ID NO: 742127 - protein, 337 aa, Homo sapiens
MESTTTSFPNETATIISQYKLFPTRFARGRRITCVVKHPALEKDIRYSFILDIQYAPEVSVTGYDGNWFVGRKGVNLKCNADANPPPFKSVWSRLDGQWPDGLLASDNTLHFVHPLTFNYSGVYICKVTNSLGQRSDQKVIYISDPPTTTTLQPTIQWHPSTADIEDLATEPKKLPFPLSTLATIKDDTIATIIASVVGGALFIVLVSVLAGIFCYRRRRTFRGDYFAKNYIPPSDMQKESQIDVLQQDELDSYPDSVKKENKNPVNNLIRKDYLEEPEKTQWNNVENLNRFERPMDYYEDLKMGMKFVSDEHYDENEDDLVSHVDGSVISRREWYV

SEQ ID NO: 742128 - protein, 615 aa, Homo sapiens
AGESGARSESRFLFPLLRGAAVVRSEFPGVRRGRVPRGGEWRRRRAAPASASAVASATAVSRQPPAFGQVSAGSDGARAGSWGRARRTFHSLRPEPEAPGPGEPGGGRASGPGGGWGMARTLRPSPLCPGGGKAQLSSASLLGAGLLLQPPTPPPLLLLLFPLLLFSRLCGALAGPIIVEPHVTAVWGKNVSLKCLIEVNETITQISWEKIHGKSSQTVAVHHPQYGFSVQGEYQGRVLFKNYSLNDATITLHNIGFSDSGKYICKAVTFPLGNAQSSTTVTVLVEPTVSLIKGPDSLIDGGNETVAAICIAATGKPVAHIDWEGDLGEMESTTTSFPNETATIISQYKLFPTRFARGRRITCVVKHPALEKDIRYSFILDIQYAPEVSVTGYDGNWFVGRKGVNLKCNADANPPPFKSVWSRLDGQWPDGLLASDNTLHFVHPLTFNYSGVYICKVTNSLGQRSDQKVIYISDVPFKQTSSIAVAGAVIGAVLALFIIAIFVTVLLTPRKKRPSYLDKVMTFHPHINHLLCMKNDPHLGLRKTYFSLNTCLADSVSKKETVGNLQHSNGLNSRSLTMKMRIQLGKMAFSRCTPLYKSNVLPRTEPWKTQSKLRP

SEQ ID NO: 742129 - protein, 296 aa, Homo sapiens
VEGQSRALVIAQELLSSEKAYVEMLQHLNLDFHGAVMRALDDMDHEGRDTLAREELRQGLSELPAIHDLHQGILEELEERLSNWESQQKVADVFLAREQGFDHHATHILQFDRYLGLLSENCLHSPRLAAAVREFEQSVQGGSQTAKHRLLRVVQRLFQYQVLLTDYLNNLCPDSAEYDNTQGALSLISKVTDRANDSMEQGENLQKLVHIEHSVRGQGDLLQPGREFLKEGTLMKVTGKNRRPRHLFLMNDVLLYTYPQKDGKYRLKNTLAVANMKVSRPVMESAPYALKIETSE

SEQ ID NO: 742130 - protein, 260 aa, Homo sapiens
MRALDDMDHEGRDTLAREELRQGLSELPAIHDLHQGILEELEERLSNWESQQKVADVFLAREQGFDHHATHILQFDRYLGLLSENCLHSPRLAAAVREFEQSVQGGSQTAKHRLLRVVQRLFQYQVLLTDYLNNLCPDSAEYDNTQGALSLISKVTDRANDSMEQGENLQKLVHIEHSVRGQGDLLQPGREFLKEGTLMKVTGKNRRPRHLFLMNDVLLYTYPQKDGKYRLKNTLAVANMKVSRPVMESAPYALKIETSE

SEQ ID NO: 742131 - protein, 123 aa, Homo sapiens
MVTFLGGFDSHSLNPCVARGKEWVEEQSIMYVPCSVKLHFTKDKQNRGRSQICIYLRLGSGDGLYSPLVPYLGRPPGETWPLVAICLGTKGKTVFCDPASKLNFSLWYSEFGVPRCSFPFTDV

SEQ ID NO: 742132 - protein, 106 aa, Homo sapiens
GPMQGICVIQSTNPESEKPQLCPRERHCPYYSQQQTNLPLLQMEIQSLLCFKAVCYTNIFEKIVWNESCQCFCSENIWKPNIHKELSPTAADTNEQIELFSGQYNK

SEQ ID NO: 742133 - protein, 111 aa, Homo sapiens
TASWLQLSGPWRGRRGLGAVAWVSRRAEAEPGRRALPGLVESAGGLGVPCRVVLSCAAHLRPGHWGREQVCLVPVLGPTGCKEGPPGHGGACGAGWPGRRTGRGEQSFSGI

SEQ ID NO: 742134 - protein, 76 aa, Homo sapiens
AAAVKRDMDLVGADSSVGRAAVAGGPCENTHSDALAAAKAFGSSRRASSVPTLNPWYLCEMWVTPRPNSCSPGSGQ

SEQ ID NO: 742135 - protein, 70 aa, Homo sapiens
AAAVKRDMDLVGADSSVGRAAVAGGPCENTHSDALAAAKAFGSSCLALVSPTFHTGTRGYAWGHCWLSGC

SEQ ID NO: 742136 - protein, 782 aa, Homo sapiens
YSKADSLKQLILKTTTGITEKVLHGQEISVDVDFVTAQSKTMEVKPCPFRPYHSPLLVFKSYRFSPYYRTKEKLPLSSVSYSNMIEPDQCFCRFDLTGTCNDDDCQWQHIQDYTLSRKQLFQDILSYNLSLIGCAETSTNEEITASAEKYVEKLFGVNKDRMSMDQMAVLLVSNINESKGHTPPFTTYKDKRKWKPKFWRKPISDNSFSSDEEQSTGPIKYAFQPENQINVPALDTVVTPDDVRYFTNETDDIANLEASVLENPSHVQLWLKLAYKYLNQNEGECSESLDSALNVLARALENNKDNPEIWCHYLRLFSKRGTKDEVQEMCETAVEYAPDYQSFWTFLHLESTFEEKDYVCERMLEFLMGAAKQETSNILSFQLLEALLFRVQLHIFTGRCQSALAILQNALKSANDGIVAEYLKTSDRCLAWLAYIHLIEFNILPSKFYDPSNDNPSRIVNTESFVMPWQAVQDVKTNPDMLLAVFEDAVKACTDESLAVEERIEACLPLYTNMIALHQLLERYEAAMELCKSLLESCPINCQLLEALVALYLQTNQHDKARAVWLTAFEKNPQNAEVFYHMCKFFILQNRGDNLLPFLRKFIASFFKPGFEKYNNLDLFRYLLNIPGPIDIPSRLCKGNFDDDMFNHQVPYLWLIYCLCHPLQSSIKETVEAYEAALGVAMRCDIVQKIWMDYLVFANNRAAGSRNKVQEFKFFTDLVNRCLVTVPARYPIPFSSADYWSNYEFHNRVIFFYLSCVPKTQHSKTLERFCSVMPANSGLALR

SEQ ID NO: 742137 - protein, 816 aa, Homo sapiens
YSKADSLKQLILKTTTGITEKVLHGQEISVDVDFVTAQSKTMEVKPCPFRPYHSPLLVFKSYRFSPYYRTKEKLPLSSVSYSNMIEPDQCFCRFDLTGTCNDDDCQWQHIQDYTLSRKQLFQDILSYNLSLIGCAETSTNEEITASAEKYVEKLFGVNKDRMSMDQMAVLLVSNINESKGHTPPFTTYKDKRKWKPKFWRKPISDNSFSSDEEQSTGPIKYAFQPENQINVPALDTVVTPDDVRYFTNETDDIANLEASVLENPSHVQLWLKLAYKYLNQNEGECSESLDSALNVLARALENNKDNPEIWCHYLRLFSKRGTKDEVQEMCETAVEYAPDYQSFWTFLHLESTFEEKDYVCERMLEFLMGAAKQETSNILSFQLLEALLFRVQLHIFTGRCQSALAILQNALKSANDGIVAEYLKTSDRCLAWLAYIHLIEFNILPSKFYDPSNDNPSRIVNTESFVMPWQAVQDVKTNPDMLLAVFEDAVKACTDESLAVEERIEACLPLYTNMIALHQLLERYEAAMELCKSLLESCPINCQLLEALVALYLQTNQHDKARAVWLTAFEKNPQNAEVFYHMCKFFILQNRGDNLLPFLRKFIASFFKPGFEKYNNLDLFRYLLNIPGPIDIPSRLCKGNFDDDMFNHQVPYLWLIYCLCHPLQSSIKETVEAYEAALGVAMRCDIVQKIWMDYLVFANNRAAGSRNKVQEFKFFTDLVNRCLVTVPARYPIPFSSADYWSNYEFHNRVIFFYLSCVPKTQHSKTLERFCSVMPANSGLALRLLQHEWEESNVQILKLQAKMFTYNIPTCLATWKM

SEQ ID NO: 742138 - protein, 895 aa, Homo sapiens
YSKADSLKQLILKTTTGITEKVLHGQEISVDVDFVTAQSKTMEVKPCPFRPYHSPLLVFKSYRFSPYYRTKEKLPLSSVSYSNMIEPDQCFCRFDLTGTCNDDDCQWQHIQDYTLSRKQLFQDILSYNLSLIGCAETSTNEEITASAEKYVEKLFGVNKDRMSMDQMAVLLVSNINESKGHTPPFTTYKDKRKWKPKFWRKPISDNSFSSDEEQSTGPIKYAFQPENQINVPALDTVVTPDDVRYFTNETDDIANLEASVLENPSHVQLWLKLAYKYLNQNEGECSESLDSALNVLARALENNKDNPEIWCHYLRLFSKRGTKDEVQEMCETAVEYAPDYQSFWTFLHLESTFEEKDYVCERMLEFLMGAAKQETSNILSFQLLEALLFRVQLHIFTGRCQSALAILQNALKSANDGIVAEYLKTSDRCLAWLAYIHLIEFNILPSKFYDPSNDNPSRIVNTESFVMPWQAVQDVKTNPDMLLAVFEDAVKACTDESLAVEERIEACLPLYTNMIALHQLLERYEAAMELCKSLLESCPINCQLLEALVALYLQTNQHDKARAVWLTAFEKNPQNAEVFYHMCKFFILQNRGDNLLPFLRKFIASFFKPGFEKYNNLDLFRYLLNIPGPIDIPSRLCKGNFDDDMFNHQVPYLWLIYCLCHPLQSSIKETVEAYEAALGVAMRCDIVQKIWMDYLVFANNRAAGSRNKVQEFKFFTDLVNRCLVTVPARYPIPFSSADYWSNYEFHNRVIFFYLSCVPKTQHSKTLERFCSVMPANSGLALRLLQHEWEESNVQILKLQAKMFTYNIPTCLATWKIAIAAEIVLKGQREVHRLYQRALQKLPLCASLWKDQLLFEASEGGKTDNLRKLVSKCQEIGVSLNELLNLNSNKTESKNH

SEQ ID NO: 742139 - protein, 816 aa, Homo sapiens; identical to SEQ ID NO: 742137

SEQ ID NO: 742140 - protein, 604 aa, Homo sapiens
YSKADSLKQLILKTTTGITEKVLHGQEISVDVDFVTAQSKTMEVKPCPFRPYHSPLLVFKSYRFSPYYRTKEKLPLSSVSYSNMIEPDQCFCRFDLTGTCNDDDCQWQHIQDYTLSRKQLFQDILSYNLSLIGCAETSTNEEITASAEKYVEKLFGVNKDRMSMDQMAVLLVSNINESKGHTPPFTTYKDKRKWKPKFWRKPISDNSFSSDEEQSTGPIKYAFQPENQINVPALDTVVTPDDVRYFTNETDDIANLEASVLENPSHVQLWLKLAYKYLNQNEGECSESLDSALNVLARALENNKDNPEIWCHYLRLFSKRGTKDEVQEMCETAVEYAPDYQSFWTFLHLESTFEEKDYVCERMLEFLMGAAKQETSNILSFQLLEALLFRVQLHIFTGRCQSALAILQNALKSANDGIVAEYLKTSDRCLAWLAYIHLIEFNILPSKFYDPSNDNPSRIVNTESFVMPWQAVQDVKTNPDMLLAVFEDAVKACTDESLAVEERIEACLPLYTNMIALHQLLERYEAAMELCKSLLESCPINCQLLEALVALYLQTNQHDKARAVWLTAFEIEAIIFFHFCGNLLHPSLNRGLRSIITWICFGIS

SEQ ID NO: 742141 - protein, 816 aa, Homo sapiens; identical to SEQ ID NO: 742137

SEQ ID NO: 742142 - protein, 816 aa, Homo sapiens; identical to SEQ ID NO: 742137

SEQ ID NO: 742143 - protein, 816 aa, Homo sapiens; identical to SEQ ID NO: 742137

SEQ ID NO: 742144 - protein, 895 aa, Homo sapiens; identical to SEQ ID NO: 742138

SEQ ID NO: 742145 - protein, 780 aa, Homo sapiens
MSKMPAKKKSCFQITSVTTAQVATSITEDTESLDDPDESRTEDVSSEIFDVSRATDYGPEEVCERSSSEETLNNVGDAETPGTVSPNLLLDGQLAAAAAAPANGGGVVSARSVSGALASTLAAAATSAPAPGAPGGPQLAGSSAGPVTAAPSQPPTTCSSRFRVIKLDHGSGEPYRRGRWTCMEYYERDSDSSVLTRSGDCIRHSSTFDQTAERDSGLGATGGSVVVVVASMQGAHGPESGTDSSLTAVSQLPPSEKMSQPTPAQPQSFSVGQPQPPPPPVGGAVAQSSAPLPPFPGAATGPQPMMAAAQPSQPQGAGPGGQTLPPTNVTLAQPAMSLPPQPGPAVGAPAAQQPQQFAYPQPQIPPGHLLPVQPSGQSEYLQQHVAGLQPPSPAQPSSTGAAASPATAATLPVGTGQNASSVGAQLMGASSQPSEAMAPRTGPAQGGQVAPCQPTGVPPATVGGVVQPCLGPAGAGQPQSVPPPQMGGSGPLSAVPGGPHAVVPGVPNVPAAVPAPSVPSVSTTSVTMPNVPAPLAQSQQLSSHTPVSRSSSIIQHVGLPLAPGTHSAPTSLPQSDLSQFQTQTQPLVGQVDDTRRKSEPLPQPPLSLIAENKPVVKPPVADSLANPLQLTPMNSLATSVFSIAIPVDGDEDRNPSTAFYQAFHLNTLKESKSLWDSASGGGVVAIDNKIEQAMDLVKSHLMYAVREEVEVLKEQIKELVERNSLLERENALLKSLSSNDQLSQLPTQQANPGSTSQQQAVIAQPPQPTQPPQQPNVSSA

SEQ ID NO: 742146 - protein, 780 aa, Homo sapiens; identical to SEQ ID NO: 742145

SEQ ID NO: 742147 - protein, 756 aa, Homo sapiens
MSKMPAKKKSCFQITSVTTAQVATSITEDTESLDDPDESRTEDVSSEIFDVSRATDYGPEEVCERSSSEETLNNVGDAETPGTVSPNLLLDGQLAAAAAAPANGGGVVSARSVSGALASTLAAAATSAPAPGAPGGPQLAGSSAGPVTAAPSQPPTTCSSRFRVIKLDHGSGEPYRRGRWTCMEYYERDSDSSVLTRSGDCIRHSSTFDQTAERDSGLGATGGSVVVVVASMQGAHGPESGTDSSLTAVSQLPPSEKMSQPTPAQPQSFSVGQPQPPPPPVGGAVAQSSAPLPPFPGAATGPQPMMAAAQPSQPQGAGPGGQTLPPTNVTLAQPAMSLPPQPGPAVGAPAAQQPQQFAYPQPQIPPGHLLPVQPSGQSEYLQQHVAGLQPPSPAQPSSTGAAASPATAATLPVGTGQNASSVGAQLMGASSQPSEAMAPRTGPAQGGQVAPCQPTGVPPATVGGVVQPCLGPAGAGQPQSVPPPQMGGSGPLSAVPGGPHAVVPGVPNVPAAVPAPSVPSVSTTSVTMPNVPAPLAQSQQLSSHTPVSRSSSIIQHVGLPLAPGTHSAPTSLPQSDLSQFQTQTQPLVGQVDDTRRKSEPLPQPPLSLIAENKPVVKPPVADSLANPLQLTPMNSLATSVFSIAIPVDGDEDSASGGGVVAIDNKIEQAMDLVKSHLMYAVREEVEVLKEQIKELVERNSLLERENALLKSLSSNDQLSQLPTQQANPGSTSQQQAVIAQPPQPTQPPQQPNVSSA

SEQ ID NO: 742148 - protein, 690 aa, Homo sapiens
MSKMPAKKKSCFQITSVTTAQVATSITEDTESLDDPDESRTEDVSSEIFDVSRATDYGPEEVCERSSSEETLNNVGDAETPGTVSPNLLLDGQLAAAAAAPANGGGVVSARSVSGALASTLAAAATSAPAPGAPGGPQLAGSSAGPVTAAPSQPPTTCSSRFRVIKLDHGSGEPYRRGRWTCMEYYERDSDSSVLTRSGDCIRHSSTFDQTAERDSGLGATGGSVVVVVASMQGAHGPESGTDSSLTAVSQLPPSEKMSQPTPAQPQSFSVGQPQPPPPPVGGAVAQSSAPLPPFPGAATGPQPMMAAAQPSQPQGAGPGGQTLPPTNVTLAQPAMSLPPQPGPAVGAPAAQQPQQFAYPQPQIPPGHLLPVQPSGQSEYLQQHVAGLQPPSPAQPSSTGAAASPATAATLPVGTGQNASSVGAQLMGASSQPSEAMAPRTGPAQGGQVAPCQPTGVPPATVGGVVQPCLGPAGAGQPQSVPPPQMGGSGPLSAVPGGPHAVVPGVPNVPAAVPAPSVPSVSTTSVTMPNVPAPLAQSQQLSSHTPVSRSSSIIQHVGLPLAPGTHSAPTSLPQSDLSQFQTQTQPLVGQVDDTRRKSEPLPQPPLSLIAENKPVVKPPVADSLANPLQLTPMNSLATSVFSIAIPVDGDEDRNPSTAFYQAFHLNTLKESKSLWDRIFFRIQHRRRNVT

SEQ ID NO: 742149 - protein, 655 aa, Homo sapiens
MSKMPAKKKSCFQITSVTTAQVATSITEDTESLDDPDESRTEDVSSEIFDVSRATDYGPEEVCERSSSEETLNNVGDAETPGTVSPNLLLDGQLAAAAAAPANGGGVVSARSVSGALASTLAAAATSAPAPGAPGGPQLAGSSAGPVTAAPSQPPTTCSSRFRVIKLDHGSGEPYRRGRWTCMEYYERDSDSSVLTRSGDCIRHSSTFDQTAERDSGLGATGGSVVVVVASMQGAHGPESGTDSSLTAVSQLPPSEKMSQPTPAQPQSFSVGQPQPPPPPVGGAVAQSSAPLPPFPGAATGPQPMMAAAQPSQPQGAGPGGQTLPPTNVTLAQPAMSLPPQPGPAVGAPAAQQPQQFAYPQPQIPPGHLLPVQPSGQSEYLQQHVAGLQPPSPAQPSSTGAAASPATAATLPVGTGQNASSVGAQLMGASSQPSEAMAPRTGPAQGGQVAPCQPTGVPPATVGGVVQPCLGPAGAGQPQSVPPPQMGGSGPLSAVPGGPHAVVPGVPNVPAAVPAPSVPSVSTTSVTMPNVPAPLAQSQQLSSHTPVSRSSSIIQHVGLPLAPGTHSAPTSLPQSDLSQFQTQTQPLVGQVDDTRRKSEPLPQPPLSLIAENKPVVKPPVADSLANPLQLTPMNSLATSVFSIAIPVDGDEDRIW

SEQ ID NO: 742150 - protein, 690 aa, Homo sapiens; identical to SEQ ID NO: 742148

SEQ ID NO: 742151 - protein, 690 aa, Homo sapiens; identical to SEQ ID NO: 742148

SEQ ID NO: 742152 - protein, 710 aa, Homo sapiens
MSKMPAKKKSCFQITSVTTAQVATSITEDTESLDDPDESRTEDVSSEIFDVSRATDYGPEEVCERSSSEETLNNVGDAETPGTVSPNLLLDGQLAAAAAAPANGGGVVSARSVSGALASTLAAAATSAPAPGAPGGPQLAGSSAGPVTAAPSQPPTTCSSRFRVIKLDHGSGEPYRRGRWTCMEYYERDSDSSVLTRSGDCIRHSSTFDQTAERDSGLGATGGSVVVVVASMQGAHGPESGTDSSLTAVSQLPPSEKMSQPTPAQPQSFSVGQPQPPPPPVGGAVAQSSAPLPPFPGAATGPQPMMAAAQPSQPQGAGPGGQTLPPTNVTLAQPAMSLPPQPGPAVGAPAAQQPQQFAYPQPQIPPGHLLPVQPSGQSEYLQQHVAGLQPPSPAQPSSTGAAASPATAATLPVGTGQNASSVGAQLMGASSQPSEAMAPRTGPAQGGQVAPCQPTGVPPATVGGVVQPCLGPAGAGQPQSVPPPQMGGSGPLSAVPGGPHAVVPGVPNVPAAVPAPSVPSVSTTSVTMPNVPAPLAQSQQLSSHTPVSRSSSIIQHVGLPLAPGTHSAPTSLPQSDLSQFQTQTQPLVGQVDDTRRKSEPLPQPPLSLIAENKPVVKPPVADSLANPLQLTPMNSLATSVFSIAIPVDGDEDSASGGGVVAIDNKIEQAMLKRMVVLGERQRLKNEETNSDAYELKIATELFGDKTYRVT

SEQ ID NO: 742153 - protein, 780 aa, Homo sapiens; identical to SEQ ID NO: 742145

SEQ ID NO: 742154 - protein, 738 aa, Homo sapiens
MSKMPAKKKSCFQITSVTTAQVATSITEDTESLDDPDESRTEDVSSEIFDVSRATDYGPEEVCERSSSEETLNNVGDAETPGTVSPNLLLDGQLAAAAAAPANGGGVVSARSVSGALASTLAAAATSAPAPGAPGGPQLAGSSAGPVTAAPSQPPTTCSSRFRVIKLDHGSGEPYRRGRWTCMEYYERDSDSSVLTRSGDCIRHSSTFDQTAERDSGLGATGGSVVVVVASMQGAHGPESGTDSSLTAVSQLPPSEKMSQPTPAQPQSFSVGQPQPPPPPVGGAVAQSSAPLPPFPGAATGPQPMMAAAQPSQPQGAGPGGQTLPPTNVTLAQPAMSLPPQPGPAVGAPAAQQPQQFAYPQPQIPPGHLLPVQPSGQSEYLQQHVAGLQPPSPAQPSSTGAAASPATAATLPVGTGQNASSVGAQLMGASSQPSEAMAPRTGPAQGGQVAPCQPTGVPPATVGGVVQPCLGPAGAGQPQSVPPPQMGGSGPLSAVPGGPHAVVPGVPNVPAAVPAPSVPSVSTTSVTMPNVPAPLAQSQQLSSHTPVSRSSSIIQHVGLPLAPGTHSAPTSLPQSDLSQFQTQTQPLVGQVDDTRRKSEPLPQPPLSLIAELTPMNSLATSVFSIAIPVDGDEDSASGGGVVAIDNKIEQAMDLVKSHLMYAVREEVEVLKEQIKELVERNSLLERENALLKSLSSNDQLSQLPTQQANPGSTSQQQAVIAQPPQPTQPPQQPNVSSA

SEQ ID NO: 742155 - protein, 147 aa, Homo sapiens
SFDVGSSYHCEADSLANPLQLTPMNSLATSVFSIAIPVDGDEDSASGGGVVAIDNKIEQAMDLVKSHLMYAVREEVEVLKEQIKELVERNSLLERENALLKSLSSNDQLSQLPTQQANPGSTSQQQAVIAQPPQPTQPPQQPNVSSA

SEQ ID NO: 742156 - protein, 690 aa, Homo sapiens; identical to SEQ ID NO: 742148

SEQ ID NO: 742157 - protein, 690 aa, Homo sapiens; identical to SEQ ID NO: 742148

SEQ ID NO: 742158 - protein, 691 aa, Homo sapiens
MSKMPAKKKSCFQITSVTTAQVATSITEDTESLDDPDESRTEDVSSEIFDVSRATDYGPEEVCERSSSEETLNNVGDAETPGTVSPNLLLDGQLAAAAAAPANGGGVVSARSVSGALASTLAAAATSAPAPGAPGGPQLAGSSAGPVTAAPSQPPTTCSSRFRVIKLDHGSGEPYRRGRWTCMEYYERDSDSSVLTRSGDCIRHSSTFDQTAERDSGLGATGGSVVVVVASMQGAHGPESGTDSSLTAVSQLPPSEKMSQPTPAQPQSFSVGQPQPPPPPVGGAVAQSSAPLPPFPGAATGPQPMMAAAQPSQPQGAGPGGQTLPPTNVTLAQPAMSLPPQPGPAVGAPAAQQPQQFAYPQPQIPPGHLLPVQPSGQSEYLQQHVAGLQPPSPAQPSSTGAAASPATAATLPVGTGQNASSVGAQLMGASSQPSEAMAPRTGPAQGGQVAPCQPTGVPPATVGGVVQPCLGPAGAGQPQSVPPPQMGGSGPLSAVPGGPHAVVPGVPNVPAAVPAPSVPSVSTTSVTMPNVPAPLAQSQQLSSHTPVSRSSSIIQHVGLPLAPGTHSAPTSLPQSDLSQFQTQTQPLVGQVDDTRRKSEPLPQPPLSLIAENKPVVKPPVADSLANPLQLTPMNSLATSVFSIAIPVDGDEDRNPSTAFYQAFHLNTLKESKSLWDRGEITWYLAWDKAAK

SEQ ID NO: 742159 - protein, 126 aa, Homo sapiens
SDGSENFNRGWKDYENGFGNFVQKHGEYWLGNKNLHFLTTQEDYTLKIDLADFEKNSRYAQYKNFKVGDEKNFYELNIGEYSGTAGDSLAGNFHPEVQWWASHQRMKFSTWDRDHDNYEGNCAEED

SEQ ID NO: 742160 - protein, 37 aa, Homo sapiens
MYFAKPWLSLTVDLFNTASQVCLCSKKSECLTRGDRG

SEQ ID NO: 742161 - protein, 122 aa, Homo sapiens
  misc_feature (32)..(33): Xaa can be any naturally occurring amino acid
  misc_feature (118)..(118): Xaa can be any naturally occurring amino acid
MALVSADSRIAELLTELHQLIKQTQGRAFAQXXNFSVNIQKTHERMQDREQDFSLFTGQSCVASYTTAKADGRRLELTTSFRESFGTKIGEIQVFCFGKERAVFRGQGLPVFYIDFGXTPVD

SEQ ID NO: 742162 - protein, 115 aa, Homo sapiens
NTPIVQRKKGNQTSSFFPRLSSAKNLHFRNPEVFKTTVGKRDEFAGLLNSTHKLSREPTRCSLWLPTVLPTPNRELGIRIPGNPLETSHSVSRFLRAVTIVFRSLCPLYLDQVET

SEQ ID NO: 742163 - protein, 73 aa, Homo sapiens
MSDLAERAPRETSWPLKCGVVFSPKKTPRRHRWFDHLEWRLAALRASPRAATNMRRARGKTSSTNRRKQYAMA

SEQ ID NO: 742164 - protein, 120 aa, Homo sapiens
PFLFIQCGVWRRRAEMAPRNVEVIELAKEWTPAGKAKQENSAKKFYSESEEEEDSSDSSSDSESESGSESGEQGESGEEGDSNEDSSEDSSSEQDSESGRESGLENKRTAKRNSKAKGKR

SEQ ID NO: 742165 - protein, 1124 aa, Homo sapiens
RTSFVPCPLDWNLLERTPGRTNPAPASTAAMSSNSFPYNEQSGGGEATELGQEATSTISPSGAFGLFSSDLKKNEDLKQMLESNKDSAKLDAMKRIVGMIAKGKNASELFPAVVKNVASKNIEIKKLVYVYLVRYAEEQQDLALLSISTFQRALKDPNQLIRASALRVLSSIRVPIIVPIMMLAIKEASADLSPYVRKNAAHAIQKLYSLDPEQKEMLIEVIEKLLKDKSTLVAGSVVMAFEEVCPDRIDLIHKNYRKLCNLLVDVEEWGQVVIIHMLTRYARTQFVSPWKEGDELEDNGKNFYESDDDQKEKTDKKKKPYTMDPDHRLLIRNTKPLLQSRNAAVVMAVAQLYWHISPKSEAGIISKSLVRLLRSNREVQYIVLQNIATMSIQRKGMFEPYLKSFYVRSTDPTMIKTLKLEILTNLANEANISTLLREFQTYVKSQDKQFAAATIQTIGRCATNILEVTDTCLNGLVCLLSNRDEIVVAESVVVIKKLLQMQPAQHGEIIKHMAKLLDSITVPVARASILWLIGENCERVPKIAPDVLRKMAKSFTSEDDLVKLQILNLGAKLYLTNSKQTKLLTQYILNLGKYDQNYDIRDRTRFIRQLIVPNEKSGALSKYAKKIFLAQKPAPLLESPFKDRDHFQLGTLSHTLNIKATGYLELSNWPEVAPDPSVRNVEVIELAKEWTPAGKAKQENSAKKFYSESEEEEDSSDSSSDSESESGSESGEQGESGEEGDSNEDSSEDSSSEQDSESGRESGLENKRTAKRNSKAKGKSDSEDGEKENEKSKTSDSSNDESSSIEDSSSDSESESEPESESESRRVTKEKEKKTKQDRTPLTKDVSLLDLDDFNPVSTPVALPTPALSPSLMADLEGLHLSTSSSVISVSTPAFVPTKTHVLLHRMSGKGLAAHYFFPRQPCIFGDKMVSIQITLNNTTDRKIENIHIGEKKLPIGMKMHVFNPIDSLEPEGSITVSMGIDFCDSTQTASFQLCTKDDCFNVNIQPPVGELLLPVAMSEKDFKKEQGVLTGMNETSAVIIAAPQNFTPSVIFQKVVNVANVGAVPSGQDNIHRFAAKTVHSGSLMLVTVELKEGSTAQLIINTEKTVIGSVLLRELKPVLSQG

SEQ ID NO: 742166 - protein, 1084 aa, Homo sapiens
RTSFVPCPLDWNLLERTPGRTNPAPASTAAMSSNSFPYNEQSGGGEATELGQEATSTISPSGAFGLFSSDLKKNEDLKQMLESNKDSAKLDAMKRIVGMIAKGKNASELFPAVVKNVASKNIEIKKLVYVYLVRYAEEQQDLALLSISTFQRALKDPNQLIRASALRVLSSIRVPIIVPIMMLAIKEASADLSPYVRKNAAHAIQKLYSLDPEQKEMLIEVIEKLLKDKSTLVAGSVVMAFEEVCPDRIDLIHKNYRKLCNLLVDVEEWGQVVIIHMLTRYARTQFVSPWKEGDELEDNGKNFYESDDDQKEKTDKKKKPYTMDPDHRLLIRNTKPLLQSRNAAVVMAVAQLYWHISPKSEAGIISKSLVRLLRSNREVQYIVLQNIATMSIQRKGMFEPYLKSFYVRSTDPTMIKTLKLEILTNLANEANISTLLREFQTYVKSQDKQFAAATIQTIGRCATNILEVTDTCLNGLVCLLSNRDEIVVAESVVVIKKLLQMQPAQHGEIIKHMAKLLDSITVPVARASILWLIGENCERVPKIAPDVLRKMAKSFTSEDDLVKLQILNLGAKLYLTNSKQTKLLTQYILNLGKYDQNYDIRDRTRFIRQLIVPNEKSGALSKYAKKIFLAQKPAPLLESPFKDRDHFQLGTLSHTLNIKATGYLELSNWPEVAPDPSVRNVEVIELAKEWTPAGKAKQENSAKKFYSESEEEEDSSDSSSDSESESGSESGEQGESGEEGDSNEDSSEDSSSEQDSESGRESGLENKRTAKRNSKAKGKSDSEDGEKENEKSKTSDSSNDESSSIEDSSSDSESESEPESESESRRVTKEKEKKTKQDRTPLTKDVSLLDLDDFNPVSTPVALPTPALSPSLMADLEGLHLSTSSSVISVSTPAFVPTKTHVLLHRMSGKGLAAHYFFPRQPCIFGDKMVSIQITLNNTTDRKIENIHIGEKKLPIGMKMHVFNPIDSLEPEGSITVSMGIDFCDSTQTASFQLCTKDDCFNVNIQPPVGELLLPVAMSEKDFKKEQGVLTGMNETSAVIIAAPQNFTPSVIFQKVVNVANVGAVPSGQDNIHRSLFFLFQVCS

SEQ ID NO: 742167 - protein, 464 aa, Homo sapiens
PFLFIQCGVWRRRAEMAPRNVEVIELAKEWTPAGKAKQENSAKKFYSESEEEEDSSDSSSDSESESGSESGEQGESGEEGDSNEDSSEDSSSEQDSESGRESGLENKRTAKRNSKAKGKSDSEDGEKENEKSKTSDSSNDESSSIEDSSSDSESESEPESESESRRVTKEKEKKTKQDRTPLTKDVSLLDLDDFNPVSTPVALPTPALSPSLMADLEGLHLSTSSSVISVSTPAFVPTKTHVLLHRMSGKGLAAHYFFPRQPCIFGDKMVSIQITLNNTTDRKIENIHIGEKKLPIGMKMHVFNPIDSLEPEGSITVSMGIDFCDSTQTASFQLCTKDDCFNVNIQPPVGELLLPVAMSEKDFKKEQGVLTGMNETSAVIIAAPQNFTPSVIFQKVVNVANVGAVPSGQDNIHRFAAKTVHSGSLMLVTVELKEGSTAQLIINTEKTVIGSVLLRELKPVLSQG

SEQ ID NO: 742168 - protein, 1041 aa, Homo sapiens
RTSFVPCPLDWNLLERTPGRTNPAPASTAAMSSNSFPYNEQSGGGEATELGQEATSTISPSGAFGLFSSDLKKNEDLKQMLESNKDSAKLDAMKRIVGMIAKGKNASELFPAVVKNVASKNIEIKKLVYVYLVRYAEEQQDLALLSISTFQRALKDPNQLIRASALRVLSSIRVPIIVPIMMLAIKEASADLSPYVRKNAAHAIQKLYSLDPEQKEMLIEVIEKLLKDKSTLVAGSVVMAFEEVCPDRIDLIHKNYRKLCNLLVDVEEWGQVVIIHMLTRYARTQFVSPWKEGDELEDNGKNFYESDDDQKEKTDKKKKPYTMDPDHRLLIRNTKPLLQSRNAAVVMAVAQLYWHISPKSEAGIISKSLVRLLRSNREVQYIVLQNIATMSIQRKGMFEPYLKSFYVRSTDPTMIKTLKLEILTNLANEANISTLLREFQTYVKSQDKQFAAATIQTIGRCATNILEVTDTCLNGLVCLLSNRDEIVVAESVVVIKKLLQMQPAQHGEIIKHMAKLLDSITVPVARASILWLIGENCERVPKIAPDVLRKMAKSFTSEDDLVKLQILNLGAKLYLTNSKQTKLLTQYILNLGKYDQNYDIRDRTRFIRQLIVPNEKSGALSKYAKKIFLAQKPAPLLESPFKDRDHFQLGTLSHTLNIKATGYLELSNWPEVAPDPSVRNVEVIELAKEWTPAGKAKQENSAKKFYSESEEEEDSSDSSSDSESESGSESGEQGESGEEGDSNEDSSEDSSSEQDSESGRESGLENKRTAKRNSKAKGKSDSEDGEKENEKSKTSDSSNDESSSIEDSSSDSESESEPESESESRRVTKEKEKKTKQDRTPLTKDVSLLDLDDFNPVSTPVALPTPALSPSLMADLEGLHLSTSSSVISVSTPAFVPTKTHVLLHRMSGKGLAAHYFFPRQPCIFGDKMVSIQITLNNTTDRKIENIHIGEKKLPIGMKMHVFNPIDSLEPEGSITVSMGIDFCDSTQTASFQLCTKDDCFNVNIQPPVGELLLPVAMSEKDFKKEQGERCLQLTRNLHTK

SEQ ID NO: 742169 - protein, 218 aa, Homo sapiens [sequence omitted]

SEQ ID NO: 742170 - protein, 986 aa, Homo sapiens
RTSFVPCPLDWNLLERTPGRTNPAPASTAAMSSNSFPYNEQSGGGEATELGQEATSTISPSGAFGLFSSDLKKNEDLKQMLESNKDSAKLDAMKRIVGMIAKGKNASELFPAVVKNVASKNIEIKKLVYVYLVRYAEEQQDLALLSISTFQRALKDPNQLIRASALRVLSSIRVPIIVPIMMLAIKEASADLSPYVRKNAAHAIQKLYSLDPEQKEMLIEVIEKLLKDKSTLVAGSVVMAFEEVCPDRIDLIHKNYRKLCNLLVDVEEWGQVVIIHMLTRYARTQFVSPWKEGDELEDNGKNFYESDDDQKEKTDKKKKPYTMDPDHRLLIRNTKPLLQSRNAAVVMAVAQLYWHISPKSEAGIISKSLVRLLRSNREVQYIVLQNIATMSIQRKGMFEPYLKSFYVRSTDPTMIKTLKLEILTNLANEANISTLLREFQTYVKSQDKQFAAATIQTIGRCATNILEVTDTCLNGLVCLLSNRDEIVVAESVVVIKKLLQMQPAQHGEIIKHMAKLLDSITVPVARASILWLIGENCERVPKIAPDVLRKMAKSFTSEDDLVKLQILNLGAKLYLTNSKQTKLLTQYILNLGKYDQNYDIRDRTRFIRQLIVPNEKSGALSKYAKKIFLAQKPAPLLESPFKDRDHFQLGTLSHTLNIKATGYLELSNWPEVAPDPSVRNVEVIELAKEWTPAGKAKQENSAKKFYSESEEEEDSSDSSSDSESESGSESGEQGESGEEGDSNEDSSEDSSSEQDSESGRESGLENKRTAKRNSKAKGKSDSEDGEKENEKSKTSDSSNDESSSIEDSSSDSESESEPESESESRRVTKEKEKKTKQDRTPLTKDVSLLDLDDFNPVSTPVALPTPALSPSLMADLEGLHLSTSSSVISVSTPAFVPTKTHVLLHRMSGKGLAAHYFFPRQPCIFGDKMVSIQITLNNTTDRKIENIHIGEKKLPIGMKMHVFNPIALSLVCENEITYFLNPNTKA

SEQ ID NO: 742171 - protein, 893 aa, Homo sapiens
RTSFVPCPLDWNLLERTPGRTNPAPASTAAMSSNSFPYNEQSGGGEATELGQEATSTISPSGAFGLFSSDLKKNEDLKQMLESNKDSAKLDAMKRIVGMIAKGKNASELFPAVVKNVASKNIEIKKLVYVYLVRYAEEQQDLALLSISTFQRALKDPNQLIRASALRVLSSIRVPIIVPIMMLAIKEASADLSPYVRKNAAHAIQKLYSLDPEQKEMLIEVIEKLLKDKSTLVAGSVVMAFEEVCPDRIDLIHKNYRKLCNLLVDVEEWGQVVIIHMLTRYARTQFVSPWKEGDELEDNGKNFYESDDDQKEKTDKKKKPYTMDPDHRLLIRNTKPLLQSRNAAVVMAVAQLYWHISPKSEAGIISKSLVRLLRSNREVQYIVLQNIATMSIQRKGMFEPYLKSFYVRSTDPTMIKTLKLEILTNLANEANISTLLREFQTYVKSQDKQFAAATIQTIGRCATNILEVTDTCLNGLVCLLSNRDEIVVAESVVVIKKLLQMQPAQHGEIIKHMAKLLDSITVPVARASILWLIGENCERVPKIAPDVLRKMAKSFTSEDDLVKLQILNLGAKLYLTNSKQTKLLTQYILNLGKYDQNYDIRDRTRFIRQLIVPNEKSGALSKYAKKIFLAQKPAPLLESPFKDRDHFQLGTLSHTLNIKATGYLELSNWPEVAPDPSVRNVEVIELAKEWTPAGKAKQENSAKKFYSESEEEEDSSDSSSDSESESGSESGEQGESGEEGDSNEDSSEDSSSEQDSESGRESGLENKRTAKRNSKAKGKSDSEDGEKENEKSKTSDSSNDESSSIEDSSSDSESESEPESESESRRVTKEKEKKTKQDRTPLTKDVSLLDLDDFNPVSTPVALPTPALSPSLMADLEGLHLSTSSSVISVSYF

SEQ ID NO: 742172 - protein, 121 aa, Homo sapiens
MSLKFCKCNFQKEINKREPSFAFTGVLTGMNETSAVIIAAPQNFTPSVIFQKVVNVANVGAVPSGQDNIHRFAAKTVHSGSLMLVTVELKEGSTAQLIINTEKTVIGSVLLRELKPVLSQG

SEQ ID NO: 742173 - protein, 782 aa, Homo sapiens
  misc_feature (739)..(739): Xaa can be any naturally occurring amino acid
  misc_feature (742)..(742): Xaa can be any naturally occurring amino acid
RTSFVPCPLDWNLLERTPGRTNPAPASTAAMSSNSFPYNEQSGGGEATELGQEATSTISPSGAFGLFSSDLKKNEDLKQMLESNKDSAKLDAMKRIVGMIAKGKNASELFPAVVKNVASKNIEIKKLVYVYLVRYAEEQQDLALLSISTFQRALKDPNQLIRASALRVLSSIRVPIIVPIMMLAIKEASADLSPYVRKNAAHAIQKLYSLDPEQKEMLIEVIEKLLKDKSTLVAGSVVMAFEEVCPDRIDLIHKNYRKLCNLLVDVEEWGQVVIIHMLTRYARTQFVSPWKEGDELEDNGKNFYESDDDQKEKTDKKKKPYTMDPDHRLLIRNTKPLLQSRNAAVVMAVAQLYWHISPKSEAGIISKSLVRLLRSNREVQYIVLQNIATMSIQRKGMFEPYLKSFYVRSTDPTMIKTLKLEILTNLANEANISTLLREFQTYVKSQDKQFAAATIQTIGRCATNILEVTDTCLNGLVCLLSNRDEIVVAESVVVIKKLLQMQPAQHGEIIKHMAKLLDSITVPVARASILWLIGENCERVPKIAPDVLRKMAKSFTSEDDLVKLQILNLGAKLYLTNSKQTKLLTQYILNLGKYDQNYDIRDRTRFIRQLIVPNEKSGALSKYAKKIFLAQKPAPLLESPFKDRDHFQLGTLSHTLNIKATGYLELSNWPEVAPDPSVRNVEVIELAKEWTPAGKAKQENSAKKFYSESEEEEDSSDSSSDSESESGSESGEQGESGEXRFXLFVFNGGILPVGRPMRNGRGLLPFKPNGPPLVGPLSPREK

SEQ ID NO: 742174 - protein, 114 aa, Homo sapiens
LGISGVEGSLWGRAGSVLLWMTLTLTIARQSLLSLVQPQAPPLPIVSAPGMKHVFLTGLSPEAFEFATPANPSLKRVALSDPFDVRFGVETYFTKFSYINITLCMRQNEDQGDE

SEQ ID NO: 742175 - protein, 111 aa, Homo sapiens
GGVRLQKRNAAHQISAVHLRSEPGCKATWLDWPPLPTSFSQASLQPLHAFILQPGPCQQDCARQDSLYTPRGQWAPQHGQTANETMFSLHEEVTGTRKSLKERGKDLGVCL

SEQ ID NO: 742176 - protein, 240 aa, Homo sapiens
MGDALGSVVVVITAIIFYVLPLKSEDPCNWQCYIDPSLTVLMVIIILSSAFPLIKETAAILLQMVPKGVNMEELMSKLSAVPGISSVHEVHIWELVSGKIIATLHIKYPKDRGYQDASTKIREIFHHAGIHNVTIQFENVDLKEPLEQKDLLLLCNSPCISKGCAKQLCCPPGALPLAHVNGCAEHNGGPSLDTYGSDGLSRRDAREVAIEVSLDSCLSDHGQSLNKTQEDQCYVNRTHF

SEQ ID NO: 742177 - protein, 410 aa, Homo sapiens
LTALCFTIFVEAVLRLARPERIDDPELVLIVGVLGLLVNVVGLLIFQDCAAWFACCLRGRSRRLQQRQQLAEGCVPGAFGGPQGAEDPRRAADPTAPGSDSAVTLRGTSVERKREKGATVFSKRSRTYTQHKVSSLNAGDSFNTQNEPEDMMKKEKKSEALNIRGVLLHVMGDALGSVVVVITAIIFYVLPLKSEDPCNWQCYIDPSLTVLMVIIILSSAFPLIKETAAILLQMVPKGVNMEELMSKLSAVPGISSVHEVHIWELVSGKIIATLHIKYPKDRGYQDASTKIREIFHHAGIHNVTIQFENVDLKEPLEQKDLLLLCNSPCISKGCAKQLCCPPGALPLAHVNGCAEHNGGPSLDTYGSDGLSRRDAREVAIEVSLDSCLSDHGQSLNKTQEDQCYVNRTHF

SEQ ID NO: 742178 - protein, 260 aa, Homo sapiens
MMKKEKKSEALNIRGVLLHVMGDALGSVVVVITAIIFYVLPLKSEDPCNWQCYIDPSLTVLMVIIILSSAFPLIKETAAILLQMVPKGVNMEELMSKLSAVPGISSVHEVHIWELVSGKIIATLHIKYPKDRGYQDASTKIREIFHHAGIHNVTIQFENVDLKEPLEQKDLLLLCNSPCISKGCAKQLCCPPGALPLAHVNGCAEHNGGPSLDTYGSDGLSRRDAREVAIEVSLDSCLSDHGQSLNKTQEDQCYVNRTHF

SEQ ID NO: 742179 - protein, 313 aa, Homo sapiens
MCTALSPKVRSGPGLSDMHQYSQWLASRHEANLLPMKEDLALWLTNLLGKEITAETFMEKLDNGALLCQLAETMQEKFKESMDANKPTKNLPLKKIPCKTSAPSGSFFARDNTANFLSWCRDLGVDETCLFESEGLVLHKQPREVCLCLLELGRIAARYGVEPPGLIKLEKEIEQEETLSAPSPSPSPSSKSSGKKSTGNLLDDAVKRISEDPPCKCPNKFCVERLSQGRYRVGEKILFIRMLHNKHVMVRVGGGWETFAGYLLKHDPCRMLQISRVDGKTSPIQSKSPTLKDMNPDNYLVVSASYKAKKEIK

SEQ ID NO: 742180 - protein, 141 aa, Homo sapiens
MCTALSPKVRSGPGLSDMHQYSQWLASRHEANLLPMKEDLALWLTNLLGKEITAETFMEKLDNGALLCQLAETMQEKFKESMDANKPTKNLPLKKIPCKTSAPSGSFFARDNTANFLSWCRDLGVDETCLFESEGLGFGGQ

SEQ ID NO: 742181 - protein, 121 aa, Homo sapiens
ICLQMSLGPELYMVKRISEDPPCKCPNKFCVERLSQGRYRVGEKILFIRMLHNKHVMVRVGGGWETFAGYLLKHDPCRMLQISRVDGKTSPIQSKSPTLKDMNPDNYLVVSASYKAKKEIK

SEQ ID NO: 742182 - protein, 141 aa, Homo sapiens; identical to SEQ ID NO: 742180

SEQ ID NO: 742183 - protein, 153 aa, Homo sapiens [sequence omitted]

SEQ ID NO: 742184 - protein, 88 aa, Homo sapiens
SGCSPCVGMWLTARCLTVLRLLGIPRRTLSHECLKTVSSLPEMDDTCFLINWHLPFQSHHFLYPLGCHKSSSAPQECPLEPRSPLLCP

SEQ ID NO: 742185 - protein, 88 aa, Homo sapiens; identical to SEQ ID NO: 742184

SEQ ID NO: 742186 - protein, 298 aa, Homo sapiens
MACIENVLGGHAPSPLVVSVDKNGNQELHHDMPLQCLSSKPEDDAEPWGQPQVPLRPSVNVLTDLDSKQLEWPSERTGSCIPLHSLRAHRHPYGPPPAVAEESLATAEVNSSDALAGWRQEGQDAINVSWEVSGGPPALIVGGTKVNNGGTERGSNNARLHVALPQGKGFFPPRGPQVRGPSHIPTLRSGIVMEVPPGNTRIACRGKLAHVSFPLRGPCHPMHNWPRPIPLSSSTPGLPSCSTVHCFIPPRPPIFNPFLTMPLPFAPPPIFGPPLPSYFAHFHSGGMPAPASPNREHS

SEQ ID NO: 742187 - protein, 256 aa, Homo sapiens
  misc_feature (245)..(245): Xaa can be any naturally occurring amino acid
MYNVGEHNLFPGPIDNSGLFSDPESQTLKEHLIDELDYVLVPTEAWNKLLNWYGCVEGQQPIVRKVVEHGLFVKHCKVEVYLLELKLCENSDPTNVLSCHFSKADTIATIEKEMRKLFNIPAERETRLWNKYMSNTYEQLSKLDNTVQDAGLYQGQVLVIEPQNEDGTWPRQTLQSNICHYVKFHANRDFAHGIKHNGQEQWLMPVIPALWEAEAGGSPEVKSLRPAWPTAEHPVSAKGAELAGXPGHISALAVGA

SEQ ID NO: 742188 - protein, 963 aa, Homo sapiens
MAEGGGCRERPDAETQKSELGPLMRTTLQRGAQWYLIDSRWFKQWKKYVGFDSWDMYNVGEHNLFPGPIDNSGLFSDPESQTLKEHLIDELDYVLVPTEAWNKLLNWYGCVEGQQPIVRKVVEHGLFVKHCKVEVYLLELKLCENSDPTNVLSCHFSKADTIATIEKEMRKLFNIPAERETRLWNKYMSNTYEQLSKLDNTVQDAGLYQGQVLVIEPQNEDGTWPRQTLQSKSSTAPSRNFTTSPKSSASPYSSVSASLIANGDSTSTCGMHSSGVSRGGSGFSASYNCQEPPSSHIQPGLCGLGNLGNTCFMNSALQCLSNTAPLTDYFLKDEYEAEINRDNPLGMKGEIAEAYAELIKQMWSGRDAHVAPRMFKTQVGRFAPQFSGYQQQDSQELLAFLLDGLHEDLNRVKKKPYLELKDANGRPDAVVAKEAWENHRLRNDSVIVDTFHGLFKSTLVCPECAKVSVTFDPFCYLTLPLPLKKDRVMEVFLVPADPHCRPTQYRVTVPLMGAVSDLCEALSRLSGIAAENMVVADVYNHRFHKIFQMDEGLNHIMPRDDIFVYEVCSTSVDGSECVTLPVYFRERKSRPSSTSSASALYGQPLLLSVPKHKLTLESLYQAVCDRISRYVKQPLPDEFGSSPLEPGACNGSRNSCEGEDEEEMEHQEEGKEQLSETEGSGEDEPGNDPSETTQKKIKGQPCPKRLFTFSLVNSYGTADINSLAADGKLLKLNSRSTLAMDWDSETRRLYYDEQESEAYEKHVSMLQPQKKKKTTVALRDCIELFTTMETLGEHDPWYCPNCKKHQQATKKFDLWSLPKILVVHLKRFSYNRYWRDKLDTVVEFPIRGLNMSEFVCNLSARPYVYDLIAVSNHYGAMGVGHYTAYAKNKLNGKWYYFDDSNVSLASEDQIVTKAAYVLFYQRRDDEFYKTPSLSSSGSSDGGTRPSSSQQGFGDDEACSMDTN

SEQ ID NO: 742189 - protein, 963 aa, Homo sapiens; identical to SEQ ID NO: 742188

SEQ ID NO: 742190 - protein, 963 aa, Homo sapiens; identical to SEQ ID NO: 742188

SEQ ID NO: 742191 - protein, 893 aa, Homo sapiens [sequence omitted]

SEQ ID NO: 742192 - protein, 945 aa, Homo sapiens
MAEGGGCRERPDAETQKSELGPLMRTTLQRGAQWYLIDSRWFKQWKKYVGFDSWDMYNVGEHNLFPGPIDNSGLFSDPESQTLKEHLIDELDYVLVPTEAWNKLLNWYGCVEGQQPIVRKVVEHGLFVKHCKVEVYLLELKLCENSDPTNVLSCHFSKADTIATIEKEMRKLFNIPAERETRLWNKYMSNTYEQLSKLDNTVQDAGLYQGQVLVIEPQNEDGTWPRQTLQSKSSTAPSRNFTTSPKSSASPYSSVSASLIANGDSTSTCGMHSSGVSRGGSGFSASYNCQEPPSSHIQPGLCGLGNLGNTCFMNSALQCLSNTAPLTDYFLKDEYEAEINRDNPLGMKGEIAEAYAELIKQMWSGRDAHVAPRMFKTQVGRFAPQFSGYQQQDSQELLAFLLDGLHEDLNRVVAKEAWENHRLRNDSVIVDTFHGLFKSTLVCPECAKVSVTFDPFCYLTLPLPLKKDRVMEVFLVPADPHCRPTQYRVTVPLMGAVSDLCEALSRLSGIAAENMVVADVYNHRFHKIFQMDEGLNHIMPRDDIFVYEVCSTSVDGSECVTLPVYFRERKSRPSSTSSASALYGQPLLLSVPKHKLTLESLYQAVCDRISRYVKQPLPDEFGSSPLEPGACNGSRNSCEGEDEEEMEHQEEGKEQLSETEGSGEDEPGNDPSETTQKKIKGQPCPKRLFTFSLVNSYGTADINSLAADGKLLKLNSRSTLAMDWDSETRRLYYDEQESEAYEKHVSMLQPQKKKKTTVALRDCIELFTTMETLGEHDPWYCPNCKKHQQATKKFDLWSLPKILVVHLKRFSYNRYWRDKLDTVVEFPIRGLNMSEFVCNLSARPYVYDLIAVSNHYGAMGVGHYTAYAKNKLNGKWYYFDDSNVSLASEDQIVTKAAYVLFYQRRDDEFYKTPSLSSSGSSDGGTRPSSSQQGFGDDEACSMDTN

SEQ ID NO: 742193 - protein, 861 aa, Homo sapiens
MYNVGEHNLFPGPIDNSGLFSDPESQTLKEHLIDELDYVLVPTEAWNKLLNWYGCVEGQQPIVRKVVEHGLFVKHCKVEVYLLELKLCENSDPTNVLSCHFSKADTIATIEKEMRKLFNIPAERETRLWNKYMSNTYEQLSKLDNTVQDAGLYQGQVLVIEPQNEDGTWPRQTLQSNGSGFSASYNCQEPPSSHIQPGLCGLGNLGNTCFMNSALQCLSNTAPLTDYFLKDEYEAEINRDNPLGMKGEIAEAYAELIKQMWSGRDAHVAPRMFKTQVGRFAPQFSGYQQQDSQELLAFLLDGLHEDLNRVKKKPYLELKDANGRPDAVVAKEAWENHRLRNDSVIVDTFHGLFKSTLVCPECAKVSVTFDPFCYLTLPLPLKKDRVMEVFLVPADPHCRPTQYRVTVPLMGAVSDLCEALSRLSGIAAENMVVADVYNHRFHKIFQMDEGLNHIMPRDDIFVYEVCSTSVDGSECVTLPVYFRERKSRPSSTSSASALYGQPLLLSVPKHKLTLESLYQAVCDRISRYVKQPLPDEFGSSPLEPGACNGSRNSCEGEDEEEMEHQEEGKEQLSETEGSGEDEPGNDPSETTQKKIKGQPCPKRLFTFSLVNSYGTADINSLAADGKLLKLNSRSTLAMDWDSETRRLYYDEQESEAYEKHVSMLQPQKKKKTTVALRDCIELFTTMETLGEHDPWYCPNCKKHQQATKKFDLWSLPKILVVHLKRFSYNRYWRDKLDTVVEFPIRGLNMSEFVCNLSARPYVYDLIAVSNHYGAMGVGHYTAYAKNKLNGKWYYFDDSNVSLASEDQIVTKAAYVLFYQRRDDEFYKTPSLSSSGSSDGGTRPSSSQQGFGDDEACSMDTN

SEQ ID NO: 742194 - protein, 981 aa, Homo sapiens
MAEGGGCRERPDAETQKSELGPLMRTTLQRGAQWYLIDSRWFKQWKKYVGFDSWDMYNVGEHNLFPGPIDNSGLFSDPESQTLKEHLIDELDYVLVPTEAWNKLLNWYGCVEGQQPIVRKVVEHGLFVKHCKVEVYLLELKLCENSDPTNVLSCHFSKADTIATIEKEMRKLFNIPAERETRLWNKYMSNTYEQLSKLDNTVQDAGLYQGQVLVIEPQNEDGTWPRQTLQSKSSTAPSRNFTTSPKSSASPYSSVSASLIANGDSTSTCGMHSSGVSRGGSGFSASYNCQEPPSSHIQPGLCGLGNLGNTCFMNSALQCLSNTAPLTDYFLKDEYEAEINRDNPLGMKGEIAEAYAELIKQMWSGRDAHVAPRMFKTQVGRFAPQFSGYQQQDSQELLAFLLDGLHEDLNRVKKKPYLELKDANGRPDAVVAKEAWENHRLRNDSVIVDTFHGLFKSTLVCPECAKVSVTFDPFCYLTLPLPLKKDRVMEVFLVPADPHCRPTQYRVTVPLMGAVSDLCEALSRLSGIAAENMVVADVYNHRFHKIFQMDEGLNHIMPRDDIFVYEVCSTSVDGSECVTLPVYFRERKSRPSSTSSASALYGQPLLLSVPKHKLECSGTISAHCTLYLPGSSDSAASASQVAVDYSRYVKQPLPDEFGSSPLEPGACNGSRNSCEGEDEEEMEHQEEGKEQLSETEGSGEDEPGNDPSETTQKKIKGQPCPKRLFTFSLVNSYGTADINSLAADGKLLKLNSRSTLAMDWDSETRRLYYDEQESEAYEKHVSMLQPQKKKKTTVALRDCIELFTTMETLGEHDPWYCPNCKKHQQATKKFDLWSLPKILVVHLKRFSYNRYWRDKLDTVVEFPIRGLNMSEFVCNLSARPYVYDLIAVSNHYGAMGVGHYTAYAKNKLNGKWYYFDDSNVSLASEDQIVTKAAYVLFYQRRDDEFYKTPSLSSSGSSDGGTRPSSSQQGFGDDEACSMDTN

SEQ ID NO: 742195 - protein, 693 aa, Homo sapiens
MHSSGVSRGGSGFSASYNCQEPPSSHIQPGLCGLGNLGNTCFMNSALQCLSNTAPLTDYFLKDEYEAEINRDNPLGMKGEIAEAYAELIKQMWSGRDAHVAPRMFKTQVGRFAPQFSGYQQQDSQELLAFLLDGLHEDLNRVKKKPYLELKDANGRPDAVVAKEAWENHRLRNDSVIVDTFHGLFKSTLVCPECAKVSVTFDPFCYLTLPLPLKKDRVMEVFLVPADPHCRPTQYRVTVPLMGAVSDLCEALSRLSGIAAENMVVADVYNHRFHKIFQMDEGLNHIMPRDDIFVYEVCSTSVDGSECVTLPVYFRERKSRPSSTSSASALYGQPLLLSVPKHKLTLESLYQAVCDRISRYVKQPLPDEFGSSPLEPGACNGSRNSCEGEDEEEMEHQEEGKEQLSETEGSGEDEPGNDPSETTQKKIKGQPCPKRLFTFSLVNSYGTADINSLAADGKLLKLNSRSTLAMDWDSETRRLYYDEQESEAYEKHVSMLQPQKKKKTTVALRDCIELFTTMETLGEHDPWYCPNCKKHQQATKKFDLWSLPKILVVHLKRFSYNRYWRDKLDTVVEFPIRGLNMSEFVCNLSARPYVYDLIAVSNHYGAMGVGHYTAYAKNKLNGKWYYFDDSNVSLASEDQIVTKAAYVLFYQRRDDEFYKTPSLSSSGSSDGGTRPSSSQQGFGDDEACSMDTN

SEQ ID NO: 742196 - protein, 851 aa, Homo sapiens
MAEGGGCRERPDAETQKSELGPLMRTTLQRGAQWYLIDSRWFKQWKKYVGFDSWDMYNVGEHNLFPGPIDNSGLFSDPESQTLKEHLIDELDYVLVPTEAWNKLLNWYGCVEGQQPIVRKVVEHGLFVKHCKVEVYLLELKLCENSDPTNVLSCHFSKADTIATIEKEMRKLFNIPAERETRLWNKYMSNTYEQLSKLDNTVQDAGLYQGQVLVIEPQNEDGTWPRQTLQSKSSTAPSRNFTTSPKSSASPYSSVSASLIANGDSTSTCGMHSSGVSRGGSGFSASYNCQEPPSSHIQPGLCGLGNLGNTCFMNSALQCLSNTAPLTDYFLKDEYEAEINRDNPLGMKGEIAEAYAELIKQMWSGRDAHVAPRMFKTQVGRFAPQFSGYQQQDSQELLAFLLDGLHEDLNRVKKKPYLELKDANGRPDAVVAKEAWENHRLRNDSVIVDTFHGLFKSTLVCPECAKVSVTFDPFCYLTLPLPLKKDRVMEVFLVPADPHCRPTQYRVTVPLMGAVSDLCEALSRLSGIAAENMVVADVYNHRFHKIFQMDEGLNHIMPRDDIFVYEVCSTSVDGSECVTLPVYFRERKSRPSSTSSASALYGQPLLLSVPKHKLTLESLYQAVCDRISRYVKQPLPDEFGSSPLEPGPAMAPGTAVKKKKKTTVALRDCIELFTTMETLGEHDPWYCPNCKKHQQATKKFDLWSLPKILVVHLKRFSYNRYWRDKLDTVVEFPIRGLNMSEFVCNLSARPYVYDLIAVSNHYGAMGVGHYTAYAKNKLNGKWYYFDDSNVSLASEDQIVTKAAYVLFYQRRDDEFYKTPSLSSSGSSDGGTRPSSSQQGFGDDEACSMDTN

SEQ ID NO: 742197 - protein, 296 aa, Homo sapiens
MVVLEYPPLFDSSGEDEPGNDPSETTQKKIKGQPCPKRLFTFSLVNSYGTADINSLAADGKLLKLNSRSTLAMDWDSETRRLYYDEQESEAYEKHVSMLQPQKKKKTTVALRDCIELFTTMETLGEHDPWYCPNCKKHQQATKKFDLWSLPKILVVHLKRFSYNRYWRDKLDTVVEFPIRGLNMSEFVCNLSARPYVYDLIAVSNHYGAMGVGHYTAYAKNKLNGKWYYFDDSNVSLASEDQIVTKAAYVLFYQRRDDEFYKTPSLSSSGSSDGGTRPSSSQQGFGDDEACSMDTN

SEQ ID NO: 742198 - protein, 882 aa, Homo sapiens
MAEGGGCRERPDAETQKSELGPLMRTTLQRGAQWYLIDSRWFKQWKKYVGFDSWDMYNVGEHNLFPGPIDNSGLFSDPESQTLKEHLIDELDYVLVPTEAWNKLLNWYGCVEGQQPIVRKVVEHGLFVKHCKVEVYLLELKLCENSDPTNVLSCHFSKADTIATIEKEMRKLFNIPAERETRLWNKYMSNTYEQLSKLDNTVQDAGLYQGQVLVIEPQNEDGTWPRQTLQSKSSTAPSRNFTTSPKSSASPYSSVSASLIANGDSTSTCGMHSSGVSRGGSGFSASYNCQEPPSSHIQPGLCGLGNLGNTCFMNSALQCLSNTAPLTDYFLKDEYEAEINRDNPLGMKGEIAEAYAELIKQMWSGRDAHVAPRMFKTQVGRFAPQFSGYQQQDSQELLAFLLDGLHEDLNRVKKKPYLELKDANGRPDAVVAKEAWENHRLRNDSVIVDTFHGLFKSTLVCPECAKVSVTFDPFCYLTLPLPLKKDRVMEVFLVPADPHCRPTQYRVTVPLMGAVSDLCEALSRLSGIAAENMVVADVYNHRFHKIFQMDEGLNHIMPRDDIFVYEVCSTSVDGSECVTLPVYFRERKSRPSSTSSASALYGQPLLLSVPKHKLTLESLYQAVCDRISRYVKQPLPDEFGSSPLEPGACNGSRNSCEGEDEEEMEHQEEGKEQLSETEGSGEDEPGNDPSETTQKKIKGQPCPKRLFTFSLVNSYGTADINSLAADGKLLKLNSRSTLAMDWDSETRRLYYDEQESEAYEKHVSMLQPQKKKKTTVALRDCIELFTTMETLGEHDPWYCPNCKKHQQATKKFDLWSLPKILVVHLKRFSYNRYWRDKLDTVVEFPIRGLNMSEFVCNLSARPYVYDLIAVSNHYGAMGVGHY

SEQ ID NO: 742199 - protein, 919 aa, Homo sapiens
MAEGGGCRERPDAETQKSELGPLMRTTLQRGAQWYLIDSRWFKQWKKYVGFDSWDMYNVGEHNLFPGPIDNSGLFSDPESQTLKEHLIDELDYVLVPTEAWNKLLNWYGCVEGQQPIVRKVVEHGLFVKHCKVEVYLLELKLCENSDPTNVLSCHFSKADTIATIEKEMRKLFNIPAERETRLWNKYMSNTYEQLSKLDNTVQDAGLYQGQVLVIEPQNEDGTWPRQTLQSKSSTAPSRNFTTSPKSSASPYSSVSASLIANGDSTSTCGMHSSGVSRGGSGFSASYNCQEPPSSHIQPGLCGLGNLGNTCFMNSALQCLSNTAPLTDYFLKDEYEAEINRDNPLGMKGEIAEAYAELIKQMWSGRDAHVAPRMFKTQVGRFAPQFSGYQQQDSQELLAFLLDGLHEDLNRVKKKPYLELKDANGRPDAVVAKEAWENHRLRNDSVIVDTFHGLFKSTLVCPECAKVSVTFDPFCYLTLPLPLKKDRVMEVFLVPADPHCRPTQYRVTVPLMGAVSDLCEALSRLSGIAAENMVVADVYNHRFHKIFQMDEGLNHIMPRDDIFVYEVCSTSVDGSECVTLPVYFRERKSRPSSTSSASALYGQPLLLSVPKHKLTLESLYQAVCDRISRYVKQPLPDEFGSSPLEPGACNGSRNSCEGEDEEEMEHQEEGKEQLSETEGSGEDEPGNDPSETTQKKIKGQPCPKRLFTFSLVNSYGTADINSLAADGKLLKLNSRSTLAMDWDSETRRLYYDEQESEAYEKHVSMLQPQKKKKTTVALRDCIELFTTMETLGEHDPWYQLLTVGLNMSEFVCNLSARPYVYDLIAVSNHYGAMGVGHYTAYAKNKLNGKWYYFDDSNVSLASEDQIVTKAAYVLFYQRRDDEFYKTPSLSSSGSSDGGTRPSSSQQGFGDDEACSMDTN

SEQ ID NO: 742200 - protein, 876 aa, Homo sapiens
MAEGGGCRERPDAETQKSELGPLMRTTLQRGAQWYLIDSRWFKQWKKYVGFDSWDMYNVGEHNLFPGPIDNSGLFSDPESQTLKEHLIDELDYVLVPTEAWNKLLNWYGCVEGQQPIVRKVVEHGLFVKHCKVEVYLLELKLCENSDPTNVLSCHFSKADTIATIEKEMRKLFNIPAERETRLWNKYMSNTYEQLSKLDNTVQDAGLYQGQVLVIEPQNEDGTWPRQTLQSKSSTAPSRNFTTSPKSSASPYSSVSASLIANGDSTSTCGMHSSGVSRGGSGFSASYNCQEPPSSHIQPGLCGLGNLGNTCFMNSALQCLSNTAPLTDYFLKDEYEAEINRDNPLGMKGEIAEAYAELIKQMWSGRDAHVAPRMFKTQVGRFAPQFSGYQQQDSQELLAFLLDGLHEDLNRVKKKPYLELKDANGRPDAVVAKEAWENHRLRNDSVIVDTFHGLFKSTLVCPECAKVSVTFDPFCYLTLPLPLKKDRVMEVFLVPADPHCRPTQYRVTVPLMGAVSDLCEALSRLSGIAAENMVVADVYNHRFHKIFQMDEGLNHIMPRDDIFVYEVCSTSVDGSECVTLPVYFRERKSRPSSTSSASALYGQPLLLSVPKHKLTLESLYQAVCDRISRYVKQPLPDEFGSSPLEPGACNGSRNSCEGEDEEEMEHQEEGKEQLSETEGSGEDEPGNDPSETTQKKIKGQPCPKRLFTFSLVNSYGTADINSLAADGKLLKLNSRSTLAMDWDSETRRLYYDEQESEAYEKHVSMLQPQKKKKTTVALRDCIELFTTMETLGEHDPWYCPNCKKHQQATKKFDLWSLPKILVVHLKRFSYNRYWRDKLDTVVEFPIRGLNMSEFVCNLSARPYVYDLIAVSNPTSR

SEQ ID NO: 742201 - protein, 199 aa, Homo sapiens [sequence omitted]

SEQ ID NO: 742202 - protein, 884 aa, Homo sapiens
MAEGGGCRERPDAETQKSELGPLMRTTLQRGAQWYLIDSRWFKQWKKYVGFDSWDMYNVGEHNLFPGPIDNSGLFSDPESQTLKEHLIDELDYVLVPTEAWNKLLNWYGCVEGQQPIVRKVVEHGLFVKHCKVEVYLLELKLCENSDPTNVLSCHFSKADTIATIEKEMRKLFNIPAERETRLWNKYMSNTYEQLSKLDNTVQDAGLYQGQVLVIEPQNEDGTWPRQTLQSKSSTAPSRNFTTSPKSSASPYSSVSASLIANGDSTSTCGMHSSGVSRGGSGFSASYNCQEPPSSHIQPGLCGLGNLGNTCFMNSALQCLSNTAPLTDYFLKDEYEAEINRDNPLGMKGEIAEAYAELIKQMWSGRDAHVAPRMFKTQVGRFAPQFSGYQQQDSQELLAFLLDGLHEDLNRVKKKPYLELKDANGRPDAVVAKEAWENHRLRNDSVIVDTFHGLFKSTLVCPECAKVSVTFDPFCYLTLPLPLKKDRVMEVFLVPADPHCRPTQYRVTVPLMGAVSDLCEALSRLSGIAAENMVVADVYNHRFHKIFQMDEGLNHIMPRDDIFVYEVCSTSVDGSECVTLPVYFRERKSRPSSTSSASALYGQPLLLSVPKHKLTLESLYQAVCDRISRYVKQPLPDEFGSSPLEPGACNGSRNSCEGEDEEEMEHQEEGKEQLSETEGSGEDEPGNDPSETTQKKIKGQPCPKRLFTFSLVNSYGTADINSLAADGKLLKLNSRSTLAMDWDSETRRLYYDEQESEAYEKHVSMLQPQKKKKTTVALRDCIELFTTMETLGEHDPWYCPNCKKHQQATKKFDLWSLPKILVVHLKRFSYNRYWRDKLDTVVEFPIRGLNMSEFVCNLSARPYVYDLIAVSNHYGAMGVGHCKY

SEQ ID NO: 742203 - protein, 101 aa, Homo sapiens
IELGTVTFVSIIMEPGGGHYTAYAKNKLNGKWYYFDDSNVSLASEDQIVTKAAYVLFYQRRDDEFYKTPSLSSSGSSDGGTRPSSSQQGFGDDEACSMDTN

SEQ ID NO: 742204 - protein, 683 aa, Homo sapiens
MAEGGGCRERPDAETQKSELGPLMRTTLQRGAQWYLIDSRWFKQWKKYVGFDSWDMYNVGEHNLFPGPIDNSGLFSDPESQTLKEHLIDELDYVLVPTEAWNKLLNWYGCVEGQQPIVRKVVEHGLFVKHCKVEVYLLELKLCENSDPTNVLSCHFSKADTIATIEKEMRKLFNIPAERETRLWNKYMSNTYEQLSKLDNTVQDAGLYQGQVLVIEPQNEDGTWPRQTLQSKSSTAPSRNFTTSPKSSASPYSSVSASLIANGDSTSTCGMHSSGVSRGGSGFSASYNCQEPPSSHIQPGLCGLGNLGNTCFMNSALQCLSNTAPLTDYFLKDEYEAEINRDNPLGMKGEIAEAYAELIKQMWSGRDAHVAPRMFKTQVGRFAPQFSGYQQQDSQELLAFLLDGLHEDLNRVKKKPYLELKDANGRPDAVVAKEAWENHRLRNDSVIVDTFHGLFKSTLVCPECAKVSVTFDPFCYLTLPLPLKKDRVMEVFLVPADPHCRPTQYRVTVPLMGAVSDLCEALSRLSGIAAENMVVADVYNHRFHKIFQMDEGLNHIMPRDDIFVYEVCSTSVDGSECVTLPVYFRERKSRPSSTSSASALYGQPLLLSVPKHKLECSGTISAHCTLYLPGSSDSAASASQVAGITGMCHHAQPAMLFLRGLHCRPIGRSRKRQKQEAQNRRAD

SEQ ID NO: 742205 - protein, 292 aa, Homo sapiens
MAEGGGCRERPDAETQKSELGPLMRTTLQRGAQWYLIDSRWFKQWKKYVGFDSWDMYNVGEHNLFPGPIDNSGLFSDPESQTLKEHLIDELDYVLVPTEAWNKLLNWYGCVEGQQPIVRKVVEHGLFVKHCKVEVYLLELKLCENSDPTNVLSCHFSKADTIATIEKEMRKLFNIPAERETRLWNKYMSNTYEQLSKLDNTVQDAGLYQGQVLVIEPQNEDGTWPRQTLQSNICHYVKFHANRDFAHGIKHNGQEQWLMPVIPALWEAEAGGSPEVKSLRPAWPTCRTPCLC

SEQ ID NO: 742206 - protein, 101 aa, Homo sapiens
AVMYRRIPPADESIVCNVLMEFKTLNQRRTCWRGIHVSTWVWLLRVLHPSSLGLRAVAQVPGSSSWLSDLGLLSGGNHWPPVGSSGVNWTTQPSVLSHCPS

SEQ ID NO: 742207 - protein, 1691 aa, Homo sapiens [sequence omitted]

SEQ ID NO: 742208 - protein, 1670 aa, Homo sapiens
MASWTSPWWVLIGMVFMHSPLPQTTAEKSPGAYFLPEFALSPQGSFLEDTTGEQFLTYRYDDQTSRNTRSDEDKDGNWDAWGDWSDCSRTCGGGASYSLRRCLTGRNCEGQNIRYKTCSNHDCPPDAEDFRAQQCSAYNDVQYQGHYYEWLPRYNDPAAPCALKCHAQGQNLVVELAPKVLDGTRCNTDSLDMCISGICQAVGCDRQLGSNAKEDNCGVCAGDGSTCRLVRGQSKSHVSPEKREENVIAVPLGSRSVRITVKGPAHLFIESKTLQGSKGEHSFNSPGVFVVENTTVEFQRGSERQTFKIPGPLMADFIFKTRYTAAKDSVVQFFFYQPISHQWRQTDFFPCTVTCGGGYQLNSAECVDIRLKRVVPDHYCHYYPENVKPKPKLKECSMDPCPSSDGFKEIMPYDHFQPLPRWEHNPWTACSVSCGGGIQRRSFVCVEESMHGEILQVEEWKCMYAPKPKVMQTCNLFDCPKWIAMEWSQCTVTCGRGLRYRVVLCINHRGEHVGGCNPQLKLHIKEECVIPIPCYKPKEKSPVEAKLPWLKQAQELEETRIATEEPTFIPEPWSACSTTCGPGVQVREVKCRVLLTFTQTETELPEEECEGPKLPTERPCLLEACDESPASRELDIPLPEDSETTYDWEYAGFTPCTATCVGGHQEAIAVCLHIQTQQTVNDSLCDMVHRPPAMSQACNTEPCPPRWHVGSWGPCSATCGVGIQTRDVYCLHPGETPAPPEECRDEKPHALQACNQFDCPPGWHIEEWQQCSRTCGGGTQNRRVTCRQLLTDGSFLNLSDELCQGPKASSHKSCARTDCPPHLAVGDWSKCSVSCGVGIQRRKQVCQRLAAKGRRIPLSEMMCRDLPGLPLVRSCQMPECSKIKSEMKTKLGEQGPQILSVQRVYIQTREEKRINLTIGSRAYLLPNTSVIIKCPVRRFQKSLIQWEKDGRCLQNSKRLGITKSGSLKIHGLAAPDIGVYRCIAGSAQETVVLKLIGTDNRLIARPALREPMREYPGMDHSEANSLGVTWHKMRQMWNNKNDLYLDDDHISNQPFLRALLGHCSNSAGSTNSWELKNKQFEAAVKQGAYSMDTAQFDELIRNMSQLMETGEVSDDLASQLIYQLVAELAKAQPTHMQWRGIQEETPPAAQLRGETGSVSQSSHAKNSGKLTFKPKGPVLMRQSQPPSISFNKTINSRIGNTVYITKRTEVINILCDLITPSEATYTWTKDGTLLQPSVKIILDGTGKIQIQNPTRKEQGIYECSVANHLGSDVESSSVLYAEAPVILSVERNITKPEHNHLSVVVGGIVEAALGANVTIRCPVKGVPQPNITWLKRGGSLSGNVSLLFNGSLLLQNVSLENEGTYVCIATNALGKAVATSVLHLLERRWPESRIVFLQGHKKYILQATNTRTNSNDPTGEPPPQEPFWEPGNWSHCSATCGHLGARIQRPQCVMANGQEVSEALCDHLQKPLAGFEPCNIRDCPARWFTSVWSQCSVSCGEGYHSRQVTCKRTKANGTVQVVSPRACAPKDRPLGRKPCFGHPCVQWEPGNRCPGRCMGRAVRMQQRHTACQHNSSDSNCDDRKRPTLRRNCTSGACDVCWHTGPWKPCTAACGRGFQSRKVDCIHTRSCKPVAKRHCVQKKKPISWRHCLGPSCDNRYKQRCCQSCQEG

SEQ ID NO: 742209 - protein, 216 aa, Homo sapiens
MSEAYFRVESGALGPEENFLSLDDILMSHEKLPVRTETAMPRLGAFFLERSAGAETDNAVPQGSKLELPLWLAKGLFDNKRRILSVELPKIYQEGWRTVFSADPNVVDLHKMGPHFYGFGSQLLHFDSPENADISQSLLQTFIGRFRRIMDSSQNAYNEDTSALVARLDEMERGLFQTGQKGLNDFQCWEKGQASQITASNLVQNYKKRKFTDMED

SEQ ID NO: 742210 - protein, 138 aa, Homo sapiens
MSEAYFRVESGALGPEENFLSLDDILMSHEKLPVRTETAMPRLGAFFLERSAGAETDNAVPQTFIGRFRRIMDSSQNAYNEDTSALVARLDEMERGLFQTGQKGLNDFQCWEKGQASQITASNLVQNYKKRKFTDMED

SEQ ID NO: 742211 - protein, 204 aa, Homo sapiens
MSEAYFRVESGALGPEENFLSLDDILMSHEKLPVRTETAMPRLGAFFLERSAGAETDNAVPQGFALLPRLECSGVIWLTAALTSQAPEILPPQPPMWLVLQGSKLELPLWLAKGLFDNKRRILSVELPKIYQEGWRTVFSADPNVVDLHKMGPHFYGFGSQLLHFDSPENADISQSLLQTFNLDVFADHGSSRCFKKNFSRVPR

SEQ ID NO: 742212 - protein, 236 aa, Homo sapiens
MSEAYFRVESGALGPEENFLSLDDILMSHEKLPVRTETAMPRLGAFFLERSAGAETDNAVPQVEFLVSLVSLTSRMKPKTLVGSKLELPLWLAKGLFDNKRRILSVELPKIYQEGWRTVFSADPNVVDLHKMGPHFYGFGSQLLHFDSPENADISQSLLQTFIGRFRRIMDSSQNAYNEDTSALVARLDEMERGLFQTGQKGLNDFQCWEKGQASQITASNLVQNYKKRKFTDMED

SEQ ID NO: 742213 - protein, 216 aa, Homo sapiens; identical to SEQ ID NO: 742209

SEQ ID NO: 742214 - protein, 101 aa, Homo sapiens
MSEAYFRVESGALGPEENFLSLDDILMSHEKLPVRTETAMPRLGAFFLERSAGAETDNAVPQSNRPDAVATPVIPALWEAEAGGSRGQEIQTILANMVKPH

SEQ ID NO: 742215 - protein, 216 aa, Homo sapiens; identical to SEQ ID NO: 742209

SEQ ID NO: 742216 - protein, 138 aa, Homo sapiens; identical to SEQ ID NO: 742210

SEQ ID NO: 742217 - protein, 252 aa, Homo sapiens
RLGTRPGGAGSPSCTPLTPEAPPNHASGSGEAQVAAMSEAYFRVESGALGPEENFLSLDDILMSHEKLPVRTETAMPRLGAFFLERSAGAETDNAVPQGSKLELPLWLAKGLFDNKRRILSVELPKIYQEGWRTVFSADPNVVDLHKMGPHFYGFGSQLLHFDSPENADISQSLLQTFIGRFRRIMDSSQNAYNEDTSALVARLDEMERGLFQTGQKGLNDFQCWEKGQASQITASNLVQNYKKRKFTDMED

SEQ ID NO: 742218 - protein, 255 aa, Homo sapiens
MSEAYFRVESGALGPEENFLSLDDILMSHEKLPVRTETAMPRLGAFFLERSAGAETDNAVPQGFALLPRLECSGVIWLTAALTSQAPEILPPQPPMWLVLQGSKLELPLWLAKGLFDNKRRILSVELPKIYQEGWRTVFSADPNVVDLHKMGPHFYGFGSQLLHFDSPENADISQSLLQTFIGRFRRIMDSSQNAYNEDTSALVARLDEMERGLFQTGQKGLNDFQCWEKGQASQITASNLVQNYKKRKFTDMED

SEQ ID NO: 742219 - protein, 374 aa, Homo sapiens
MEADSPAGPGAPEPLAEGAAAEFSSLLRRIKGKLFTWNILKTIALGQMLSLCICGTAITSQYLAERYKVNTPMLQSFINYCLLFLIYTVMLAFRSGSDNLLVILKRKWWKYILLGLADVEANYVIVRAYQYTTLTSVQLLDCFGIPVLMALSWFILHARYRVIHFIAVAVCLLGVGTMVGADILAGREDNSGSDVLIGDILVLLGASLYAISNVCEEYIVKKLSRQEFLGMVGLFGTIISGIQLLIVEYKDIASIHWDWKIALLFVAFALCMFCLYSFMPLVIKVTSATSVNLGILTADLYSLFVGLFLFGYKFSGLYILSFTVIMVGFILYCSTPTRTAEPAESSVPPVTSIGIDNLGLKLEENLQETHSAVL

SEQ ID NO: 742220 - protein, 327 aa, Homo sapiens
MLSLCICGTAITSQYLAERYKVNTPMLQSFINYCLLFLIYTVMLAFRSGSDNLLVILKRKWWKYILLGLADVEANYVIVRAYQYTTLTSVQLLDCFGIPVLMALSWFILHARYRVIHFIAVAVCLLGVGTMVGADILAGREDNSGSDVLIGDILVLLGASLYAISNVCEEYIVKKLSRQEFLGMVGLFGTIISGIQLLIVEYKDIASIHWDWKIALLFVAFALCMFCLYSFMPLVIKVTSATSVNLGILTADLYSLFVGLFLFGYKFSGLYILSFTVIMVGFILYCSTPTRTAEPAESSVPPVTSIGIDNLGLKLEENLQETHSAVL

SEQ ID NO: 742221 - protein, 374 aa, Homo sapiens; identical to SEQ ID NO: 742219

SEQ ID NO: 742222 - protein, 374 aa, Homo sapiens; identical to SEQ ID NO: 742219

SEQ ID NO: 742223 - protein, 367 aa, Homo sapiens
MEADSPAGPGAPEPLAEGAAAEFSSLLRRIKGKLFTWNILKTIALGQMLSLCICGTAITSQYLAERYKVNTPMLQSFINYCLLFLIYTVMLAFRSGSDNLLVILKRKWWKYILLGLADVEANYVIVRAYQYTTLTSVQLLDCFGIPVLMALSWFILHARYRVIHFIAVAVCLLGVGTMVGADILAGREDNSGSDVLIGDILVLLGASLYAISNVCEEYIVKKLSRQEFLGMVGLFGTIISGIQLLIVEYKDIASIHWDWKIALLFVAFALCMFCLYSFMPLVIKVTSATSVNLGILTADLYSLFVGLFLFGYKFSGLYILSFTVIMVGFILYCSTPTRTAEPAESSVPPAVKRQCYYYFLSKICNAL

SEQ ID NO: 742224 - protein, 367 aa, Homo sapiens; identical to SEQ ID NO: 742223

SEQ ID NO: 742225 - protein, 121 aa, Homo sapiens
EWPNSHLTQSNLCRSLLFAVVQSAVTFHLLFFFIFRDRVSLLLPRLECNDTISAYGDLRLLGSSDSHATASRVAGTTDTRHGKRLIFVFLVETGFHLVAQAGLEFLSLSDLPAPASQSAGI

SEQ ID NO: 742226 - protein, 78 aa, Homo sapiens
RGERQGQRLLSSCDHQQAVTKGAWPGAEVNSGPRSLLGPRKTREGTEIVVEANSRSEDWGGGAKRGLERCWDPELGPQ

SEQ ID NO: 742227 - protein, 73 aa, Homo sapiens
QLLLGEGTDSASDCRGICRKIGETEDTFNCKSPRNSKCKLFRGLLTSHSNHREVIETGSVDKDPQGLGPETSL

SEQ ID NO: 742228 - protein, 160 aa, Homo sapiens
MGPSVLRPLRRAEHPDVARSPKGVGSPLQGPACCLFPAGGVHNGVSKDRFPPLAPLSLSPPSSSAFQPHKGPVRFGTATAQGSEAKSPWVGVFQDTWPCVSCLLSPQPLGSWERDSHGSRARDPWAEPQKWLSILAWAGVGVEARGLAQADEAPSFQGGN

SEQ ID NO: 742229 - protein, 130 aa, Homo sapiens
MRLRPTGLHSQEIRHSKSQDEIGGRHKIQITKTLLIKQVAVKKPAKTHQNQDGDESDSGRPHCYTPISAMTVYRCHSNVWKLPVRSIKGRHEYIHPLFSISSRNNHKNGQPGALGAPLPMEWPFFYSFTF

SEQ ID NO: 742230 - protein, 285 aa, Homo sapiens
MKVTVGPDPSLVYRPDVDPEVAKDKASFRNYTSGPLLDRVFTTYKLMHTHQTVDFVRSKHAQFGGFSYKKMTVMEAVDLLDGLVDESDPDVDFPNSFHAFQTAEGIRKAHPDKDWFHLVGLLHDLGKVLALFGEPQWAVVGDTFPVGCRPQASVVFCDSTFQDNPDLQDPRYSTELGMYQPHCGLDRVLMSWGHDEYMYQVMKFNKFSLPPEAFYMIRFHSFYPWHTGRDYQQLCSQQDLAMLPWVREFNKFDLYTKCPDLPDVDKLRPYYQGLIDKYCPGILSW

SEQ ID NO: 742231 - protein, 285 aa, Homo sapiens; identical to SEQ ID NO: 742230

SEQ ID NO: 742232 - protein, 231 aa, Homo sapiens
MKVTVGPDPSLVYRPDVDPEVAKDKASFRNYTSGPLLDRVFTTYKLMHTHQTVDFVRSKHAQFGGFSYKKMTVMEAVDLLDGLVDESDPDVDFPNSFHAFQTAEGIRKAHPDKVPNLPCPSPSQTGSTSSGSCTTWGRSWPCSGSPSGLSSATPSPSDAVRRPPWFSATPPSRTTLTSRILDTAQSSGCISPTVGSTGSSCPGAMMQVRPLHQVPGPAGRGQAAALLPGAH

SEQ ID NO: 742233 - protein, 285 aa, Homo sapiens; identical to SEQ ID NO: 742230

SEQ ID NO: 742234 - protein, 296 aa, Homo sapiens
MKVTVGPDPSLVYRPDVDPEVAKDKASFRNYTSGPLLDRVFTTYKLMHTHQTVDFVRSKHAQFGGFSYKKMTVMEAVDLLDGLVDESDPDVDFPNSFHAFQTAEGIRKAHPDKVPNLALSIPLPDWFHLVGLLHDLGKVLALFGEPQWAVVGDTFPVGCRPQASVVFCDSTFQDNPDLQDPRYSTELGMYQPHCGLDRVLMSWGHDEYMYQVMKFNKFSLPPEAFYMIRFHSFYPWHTGRDYQQLCSQQDLAMLPWVREFNKFDLYTKCPDLPDVDKLRPYYQGLIDKYCPGILSW

SEQ ID NO: 742235 - protein, 258 aa, Homo sapiens
MKVTVGPDPSLVYRPDVDPEVAKDKASFRNYTHAQFGGFSYKKMTVMEAVDLLDGLVDESDPDVDFPNSFHAFQTAEGIRKAHPDKDWFHLVGLLHDLGKVLALFGEPQWAVVGDTFPVGCRPQASVVFCDSTFQDNPDLQDPRYSTELGMYQPHCGLDRVLMSWGHDEYMYQVMKFNKFSLPPEAFYMIRFHSFYPWHTGRDYQQLCSQQDLAMLPWVREFNKFDLYTKCPDLPDVDKLRPYYQGLIDKYCPGILSW

SEQ ID NO: 742236 - protein, 270 aa, Homo sapiens
MKVTVGPDPSLVYRPDVDPEVAKDKASFRNYTSGPLLDRVFTTYKLMHTHQTVDFVRSKHAQFGGFSYKKMTVMEAVDLLDGLVDESDPDVDFPNSFHAFQTAEGIRKAHPDKDWFHLVGLLHDLGKVLALFGEPQASVVFCDSTFQDNPDLQDPRYSTELGMYQPHCGLDRVLMSWGHDEYMYQVMKFNKFSLPPEAFYMIRFHSFYPWHTGRDYQQLCSQQDLAMLPWVREFNKFDLYTKCPDLPDVDKLRPYYQGLIDKYCPGILSW

SEQ ID NO: 742237 - protein, 313 aa, Homo sapiens
MKVTVGPDPSLVYRPDVDPEVAKDKASFRNYTSGPLLDRVFTTYKLMHTHQTVDFVRSKHAQFGGFSYKKMTVMEAVDLLDGLVDESDPDVDFPNSFHAFQTAEGIRKAHPDKDWFHLVGLLHDLGKVLALFGEPQWAVVGDTFPVGCRPQASVVFCDSTFQDNPDLQDPRYSTELGMYQPHCGLDRVLMSWGHDEYMYQVMKFNKFSLPPEVGGGRGNAARPPGPVLQPQVSRWVALPEAFYMIRFHSFYPWHTGRDYQQLCSQQDLAMLPWVREFNKFDLYTKCPDLPDVDKLRPYYQGLIDKYCPGILSW

SEQ ID NO: 742238 - protein, 320 aa, Homo sapiens
MKVTVGPDPSLVYRPDVDPEVAKDKASFRNYTSGPLLDRVFTTYKLMHTHQTVDFVRSKHAQFGGFSYKKMTVMEAVDLLDGLVDESDPDVDFPNSFHAFQTAEGIRKAHPDKDWFHLVGLLHDLGKVLALFGEPQWAVVGDTFPVGCRPQASVVFCDSTFQDNPDLQDPRYSTELGMYQPHCGLDRVLMSWGHDEYMYQVMKFNKFSLPPEAFYMIRFHSFYPWHTGRDYQQLCSQQDLAMLPWVREFKSTPRYPPRGVVGVKKGVGWGAWGFFTGLTAPPCCSKFDLYTKCPDLPDVDKLRPYYQGLIDKYCPGILSW

SEQ ID NO: 742239 - protein, 348 aa, Homo sapiens
MKVTVGPDPSLVYRPDVDPEVAKDKASFRNYTSGPLLDRVFTTYKLMHTHQTVDFVRSKHAQFGGFSYKKMTVMEAVDLLDGLVDESDPDVDFPNSFHAFQTAEGIRKAHPDKDWFHLVGLLHDLGKVLALFGEPQWAVVGDTFPVGCRPQASVVFCDSTFQDNPDLQDPRYSTELGMYQPHCGLDRVLMSWGHDEYMYQVMKFNKFSLPPEVGGGRGNAARPPGPVLQPQVSRWVALPEAFYMIRFHSFYPWHTGRDYQQLCSQQDLAMLPWVREFKSTPRYPPRGVVGVKKGVGWGAWGFFTGLTAPPCCSKFDLYTKCPDLPDVDKLRPYYQGLIDKYCPGILSW

SEQ ID NO: 742240 - protein, 267 aa, Homo sapiens
MKVTVGPDPSLVYRPDVDPEVAKDKASFRNYTSGPLLDRVFTTYKLMHTHQTVDFVRSKHAQFGGFSYKKMTVMEAVDLLDGLVDESDPDVDFPNSFHAFQTAEGIRKAHPDKDWFHLVGLLHDLGKVLALFGEPQWAVVGDTFPVGCRPQASVVFCDSTFQDNPDLQDPRYSTELGMYQPHCGLDRVLMSWGHDEYMYQVMKFNKFSLPPEAATTSSCAASRTWPCCPGCGSSTSSTSTPSARTCRTWTSCGPTTRGSLTSTALAS

SEQ ID NO: 742241 - protein, 241 aa, Homo sapiens
MKVTVGPDPSLVYRPDVDPEVAKDKASFRNYTSGPLLDRVFTTYKLMHTHQTVDFVRSKHAQFGGFSYKKMTVMEAVDLLDGLVDESDPDVDFPNSFHAFQTAEGIRKAHPDKDWFHLVGLLHDLGKVLALFGEPQWAVVGDTFPVGCRPQASVVFCDSTFQDNPDLQDPRYSTELGMYQPHCGLDRVLMSWGHDEYMYQVMKFNNKFDLYTKCPDLPDVDKLRPYYQGLIDKYCPGILSW

SEQ ID NO: 742242 - protein, 49 aa, Homo sapiens
MIRFHSFYPWHTGRDYQQLCSQQDLAMLPWVREFKSTPRYPPRGVVGVK

SEQ ID NO: 742243 - protein, 108 aa, Homo sapiens
AFYMIRFHSFYPWHTGRDYQQLCSQQDLAMLPWVREFKSTPRYPPRGVVGVKKGVGWGAWGFFTGLTAPPCCSKFDLYTKCPDLPDVDKLRPYYQGLIDKYCPGILSW

SEQ ID NO: 742244 - protein, 125 aa, Homo sapiens
METRSHYIAQAGLELLGSSNPPISASQSTGIKGVSHHAWQRYFQGAVFLKTRKGPQRQFNHQGCHSHHRPRVHRPEPGCRHLRFFCCCCFFSETEFCSCHPGWLECNGAISVHYNLGNRSETPSQ

SEQ ID NO: 742245 - protein, 104 aa, Homo sapiens
MGRIPGGCSSKAFIGRAQWLTPVIPALWEAKGLTLLSRLECSDVIMDHCSPQLTGLRMKGFLAQTPPLEFPVHQYQPGDHVLIKSWKRESLNQLRRTSSGTLDE

SEQ ID NO: 742246 - protein, 104 aa, Homo sapiens; identical to SEQ ID NO: 742245

SEQ ID NO: 742247 - protein, 104 aa, Homo sapiens; identical to SEQ ID NO: 742245

SEQ ID NO: 742248 - protein, 225 aa, Homo sapiens
MLLSGSGGDGVSAKMSTAAVPELKQISRVEAMRLGPGWSHSCHAMLYAANPGQLFGRIPMRFSVLMQMRFDGLLGFPGGFVDRRFWSLEDGLNRVLGLGLGCLRLTEADYLSSHLTEGPHRVVAHLYARQLTLEQLHAVEISAVHSRDHGLEVLGLVRVPLYTQKDRVGGFPNFLSNAFVSTAKCQLLFALKVLNMMPEEKLVEALAAATEKQKKALEKLLPASS

SEQ ID NO: 742249 - protein, 228 aa, Homo sapiens
KLARYEAGFESAGVSAKMSTAAVPELKQISRVEAMRLGPGWSHSCHAMLYAANPGQLFGRIPMRFSVLMQMRFDGLLGFPGGFVDRRFWSLEDGLNRVLGLGLGCLRLTEADYLSSHLTEGPHRVVAHLYARQLTLEQLHAVEISAVHSRDHGLEVLGLVRVPLYTQKDRVGGFPNFLSNAFVSTAKCQLLFALKVLNMMPEEKLVEALAAATEKQKKALEKLLPASS

SEQ ID NO: 742250 - protein, 468 aa, Homo sapiens
KLARYEAGFESAGVSAKMSTAAVPELKQISRVEAMRLGPGWSHSCHAMLYAANPGQLFGRIPMRFSVLMQMRFDGLLGFPGGFVDRRFWSLEDGLNRVLGLGLGCLRLTEADYLSSHLTEGPHRVVAHLYARQLTLEQLHAVEISAVHSRDHGLEVGPPPGPRPPPRGLALAPWKAPMGNTSPEGPLAGLGRVSLSPAMGWGEGSGAGRPGKEGRGWGPALGLPQGCVTSALLPAIANPGSGGVEIGGEEGMGEERGLLGELGNLSTAGVVKLGNLMLGVKALGICTLWSGRAGLRVFRLRWVDGGSMGCGPRGGVAWVRGGGVHGVSLHTCLGRRGLHCSEGAGWLLPGPAWVSHEVLGKAGCSYPGLIASRPLLLEVPLCGRPGPNPYLLSAQVLGLVRVPLYTQKDRVGGFPNFLSNAFVSTAKCQLLFALKVLNMMPEEKLVEALAAATEKQKKALEKLLPASS

SEQ ID NO: 742251 - protein, 251 aa, Homo sapiens
KLARYEAGFESAGVSAKMSTAAVPELKQISRVEAMRLGPGWSHSCHAMLYAANPGQLFGRIPMRFSVLMQMRFDGLLGFPGGFVDRRFWSLEDGLNRVLGLGLGCLRLTEADYLSSHLTEGPHRVVAHLYARQLTLEQLHAVEISAVHSRDHGLEVGPPPGPRPRPGVWLWPRGRHRWVLGLVRVPLYTQKDRVGGFPNFLSNAFVSTAKCQLLFALKVLNMMPEEKLVEALAAATEKQKKALEKLLPASS

SEQ ID NO: 742252 - protein, 225 aa, Homo sapiens; identical to SEQ ID NO: 742248

SEQ ID NO: 742253 - protein, 188 aa, Homo sapiens
KLARYEAGFESAGVSAKMSTAAVPELKQISRVEAMRLGPGWSHSCHAMLYAANPGQLFGRIPMRFSVLMQMRFDGLLGFPGGFVDRRFWSLEDGLNRVLGLGLGCLRLTEADYLSSHLTEGPHRVVAHLYARQLTLEQLHAVEISAVHSRDHGLEVLNMMPEEKLVEALAAATEKQKKALEKLLPASS

SEQ ID NO: 742254 - protein, 1023 aa, Homo sapiens
YKLLFNFVEQNMKIERLVEVKPSLVIDYLKTEKKLFWPKIKKVNVQVSFNPENKQKGILLTGSKTEVLKAVDIVKQVWDSVCVKSVHTDKPGAKQFFQDKARFYQSEIKRLFGCYIELQENEVMKEGGSPAGQKCFSRTVLAPGVVLIVQQGDLARLPVDVVVNASNEDLKHYGGLAAALSKAAGPELQADCDQIVKREGRLLPGNATISKAGKLPYHHVIHAVGPRWSGYEAPRCVYLLRRAVQLSLCLAEKYKYRSIAIPAISSGVFGFPLGRCVETIVSAIKENFQFKKDGHCLKEIYLVDVSEKTVEAFAEAVKTVFKATLPDTAAPPGLPPAAAGPGKTSWEKGSLVSPGGLQMLLVKEGVQNAKTDVVVNSVPLDLVLSRGPLSKSLLEKAGPELQEELDTVGQGVAVSMGTVLKTSSWNLDCRYVLHVVAPEWRNGSTSSLKIMEDIIRECMEITESLSLKSIAFPAIGTGNLGFPKNIFAELIISEVFKFSSKNQLKTLQEVHFLLHPSDHENIQAFSDEFARRANGNLVSDKIPKAKDTQGFYGTVSSPDSGVYEMKIGSIIFQVASGDITKEEADVIVNSTSNSFNLKAGVSKAILECAGQNVERECSQQAQQRKNDYIITGGGFLRCKNIIHVIGGNDVKSSVSSVLQECEKKNYSSICLPAIGTGNAKQHPDKVAEAIIDAIEDFVQKGSAQSVKKVKVVIFLPQVLDVFYANMKKREGTQLSSQQSVMSKLASFLGFSKQSPQKKNHLVLEKKTESATFRVCGENVTCVEYAISWLQDLIEKEQCPYTSEDECIKDFDEKEYQELNELQKKLNINISLDHKRPLIKVLGISRDVMQARDEIEAMIKRVRLAKEQESRADCISEFIEWQYNDNNTSHCFNKMTNLKLEDARREKKKTVDVKINHRHYTVNLNTYTATDTKGHSLSVQRLTKSKVDIPAHWSDMKQQNFCVVELLPSDPEYNTVASKFNQTCSHFRIEKVSLLLECSFWMVEISSVMVLYKIHFHSLPITFF

SEQ ID NO: 742255 - protein, 1097 aa, Homo sapiens
VNLNTYTATDTKGHSLSVQRLTKSKVDIPAHWSDMKQQNFCVVELLPSDPEYNTVASKFNQTCSHFRIIELQENEVMKEGGSPAGQKCFSRTVLAPGVVLIVQQGDLARLPVDVVVNASNEDLKHYGGLAAALSKAAGPELQADCDQIVKREGRLLPGNATISKAGKLPYHHVIHAVGPRWSGYEAPRCVYLLRRAVQLSLCLAEKYKYRSIAIPAISSGVFGFPLGRCVETIVSAIKENFQFKKDGHCLKEIYLVDVSEKTVEAFAEAVKTVFKATLPDTAAPPGLPPAAAGPGKTSWEKGSLVSPGGLQMLLVKEGVQNAKTDVVVNSVPLDLVLSRGPLSKSLLEKAGPELQEELDTVGQGVAVSMGTVLKTSSWNLDCRYVLHVVAPEWRNGSTSSLKIMEDIIRECMEITESLSLKSIAFPAIGTGNLGFPKNIFAELIISEVFKFSSKNQLKTLQEVHFLLHPSDHENIQAFSDEFARRANGNLVSDKIPKAKDTQGFYGTVSSPDSGVYEMKIGSIIFQVASGDITKEEADVIVNSTSNSFNLKAGVSKAILECAGQNVERECSQQAQQRKNDYIITGGGFLRCKNIIHVIGGNDVKSSVSSVLQECEKKNYSSICLPAIGTGNAKQHPDKVAEAIIDAIEDFVQKGSAQSVKKVKVVIFLPQVLDVFYANMKKREGTQLSSQQSVMSKLASFLGFSKQSPQKKNHLVLEKKTESATFRVCGENVTCVEYAISWLQDLIEKEQCPYTSEDECIKDFDEKEYQELNELQKKLNINISLDHKRPLIKVLGISRDVMQARDEIEAMIKRVRLAKEQESRADCISEFIEWQYNDNNTSHCFNKMTNLKLEDARREKKKTVDVKINHRHYTVNLNTYTATDTKGHSLSVQRLTKSKVDIPAHWSDMKQQNFCVVELLPSDPEYNTVASKFNQTCSHFRIEKIERIQNPDLWNSYQAKKKTMDAKNGQTMNEKQLFHGTDAGSVPHVNRNGFNRSYAGKNAVAYGKGTYFAVNANYSANDTYSRPDANGRKHVYYVRVLTGIYTHGNHSLIVPPSKNPQNPTDLYDTVTDNVHHPSLFVAFYDYQAYPEYLITFRK

SEQ ID NO: 742256 - protein, 1053 aa, Homo sapiens
VNLNTYTATDTKGHSLSVQRLTKSKVDIPAHWSDMKQQNFCVVELLPSDPEYNTVASKFNQTCSHFRIIELQENEVMKEGGSPAGQKCFSRTVLAPGVVLIVQQGDLARLPVDVVVNASNEDLKHYGGLAAALSKAAGPELQADCDQIVKREGRLLPGNATISKAGKLPYHHVIHAVGPRWSGYEAPRCVYLLRRAVQLSLCLAEKYKYRSIAIPAISSGVFGFPLGRCVETIVSAIKENFQFKKDGHCLKEIYLVDVSEKTVGPLQMLLVKEGVQNAKTDVVVNSVPLDLVLSRGPLSKSLLEKAGPELQEELDTVGQGVAVSMGTVLKTSSWNLDCRYVLHVVAPEWRNGSTSSLKIMEDIIRECMEITESLSLKSIAFPAIGTGNLGFPKNIFAELIISEVFKFSSKNQLKTLQEVHFLLHPSDHENIQAFSDEFARRANGNLVSDKIPKAKDTQGFYGTVSSPDSGVYEMKIGSIIFQVASGDITKEEADVIVNSTSNSFNLKAGVSKAILECAGQNVERECSQQAQQRKNDYIITGGGFLRCKNIIHVIGGNDVKSSVSSVLQECEKKNYSSICLPAIGTGNAKQHPDKVAEAIIDAIEDFVQKGSAQSVKKVKVVIFLPQVLDVFYANMKKREGTQLSSQQSVMSKLASFLGFSKQSPQKKNHLVLEKKTESATFRVCGENVTCVEYAISWLQDLIEKEQCPYTSEDECIKDFDEKEYQELNELQKKLNINISLDHKRPLIKVLGISRDVMQARDEIEAMIKRVRLAKEQESRADCISEFIEWQYNDNNTSHCFNKMTNLKLEDARREKKKTVDVKINHRHYTVNLNTYTATDTKGHSLSVQRLTKSKVDIPAHWSDMKQQNFCVVELLPSDPEYNTVASKFNQTCSHFRIEKIERIQNPDLWNSYQAKKKTMDAKNGQTMNEKQLFHGTDAGSVPHVNRNGFNRSYAGKNAVAYGKGTYFAVNANYSANDTYSRPDANGRKHVYYVRVLTGIYTHGNHSLIVPPSKNPQNPTDLYDTVTDNVHHPSLFVAFYDYQAYPEYLITFRK

SEQ ID NO: 742257 - protein, 580 aa, Homo sapiens
MKIGSIIFQVASGDITKEEADVIVNSTSNSFNLKAGVSKAILECAGQNVERECSQQAQQRKNDYIITGGGFLRCKNIIHVIGGNDVKSSVSSVLQECEKKNYSSICLPAIGTGNAKQHPDKVAEAIIDAIEDFVQKGSAQSVKKVKVVIFLPQVLDVFYANMKKREGTQLSSQQSVMSKLASFLGFSKQSPQKKNHLVLEKKTESATFRVCGENVTCVEYAISWLQDLIEKEQCPYTSEDECIKDFDEKEYQELNELQKKLNINISLDHKRPLIKVLGISRDVMQARDEIEAMIKRVRLAKEQESRADCISEFIEWQYNDNNTSHCFNKMTNLKLEDARREKKKTVDVKINHRHYTVNLNTYTATDTKGHSLSVQRLTKSKVDIPAHWSDMKQQNFCVVELLPSDPEYNTVASKFNQTCSHFRIEKIERIQNPDLWNSYQAKKKTMDAKNGQTMNEKQLFHGTDAGSVPHVNRNGFNRSYAGKNAVAYGKGTYFAVNANYSANDTYSRPDANGRKHVYYVRVLTGIYTHGNHSLIVPPSKNPQNPTDLYDTVTDNVHHPSLFVAFYDYQAYPEYLITFRK

SEQ ID NO: 742258 - protein, 420 aa, Homo sapiens
APLPHLRTQLSSQQSVMSKLASFLGFSKQSPQKKNHLVLEKKTESATFRVCGENVTCVEYAISWLQDLIEKEQCPYTSEDECIKDFDEKEYQELNELQKKLNINISLDHKRPLIKVLGISRDVMQARDEIEAMIKRVRLAKEQESRADCISEFIEWQYNDNNTSHCFNKMTNLKLEDARREKKKTVDVKINHRHYTVNLNTYTATDTKGHSLSVQRLTKSKVDIPAHWSDMKQQNFCVVELLPSDPEYNTVASKFNQTCSHFRIEKIERIQNPDLWNSYQAKKKTMDAKNGQTMNEKQLFHGTDAGSVPHVNRNGFNRSYAGKNAVAYGKGTYFAVNANYSANDTYSRPDANGRKHVYYVRVLTGIYTHGNHSLIVPPSKNPQNPTDLYDTVTDNVHHPSLFVAFYDYQAYPEYLITFRK

SEQ ID NO: 742259 - protein, 365 aa, Homo sapiens
MTGENLVSWLQDLIEKEQCPYTSEDECIKDFDEKEYQELNELQKKLNINISLDHKRPLIKVLGISRDVMQARDEIEAMIKRVRLAKEQESRADCISEFIEWQYNDNNTSHCFNKMTNLKLEDARREKKKTVDVKINHRHYTVNLNTYTATDTKGHSLSVQRLTKSKVDIPAHWSDMKQQNFCVVELLPSDPEYNTVASKFNQTCSHFRIEKIERIQNPDLWNSYQAKKKTMDAKNGQTMNEKQLFHGTDAGSVPHVNRNGFNRSYAGKNAVAYGKGTYFAVNANYSANDTYSRPDANGRKHVYYVRVLTGIYTHGNHSLIVPPSKNPQNPTDLYDTVTDNVHHPSLFVAFYDYQAYPEYLITFRK

SEQ ID NO: 742260 - protein, 135 aa, Homo sapiens [sequence omitted]

SEQ ID NO: 742261 - protein, 1097 aa, Homo sapiens; identical to SEQ ID NO: 742255

SEQ ID NO: 742262 - protein, 1097 aa, Homo sapiens; identical to SEQ ID NO: 742255

SEQ ID NO: 742263 - protein, 1097 aa, Homo sapiens; identical to SEQ ID NO: 742255

SEQ ID NO: 742264 - protein, 976 aa, Homo sapiens
VNLNTYTATDTKGHSLSVQRLTKSKVDIPAHWSDMKQQNFCVVELLPSDPEYNTVASKFNQTCSHFRIIELQENEVMKEGGSPAGQKCFSRTVLAPGVVLIVQQGDLARLPVDVVVNASNEDLKHYGGLAAALSKAAGPELQADCDQIVKREGRLLPGNATISKAGKLPYHHVIHAVGPRWSGYEAPRCVYLLRRAVQLSLCLAEKYKYRSIAIPAISSGVFGFPLGRCVETIVSAIKENFQFKKDGHCLKEIYLVDVSEKTVEAFAEAVKTVFKATLPDTAAPPGLPPAAAGPGKTSWEKGSLVSPGGLQMLLVKEGVQNAKTDVVVNSVPLDLVLSRGPLSKSLLEKAGPELQEELDTVGQGVAVSMGTVLKTSSWNLDCRYVLHVVAPEWRNGSTSSLKIMEDIIRECMEITESLSLKSIAFPAIGTGNLGFPKNIFAELIISEVFKFSSKNQLKTLQEVHFLLHPSDHENIQAFSDEFARRANGNLVSDKIPKAKDTQGFYGTVSSPDSGVYEMKIGSIIFQVASGDITKEEADVIVNSTSNSFNLKAGVSKAILECAGQNVERECSQQAQQRKNDYIITGGGFLRCKNIIHVIGGNDVKSSVSSVLQECEKKNYSSICLPAIGTGNAKQHPDKVAEAIIDAIEDFVQKGSAQSVKKVKVVIFLPQVLDVFYANMKKREGTQLSSQQSVMSKLASFLGFSKQSPQKKNHLVLEKKTESATFRVCGENVTCVEYAISWLQDLIEKEQCPYTSEDECIKDFDEKEYQELNELQKKLNINISLDHKRPLIKVLGISRDVMQARDEIEAMIKRVRLAKEQESRADCISEFIEWQYNDNNTSHCFNKMTNLKLEDARREKKKTVDVKINHRHYTVNLNTYTATDTKGHSLSVQRLTKSKVDIPAHWSDMKQQNFCVVELLPSDPEYNTVASKFNQTCSHFRIEKVSLLLECSFWMVEISSVMVLYKIHFHSLPITFF

SEQ ID NO: 742265 - protein, 975 aa, Homo sapiens
VNLNTYTATDTKGHSLSVQRLTKSKVDIPAHWSDMKQQNFCVVELLPSDPEYNTVASKFNQTCSHFRIIELQENEVMKEGGSPAGQKCFSRTVLAPGVVLIVQQGDLARLPVDVVVNASNEDLKHYGGLAAALSKAAGPELQADCDQIVKREGRLLPGNATISKAGKLPYHHVIHAVGPRWSGYEAPRCVYLLRRAVQLSLCLAEKYKYRSIAIPAISSGVFGFPLGRCVETIVSAIKENFQFKKDGHCLKEIYLVDVSEKTVEAFAEAVKTVFKATLPDTAAPPGLPPAAAGPGKTSWEKGSLVSPGGLQMLLVKEGVQNAKTDVVVNSVPLDLVLSRGPLSKSLLEKAGPELQEELDTVGQGVAVSMGTVLKTSSWNLDCRYVLHVVAPEWRNGSTSSLKIMEDIIRECMEITESLSLKSIAFPAIGTGNLGFPKNIFAELIISEVFKFSSKNQLKTLQEVHFLLHPSDHENIQAFSDEFARRANGNLVSDKIPKAKDTQGFYGTVSSPDSGVYEMKIGSIIFQVASGDITKEEADVIVNSTSNSFNLKAGVSKAILECAGQNVERECSQQAQQRKNDYIITGGGFLRCKNIIHVIGGNDVKSSVSSVLQECEKKNYSSICLPAIGTGNAKQHPDKVAEAIIDAIEDFVQKGSAQSVKKVKVVIFLPQVLDVFYANMKKREGTQLSSQQSVMSKLASFLGFSKQSPQKKNHLVLEKKTESATFRVCGENVTCVEYAISWLQDLIEKEQCPYTSEDECIKDFDEKEYQELNELQKKLNINISLDHKRPLIKVLGISRDVMQARDEIEAMIKRVRLAKEQESRADCISEFIEWQYNDNNTSHCFNKMTNLKLEDARREKKKTVDVKINHRHYTVNLNTYTATDTKGHSLSVQRLTKSKVDIPAHWSDMKQQNFCVVELLPSDPEYNTVASKFNQTCSHFRIEKVNVMIRACSPSYWEAEVEGLHEPRSLTPVWVT

SEQ ID NO: 742266 - protein, 1097 aa, Homo sapiens; identical to SEQ ID NO: 742255

SEQ ID NO: 742267 - protein, 976 aa, Homo sapiens; identical to SEQ ID NO: 742264

SEQ ID NO: 742268 - protein, 1097 aa, Homo sapiens; identical to SEQ ID NO: 742255

SEQ ID NO: 742269 - protein, 1097 aa, Homo sapiens; identical to SEQ ID NO: 742255

SEQ ID NO: 742270 - protein, 1097 aa, Homo sapiens; identical to SEQ ID NO: 742255

SEQ ID NO: 742271 - protein, 1097 aa, Homo sapiens; identical to SEQ ID NO: 742255

SEQ ID NO: 742272 - protein, 976 aa, Homo sapiens; identical to SEQ ID NO: 742264

SEQ ID NO: 742273 - protein, 375 aa, Homo sapiens
VNLNTYTATDTKGHSLSVQRLTKSKVDIPAHWSDMKQQNFCVVELLPSDPEYNTVASKFNQTCSHFRIIELQENEVMKEGGSPAGQKCFSRTVLAPGVVLIVQQGDLARLPVDVVVNASNEDLKHYGGLAAALSKAAGPELQADCDQIVKREGRLLPGNATISKAGKLPYHHVIHAVGPRWSGYEAPRCVYLLRRAVQLSLCLAEKYKYRSIAIPAISSGVFGFPLGRCVETIVSAIKENFQFKKDGHCLKEIYLVDVSEKTVEAFAEAVKTVFKATLPDTAAPPGLPPAAAGPGKTSWEKGSLVSPGGLQMLLVKEGVQNAKVSVAFTEHHQGTVTLLSQWLSHGGLKKDKDQGENQGRESHAFHPCLETIFLR

SEQ ID NO: 742274 - protein, 151 aa, Homo sapiens
MAASSQGNFEGDIESVDLAEFAKQQPWWRKLFGPESGLSAEKYSVATHLFIGGVTGWCTGFIFQKVGKLAATAVGGGFFLLQLANHSGYIKVDWQRVEKDMKKAKEQLKIPKSTQIPNQVRSKAEEVVSFVKKNVLVTGGFFGGFLLGMAS

SEQ ID NO: 742275 - protein, 670 aa, Homo sapiens
AGAESLGSPREDSDLFGLIRLPTSGNFDPPRFRTRSRLGGFVQVRLLLGQPLFASAPLRGRTRLGSARRLAAFSVPYSGGGFGRPRPSSGVLFGPRFGLRDRRFGRSRTAPSGRLGGVRMEDSDSAAKQLGLADAAAAGGEAEEPVLSRDEDSEEDADSEAERETPRVTAVAVMAAEPGHMDMGAEALPGPDEAAAAAAFAEVTTVTVANVGAAADNVFTTSVANAASISGHVLSGRTALQIGDSLNTEKATLIVVHTDGSIVETTGLKGPAAPLTPGPQSPPTPLAPGQEKGGTKYNWDPSVYDSELPVRCRNISGTLYKNRLGSGGRGRCIKQGENWYSPTEFEAMAGRASSKDWKRSIRYAGRPLQCLIQDGILNPHAASCTCAACCDDMTLSGPVRLFVPYKRRKKENELPTTPVKKDSPKNITLLPATAATTFTVTPSGQITTSGALTFDRASTVEATAVISESPAQGDVFAGATVQEASVQPPCRASHPEPHYPGYQDSCQIAPFPEAALPTSHPKIVLTSLPALAVPPPTPTKAAPPALVNGLELSEPRSWLYLEEMVNSLLNTAQQLKTLFEQAKHASTYREAATNQAKIHADAERKEQSCVNCGREAMSECTGCHKVNYCSTFCQRKDWKDHQHICGQSAAVTVQADEVHVAESVMEKVTV

SEQ ID NO: 742276 - protein, 684 aa, Homo sapiens
AGAESLGSPREDSDLFGLIRLPTSGNFDPPRFRTRSRLGGFVQVRLLLGQPLFASAPLRGRTRLGSARRLAAFSVPIRAAASGGLGPARASSSGPASGSATGASGGPGRRLREGSAESGWRTRTRRQSSWAWLKAAAVAAAAAVAAAAAAAAGGEAEEPVLSRDEDSEEDADSEAERETPRVTAVAVMAAEPGHMDMGAEALPGPDEAAAAAAFAEVTTVTVANVGAAADNVFTTSVANAASISGHVLSGRTALQIGDSLNTEKATLIVVHTDGSIVETTGLKGPAAPLTPGPQSPPTPLAPGQEKGGTKYNWDPSVYDSELPVRCRNISGTLYKNRLGSGGRGRCIKQGENWYSPTEFEAMAGRASSKDWKRSIRYAGRPLQCLIQDGILNPHAASCTCAACCDDMTLSGPVRLFVPYKRRKKENELPTTPVKKDSPKNITLLPATAATTFTVTPSGQITTSGALTFDRASTVEATAVISESPAQGDVFAGATVQEASVQPPCRASHPEPHYPGYQDSCQIAPFPEAALPTSHPKIVLTSLPALAVPPPTPTKAAPPALVNGLELSEPRSWLYLEEMVNSLLNTAQQLKTLFEQAKHASTYREAATNQAKIHADAERKEQSCVNCGREAMSECTGCHKVNYCSTFCQRKDWKDHQHICGQSAAVTVQADEVHVAESVMEKVTV

SEQ ID NO: 742277 - protein, 684 aa, Homo sapiens; identical to SEQ ID NO: 742276

SEQ ID NO: 742278 - protein, 76 aa, Homo sapiens
EIVPRHSSLGGRQSCVNCGREAMSECTGCHKVNYCSTFCQRKDWKDHQHICGQSAAVTVQADEVHVAESVMEKVTV

SEQ ID NO: 742279 - protein, 459 aa, Homo sapiens
AGAESLGSPREDSDLFGLIRLPTSGNFDPPRFRTRSRLGGFVQVRLLLGQPLFASAPLRGRTRLGSARRLAAFSVPIRAAASGGLGPARASSSGPASGSATGASGGPGRRLREGSAESGWRTRTRRQSSWAWLKAAAVAAAAAVAAAAAAAAGGEAEEPVLSRDEDSEEDADSEAERETPRVTAVAVMAAEPGHMDMGAEALPGPDEAAAAAAFAEVTTVTVANVGAAADNVFTTSVANAASISGHVLSGRTALQIGDSLNTEKATLIVVHTDGSIVETTGLKGPAAPLTPGPQSPPTPLAPGQEKGGTKYNWDPSVYDSELPVRCRNISGTLYKNRLGSGGRGRCIKQGENWYSPTEFEAMAGRASSKDWKRSIRYAGRPLQCLIQDGILNPHAASCTCAACCDDMTLSGPVRLFVPYKRRKKENELPTTPVKKDSPKNITLLPATAATTFTVTPSGR

SEQ ID NO: 742280 - protein, 100 aa, Homo sapiens
LHCMILLLILSGVNSSGFSELGTHLGLNHPGGSVILQGSSHMVSHHSIVWVKLLYSMADSFHQEEKLQCAKVYQVSAGIMLANVTLVKANHKVKAHIIGK

SEQ ID NO: 742281 - protein, 302 aa, Homo sapiens
MNQASTRSHCIFTIHLSSKEPGSATVRHAKLHLVDLAGSERVAKTGVGGHLLTEAKYINLSLHYLEQVIIALSEKHRSHIPYRNSMMTSVLRDSLGGNCMTTMIATLSLEKRNLDESISTCRFAQRVALIKNEAVLNEEINPRLVIKRLQKEIQELKDELAMVTGEQRTEALTEAELLQLEKLITSFLEDQDSDSRLEVGADMRKVHHCFHHLKKLLNDKKILENNTVSSESKDQDCQEPLKEEEYRKLRDILKQRDNEINILSEVMKKLPLSWFERGKQQSFLSHMAELPTQLPFHIASFH

SEQ ID NO: 742282 - protein, 627 aa, Homo sapiens
MNQASTRSHCIFTIHLSSKEPGSATVRHAKLHLVDLAGSERVAKTGVGGHLLTEAKYINLSLHYLEQVIIALSEKHRSHIPYRNSMMTSVLRDSLGGNCMTTMIATLSLEKRNLDESISTCRFAQRVALIKNEAVLNEEINPRLVIKRLQKEIQELKDELAMVTGEQRTEALTEAELLQLEKLITSFLEDQDSDSRLEVGADMRKVHHCFHHLKKLLNDKKILENNTVSSESKDQDCQEPLKEEEYRKLRDILKQRDNEINILVNMLKKEKKKAQEALHLAGMDRREFRQSQSPPFRLGNPEEGQRMRLSSAPSQAQDFSILGKRSSLLHKKIGMREEMSLGCQEAFEIFKRDHADSVTIDDNKQILKQRFSEAKALGESINEARSKIGHLKEEITQRHIQQVALGISENMAVPLMPDQQEEKLRSQLEEEKRRYKTMFTRLKALKVEIEHLQLLMDKAKVKLQKEFEVWWAEEATNLQVNSPAVNSLDHTKPFLQTSDSQHEWSQLLSNKSSGGWEVQDQGTGRFDVCDVNARKILPSPCPSPHSQKQSSTSTPLEDSIPKRPVSSIPLTGDSQTDSDIIAFIKARQSILQKQYLQLLCSLFPKSAVSSAQASTNRKGLSDVLVTR

SEQ ID NO: 742283 - protein, 265 aa, Homo sapiens
MREEMSLGCQEAFEIFKRDHADSVTIDDNKQILKQRFSEAKALGESINEARSKIGHLKEEITQRHIQQVALGISENMAVPLMPDQQEEKLRSQLEEEKRRYKTMFTRLKALKVEIEHLQLLMDKAKVKLQKEFEVWWAEEATNLQVNSPAVNSLDHTKPFLQTSDSQHEWSQLLSNKSSGGWEVQDQGTGRFDVCDVNARKILPSPCPSPHSQKQSSTSTPLEDSIPKRPVSSIPLTGDSQTDSDIIAFIKARQSILQKQCLGSN

SEQ ID NO: 742284 - protein, 293 aa, Homo sapiens
MREEMSLGCQEAFEIFKRDHADSVTIDDNKQILKQRFSEAKALGESINEARSKIGHLKEEITQRHIQQVALGISENMAVPLMPDQQEEKLRSQLEEEKRRYKTMFTRLKALKVEIEHLQLLMDKAKVKLQKEFEVWWAEEATNLQVNSPAVNSLDHTKPFLQTSDSQHEWSQLLSNKSSGGWEVQDQGTGRFDVCDVNARKILPSPCPSPHSQKQSSTSTPLEDSIPKRPVSSIPLTGDSQTDSDIIAFIKARQSILQKQYLQLLCSLFPKSAVSSAQASTNRKGLSDVLVTR

SEQ ID NO: 742285 - protein, 466 aa, Homo sapiens
MVTGEQRTEALTEAELLQLEKLITSFLEDQDSDSRLEVGADMRKVHHCFHHLKKLLNDKKILENNTVSSESKDQDCQEPLKEEEYRKLRDILKQRDNEINILVNMLKKEKKKAQEALHLAGMDRREFRQSQSPPFRLGNPEEGQRMRLSSAPSQAQDFSILGKRSSLLHKKIGMREEMSLGCQEAFEIFKRDHADSVTIDDNKQILKQRFSEAKALGESINEARSKIGHLKEEITQRHIQQVALGISENMAVPLMPDQQEEKLRSQLEEEKRRYKTMFTRLKALKVEIEHLQLLMDKAKVKLQKEFEVWWAEEATNLQVNSPAVNSLDHTKPFLQTSDSQHEWSQLLSNKSSGGWEVQDQGTGRFDVCDVNARKILPSPCPSPHSQKQSSTSTPLEDSIPKRPVSSIPLTGDSQTDSDIIAFIKARQSILQKQYLQLLCSLFPKSAVSSAQASTNRKGLSDVLVTR

SEQ ID NO: 742286 - protein, 159 aa, Homo sapiens
MNQASTRSHCIFTIHLSSKEPGSATVRHAKLHLVDLAGSERVAKTGVGGHLLTEAKYINLSLHYLEQVIIALSEKHRSHIPYRNSMMTSVLRDSLGGNCMTTMIATLSLEKRNLDESISTCRFAQRVALIKNEAVLNEEINPRLKAPSSSDGVLFCRNQ

SEQ ID NO: 742287 - protein, 364 aa, Homo sapiens
MYLSRFLSIHALWVTVSSVMQPYPLVWGHYDLCKTQIYTEEGKVWDYMACQPESTDMTKYLKVKLDPPDITCGDPPETFCAMGNPYMCNNECDASTPELAHPPELMFDFEGRHPSTFWQSATWKEYPKPLQVNITLSWSKTIELTDNIVITFESGRPDQMILEKSLDYGRTWQPYQYYATDCLDAFHMDPKSVKDLSQHTVLEIICTEEYSTGYTTNSKIIHFEIKDRFAFFAGPRLRNMASLYGQLDTTKKLRDFFTVTDLRIRLLRPAVGEIFVDELHLARYFYAISDIKVRGRCKCNLHATVCVYDNSKLTCECEHNTTGPDCGKCKKNYQGRPWSPGSYLPIPKGTANTCIPSISSIGSK

SEQ ID NO: 742288 - protein, 296 aa, Homo sapiens
MYLSRFLSIHALWVTVSSVMQPYPLVWGHYDLCKTQIYTEEGKVWDYMACQPESTDMTKYLKVKLDPPDITCGDPPETFCAMGNPYMCNNECDASTPELAHPPELMFDFEGRHPSTFWQSATWKEYPKPLQVNITLSWSKTIELTDNIVITFESGRPDQMILEKSLDYGRTWQPYQYYATDCLDAFHMDPKSVKDLSQHTVLEIICTEEYSTGYTTNSKIIHFEIKDRFAFFAGPRLRNMASLYGQLDTTKKLRDFFTVTDLRIRLLRPAVGEIFVDELHLARYFYAISDIKVRGR

SEQ ID NO: 742289 - protein, 296 aa, Homo sapiens; identical to SEQ ID NO: 742288

SEQ ID NO: 742290 - protein, 136 aa, Homo sapiens
PKSQAHVTMKRELEEGVSGEACGNCCLRVDQWQAAVGQQGQQLGKQAEHRAPEREQLGPAGQVCVCYQVWPGPRIMTSSLPNLVQVSLLVDSTSEPSREGDFCEIQVLAVTKLTFQSSIININKVRVGKDISSACN

SEQ ID NO: 742291 - protein, 106 aa, Homo sapiens
MENCSQVQWVMLVIPAVWQTELGGLLEPRSLRPTWATWRNTISTKNTKISQAWWYTPVIQAECSGMIMAHCSLHLLGSIDPPTSATQVAGITGVVRTAANLVVVGA

SEQ ID NO: 742292 - protein, 101 aa, Homo sapiens
QRLLCPIRLAVGTPAFPLRFLKINPTPRQGRSCCSSTPAPPGTSGKRDFFYKACHSDLNREENNGFFSSRLRKFTFEYLTTKFPINTSKAQKKASWGPYLP

SEQ ID NO: 742293 - protein, 103 aa, Homo sapiens
GAQCGLGQHTTWPPALQSHFRLKVVSESHLRAQGPWPSWLTEFLRSAEPQTEPPWKVHPVTAGSGWGWRCKVPRYSRRFSHHLSTTFRTQPAPVAAGRKNYDL

SEQ ID NO: 742294 - protein, 112 aa, Homo sapiens
LYPGEGSGEGRSVLTCVREVAKKMPKFTACHLVNASCVLSLTSHLPNSAFFLYTQLQSLMCAITSLLLSLPRELKPNSYCVLHPPASFSPCPHPNPHSKYTTDDWSTFPRSS

SEQ ID NO: 742295 - protein, 974 aa, Homo sapiens
MAKAGRAGGPPPGGGAPWHLRNVLSDSVESSDDEFFDAREEMAEGKNAILIGMSQWNSNDLVEQIETMGKLDEHQGEGTAPCTSSILQEKQRELYRVSLRRQRFPAQGSIEIHEDSEEGCPQRSCKTHVLLLVLHGGNILDTGAGDPSCKAADIHTFSSVLEKVTRAHFPAALGHILIKFVPCPAICSEAFSLVSHLNPYSHDEGCLSSSQDHVPLAALPLLAISSPQYQDAVATVIERANQVYREFLKSSDGIGFSGQVCLIGDCVGGLLAFDAICYSAGPSGDSPASSSRKGSISSTQDTPVAVEEDCSLASSKRLSKSNIDISSGLEDEEPKRPLPRKQSDSSTYDCEAITQHHAFLSSIHSSVLKDESETPAAGGPQLPEVSLGRFDFDVSDFFLFGSPLGLVLAMRRTVLPGLDGFQVRPACSQVYSFFHCADPSASRLEPLLEPKFHLVPPVSVPRYQRFPLGDGQSLLLADALHTHSPLFLEGSSRDSPPLLDAPASPPQASRFQRPGRRMSEGSSHSESSESSDSMAPVGASRITAKWWGSKRIDYALYCPDVLTAFPTVALPHLFHASYWESTDVVAFILRQVMRYESVNIKESARLDPAALSPANPREKWLRKRTQVKLRNVTANHRANDVIAAEDGPQVLVGRFMYGPLDMVALTGEKVDILVMAEPSSGRWVHLDTEITNSSGRITYNVPRPRRLGVGVYPVKMVVRGDQTCAMSYLTVLPRGMECVVFSIDGSFAASVSIMGSDPKVRPGAVDVVRHWQDLGYMILYITGRPDMQKQRVVSWLSQHNFPQGMIFFSDGLVHDPLRQKAIFLRNLMQECFIKISAAYGSTKDISVYSVLGLPASQIFIVGRPTKKYQTQCQFLSEGYAAHLAALEASHRSRPKKNNSRMILRKGSFGLHAQPEFLRKRNHLRRTMSVQQPDPPAANPKPERAQSQPESDKDHERPLPALSWARGPPKFESVP

SEQ ID NO: 742296 - protein, 893 aa, Homo sapiens
MAKAGRAGGPPPGGGAPWHLRNVLSDSVESSDDEFFDAREEMAEGKNAILIGMSQWNSNDLVEQIETMGKLDEHQGEGTAPCTSSILQEKQRELYRVSLRRQRFPAQGSIEIHEDSEEGCPQRSCKTHVLLLVLHGGNILDTGAGDPSCKAADIHTFSSVLEKVTRAHFPAALGHILIKFVPCPAICSEAFSLVSHLNPYSHDEGCLSSSQDHVPLAALPLLAISSPQYQDAVATVIERANQVYREFLKSSDGIGFSGQVCLIGDCVGGLLAFDAICYSAGPSGDSPASSSRKGSISSTQDTPVAVEEDCSLASSKRLSKSNIDISSGLEDEEPKRPLPRKQSDSSTYDCEAITQHHAFLSSIHSSVLKDESETPAAGGPQLPEVSLGRFDFDVSDFFLFGSPLGLVLAMRRTVLPGLDGFQVRPACSQVYSFFHCADPSASRLEPLLEPKFHLVPPVSVPRYQRFPLGDGQSLLLADALHTHSPLFLEGSSRDSPPLLDAPASPPQASRFQRPGRRMSEGSSHSESSESSDSMAPVGASRITAKWWGSKRIDYALYCPDVLTAFPTVALPHLFHASYWESTDVVAFILRQVMRYESVNIKESARLDPAALSPANPREKWLRKRTQVKLRNVTANHRANDVIAAEDGPQVLVGRFMYGPLDMVALTGEKVDILVMAEPSSGRWVHLDTEITNSSGRITYNVPRPRRLGVGVYPVKMVVRGDQTCAMSYLTVLPRGMECVVFSIDGSFAASVSIMGSDPKVRPGAVDVVRHWQDLGYMILYITGRPDMQKQRVVSWLSQHNFPQGMIFFSDGLVHDPLRQKAIFLRNLMQECFIKISAAYGSTKDISVYSVLGLPASQIFIVGRPTKKYQTQCQDCLSPGFKASPGNIARRCFY

SEQ ID NO: 742297 - protein, 457 aa, Homo sapiens [sequence omitted]

SEQ ID NO: 742298 - protein, 364 aa, Homo sapiens
MSPEEWTYLVVLLISIPIGFLFKKAGPGLKRWGAAAVGLGLTLFTCGPHTLHSLVTILGTWALIQAQPCSCHALALAWTFSYLLFFRALSLLGLPTPTPFTNAVQLLLTLKLVSLASEVQDLHLAQRKEMASGFSKGPTLGLLPDVPSLMETLSYSYCYVGIMTGPFFRYRTYLDWLEQPFPGAVPSLRPLLRRAWPAPLFGLLFLLSSHLFPLEAVREDAFYARPLPARLFYMIPVFFAFRMRFYVAWIAAECGCIAAGFGAYPVAAKARAGGGPTLQCPPPSRQKNERRGSLESNIRPPTKHVTGKYPRGTSMRSKQRQSARRKTKAADIQANDREHKHTTASDTTRAEKTGERHGESRKST

SEQ ID NO: 742299 - protein, 314 aa, Homo sapiens
AVAVLSVSIREGPTLGLLPDVPSLMETLSYSYCYVGIMTGPFFRYRTYLDWLEQPFPGAVPSLRPLLRRAWPAPLFGLLFLLSSHLFPLEAVREDAFYARPLPARLFYMIPVFFAFRMRFYVAWIAAECGCIAAGFGAYPVAAKARAGGGPTLQCPPPSSPEKAASLEYDYETIRNIDCYSTDFCVRVRDGMRYWNMTVQWWLAQYIYKSAPARSYVLRKRWHMLLSATGRAPPGITELLTIRGLAGEAAGSARGRASHGQSWTVHGLETPEEMGWHGGPATRRAHRTTADRRVSEPGGTRGGGSSPRGQRGTR

SEQ ID NO: 742300 - protein, 340 aa, Homo sapiens
MSPEEWTYLVVLLISIPIGFLFKKAGPGLKRWGAAAVGLGLTLFTCGPHTLHSLVTILGTWALIQAQPCSCHALALAWTFSYLLFFRALSLLGLPTPTPFTNAVQLLLTLKLVSLASEVQDLHLAQRKEMASGFSKGPTLGLLPDVPSLMETLSYSYCYVGIMTGPFFRYRTYLDWLEQPFPGAVPSLRPLLRRAWPAPLFGLLFLLSSHLFPLEAVREDAFYARPLPARLFYMIPVFFAFRMRFYVAWIAAECGCIAAGFGAYPVAAKARAGGGPTLQCPPPSRGQAARGRLPKTQQPPPPRAGSAPSREESGEQGARATTFLSRVSPPRQPWPASPCR

SEQ ID NO: 742301 - protein, 472 aa, Homo sapiens
MSPEEWTYLVVLLISIPIGFLFKKAGPGLKRWGAAAVGLGLTLFTCGPHTLHSLVTILGTWALIQAQPCSCHALALAWTFSYLLFFRALSLLGLPTPTPFTNAVQLLLTLKLVSLASEVQDLHLAQRKEMASGFSKGPTLGLLPDVPSLMETLSYSYCYVGIMTGPFFRYRTYLDWLEQPFPGAVPSLRPLLRRAWPAPLFGLLFLLSSHLFPLEAVREDAFYARPLPARLFYMIPVFFAFRMRFYVAWIAAECGCIAAGFGAYPVAAKARAGGGPTLQCPPPSSPEKAASLEYDYETIRNIDCYSTDFCVRVRDGMRYWNMTVQWWLAQYIYKSAPARSYVLRSAWTMLLSAYWHGLHPGYYLSFLTIPLCLAAEGRLESALRGRLSPGGQKAWDWVHWFLKMRAYDYMCMGFVLLSLADTLRYWASIYFCIHFLALAALGLGLALGGGSPSRRKAASQPTSLAPEKLREE

SEQ ID NO: 742302 - protein, 369 aa, Homo sapiens
AGGTARDLRIGGKRAGTARPPPARRAAQTMSPEEWTYLVVLLISIPIGFLFKKAGPGLKRWGAAAVGLGLTLFTCGPHTLHSLVTILGTWALIQAQPCSCHALALAWTFSYLLFFRALSLLGLPTPTPFTNAVQLLLTLKLVSLASEVQDLHLAQRKEMASGFSKGPTLGLLPDVPSLMETLSYSYCYVGIMTGPFFRYRTYLDWLEQPFPGAVPSLRPLLRRAWPAPLFGLLFLLSSHLFPLEAVREDAFYARPLPARLFYMIPVFFAFRMRFYVAWIAAECGCIAAGFGAYPVAAKARAGGGPTLQCPPPSRGQAARGRLPKTQQPPPPRAGSAPSREESGEQGARATTFLSRVSPPRQPWPASPCR

SEQ ID NO: 742303 - protein, 340 aa, Homo sapiens; identical to SEQ ID NO: 742300

SEQ ID NO: 742304 - protein, 340 aa, Homo sapiens; identical to SEQ ID NO: 742300

SEQ ID NO: 742305 - protein, 199 aa, Homo sapiens
MSVPHPHPPPPSPEKAASLEYDYETIRNIDCYSTDFCVRVRDGMRYWNMTVQWWLAQYIYKSAPARSYVLRSAWTMLLSAYWHGLHPGYYLSFLTIPLCLAAEGRLESALRGRLSPGGQKAWDWVHWFLKMRAYDYMCMGFVLLSLADTLRYWASIYFCIHFLALAALGLGLALGGGSPSRRKAASQPTSLAPEKLREE

SEQ ID NO: 742306 - protein, 351 aa, Homo sapiens
QGGGAQWRGETMSPEEWTYLVVLLISIPIGFLFKKAGPGLKRWGAAAVGLGLTLFTCGPHTLHSLVTILGTWALIQAQPCSCHALALAWTFSYLLFFRALSLLGLPTPTPFTNAVQLLLTLKLVSLASEVQDLHLAQRKEMASGFSKGPTLGLLPDVPSLMETLSYSYCYVGIMTGPFFRYRTYLDWLEQPFPGAVPSLRPLLRRAWPAPLFGLLFLLSSHLFPLEAVREDAFYARPLPARLFYMIPVFFAFRMRFYVAWIAAECGCIAAGFGAYPVAAKARAGGGPTLQCPPPSRGQAARGRLPKTQQPPPPRAGSAPSREESGEQGARATTFLSRVSPPRQPWPASPCR

SEQ ID NO: 742307 - protein, 199 aa, Homo sapiens; identical to SEQ ID NO: 742305

SEQ ID NO: 742308 - protein, 199 aa, Homo sapiens; identical to SEQ ID NO: 742305

SEQ ID NO: 742309 - protein, 199 aa, Homo sapiens; identical to SEQ ID NO: 742305

SEQ ID NO: 742310 - protein, 340 aa, Homo sapiens; identical to SEQ ID NO: 742300

SEQ ID NO: 742311 - protein, 340 aa, Homo sapiens; identical to SEQ ID NO: 742300

SEQ ID NO: 742312 - protein, 344 aa, Homo sapiens
MSPEEWTYLVVLLISIPIGFLFKKAGPGLKRWGAAAVGLGLTLFTCGPHTLHSLVTILGTWALIQAQPCSCHALALAWTFSYLLFFRALSLLGLPTPTPFTNAVQLLLTLKLVSLASEVQDLHLAQRKEMASGFSKGPTLGLLPDVPSLMETLSYSYCYVGIMTGPFFRYRTYLDWLEQPFPGAVPSLRPLLRRAWPAPLFGLLFLLSSHLFPLEAVREDAFYARPLPARLFYMIPVFFAFRMRFYVAWIAAECGCIAAGFGAYPVAAKARAGGGPTLQCPPPSSPEKAASLEYDYETIRNIDCYSTDFCVRVRDGMRYWNMTVQWWLAQYIYKSAPARSYVLR

SEQ ID NO: 742313 - protein, 340 aa, Homo sapiens; identical to SEQ ID NO: 742300

SEQ ID NO: 742314 - protein, 217 aa, Homo sapiens
MSPEEWTYLVVLLISIPIGFLFKKAGPGLKRWGAAAVGLGLTLFTCGPHTLHSLVTILGTWALIQAQPCSCHALALAWTFSYLLFFRALSLLGLPTPTPFTNAVQLLLTLKLVSLASEVQDLHLAQRKEMASGFSKGPTLGLLPDVPSLMETLSYSYCYVGIMTGPFFRYRTYLDWLEQPFPGAVPSLRPLLRRAWPAPLFGLLFLLSSHLSTRATT

SEQ ID NO: 742315 - protein, 156 aa, Homo sapiens [sequence omitted]

SEQ ID NO: 742316 - protein, 340 aa, Homo sapiens; identical to SEQ ID NO: 742300

SEQ ID NO: 742317 - protein, 399 aa, Homo sapiens
MGSSRCGPGAHPVHLWPPHFAFSGHHPRDLGPHSGPALLVSLASEVQDLHLAQRKEMASGFSKGPTLGLLPDVPSLMETLSYSYCYVGIMTGPFFRYRTYLDWLEQPFPGAVPSLRPLLRRAWPAPLFGLLFLLSSHLFPLEAVREDAFYARPLPARLFYMIPVFFAFRMRFYVAWIAAECGCIAAGFGAYPVAAKARAGGGPTLQCPPPSSPEKAASLEYDYETIRNIDCYSTDFCVRVRDGMRYWNMTVQWWLAQYIYKSAPARSYVLRSAWTMLLSAYWHGLHPGYYLSFLTIPLCLAAEGRLESALRGRLSPGGQKAWDWVHWFLKMRAYDYMCMGFVLLSLADTLRYWASIYFCIHFLALAALGLGLALGGGSPSRRKAASQPTSLAPEKLREE

SEQ ID NO: 742318 - protein, 364 aa, Homo sapiens; identical to SEQ ID NO: 742298

SEQ ID NO: 742319 - protein, 239 aa, Homo sapiens [sequence omitted]

SEQ ID NO: 742320 - protein, 130 aa, Homo sapiens
MRSAWTMLLSAYWHGLHPGYYLSFLTIPLCLAAEGRLESALRGRLSPGGQKAWDWVHWFLKMRAYDYMCMGFVLLSLADTLRYWASIYFCIHFLALAALGLGLALGGGSPSRRKAASQPTSLAPEKLREE

SEQ ID NO: 742321 - protein, 124 aa, Homo sapiens [sequence omitted]

SEQ ID NO: 742322 - protein, 193 aa, Homo sapiens
  misc_feature (168)..(168): Xaa can be any naturally occurring amino acid
  misc_feature (181)..(181): Xaa can be any naturally occurring amino acid
MSPEEWTYLVVLLISIPIGFLFKKAGPGLKRWGAAAVGLGLTLFTCGPHTLHSLVTILGTWALIQAQPCSCHALALAWTFSYLLFFRALSLLGLPTPTPFTNAVQLLLTLKLVSLASEVQDLHLAQRKEMASGFSKGPTLGLLPDVPSLMETLSYSYCYVGIMTGKSXNRAPFFSRLTRNXTLGNLAWETKPL

SEQ ID NO: 742323 - protein, 126 aa, Homo sapiens
DPISSPFVWHGLHPGYYLSFLTIPLCLAAEGRLESALRGRLSPGGQKAWDWVHWFLKMRAYDYMCMGFVLLSLADTLRYWASIYFCIHFLALAALGLGLALGGGSPSRRKAASQPTSLAPEKLREE

SEQ ID NO: 742324 - protein, 165 aa, Homo sapiens
MSPEEWTYLVVLLISIPIGFLFKKAGPGLKRWGAAAVGLGLTLFTCGPHTLHSLVTILGTWALIQAQPCSCHALALAWTFSYLLFFRALSLLGLPTPTPFTNAVQLLLTLKVLGVGSLFLVSFAPLLAHRTNIADLEGSISFPFHKGETEVRVRGPGDGRPMASI

SEQ ID NO: 742325 - protein, 94 aa, Homo sapiens
LEGHALLSYPEEEFLSFLHPEHSRGMLRFMVKEIVRDLDQDGDKQLSVPEFISLPVGTVENQQGQDIDDNWVNNSAGMNNSAGMNNSAGMNNSA

SEQ ID NO: 742326 - protein, 260 aa, Homo sapiens
MVIFSKVDVNTDRKISAKEMQRWIMEKTAEHFQEAMEESKTHFRAVDPDGDGHVSWDEYKVKFLASKGHSEKEVADAIRLNEELKVDEEETQEVLENLKDRWYQADSPPADLLLTEEEFLSFLHPEHSRGMLRFMVKEIVRDLDQDGDKQLSVPEFISLPVGTVENQQGQDIDDNWVKDRKKEFEELIDSNHDGIVTAEELESYMDPMNEYNALNEAKQMIAVADENQNHHLEPEEVLKYSEFFTGSKLVDYARSVHEEF

SEQ ID NO: 742327 - protein, 260 aa, Homo sapiens; identical to SEQ ID NO: 742326

SEQ ID NO: 742328 - protein, 555 aa, Homo sapiens
MAVADFPDLEACGAYCPCVSDSALFDASVAETARRSGEGYPRGKWITCRRMLGLPRVRRACAGTTYTGSREPIDSAHRGKRRPKGSGWTRVYRRGDLGQAAPLPCACASASEPRGPSSPTVSCLSPSCGRPGDTEPSVVPGDWIGARTSLPPLPLPLPLPAPGPHPAARPMVWPWVAMASRWGPLIGLAPCCLWLLGAVLLMDASARPANHSSTRERVANREENEILPPDHLNGVKLEMDGHLNRGFHQEVRVLPRKGKGNPLALGPFSNGRRTGRGKVPRDPGRTPGESPGRKLMVIFSKVDVNTDRKISAKEMQRWIMEKTAEHFQEAMEESKTHFRAVDPDGDGHVSWDEYKVKFLASKGHSEKEVADAIRLNEELKVDEEETQEVLENLKDRWYQADSPPADLLLTEEEFLSFLHPEHSRGMLRFMVKEIVRDLDQDGDKQLSVPEFISLPVGTVENQQGQDIDDNWVKDRKKEFEELIDSNHDGIVTAEELESYMDPMNEYNALNEAKQMIAVADENQNHHLEPEEVLKYSEFFTGSKLVDYARSVHEEF

SEQ ID NO: 742329 - protein, 419 aa, Homo sapiens
MAVADFPDLEACGAYCPCVSDSALFDASVAETARRSGEGYPRGKWITCRRMLGLPRVRRACAGTTYTGSREPIDSAHRGKRRPKGSGWTRVYRRGDLGQAAPLPCACASASEPRGPSSPTVSCLSPSCGRPGDTEPSVVPGDWIGARTTRSRGGAGRKLMVIFSKVDVNTDRKISAKEMQRWIMEKTAEHFQEAMEESKTHFRAVDPDGDGHVSWDEYKVKFLASKGHSEKEVADAIRLNEELKVDEEETQEVLENLKDRWYQADSPPADLLLTEEEFLSFLHPEHSRGMLRFMVKEIVRDLDQDGDKQLSVPEFISLPVGTVENQQGQDIDDNWVKDRKKEFEELIDSNHDGIVTAEELESYMDPMNEYNALNEAKQMIAVADENQNHHLEPEEVLKYSEFFTGSKLVDYARSVHEEF

SEQ ID NO: 742330 - protein, 130 aa, Homo sapiens
MLRFMVKEIVRDLDQDGDKQLSVPEFISLPVGTVENQQGQDIDDNWVKDRKKEFEELIDSNHDGIVTAEELESYMDPMNEYNALNEAKQMIAVADENQNHHLEPEEVLKYSEFFTGSKLVDYARSVHEEF

SEQ ID NO: 742331 - protein, 219 aa, Homo sapiens
RGSPNCNAGDGHVSWDEYKVKFLASKGHSEKEVADAIRLNEELKVDEEETQEVLENLKDRWYQADSPPADLLLTEEEFLSFLHPEHSRGMLRFMVKEIVRDLDQDGDKQLSVPEFISLPVGTVENQQGQDIDDNWVKDRKKEFEELIDSNHDGIVTAEELESYMDPMNEYNALNEAKQMIAVADENQNHHLEPEEVLKYSEFFTGSKLVDYARSVHEEF

SEQ ID NO: 742332 - protein, 286 aa, Homo sapiens
MVIFSKVDVNTDRKISAKEMQRWIMEKTAEHFQEAMEESKTHFRAVDPDGDGHVSWDEYKVKFLASKGHSEKEVADAIRLNEELKVDEEESSTSRNFLDLRAGVCRPRYPQAAPLSAQEVLENLKDRWYQADSPPADLLLTEEEFLSFLHPEHSRGMLRFMVKEIVRDLDQDGDKQLSVPEFISLPVGTVENQQGQDIDDNWVKDRKKEFEELIDSNHDGIVTAEELESYMDPMNEYNALNEAKQMIAVADENQNHHLEPEEVLKYSEFFTGSKLVDYARSVHEEF

SEQ ID NO: 742333 - protein, 246 aa, Homo sapiens
MVIFSKVDVNTDRKISAKEMQRWIMEKTAEHFQEAMEESKTHFRAVDPDGDGHVSWDEYKVKFLASKGHSEKEVADAIRLNEELKVDEEETQEVLENLKDRWYQADSPPADLLLTEEEFLSFLHPEHSRGMLRFMVKEIVRDLDQDGDKQLSVPEFISLPVGTVENQQGQDIDDNWVKDRKKEFEELIDSNHDGIVTAEELENVPTLPLQPIGTLNSHFVRLAAELGGGKATLTCAPLARRATWTP

SEQ ID NO: 742334 - protein, 175 aa, Homo sapiens
MLRFMVKEIVRDLGEAGSSLAGTPGPRTDWQGPGIVGRSGQVLREPQPGCGLTHSRLADQDGDKQLSVPEFISLPVGTVENQQGQDIDDNWVKDRKKEFEELIDSNHDGIVTAEELESYMDPMNEYNALNEAKQMIAVADENQNHHLEPEEVLKYSEFFTGSKLVDYARSVHEEF

SEQ ID NO: 742335 - protein, 260 aa, Homo sapiens; identical to SEQ ID NO: 742326

SEQ ID NO: 742336 - protein, 260 aa, Homo sapiens; identical to SEQ ID NO: 742326

SEQ ID NO: 742337 - protein, 260 aa, Homo sapiens; identical to SEQ ID NO: 742326

SEQ ID NO: 742338 - protein, 260 aa, Homo sapiens; identical to SEQ ID NO: 742326

SEQ ID NO: 742339 - protein, 260 aa, Homo sapiens; identical to SEQ ID NO: 742326

SEQ ID NO: 742340 - protein, 226 aa, Homo sapiens
MVIFSKVDVNTDRKISAKEMQRWIMEKTAEHFQEAMEESKTHFRAVDPDGDGHVSWDEYKVKFLASKGHSEKEVADAIRLNEELKVDEEETQEVLENLKDRWYQADSPPADLLLTEEEFLSFLHPEHSRGMLRFMVKEIVRDLDQDGDKQLSVPEFISLPVGTVENQQGQDIDDNWVKDRKKEFEELIDSNHDGIVTAEELESYMDPMNEYNALNEISLQSLCRRR

SEQ ID NO: 742341 - protein, 184 aa, Homo sapiens
MVIFSKVDVNTDRKISAKEMQRWIMEKTAEHFQEAMEESKTHFRAVDPDGDGHVSWDEYKVKFLASKGHSEKEVADAIRLNEELKVDEEETQEVLENLKDRWYQADSPPADLLLTEEEFLSFLHPEHSRGMLRFMVKEIVRDLDQDGDKQLSVPEFISLPVGTVENQQGQDIDDNWVEIVASHF

SEQ ID NO: 742342 - protein, 82 aa, Homo sapiens
MLRFMVKEIVRDLDQDGDKQLSVPEFISLPVGTVENQQGQDIDDNWVKDRKKEFEELIDSNHDGIVTAEELESYTTQNDTTG

SEQ ID NO: 742343 - protein, 278 aa, Homo sapiens
MAVADFPDLEACGAYCPCVSDSALFDASVAETARRSGEGYPRGKWITCRRMLGLPRVRRACAGTTYTGSREPIDSAHRGKRRPKGSGWTRVYRRGDLGQAAPLPCACASASEPRGPSSPTVSCLSPSCGRPGDTEPSVVPGDWIGARTSLPPLPLPLPLPAPGPHPAARPMVWPWVAMASRWGPLIGLAPCCLWLLGAVLLMDASARPANHSSTRERVANREENEILPPDHLNGVKLEMDGHLNRGFHQEVFLGKDLGGFDELPGPGVSEPPRSRSCR

SEQ ID NO: 742344 - protein, 260 aa, Homo sapiens; identical to SEQ ID NO: 742326

SEQ ID NO: 742345 - protein, 260 aa, Homo sapiens; identical to SEQ ID NO: 742326

SEQ ID NO: 742346 - protein, 242 aa, Homo sapiens
MVIFSKVDVNTDRKISAKEMQRWIMEKTAEHFQEAMEESKTHFRAVDPDGDGHVSWDEYKVKFLASKGHSEKEVADAIRLNEELKVDEEETQEVLENLKDRWYQADSPPADLLLTEEEFLSFLHPEHSRGMLRFMVKEIVRDLDQDGDKQLSVPEFISLPVGTVENQQGQDIDDNWVKDRKKEFEELIDSNHDGIVTAEELESYMDPMNEYNALNEAKQMIAGCGPAAPPPPWSLEIVASHF

SEQ ID NO: 742347 - protein, 260 aa, Homo sapiens; identical to SEQ ID NO: 742326

SEQ ID NO: 742348 - protein, 260 aa, Homo sapiens; identical to SEQ ID NO: 742326

SEQ ID NO: 742349 - protein, 258 aa, Homo sapiens
MAVADFPDLEACGAYCPCVSDSALFDASVAETARRSGEGYPRGKWITCRRMLGLPRVRRACAGTTYTGSREPIDSAHRGKRRPKGSGWTRVYRRGDLGQAAPLPCACASASEPRGPSSPTVSCLSPSCGRPGDTEPSVVPGDWIGARTSLPPLPLPLPLPAPGPHPAARPMVWPWVAMASRWGPLIGLAPCCLWLLGAVLLMDASARPANHSSTRERVANREENEILPPDHLNGVKLEMDGHLNRGFHQEVPRSRSCR

SEQ ID NO: 742350 - protein, 274 aa, Homo sapiens
MAVADFPDLEACGAYCPCVSDSALFDASVAETARRSGEGYPRGKWITCRRMLGLPRVRRACAGTTYTGSREPIDSAHRGKRRPKGSGWTRVYRRGDLGQAAPLPCACASASEPRGPSSPTVSCLSPSCGRPGDTEPSVVPGDWIGARTSLPPLPLPLPLPAPGPHPAARPMVWPWVAMASRWGPLIGLAPCCLWLLGAVLLMDASARPANHSSTRERVANREENEILPPDHLNGVKLEMDGHLNRGFHQEVFLGKDLGGFDEVMPARWSPLSVK

SEQ ID NO: 742351 - protein, 77 aa, Homo sapiens
VTRPVPSMCCRPAFSVNGSMRSLGGAGRTVLQPQVCRSVCCLVNVAVSNELYLQEEVAPGFGPGAVVCRPLPHSIGS

SEQ ID NO: 742352 - protein, 514 aa, Homo sapiens
RDGGGSFRQLKGDLGPEDPSPSAAGRGQAGPVGAGAAAAALGLSHPPRIEALGAAGRQESDGESGAVRGAEPGAGPAVAAAAAPPPRVQTQEAAGRAGANRAAAAMELRVGNRYRLGRKIGSGSFGDIYLGTDIAAGEEVAIKLECVKTKHPQLHIESKIYKMMQGGVGIPTIRWCGAEGDYNVMVMELLGPSLEDLFNFCSRKFSLKTVLLLADQMISRIEYIHSKNFIHRDVKPDNFLMGLGKKGNLVYIIDFGLAKKYRDARTHQHIPYRENKNLTGTARYASINTHLGIEQSRRDDLESLGYVLMYFNLGSLPWQGLKAATKRQKYERISEKKMSTPIEVLCKGYPSEFATYLNFCRSLRFDDKPDYSYLRQLFRNLFHRQGFSYDYVFDWNMLKFGASRAADDAERERRDREERLRHSRNPATRGLPSTASGRLRGTQEVAPPTPLTPTSHTANTSPRPVSGMERERKVSMRLHRGAPVNISSSDLTGRQDTSRMSTSQNSIPFEHHGK

SEQ ID NO: 742353 - protein, 520 aa, Homo sapiens
RDGGGSFRQLKGDLGPEDPSPSAAGRGQAGPVGAGAAAAALGLSHPPRIEALGAAGRQESDGESGAVRGAEPGAGPAVAAAAAPPPRVQTQEAAGRAGANRAAAAMELRVGNRYRLGRKIGSGSFGDIYLGTDIAAGEEVAIKLECVKTKHPQLHIESKIYKMMQGGVGIPTIRWCGAEGDYNVMVMELLGPSLEDLFNFCSRKFSLKTVLLLADQMISRIEYIHSKNFIHRDVKPDNFLMGLGKKGNLVYIIDFGLAKKYRDARTHQHIPYRENKNLTGTARYASINTHLGIEQSRRDDLESLGYVLMYFNLGSLPWQGLKAATKRQKYERISEKKMSTPIEVLCKGYPSEFATYLNFCRSLRFDDKPDYSYLRQLFRNLFHRQGFSYDYVFDWNMLKFGASRAADDAERERRDREERLRHSRNPATRGLPSTASGRLRGTQEVAPPTPLTPTSHTANTSPRPVSGMERERKVSMRLHRGAPVNISSSDLTGRQDTSRMSTSQIPGRVASSGLQSVVHR

SEQ ID NO: 742354 - protein, 409 aa, Homo sapiens
MELRVGNRYRLGRKIGSGSFGDIYLGTDIAAGEEVAIKLECVKTKHPQLHIESKIYKMMQGGVGIPTIRWCGAEGDYNVMVMELLGPSLEDLFNFCSRKFSLKTVLLLADQMISRIEYIHSKNFIHRDVKPDNFLMGLGKKGNLVYIIDFGLAKKYRDARTHQHIPYRENKNLTGTARYASINTHLGIEQSRRDDLESLGYVLMYFNLGSLPWQGLKAATKRQKYERISEKKMSTPIEVLCKGYPSEFATYLNFCRSLRFDDKPDYSYLRQLFRNLFHRQGFSYDYVFDWNMLKFGASRAADDAERERRDREERLRHSRNPATRGLPSTASGRLRGTQEVAPPTPLTPTSHTANTSPRPVSGMERERKVSMRLHRGAPVNISSSDLTGRQDTSRMSTSQNSIPFEHHGK

SEQ ID NO: 742355 - protein, 514 aa, Homo sapiens; identical to SEQ ID NO: 742352

SEQ ID NO: 742356 - protein, 448 aa, Homo sapiens
CPREGFLGSIRSTRRRSARIEALGAAGRQESDGESGAVRGAEPGAGPAVAAAAAPPPRVQTQEAAGRAGANRAAAAMELRVGNRYRLGRKIGSGSFGDIYLVGIPTIRWCGAEGDYNVMVMELLGPSLEDLFNFCSRKFSLKTVLLLADQMISRIEYIHSKNFIHRDVKPDNFLMGLGKKGNLVYIIDFGLAKKYRDARTHQHIPYRENKNLTGTARYASINTHLGIEQSRRDDLESLGYVLMYFNLGSLPWQGLKAATKRQKYERISEKKMSTPIEVLCKGYPSEFATYLNFCRSLRFDDKPDYSYLRQLFRNLFHRQGFSYDYVFDWNMLKFGASRAADDAERERRDREERLRHSRNPATRGLPSTASGRLRGTQEVAPPTPLTPTSHTANTSPRPVSGMERERKVSMRLHRGAPVNISSSDLTGRQDTSRMSTSQNSIPFEHHGK

SEQ ID NO: 742357 - protein, 320 aa, Homo sapiens
MLVRDWVCIGEAAQTVLLLADQMISRIEYIHSKNFIHRDVKPDNFLMGLGKKGNLVYIIDFGLAKKYRDARTHQHIPYRENKNLTGTARYASINTHLGIEQSRRDDLESLGYVLMYFNLGSLPWQGLKAATKRQKYERISEKKMSTPIEVLCKGYPSEFATYLNFCRSLRFDDKPDYSYLRQLFRNLFHRQGFSYDYVFDWNMLKFGASRAADDAERERRDREERLRHSRNPATRGLPSTASGRLRGTQEVAPPTPLTPTSHTANTSPRPVSGMERERKVSMRLHRGAPVNISSSDLTGRQDTSRMSTSQNSIPFEHHGK

SEQ ID NO: 742358 - protein, 274 aa, Homo sapiens
MGLGKKGNLVYIIDFGLAKKYRDARTHQHIPYRENKNLTGTARYASINTHLGIEQSRRDDLESLGYVLMYFNLGSLPWQGLKAATKRQKYERISEKKMSTPIEVLCKGYPSEFATYLNFCRSLRFDDKPDYSYLRQLFRNLFHRQGFSYDYVFDWNMLKFGASRAADDAERERRDREERLRHSRNPATRGLPSTASGRLRGTQEVAPPTPLTPTSHTANTSPRPVSGMERERKVSMRLHRGAPVNISSSDLTGRQDTSRMSTSQNSIPFEHHGK

SEQ ID NO: 742359 - protein, 273 aa, Homo sapiens
MVRGRGGLQRHGDGAVAKKYRDARTHQHIPYRENKNLTGTARYASINTHLGIEQSRRDDLESLGYVLMYFNLGSLPWQGLKAATKRQKYERISEKKMSTPIEVLCKGYPSEFATYLNFCRSLRFDDKPDYSYLRQLFRNLFHRQGFSYDYVFDWNMLKFGASRAADDAERERRDREERLRHSRNPATRGLPSTASGRLRGTQEVAPPTPLTPTSHTANTSPRPVSGMERERKVSMRLHRGAPVNISSSDLTGRQDTSRMSTSQNSIPFEHHGK

SEQ ID NO: 742360 - protein, 290 aa, Homo sapiens
LCQRRTWAGEGPRLQHIYTRGQQNVQRFPHSLQTTKVVMGSSELRVCTCVEVQFFFLHLPQVNGSVCVPPVRAIWCSRMASLVMALRISFRLEDLKETAATKRQKYERISEKKMSTPIEVLCKGYPSEFATYLNFCRSLRFDDKPDYSYLRQLFRNLFHRQGFSYDYVFDWNMLKFGASRAADDAERERRDREERLRHSRNPATRGLPSTASGRLRGTQEVAPPTPLTPTSHTANTSPRPVSGMERERKVSMRLHRGAPVNISSSDLTGRQDTSRMSTSQNSIPFEHHGK

SEQ ID NO: 742361 - protein, 110 aa, Homo sapiens
  misc_feature (19)..(20): Xaa can be any naturally occurring amino acid
WNMLKFGASRAADDAELGXXNPATRGLPSTASGRLRGTQEVAPPTPLTPTSHTANTSPRPVSGMERERKVSMRLHRGAPVNISSSDLTGRQDTSRMSTSQNSIPFEHHGK

SEQ ID NO: 742362 - protein, 111 aa, Homo sapiens
DLSVGGHQATGPDCPGSPGSSLATASHRKPRVRGSRRGRPTPFLSLSSANTSPRPVSGMERERKVSMRLHRGAPVNISSSDLTGRQDTSRMSTSQIPGRVASSGLQSVVHR

SEQ ID NO: 742363 - protein, 100 aa, Homo sapiens
PSPLHSDPSTLPSPVRGHLACMPLPPSRLPVTRSAEHVSQPQRPLCVAGDEASRLGLGGGDSWSGGFQWSSVCRAPMRTLLIAVKGRQCMADLLCYQWLY

SEQ ID NO: 742364 - protein, 520 aa, Homo sapiens; identical to SEQ ID NO: 742353

SEQ ID NO: 742365 - protein, 442 aa, Homo sapiens
RDGGGSFRQLKGDLGPEDPSPSAAGRGQAGPVGAGAAAAALGLSHPPRIEALGAAGRQESDGESGAVRGAEPGAGPAVAAAAAPPPRVQTQEAAGRAGANRAAAAMELRVGNRYRLGRKIGSGSFGDIYLGTDIAAGEEVAIKLECVKTKHPQLHIESKIYKMMQGGVGIPTIRWCGAEGDYNVMVMELLGPSLEDLFNFCSRKFSLKTVLLLADQMISRIEYIHSKNFIHRDVKPDNFLMGLGKKGNLVYIIDFGLAKKYRDARTHQHIPYRENKNLTGTARYASINTHLGIEQSRRDDLESLGYVLMYFNLGSLPWQGLKAATKRQKYERISEKKMSTPIEVLCKGYPSEFATYLNFCRSLRFDDKPDYSYLRQLFRNLFHRQGFSYDYVFDWNMLKFGASRAADDAERERRDREERLRHSRHFVGSAAHEVVAPGEAAS

SEQ ID NO: 742366 - protein, 106 aa, Homo sapiens
MEPGAAPGSMLLCPEVPRMPSRLSLRSTWAVASGHVLPTPMRRAVCVRGHFGWTPSRWTMFPLDSRASKVCTLVLPSPPQSSPDAITGWRPRTQLFTPPPAGWPSA

SEQ ID NO: 742367 - protein, 222 aa, Homo sapiens
RDGGGSFRQLKGDLGPEDPSPSAAGRGQAGPVGAGAAAAALGLSHPPRIEALGAAGRQESDGESGAVRGAEPGAGPAVAAAAAPPPRVQTQEAAGRAGANRAAAAMELRVGNRYRLGRKIGSGSFGDIYLGTDIAAGEEVAIKLECVKTKHPQLHIESKIYKMMQGGVGIPTIRWCGAEGDYNVMVMELLGPSLEDLFNFCSRKFSLKTVLLLADQMVRTVS

SEQ ID NO: 742368 - protein, 181 aa, Homo sapiens
RDGGGSFRQLKGDLGPEDPSPSAAGRGQAGPVGAGAAAAALGLSHPPRIEALGAAGRQESDGESGAVRGAEPGAGPAVAAAAAPPPRVQTQEAAGRAGANRAAAAMELRVGNRYRLGRKIGSGSFGDIYLGTDIAAGEEVAIKLECVKTKHPQLHIESKIYKMMQGGGRSLPVTEQHQGSV

SEQ ID NO: 742369 - protein, 110 aa, Homo sapiens; identical to SEQ ID NO: 742361
  misc_feature (19)..(20): Xaa can be any naturally occurring amino acid

SEQ ID NO: 742370 - protein, 415 aa, Homo sapiens [sequence omitted]

SEQ ID NO: 742371 - protein, 485 aa, Homo sapiens
CPREGFLGSIRSTRRRSARIEALGAAGRQESDGESGAVRGAEPGAGPAVAAAAAPPPRVQTQEAAGRAGANRAAAAMELRVGNRYRLGRKIGSGSFGDIYLGTDIAAGEEVAIKLECVKTKHPQLHIESKIYKMMQGGVGIPTIRWCGAEGDYNVMVMELLGPSLEDLFNFCSRKFSLKTVLLLADQMISRIEYIHSKNFIHRDVKPDNFLMGLGKKGNLVYIIDFGLAKKYRDARTHQHIPYRENKNLTGTARYASINTHLGIEQSRRDDLESLGYVLMYFNLGSLPWQGLKAATKRQKYERISEKKMSTPIEVLCKGYPSEFATYLNFCRSLRFDDKPDYSYLRQLFRNLFHRQGFSYDYVFDWNMLKFGASRAADDAERERRDREERLRHSRNPATRGLPSTASGRLRGTQEVAPPTPLTPTSHTANTSPRPVSGMERERKVSMRLHRGAPVNISSSDLTGRQDTSRMSTSQNSIPFEHHGK

SEQ ID NO: 742372 - protein, 352 aa, Homo sapiens
MMQGGVGIPTIRWCGAEGDYNVMVMELLGPSLEDLFNFCSRKFSLKTVLLLADQMISRIEYIHSKNFIHRDVKPDNFLMGLGKKGNLVYIIDFGLAKKYRDARTHQHIPYRENKNLTGTARYASINTHLGIEQSRRDDLESLGYVLMYFNLGSLPWQGLKAATKRQKYERISEKKMSTPIEVLCKGYPSEFATYLNFCRSLRFDDKPDYSYLRQLFRNLFHRQGFSYDYVFDWNMLKFGASRAADDAERERRDREERLRHSRNPATRGLPSTASGRLRGTQEVAPPTPLTPTSHTANTSPRPVSGMERERKVSMRLHRGAPVNISSSDLTGRQDTSRMSTSQNSIPFEHHGK

SEQ ID NO: 742373 - protein, 366 aa, Homo sapiens
MVMELLGPSLDVVVPLCPALGIPTIRWCGAEGDYNVMVMELLGPSLEDLFNFCSRKFSLKTVLLLADQMISRIEYIHSKNFIHRDVKPDNFLMGLGKKGNLVYIIDFGLAKKYRDARTHQHIPYRENKNLTGTARYASINTHLGIEQSRRDDLESLGYVLMYFNLGSLPWQGLKAATKRQKYERISEKKMSTPIEVLCKGYPSEFATYLNFCRSLRFDDKPDYSYLRQLFRNLFHRQGFSYDYVFDWNMLKFGASRAADDAERERRDREERLRHSRNPATRGLPSTASGRLRGTQEVAPPTPLTPTSHTANTSPRPVSGMERERKVSMRLHRGAPVNISSSDLTGRQDTSRMSTSQNSIPFEHHGK

SEQ ID NO: 742374 - protein, 328 aa, Homo sapiens
RDGGGSFRQLKGDLGPEDPSPSAAGRGQAGPVGAGAAAAALGLSHPPRIEALGAAGRQESDGESGAVRGAEPGAGPAVAAAAAPPPRVQTQEAAGRAGANRAAAAMELRVGNRYRLGRKIGSGSFGDIYLGTDIAAGEEVAIKLECVKTKHPQLHIESKIYKMMQGGVGIPTIRWCGAEGDYNVMVMELLGPSLEDLFNFCSRKFSLKTVLLLADQMISRIEYIHSKNFIHRDVKPDNFLMGLGKKGNLVYIIDFGLAKKYRDARTHQHIPYRENKNLTGTARYASINTHLGIGLPPRDRNTKGLARRKCPPPSKCCVKATLPNLPHT

SEQ ID NO: 742375 - protein, 520 aa, Homo sapiens; identical to SEQ ID NO: 742353

SEQ ID NO: 742376 - protein, 173 aa, Homo sapiens
MEVLCKGYPSEFATYLNFCRSLRFDDKPDYSYLRQLFRNLFHRQGFSYDYVFDWNMLKFGASRAADDAERERRDREERLRHSRNPATRGLPSTASGRLRGTQEVAPPTPLTPTSHTANTSPRPVSGMERERKVSMRLHRGAPVNISSSDLTGRQDTSRMSTSQNSIPFEHHGK

SEQ ID NO: 742377 - protein, 120 aa, Homo sapiens
WVISRILGALTLGRIDVVVGIGKATGPDCPGSPGSSLATASHRKPRVRGSRRGRPTPFLSLSSANTSPRPVSGMERERKVSMRLHRGAPVNISSSDLTGRQDTSRMSTSQNSIPFEHHGK

SEQ ID NO: 742378 - protein, 357 aa, Homo sapiens
RDGGGSFRQLKGDLGPEDPSPSAAGRGQAGPVGAGAAAAALGLSHPPRIEALGAAGRQESDGESGAVRGAEPGAGPAVAAAAAPPPRVQTQEAAGRAGANRAAAAMELRVGNRYRLGRKIGSGSFGDIYLGTDIAAGEEVAIKLECVKTKHPQLHIESKIYKMMQGGVGIPTIRWCGAEGDYNVMVMELLGPSLEDLFNFCSRKFSLKTVLLLADQMISRIEYIHSKNFIHRDVKPDNFLMGLGKKGNLVYIIDFGLAKKYRDARTHQHIPYRENKNLTGTARYASINTHLGIEQSRRDDLESLGYVLMYFNLGSLPWQGLKAATKRQKYERISEKKMLTPGALQATHPATLVGETY

SEQ ID NO: 742379 - protein, 588 aa, Homo sapiens
RDGGGSFRQLKGDLGPEDPSPSAAGRGQAGPVGAGAAAAALGLSHPPRIEALGAAGRQESDGESGAVRGAEPGAGPAVAAAAAPPPRVQTQEAAGRAGANRAAAAMELRVGNRYRLGRKIGSGSFGDIYLGTDIAAGEEVAIKLECVKTKHPQLHIESKIYKMMQGGVGIPTIRWCGAEGDYNVMVMELLGPSLEDLFNFCSRKFSLKTVLLLADQMISRIEYIHSKNFIHRDVKPDNFLMGLGKKGNLVYIIDFGLAKKYRDARTHQHIPYRENKNLTGTARYASINTHLGIEQSRRDDLESLGYVLMYFNLGSLPWQGLKAATKRQKYERISEKKMSTPIEVLCKGYPSEFATYLNFCRSLRFDDKPDYSYLRQLFRNLFHRQGFSYDYVFDWNMLKFGASRAADDAERERRDREERLRHSRNPATRGLPSTASGRLRGTQEVAPPTPLTPTSHTANTSPRPVSGMERERKVSMRLHRGAPVNISSSDLTGRQDTSRMSTSQRSRDMASLRLHAARPARMPSPAPTTHILRAPGPLTGLPARRPLLAPRADPLWNDTVPTPPPSPSKHCSGDDPLGRQLEPSRGPA

SEQ ID NO: 742380 - protein, 485 aa, Homo sapiens
RDGGGSFRQLKGDLGPEDPSPSAAGRGQAGPVGAGAAAAALGLSHPPRIEALGAAGRQESDGESGAVRGAEPGAGPAVAAAAAPPPRVQTQEAAGRAGANRAAAAMELRVGNRYRLGRKIGSGSFGDIYLGTDIAAGEEVAIKLECVKTKHPQLHIESKIYKMMQGGVGIPTIRWCGAEGDYNVMVMELLGPSLEDLFNFCSRKFSLKTVLLLADQMISRIEYIHSKNFIHRDVKPDNFLMGLGKKGNLVYIIDFGLAKKYRDARTHQHIPYRENKNLTGTARYASINTHLGIEQSRRDDLESLGYVLMYFNLGSLPWQGLKAATKRQKYERISEKKMSTPIEVLCKGYPSEFATYLNFCRSLRFDDKPDYSYLRQLFRNLFHRQGFSYDYVFDWNMLKFGASRARRMTQPWNAGGRRQRGQPRREVKAAHKKDTSRRNPGVPTAALRFHKPSQGRLAERDRQHPLGSRPPEPLRTDDATATEEA

SEQ ID NO: 742381 - protein, 256 aa, Homo sapiens
RDGGGSFRQLKGDLGPEDPSPSAAGRGQAGPVGAGAAAAALGLSHPPRIEALGAAGRQESDGESGAVRGAEPGAGPAVAAAAAPPPRVQTQEAAGRAGANRAAAAMELRVGNRYRLGRKIGSGSFGDIYLGTDIAAGEEVAIKLECVKTKHPQLHIESKIYKMMQGGVGIPTIRWCGAEGDYNVMVMELLGPSLEDLFNFCSRKFSLKTVLLLADQMQRVLPHLVRTFKFSFELLYNLFEMLHCDPGLLELLLCGA

SEQ ID NO: 742382 - protein, 188 aa, Homo sapiens
MAVPGVGLLTRLNLCARRRTRVQRPIVRLLSCPGTVAKDLRRDEQPSGSVETGFEDKIPKRRFSEMQNERREQAQRTVLIHCPEKISENKFLKYLSQFGPINNHFFYESFGLYAVVEFCQKESIGSLQNGTHTPSTAMETAIPFRSRFFNLKLKNQTSERSRVRSSNQLPRSNKQLFELLCYAESVSF

SEQ ID NO: 742383 - protein, 582 aa, Homo sapiens
MAVPGVGLLTRLNLCARRRTRVQRPIVRLLSCPGTVAKDLRRDEQPSGSVETGFEDKIPKRRFSEMQNERREQAQRTVLIHCPEKISENKFLKYLSQFGPINNHFFYESFGLYAVVEFCQKESIGSLQNGTHTPSTAMETAIPFRSRFFNLKLKNQTSERSRVRSSNQLPRSNKQLFELLCYAESIDDQLNTLLKEFQLTEENTKLRYLTCSLIEDMAAAYFPDCIVRPFGSSVNTFGKLGCDLDMFLDLDETRNLSAHKISGNFLMEFQVKNVPSERIATQKILSVLGECLDHFGPGCVGVQKILNARCPLVRFSHQASGFQCDLTTNNRIALTSSELLYIYGALDSRVRALVFSVRCWARAHSLTSSIPGAWITNFSLTMMVIFFLQRRSPPILPTLDSLKTLADAEDKCVIEGNNCTFVRDLSRIKPSQNTETLELLLKEFFEYFGNFAFDKNSINIRQGREQNKPDSSPLYIQNPFETSLNISKNVSQSQLQKFVDLARESAWILQQEDTDRPSISSNRPWGLVSLLLPSAPNRKSFTKKKSNKFAIETVKNLLESLKGNRTENFTKTSGKRTISTQT

SEQ ID NO: 742384 - protein, 712 aa, Homo sapiens
MAWAKKVGGRAGQGRSLSRCDPIILDPEWLYGPPEGEGGPEGVGGETRASIHPPLRTGRHHQKVNHNIRGPEGSAKDAAPGGGGHHQAGPGQRGDEDGALQHLCGGGGGVGVSVGRGTGTSVAAEHPSLQVKLLELQELVLRLAGDHNEGHGKFLAAAQNPADDPAPGAPAPQELGAADKQGGFEDKIPKRRFSEMQNERREQAQRTVLIHCPEKISENKFLKYLSQFGPINNHFFYESFGLYAVVEFCQKESIGSLQNGTHTPSTAMETAIPFRSRFFNLKLKNQTSERSRVRSSNQLPRSNKQLFELLCYAESIDDQLNTLLKEFQLTEENTKLRYLTCSLIEDMAAAYFPDCIVRPFGSSVNTFGKLGCDLDMFLDLDETRNLSAHKISGNFLMEFQVKNVPSERIATQKILSVLGECLDHFGPGCVGVQKILNARCPLVRFSHQASGFQCDLTTNNRIALTSSELLYIYGALDSRVRALVFSVRCWARAHSLTSSIPGAWITNFSLTMMVIFFLQRRSPPILPTLDSLKTLADAEDKCVIEGNNCTFVRDLSRIKPSQNTETLELLLKEFFEYFGNFAFDKNSINIRQGREQNKPDSSPLYIQNPFETSLNISKNVSQSQLQKFVDLARESAWILQQEDTDRPSISSNRPWGLVSLLLPSAPNRKSFTKKKSNKFAIETVKNLLESLKGNRTENFTKTSGKRTISTQT

SEQ ID NO: 742385 - protein, 517 aa, Homo sapiens [sequence omitted]

SEQ ID NO: 742386 - protein, 712 aa, Homo sapiens; identical to SEQ ID NO: 742384

SEQ ID NO: 742387 - protein, 445 aa, Homo sapiens
METAIPFRSRFFNLKLKNQTSERSRVRSSNQLPRSNKQLFELLCYAESIDDQLNTLLKEFQLTEENTKLRYLTCSLIEDMAAAYFPDCIVRPFGSSVNTFGKLGCDLDMFLDLDETRNLSAHKISGNFLMEFQVKNVPSERIATQKILSVLGECLDHFGPGCVGVQKILNARCPLVRFSHQASGFQCDLTTNNRIALTSSELLYIYGALDSRVRALVFSVRCWARAHSLTSSIPGAWITNFSLTMMVIFFLQRRSPPILPTLDSLKTLADAEDKCVIEGNNCTFVRDLSRIKPSQNTETLELLLKEFFEYFGNFAFDKNSINIRQGREQNKPDSSPLYIQNPFETSLNISKNVSQSQLQKFVDLARESAWILQQEDTDRPSISSNRPWGLVSLLLPSAPNRKSFTKKKSNKFAIETVKNLLESLKGNRTENFTKTSGKRTISTQT

SEQ ID NO: 742388 - protein, 366 aa, Homo sapiens [sequence omitted]

SEQ ID NO: 742389 - protein, 564 aa, Homo sapiens
MAVPGVGLLTRLNLCARRRTRVQRPIVRLLSCPGTVAKDLRRDEQPSGSVETGFEDKIPKRRFSEMQNERREQAQRTVLIHCPEKISENKFLKYLSQFGPINNHFFYESFGLYAVVEFCQKESIGSLQNGTHTPSTAMETAIPFRSRFFNLKLKNQTSERSRVRSSNQLPRSNKQLFELLCYAESIDDQLNTLLKEFQLTEENTKLRYLTCSLIEDMAAAYFPDCIVRPFGSSVNTFGKLGCDLDMFLDLDETRNLSAHKISGNFLMEFQVKNVPSERIATQKILSVLGECLDHFGPGCVGVQKILNARCPLVRFSHQASGFQCDLTTNNRIALTSSELLYIYGALDSRVRALVFSVRCWARAHSLTSSIPGAWITNFSLTMMVIFFLQRRSPPILPTLDSLKTLADAEDKCVIEGNNCTFVRDLSRIKPSQNTETLELLLKEFFEYFGNFAFDKNSINIRQGREQNKPDSSPLYIQNPFETSLNISKNVSQSQLQDRPSISSNRPWGLVSLLLPSAPNRKSFTKKKSNKFAIETVKNLLESLKGNRTENFTKTSGKRTISTQT

SEQ ID NO: 742390 - protein, 204 aa, Homo sapiens
MAWAKKVGGRAGQGRSLSRCDPIILDPEWLYGPPEGEGGPEGVGGETRASIHPPLRTGRHHQKVNHNIRGPEGSAKDAAPGGGGHHQAGPGQRGDEDGALQHLCGGGGGVGVSVGRGTGTSVAAEHPSLQVKLLELQELVLRLAGDHNEGHGKFLAAAQNPADDPAPGAPAPQELGAADKQGDFCEVSRQPGACTRRGQGGLSP

SEQ ID NO: 742391 - protein, 213 aa, Homo sapiens
TYTSGGGLEKLSGDRLDFTQFEEKFIGSAEDLGKLRNDGSLMFQQVPMVEIDGMKLVQTRAILNYIASKYNLYGKDIKERALIDMYTEGMADLNEMILLLPLCRPEEKDAKIALIKEKTKSRYFPAFEKVLQSHGQDYLVGNKLSRADISLVELLYYVEELDSSLISNFPLLKALKTRISNLPTVKKFLQPGSPRKPPADAKALEEARKIFRF

SEQ ID NO: 742392 - protein, 249 aa, Homo sapiens
TYTSGGGLEKLSGDRLDFTQRNQETVTMAGKPKLHYFNGRGRMEPIRWLLAAAGVEFEEKFIGSAEDLGKLRNDGSLMFQQVPMVEIDGMKLVQTRAILNYIASKYNLYGKDIKERALIDMYTEGMADLNEMILLLPLCRPEEKDAKIALIKEKTKSRYFPAFEKVLQSHGQDYLVGNKLSRADISLVELLYYVEELDSSLISNFPLLKALKTRISNLPTVKKFLQPGSPRKPPADAKALEEARKIFRF

SEQ ID NO: 742393 - protein, 72 aa, Homo sapiens
SLRAACLPSIVGGVANSEPQLLCLFLQGVRPWDGGGWAQRASVACEWSSAVSWPRRVGAKPLARCLASTSIQ

SEQ ID NO: 742394 - protein, 136 aa, Homo sapiens
KFHRGLCMVVSQLCICVCEMCFLYRYKSLKVTALESFCWNKLPSNPYVCTRGKSRNITVRKHRVVYGKIWTQRVCRARKSQLLSMGEFARINDDDMLTVIMLIMLIMIKMKLFSTHAFSPFDISEVGNILRFSGKS

SEQ ID NO: 742395 - protein, 125 aa, Homo sapiens
SPELNRDPFTSRQAPFIPNSRGHCSLPLATRCVPEPQLSSPEFMQVTVTSARVLLPPSWPHSQLPSQPTDGPMQSRWQCLPNPCPPARPHVWERPCSPLAPTRFPPLATACVSPASQPQRQACPP

SEQ ID NO: 742396 - protein, 360 aa, Homo sapiens
MSQGRGKYDFYIGLGLAMSSSIFIGGSFILKKKGLLRLARKGSMRAGQGGHAYLKEWLWWAGLLSMGAGEVANFAAYAFAPATLVTPLGALSVLVSAILSSYFLNERLNLHGKIGCLLSILGSTVMVIHAPKEEEIETLNEMSHKLGDPGFVVFATLVVIVALILIFVVGPRHGQTNILVYITICSVIGAFSVSCVKGLGIAIKELFAGKPVLRHPLAWILLLSLIVCVSTQINYLNRALDIFNTSIVTPIYYVFFTTSVLTCSAILFKEWQDMPVDDVIGTLSGFFTIIVGIFLLHAFKDVSFSLASLPVSFRKDEKAMNGNLSNMYEVLNNNEESLTCGIEQHTGENVSRRNGNLTAF

SEQ ID NO: 742397 - protein, 360 aa, Homo sapiens; identical to SEQ ID NO: 742396

SEQ ID NO: 742398 - protein, 360 aa, Homo sapiens; identical to SEQ ID NO: 742396

SEQ ID NO: 742399 - protein, 360 aa, Homo sapiens; identical to SEQ ID NO: 742396

SEQ ID NO: 742400 - protein, 360 aa, Homo sapiens; identical to SEQ ID NO: 742396

SEQ ID NO: 742401 - protein, 360 aa, Homo sapiens; identical to SEQ ID NO: 742396

SEQ ID NO: 742402 - protein, 360 aa, Homo sapiens; identical to SEQ ID NO: 742396

SEQ ID NO: 742403 - protein, 360 aa, Homo sapiens; identical to SEQ ID NO: 742396

SEQ ID NO: 742404 - protein, 360 aa, Homo sapiens; identical to SEQ ID NO: 742396

SEQ ID NO: 742405 - protein, 360 aa, Homo sapiens; identical to SEQ ID NO: 742396

SEQ ID NO: 742406 - protein, 342 aa, Homo sapiens
MSQGRGKYDFYIGLGLAMSSSIFIGGSFILKKKGLLRLARKGSMRAGQGGHAYLKEWLWWAGLLSMGAGEVANFAAYAFAPATLVTPLGALSVLVSAILSSYFLNERLNLHGPKEEEIETLNEMSHKLGDPGFVVFATLVVIVALILIFVVGPRHGQTNILVYITICSVIGAFSVSCVKGLGIAIKELFAGKPVLRHPLAWILLLSLIVCVSTQINYLNRALDIFNTSIVTPIYYVFFTTSVLTCSAILFKEWQDMPVDDVIGTLSGFFTIIVGIFLLHAFKDVSFSLASLPVSFRKDEKAMNGNLSNMYEVLNNNEESLTCGIEQHTGENVSRRNGNLTAF

SEQ ID NO: 742407 - protein, 93 aa, Homo sapiens
HLAAPRFSGIGLGPGSGGDGGAGGCPWQVFLGASPWRRRCERLQPRMLASPTGRRRRRWPCERRTGRPVWGCEPRCPRLRRRGEAARPAGRLG

SEQ ID NO: 742408 - protein, 657 aa, Homo sapiens
SAPPPRRRRRRRRHSPLGRRRRSWRCPGSLAGKQLRGRRGGPRRPKRLAGGAVGWVLLVRGVHSVRAGGGRPPRAADMKKDVRILLVGEPRVGKTSLIMSLVSEEFPEEVPPRAEEITIPADVTPERVPTHIVDYSEAEQSDEQLHQEISQANVICIVYAVNNKHSIDKVTSRWIPLINERTDKDSRLPLILVGNKSDLVEYSSMETILPIMNQYTEIETCVECSAKNLKNISELFYYAQKAVLHPTGPLYCPEEKEMKPACIKALTRIFKISDQDNDGTLNDAELNFFQRICFNTPLAPQALEDVKNVVRKHISDGVADSGLTLKGFLFLHTLFIQRGRHETTWTVLRRFGYDDDLDLTPEYLFPLLKIPPDCTTELNHHAYLFLQSTFDKHDLDRDCALSPDELKDLFKVFPYIPWGPDVNNTVCTNERGWITYQGFLSQWTLTTYLDVQRCLEYLGYLGYSILTEQESQASAVTVTRDKKIDLQKKQTQRNVFRCNVIGVKNCGKSGVLQALLGRNLMRQKKIREDHKSYYAINTVYVYGQEKYLLLHDISESEFLTEAEIICDVVCLVYDVSNPKSFEYCARIFKQHFMDSRIPCLIVAAKSDLHEVKQEYSISPTDFCRKHKMPPPQAFTCNTADAPSKDIFVKLTTMAMYP

SEQ ID NO: 742409 - protein, 125 aa, Homo sapiens
VRTQLLSFCVFSASHARLRCMCTCNRCTFCICQNFLNSDLLQSVKNKIFTAVLNRFLTLFTGYPGILLKYKRKKRITIYYTDTHYKDKLTDAQLTSTKILTVMTMFSFGSILNNVFILIGIFRGL

SEQ ID NO: 742410 - protein, 695 aa, Homo sapiens
SAPPPRRRRRRRRHSPLGRRRRSWRCPGSLAGKQLRGRRGGPRRPKRLAGGAVGWVLLVRGVHSVRAGGGRPPRAADMKKDVRILLVGEPRVGKTSLIMSLVSEEFPEEVPPRAEEITIPADVTPERVPTHIVDYSEAEQSDEQLHQEISQANVICIVYAVNNKHSIDKVTSRWIPLINERTDKDSRLPLILVGNKSDLVEYSSMETILPIMNQYTEIETCVECSAKNLKNISELFYYAQKAVLHPTGPLYCPEEKEMKPACIKALTRIFKISDQDNDGTLNDAELNFFQRICFNTPLAPQALEDVKNVVRKHISDGVADSGLTLKGFLFLHTLFIQRGRHETTWTVLRRFGYDDDLDLTPEYLFPLLKIPPDCTTELNHHAYLFLQSTFDKHDLDRDCALSPDELKDLFKVFPYIPWGPDVNNTVCTNERGWITYQGFLSQWTLTTYLDVQRCLEYLGYLGYSILTEQESQASAVTVTRDKKIDLQKKQTQRNVFRCNVIGVKNCGKSGVLQALLGRNLMRQKKIREDHKSYYAINTVYVYGQEKYLLLHDISESEFLTEAEIICDVVCLVYDVSNPKSFEYCARIFKQHFMDSRIPCLIVAAKSDLHEVKQEYSISPTDFCRKHKMPPPQAFTCNTADAPSKDIFVKLTTMAMYPHVTQADLKSSTFWLRASFGATVFAVLGFAMYKALLKQR

SEQ ID NO: 742411 - protein, 491 aa, Homo sapiens
METILPIMNQYTEIETCVECSAKNLKNISELFYYAQKAVLHPTGPLYCPEEKEMKPACIKALTRIFKISDQDNDGTLNDAELNFFQRICFNTPLAPQALEDVKNVVRKHISDGVADSGLTLKGFLFLHTLFIQRGRHETTWTVLRRFGYDDDLDLTPEYLFPLLKIPPDCTTELNHHAYLFLQSTFDKHDLDRDCALSPDELKDLFKVFPYIPWGPDVNNTVCTNERGWITYQGFLSQWTLTTYLDVQRCLEYLGYLGYSILTEQESQASAVTVTRDKKIDLQKKQTQRNVFRCNVIGVKNCGKSGVLQALLGRNLMRQKKIREDHKSYYAINTVYVYGQEKYLLLHDISESEFLTEAEIICDVVCLVYDVSNPKSFEYCARIFKQHFMDSRIPCLIVAAKSDLHEVKQEYSISPTDFCRKHKMPPPQAFTCNTADAPSKDIFVKLTTMAMYPHVTQADLKSSTFWLRASFGATVFAVLGFAMYKALLKQR

SEQ ID NO: 742412 - protein, 768 aa, Homo sapiens
SAPPPRRRRRRRRHSPLGRRRRSWRCPGSLAGKQLRGRRGGPRRPKRLAGGAVGWVLLVRGVHSVRAGGGRPPRAADMKKDVRILLVGEPRVGKTSLIMSLVSEEFPEEVPPRAEEITIPADVTPERVPTHIVDYSEAEQSDEQLHQEISQANVICIVYAVNNKHSIDKVTSRWIPLINERTDKDSRLPLILVGNKSDLVEYSSMETILPIMNQYTEIETCVECSAKNLKNISELFYYAQKAVLHPTGPLYCPEEKEMKPACIKALTRIFKISDQDNDGTLNDAELNFFQRICFNTPLAPQALEDVKNVVRKHISDGVADSGLTLKGFLFLHTLFIQRGRHETTWTVLRRFGYDDDLDLTPEYLFPLLKIPPDCTTELNHHAYLFLQSTFDKHDLDRDCALSPDELKDLFKVFPYIPWGPDVNNTVCTNERGWITYQGFLSQWTLTTYLDVQRCLEYLGYLGYSILTEQESQASAVTVTRDKKIDLQKKQTQRNVFRCNVIGVKNCGKSGVLQALLGRNLMRQKKIREDHKSYYAINTVYVYGQEKYLLLHDISESEFLTEAEIICDVVCLVYDVSNPKSFEYCARIFKQHFMDSRIPCLIVAAKSDLHEVKQEYSISPTDFCRKHKMPPPQAFTCNTADAPSKDIFVKLTTMAMYPEDHYRDRLSRDMGHTDRIENLRKIWVFLKTAFHARLRCMCTCNRCTFCICQNFLNSDLLQSVKNKIFTAVLNRHVTQADLKSSTFWLRASFGATVFAVLGFAMYKALLKQR

SEQ ID NO: 742413 - protein, 736 aa, Homo sapiens
SAPPPRRRRRRRRHSPLGRRRRSWRCPGSLAGKQLRGRRGGPRRPKRLAGGAVGWVLLVRGVHSVRAGGGRPPRAADMKKDVRILLVGEPRVGKTSLIMSLVSEEFPEEVPPRAEEITIPADVTPERVPTHIVDYSEAEQSDEQLHQEISQANVICIVYAVNNKHSIDKVTSRWIPLINERTDKDSRLPLILVGNKSDLVEYSSMETILPIMNQYTEIETCVECSAKNLKNISELFYYAQKAVLHPTGPLYCPEEKEMKPACIKALTRIFKISDQDNDGTLNDAELNFFQRICFNTPLAPQALEDVKNVVRKHISDGVADSGLTLKGFLFLHTLFIQRGRHETTWTVLRRFGYDDDLDLTPEYLFPLLKIPPDCTTELNHHAYLFLQSTFDKHDLDRDCALSPDELKDLFKVFPYIPWGPDVNNTVCTNERGWITYQGFLSQWTLTTYLDVQRCLEYLGYLGYSILTEQESQASAVTVTRDKKIDLQKKQTQRNVFRCNVIGVKNCGKSGVLQALLGRNLMRQKKIREDHKSYYAINTVYVYGQEKYLLLHDISESEFLTEAEIICDVVCLVYDVSNPKSFEYCARIFKQHFMDSRIPCLIVAAKSDLHEVKQEYSISPTDFCRKHKMPPPQAFTCNTADAPSKDIFVKLTTMAMYPHARLRCMCTCNRCTFCICQNFLNSDLLQSVKNKIFTAVLNRHVTQADLKSSTFWLRASFGATVFAVLGFAMYKALLKQR

SEQ ID NO: 742414 - protein, 727 aa, Homo sapiens
SAPPPRRRRRRRRHSPLGRRRRSWRCPGSLAGKQLRGRRGGPRRPKRLAGGAVGWVLLVRGVHSVRAGGGRPPRAADMKKDVRILLVGEPRVGKTSLIMSLVSEEFPEEVPPRAEEITIPADVTPERVPTHIVDYSEAEQSDEQLHQEISQANVICIVYAVNNKHSIDKVTSRWIPLINERTDKDSRLPLILVGNKSDLVEYSSMETILPIMNQYTEIETCVECSAKNLKNISELFYYAQKAVLHPTGPLYCPEEKEMKPACIKALTRIFKISDQDNDGTLNDAELNFFQRICFNTPLAPQALEDVKNVVRKHISDGVADSGLTLKGFLFLHTLFIQRGRHETTWTVLRRFGYDDDLDLTPEYLFPLLKIPPDCTTELNHHAYLFLQSTFDKHDLDRDCALSPDELKDLFKVFPYIPWGPDVNNTVCTNERGWITYQGFLSQWTLTTYLDVQRCLEYLGYLGYSILTEQESQASAVTVTRDKKIDLQKKQTQRNVFRCNVIGVKNCGKSGVLQALLGRNLMRQKKIREDHKSYYAINTVYVYGQEKYLLLHDISESEFLTEAEIICDVVCLVYDVSNPKSFEYCARIFKQHFMDSRIPCLIVAAKSDLHEVKQEYSISPTDFCRKHKMPPPQAFTCNTADAPSKDIFVKLTTMAMYPEDHYRDRLSRDMGHTDRIENLRKIWVFLKTALHVTQADLKSSTFWLRASFGATVFAVLGFAMYKALLKQR

SEQ ID NO: 742415 - protein, 768 aa, Homo sapiens; identical to SEQ ID NO: 742412

SEQ ID NO: 742416 - protein, 598 aa, Homo sapiens
SAPPPRRRRRRRRHSPLGRRRRSWRCPGSLAGKQLRGRRGGPRRPKRLAGGAVGWVLLVRGVHSVRAGGGRPPRAADMKKDVRILLVGEPRVGKTSLIMSLVSEEFPEEVPPRAEEITIPADVTPERVPTHIVDYSEAEQSDEQLHQEISQANVICIVYAVNNKHSIDKVTSRWIPLINERTDKDSRLPLILVGNKSDLVEYSSMETILPIMNQYTEIETCVECSAKNLKNISELFYYAQKAVLHPTGPLYCPEEKEMKPACIKALTRIFKISDQDNDGTLNDAELNFFQRICFNTPLAPQALEDVKNVVRKHISDGVADSGLTLKGFLFLHTLFIQRGRHETTWTVLRRFGYDDDLDLTPEYLFPLLKIPPDCTTELNHHAYLFLQSTFDKHDLDRDCALSPDELKDLFKVFPYIPWGPDVNNTVCTNERGWITYQGFLSQWTLTTYLDVQRCLEYLGYLGYSILTEQESQASAVTVTRDKKIDLQKKQTQRNVFRCNVIGVKNCGKSGVLQALLGRNLMRQKKIREDHKSYYAINTVYVYGQEKYLLLHDISESEFLTEAEIICDVVCLVYDVSNPKSFEYCARIFKEKTGNNQDG

SEQ ID NO: 742417 - protein, 167 aa, Homo sapiens
RTRGIDKVTSRWIPLINERTDKDSRLPLILVGNKSDLVEYSSMETILPIMNQYTEIETCVECSAKNLKNISELFYYAQKAVLHPTGPLYCPEEKEMKPACIKALTRIFKISDQDNDGTLNDAELNFFQRICFNTPLLHVLASSKFWCYCFCSFGLCYVQSIIETAMI

SEQ ID NO: 742418 - protein, 768 aa, Homo sapiens; identical to SEQ ID NO: 742412

SEQ ID NO: 742419 - protein, 695 aa, Homo sapiens; identical to SEQ ID NO: 742410

SEQ ID NO: 742420 - protein, 768 aa, Homo sapiens
SAPPPRRRRRRRRHSPLGRRRRSWRCPGSLAGKQLRGRRGGPRRPKRLAGGAVGWVLLVRGVHSVRAGGGRPPRAADMKKDVRILLVGEPRVGKTSLIMSLVSEEFPEEVPPRAEEITIPADVTPERVPTHIVDYSEAEQSDEQLHQEISQANVICIVYAVNNKHSIDKVTSRWIPLINERTDKDSRLPLILVGNKSDLVEYSSMETILPIMNQYTEIETCVECSAKNLKNISELFYYAQKAVLHPTGPLYCPEEKEMKPACIKALTRIFKISDQDNDGTLNDAELNFFQRICFNTPLAPQALEDVKNVVRKHISDGVADSGLTLKGFLFLHTLFIQRGRHETTWTVLRRFGYDDDLDLTPEYLFPLLKIPPDCTTELNHHAYLFLQSTFDKHDLDRDCALSPDELKDLFKVFPYIPWGPDVNNTVCTNERGWITYQGFLSQWTLTTYLDVQRCLEYLGYLGYSILTEQESQASAVTVTRDKKIDLQKKQTQRNVFRCNVIGVKNCGKSGVLQALLGRNLMRQKKIREDHKSYYAINTVYVYGQEKYLLLHDISESEFLTEAEIICDVVCLVYDVSNPKSFEYCARIFKQHFMDSRIPCLIVAAKSDLHEVKQEYSISPTDFCRKHKMPPPQAFTCNTADAPSKDIFVKLTTMAMYPHARLRCMCTCNRCTFCICQNFLNSDLLQSVKNKIFTAVLNRFLTLFTGYPGILLKYKRKKRITIYYTDTHYKDKLTDAQLTSTKILTVMTMFSFGSILNNVFILIGIFRGL

SEQ ID NO: 742421 - protein, 657 aa, Homo sapiens; identical to SEQ ID NO: 742408

SEQ ID NO: 742422 - protein, 239 aa, Homo sapiens
SAPPPRRRRRRRRHSPLGRRRRSWRCPGSLAGKQLRGRRGGPRRPKRLAGGAVGWVLLVRGVHSVRAGGGRPPRAADMKKDVRILLVGERESAPSGRPLSPCPPCPCSPCRPCRPCSPNLCSPGPSRASQLRSPFSAFLGLPAPSLFSFGWPPAALTLSPHLGPPEISFPCSPAVLPSHVPISPNRPTSSLRSFSPPFPLRTLSFWASQFPRPPPFRPSCLLEIPLSLPGRCWNKQTDQ

SEQ ID NO: 742423 - protein, 73 aa, Homo sapiens
TEDQVGTLCLKQHLYLPSHGKGASETHPDLVDETKLVNTQFHLTPYWQPMLTLFPGWQVKKVGIGDFGKDVSG

SEQ ID NO: 742424 - protein, 626 aa, Homo sapiens
MPCVQAQYSPSPPGSSYAAQTYSSEYTTEIMNPDYTKLTMDLGSTEITATATTSLPSISTFVEGYSSNYELKPSCVYQMQRPLIKVEEGRAPSYHHHHHHHHHHHHHHQQQHQQPSIPPASSPEDEVLPSTSMYFKQSPPSTPTTPAFPPQAGALWDEALPSAPGCIAPGPLLDPPMKAVPTVAGARFPLFHFKPSPPHPPAPSPAGGHHLGYDPTAAAALSLPLGAAAAAGSQAAALESHPYGLPLAKRAAPLAFPPLGLTPSPTASSLLGESPSLPSPPSRSSSSGEGTCAVCGDNAACQHYGVRTCEGCKGFFKRTVQKNAKYVCLANKNCPVDKRRRNRCQYCRFQKCLSVGMVKEVVRTDSLKGRRGRLPSKPKSPLQQEPSQPSPPSPPICMMNALVRALTDSTPRDLDYSRYCPTDQAAAGTDAEHVQQFYNLLTASIDVSRSWAEKIPGFTDLPKEDQTLLIESAFLELFVLRLSIRSNTAEDKFVFCNGLVLHRLQCLRGFGEWLDSIKDFSLNLQSLNLDIQALACLSALSMITERHGLKEPKRVEELCNKITSSLKDHQSKGQALEPTESKVLGALVELRKICTLGLQRIFYLKLEDLVSPPSIIDKLFLDTLPF

SEQ ID NO: 742425 - protein, 443 aa, Homo sapiens
MPCVQAQYSPSPPGSSYAAQTYSSEYTTEIMNPDYTKLTMDLGSTEITATATTSLPSISTFVEGYSSNYELKPSCVYQMQRPLIKVEEGRAPSYHHHHHHHHHHHHHHQQQHQQPSIPPASSPEDEVLPSTSMYFKQSPPSTPTTPAFPPQAGALWDEALPSAPGCIAPGPLLDPPMKAVPTVAGARFPLFHFKPSPPHPPAPSPAGGHHLGYDPTAAAALSLPLGAAAAAGSQAAALESHPYGLPLAKRAAPLAFPPLGLTPSPTASSLLGESPSLPSPPSRSSSSGEGTCAVCGDNAACQHYGVRTCEGCKGFFKRTVQKNAKYVCLANKNCPVDKRRRNRCQYCRFQKCLSVGMVKEVVRTDSLKGRRGRLPSKPKSPLQQEPSQPSPPSPPICMMNALVRALTDSTPRDLDYSRVSFMISCFQMNDQGLYLWLLVIRVD

SEQ ID NO: 742426 - protein, 102 aa, Homo sapiens
RQSATLAPMLECSGTILAHCNLHLAGSSDSRASASRVAGITGTCHHTQLIFIFLVEMGFHHVGQAGLELLTSGDSPPPPHPPASQSGGITGMSHRPGRNYHF

SEQ ID NO: 742427 - protein, 626 aa, Homo sapiens; identical to SEQ ID NO: 742424

SEQ ID NO: 742428 - protein, 626 aa, Homo sapiens; identical to SEQ ID NO: 742424

SEQ ID NO: 742429 - protein, 626 aa, Homo sapiens; identical to SEQ ID NO: 742424

SEQ ID NO: 742430 - protein, 626 aa, Homo sapiens; identical to SEQ ID NO: 742424

SEQ ID NO: 742431 - protein, 698 aa, Homo sapiens
SQYSQQSSSYGQQKPTAEEGSPASPGPEPGPLAVPGSTAGASPRRTSAPPTLSASAGETPSPTIQRARYPPDMPCVQAQYSPSPPGSSYAAQTYSSEYTTEIMNPDYTKLTMDLGSTEITATATTSLPSISTFVEGYSSNYELKPSCVYQMQRPLIKVEEGRAPSYHHHHHHHHHHHHHHQQQHQQPSIPPASSPEDEVLPSTSMYFKQSPPSTPTTPAFPPQAGALWDEALPSAPGCIAPGPLLDPPMKAVPTVAGARFPLFHFKPSPPHPPAPSPAGGHHLGYDPTAAAALSLPLGAAAAAGSQAAALESHPYGLPLAKRAAPLAFPPLGLTPSPTASSLLGESPSLPSPPSRSSSSGEGTCAVCGDNAACQHYGVRTCEGCKGFFKRTVQKNAKYVCLANKNCPVDKRRRNRCQYCRFQKCLSVGMVKEVVRTDSLKGRRGRLPSKPKSPLQQEPSQPSPPSPPICMMNALVRALTDSTPRDLDYSRYCPTDQAAAGTDAEHVQQFYNLLTASIDVSRSWAEKIPGFTDLPKEDQTLLIESAFLELFVLRLSIRSNTAEDKFVFCNGLVLHRLQCLRGFGEWLDSIKDFSLNLQSLNLDIQALACLSALSMITERHGLKEPKRVEELCNKITSSLKDHQSKGQALEPTESKVLGALVELRKICTLGLQRIFYLKLEDLVSPPSIIDKLFLDTLPF

SEQ ID NO: 742432 - protein, 69 aa, Homo sapiens
PVLAVPLSSCGLKGVVYLLSVHVYSSAQSMRRTIALTSQRFREDQMTQSEEMNHYCYLLSLLSSEANVW

SEQ ID NO: 742433 - protein, 129 aa, Homo sapiens
GILWMFASPSFLLELTPAVKPAFFSGPRCVTLSGVDAENEADVSKNEGLRHPQYPLLWERGREQSGFALPKFGAPVSFLRRLPKTFPLFSWAVLPPWEGRRRRAMLHAVERTHLFFLEQSLGTFWSECL

SEQ ID NO: 742434 - protein, 403 aa, Homo sapiens
MEPAGPCGFCPAGEVQPARYTCPRCNAPYCSLRCYRTHGTCAENFYRDQVLGELRGCSAPPSRLASALRRLRQQRETEDEPGEAGLSSGPAPGGLSGLWERLAPGEKAAFERLLSRGEAGRLLPPWRPWWWNRGAGPQLLEELDNAPGSDAAELELAPARTPPDSVKDASAAEPAAAERVLGDVPGACTPVVPTRIPAIVSLSRGPVSPLVRFQLPNVLFAYAHTLALYHGGDDALLSDFCATLLGVSGALGAQQVFASAEEALQAAAHVLEAGEHPPGPLGTRGAMHEVARILLGEGPTNQKGYTLAALGDLAQTLGRARKQAVAREERDHLYRARKKCQFLLAWTNENEAALTPLALDCARAHQAHAVVAEEVAALTGELERLWGGPVPPAPRTLIEELPS

SEQ ID NO: 742435 - protein, 380 aa, Homo sapiens
  misc_feature (26)..(26): Xaa can be any naturally occurring amino acid
  misc_feature (36)..(36): Xaa can be any naturally occurring amino acid
MAPAQKTSPVPGVERAPFPPRPRGFXQGRALSPFLXPPARLASALRRLRQQRETEDEPGEAGLSSGPAPGGLSGLWERLAPGEKAAFERLLSRGEAGRLLPPWRPWWWNRGAGPQLLEELDNAPGSDAAELELAPARTPPDSVKDASAAEPAAAERVLGDVPGACTPVVPTRIPAIVSLSRGPVSPLVRFQLPNVLFAYAHTLALYHGGDDALLSDFCATLLGVSGALGAQQVFASAEEALQAAAHVLEAGEHPPGPLGTRGAMHEVARILLGEGPTNQKGYTLAALGDLAQTLGRARKQAVAREERDHLYRARKKCQFLLAWTNENEAALTPLALDCARAHQAHAVVAEEVAALTGELERLWGGPVPPAPRTLIEELPS

SEQ ID NO: 742436 - protein, 322 aa, Homo sapiens
SHIKWSEKEGRGALRTWTVRLAPGEKAAFERLLSRGEAGRLLPPWRPWWWNRGAGPQLLEELDNAPGSDAAELELAPARTPPDSVKDASAAEPAAAERVLGDVPGACTPVVPTRIPAIVSLSRGPVSPLVRFQLPNVLFAYAHTLALYHGGDDALLSDFCATLLGVSGALGAQQVFASAEEALQAAAHVLEAGEHPPGPLGTRGAMHEVARILLGEGPTNQKGYTLAALGDLAQTLGRARKQAVAREERDHLYRARKKCQFLLAWTNENEAALTPLALDCARAHQAHAVVAEEVAALTGELERLWGGPVPPAPRTLIEELPS

SEQ ID NO: 742437 - protein, 117 aa, Homo sapiens [sequence omitted]

SEQ ID NO: 742438 - protein, 113 aa, Homo sapiens
MTSKQQRSTSIEETMRPQEKQVTITETLWDQVLTVFKDIQKELQEDARIRGMSNCSMTPMTSAPRTGSIRPPDSLMTPKLRRLQFSSGEQPSGGRIHNLKTQLFSQSAYYPGP

SEQ ID NO: 742439 - protein, 113 aa, Homo sapiens; identical to SEQ ID NO: 742438

SEQ ID NO: 742440 - protein, 357 aa, Homo sapiens
ADEGSLVGKMAATLGPLGSWQQWRRCLSARDGSRMLLLLLLLGSGQGPQQVGAGQTFEYLKREHSLSKPYQGVGTGSSSLWNLMGNAMVMTQYIRLTPDMQSKQGALWNRVPCFLRDWELQVHFKIHGQGKKNLHGDGLAIWYTKDRMQPGPVFGNMDKFVGLGVFVDTYPNEEKQQERVFPYISAMVNNGSLSYDHERDGRPTELGGCTAIVRNLHYDTFLVIRYVKRHLTIMMDIDGKHEWRDCIEVPGVRLPRGYYFGTSSITGDLSDNHDVISLKLFELTVERTPEEEKLHRDVFLPSVDNMKLPEMTAPLPPLSGLALFLIVFFSLVFSVFAIVIGIILYNKWQEQSRKRFY

SEQ ID NO: 742441 - protein, 356 aa, Homo sapiens
PEWRIRHEMAATLGPLGSWQQWRRCLSARDGSRMLLLLLLLGSGQGPQQVGAGQTFEYLKREHSLSKPYQGVGTGSSSLWNLMGNAMVMTQYIRLTPDMQSKQGALWNRVPCFLRDWELQVHFKIHGQGKKNLHGDGLAIWYTKDRMQPGPVFGNMDKFVGLGVFVDTYPNEEKQQERVFPYISAMVNNGSLSYDHERDGRPTELGGCTAIVRNLHYDTFLVIRYVKRHLTIMMDIDGKHEWRDCIEVPGVRLPRGYYFGTSSITGDLSDNHDVISLKLFELTVERTPEEEKLHRDVFLPSVDNMKLPEMTAPLPPLSGLALFLIVFFSLVFSVFAIVIGIILYNKWQEQSRKRFY

SEQ ID NO: 742442 - protein, 368 aa, Homo sapiens
ADEGSLVGKMAATLGPLGSWQQWRRCLSARDGSRMLLLLLLLGSGQGPQQVGAGQTFEYLKREHSLSKPYQGVGTGSSSLWNLMGNAMVMTQYIRLTPDMQSKQGALWNRVPCFLRDWELQVHFKIHGQGKKNLHGDGLAIWYTKDRMQPGPVFGNMDKFVGLGVFVDTYPNEEKQQEPRRGDILQEIQRVFPYISAMVNNGSLSYDHERDGRPTELGGCTAIVRNLHYDTFLVIRYVKRHLTIMMDIDGKHEWRDCIEVPGVRLPRGYYFGTSSITGDLSDNHDVISLKLFELTVERTPEEEKLHRDVFLPSVDNMKLPEMTAPLPPLSGLALFLIVFFSLVFSVFAIVIGIILYNKWQEQSRKRFY

SEQ ID NO: 742443 - protein, 203 aa, Homo sapiens
MDKERRICMGMAWQSGTQRIGCSQRVFPYISAMVNNGSLSYDHERDGRPTELGGCTAIVRNLHYDTFLVIRYVKRHLTIMMDIDGKHEWRDCIEVPGVRLPRGYYFGTSSITGDLSDNHDVISLKLFELTVERTPEEEKLHRDVFLPSVDNMKLPEMTAPLPPLSGLALFLIVFFSLVFSVFAIVIGIILYNKWQEQSRKRFY

SEQ ID NO: 742444 - protein, 210 aa, Homo sapiens
MQPGPVFGNMDKFVGLGVFVDTYPNEEKQQERVFPYISAMVNNGSLSYDHERDGRPTELGGCTAIVRNLHYDTFLVIRYVKRHLTIMMDIDGKHEWRDCIEVPGVRLPRGYYFGTSSITGDLSDNHDVISLKLFELTVERTPEEEKLHRDVFLPSVDNMKLPEMTAPLPPLSGLALFLIVFFSLVFSVFAIVIGIILYNKWQEQSRKRFY

SEQ ID NO: 742445 - protein, 203 aa, Homo sapiens; identical to SEQ ID NO: 742443

SEQ ID NO: 742446 - protein, 357 aa, Homo sapiens; identical to SEQ ID NO: 742440

SEQ ID NO: 742447 - protein, 357 aa, Homo sapiens; identical to SEQ ID NO: 742440

SEQ ID NO: 742448 - protein, 357 aa, Homo sapiens; identical to SEQ ID NO: 742440

SEQ ID NO: 742449 - protein, 321 aa, Homo sapiens
ADEGSLVGKMAATLGPLGSWQQWRRCLSARDGSRMLLLLLLLGSGQGPQQVGAGQTFEYLKREHSLSKPYQGVGTGSSSLWNLMGNAMVMTQYIRLTPDMQSKQGALWNRVPCFLRDWELQVHFKIHGQGKKNLHGDGLAIWYTKDRMQPGPVFGNMDKFVGLGVFVDTYPNEEKQQERVFPYISAMVNNGSLSYDHERDGRPTELGGCTAIVRNLHYDTFLVIRYVKRHLTIMMDIDGKHEWRDCIEVPGVRLPRGYYFGTSSITGDLSDNHDVISLKLFELTVERTPEEEKLHRDVFLPSVDNMKLPESEHRGPREMVP

SEQ ID NO: 742450 - protein, 372 aa, Homo sapiens
EKGEEGGGAPRHGVLRGARARAGAGPGRAMSRAGSWDMDGLRADGGGAGGAPASSSSSSVAAAAASGQCRGFLSAPVFAGTHSGRAAAAAAAAAAAAAAASGFAYPGTSERTGSSSSSSSSAVVAARPEAPPAKECPAPTPAAAAAAPPSAPALGYGYHFGNGYYSCRMSHGVGLQQNALKSSPHASLGGFPVEKYMDVSGLASSSVPANEVPARAKEVSFYQGYTSPYQHVPGYIDMVSTFGSGEPRHEAYISMEGYQSWTLANGWNSQVYCTKDQPQGSHFWKSSFPGDVALNQPDMCVYRRGRKKRVPYTKLQLKELENEYAINKFINKDKRRRISAATNLSERQVTIWFQNRRVKDKKIVSKLKDTVS

SEQ ID NO: 742451 - protein, 747 aa, Homo sapiens [sequence omitted]

SEQ ID NO: 742452 - protein, 284 aa, Homo sapiens
MAEAVERTDELVREYLLFRGFTHTLRQLDAEIKADKEKGFRVDKIVDQLQQLMQVYDLAALRDYWSYLERRLFSRLEDIYRPTIHKLKTSLFRFYLVYTIQTNRNDKAQEFFAKQATELQNQAEWKDWFVLPFLPSPDTNPTFATYFSRQWADTFIVSLHNFLSVLFQCMPVPVILNFDAECQRTNQVQEENEVLRQKLFALQAEIHRLKKEEQQPEEEEALVQHKLPPYVSNMDRLGDSELHFVWASCPRCCLRVRRAPQGCRLLRALLNLRARPRKSPSVVR

SEQ ID NO: 742453 - protein, 44 aa, Homo sapiens
MSWRAHYGEVYSVEFSYDENTVYSIGEDGKVGGCRIQIREHRDD

SEQ ID NO: 742454 - protein, 636 aa, Homo sapiens
MAEAVERTDELVREYLLFRGFTHTLRQLDAEIKADKEKGFRVDKIVDQLQQLMQVYDLAALRDYWSYLERRLFSRLEDIYRPTIHKLKTSLFRFYLVYTIQTNRNDKAQEFFAKQATELQNQAEWKDWFVLPFLPSPDTNPTFATYFSRQWADTFIVSLHNFLSVLFQCMPVPVILNFDAECQRTNQVQEENEVLRQKLFALQAEIHRLKKEEQQPEEEEALVQHKLPPYVSNMDRLGDSELAMVCSQRNASLSQSLRVGFLSSLLPQSKKSPSRLSPAQGPPQPQSSAKKESFGGQGTKGKDPTSGAKDGKSLLSGLATGESGWSQHRQRRLQDHGKERKELFSTTTSQCAEKKPEASGPEAEPCPELHTEPVEPLTRASSAGPEGGGVRPEQPFIVLGQEEYGEHHSSIMHCRVDCSGRRVASLDVDGVIKVWSFNPIMQTKASSISKSPLLSLEWATKRDRLLLLGSGVGTVRLYDTEAKKNLCEININDNMPRILSLACSPNGASFVCSAAAPSLTSQVDFSAPDIGSKGMNQVPGRLLLWDTKTMKQQLQFSLDPEPIAINCTAFNHNGNLLVTGAADGVIRLFVHPVEHPQEWPQGIRVQPPLRCHGPLCAVWIQRLQAGSSPQGPTLRF

SEQ ID NO: 742455 - protein, 739 aa, Homo sapiens
DASAAMAEAVERTDELVREYLLFRGFTHTLRQLDAEIKADKEKGFRVDKIVDQLQQLMQVYDLAALRDYWSYLERRLFSRLEDIYRPTIHKLKTSLFRFYLVYTIQTNRNDKAQEFFAKQATELQNQAEWKDWFVLPFLPSPDTNPTFATYFSRQWADTFIVSLHNFLSVLFQCMPVPVILNFDAECQRTNQVQEENEVLRQKLFALQAEIHRLKKEEQQPEEEEALVQHKLPPYVSNMDRLGDSELAMVCSQRNASLSQSLRVGFLSSLLPQSKKSPSRLSPAQGPPQPQSSAKKESFGGQGTKGKDPTSGAKDGKSLLSGLATGESGWSQHRQRRLQDHGKERKELFSTTTSQCAEKKPEASGPEAEPCPELHTEPVEPLTRASSAGPEGGGVRPEQPFIVLGQEEYGEHHSSIMHCRVDCSGRRVASLDVDGVIKVWSFNPIMQTKASSISKSPLLSLEWATKRDRLLLLGSGVGTVRLYDTEAKKNLCEININDNMPRILSLACSPNGASFVCSAAAPSLTSQVDFSAPDIGSKGMNQVPGRLLLWDTKTMKQQCTAFNHNGNLLVTGAADGVIRLFDMQQHECAMSWRAHYGEVYSVEFSYDENTVYSIGEDGKFIQWNIHKSGLKVSEYSLPSDATGPFVLSGYSGYKQVQVPRGRLFAFDSEGNYMLTCSATGGVIYKLGGDEKVLESCLSLGGHRAPVVTVDWSTAMDCGTCLTASMDGKIKLTTLLAHKA

SEQ ID NO: 742456 - protein, 636 aa, Homo sapiens; identical to SEQ ID NO: 742454

SEQ ID NO: 742457 - protein, 336 aa, Homo sapiens [sequence omitted]

SEQ ID NO: 742458 - protein, 307 aa, Homo sapiens
EPTPHHQGRRLPSVVRGAGPFPSLMPHLLCRIQPQDQSAPSLCGQAEGLTQAHVCCRILSLACSPNGASFVCSAAAPSLTSQVDFSAPDIGSKGMNQVPGRLLLWDTKTMKQQLQFSLDPEPIAINCTAFNHNGNLLVTGAADGVIRLFDMQQHECAMSWRAHYGEVYSVEFSYDENTVYSIGEDGKFIQWNIHKSGLKVSEYSLPSDATGPFVLSGYSGYKQVQVPRGRLFAFDSEGNYMLTCSATGGVIYKLGGDEKVLESCLSLGGHRAPVVTVDWSTAMDCGTCLTASMDGKIKLTTLLAHKA

SEQ ID NO: 742459 - protein, 150 aa, Homo sapiens [sequence omitted]

SEQ ID NO: 742460 - protein, 588 aa, Homo sapiens
MAEAVERTDELVREYLLFRGFTHTLRQLDAEIKADKEKGFRVDKIVDQLQQLMQVYDLAALRDYWSYLERRLFSRLEDIYRPTIHKLKTSLFRFYLVYTIQTNRNDKAQEFFAKQATELQNQAEWKDWFVLPFLPSPDTNPTFATYFSRQWADTFIVSLHNFLSVLFQCMPVPVILNFDAECQRTNQVQEENEVLRQKLFALQAEIHRLKKEEQQPEEEEALVQHKLPPYVSNMDRLGDSELAMVCSQRNASLSQSLRVGFLSSLLPQSKKSPSRLSPAQGPPQPQSSAKKESFGGQGTKGKDPTSGAKDGKSLLSGLATGESGWSQHRQRRLQDHGKERKELFSTTTSQCAEKKPEASGPEAEPCPELHTEPVEPLTRASSAGPEGGGVRPEQPFIVLGQEEYGEHHSSIMHCRVDCSGRRVASLDVDGVIKVWSFNPIMQTKASSISKSPLLSLEWATKRDRLLLLGSGVGTVRLYDTEAKKNLCEININDNMPRIQPQDQSAPSLCGQAEGLTQAHVCCRILSLACSPNGASFVCSAAAPSLTSQVDFSAPDIGSKGMNQVPGRLLLWDTKTMKQQAGTGLPCGS

SEQ ID NO: 742461 - protein, 77 aa, Homo sapiens
TSEYNSMHLTPLDSMSDKPQGGYIRQHQILAGRKLIDKFCGGQSSRALKSTAIRGRWCSRHTSREEPNLDGQFDLPG

SEQ ID NO: 742462 - protein, 119 aa, Homo sapiens
RLALFFVKSSMHLARCRWASAPPLYTLIDVLKYSYVRLVCKDVRAPSRPAVETETRRSESGTASNTHITQKPRTLELARSSKKLRPNLKPINRTQFQCNKCLLSTYYVHALHWTFRIRD

SEQ ID NO: 742463 - protein, 69 aa, Homo sapiens
CGTLARVLRAQEGVGTCFFCTHTSPVASASSWALRGGPEGRGCQFKKEDTVLALRESLHSEGLPITHMI

SEQ ID NO: 742464 - protein, 35 aa, Homo sapiens
MGFPLAQSRSQTAIQEPRLGFMDPKTPLGVLSYGG

SEQ ID NO: 742465 - protein, 313 aa, Homo sapiens
TRSRSRSAGRRGRRRQSQSGSRSRSRSHGRRNRRRREDEGRRRRRRRSRERRSDSEEERWQRSGMRSRSPPRPKWHSRDGSSQSDSGEEQSRGQWARRRRRARSWSPSSSASSSASPGRSQSPRAAAAALSQQQSLQERLRLREERKQQEELMKAFETPEEKRARRLAKKEAKERKKREKMGWGEEYMGYTNTDNPFGDNNLLGTFIWNKALEKKGISHLEEKELKERNKRIQEDNRLELQKVKQLRLEREREKAMREQELEMLQREKEAEHFKTWEEQEDNFHLQQAKLRSKIRIRDGRAKPIDLLAKYISA

SEQ ID NO: 742466 - protein, 131 aa, Homo sapiens
TTVGPRGCKSGPAKVPFPSPSPSPHTRAATPGLALMLAQATPNGKGSIVNSDFLKGQRGDMLGAGCTFVILKYLLKFFSMKHKFELLKSHLSKFFFFFRQGLTLSPIPECSEPRFATALQPGQRNETVPPP

SEQ ID NO: 742467 - protein, 125 aa, Homo sapiens
TPNTHQERHTGVPQTRTQHRTKVAEKPQKRAVAGKHNQELPHCPHLSRGTWSQVCPLNLVHTRCSQHAALVSLSTPSCHLTGTDNRPSGFAAESKPQARCGLMPVIPVLWEAKARGSLEARSLRL

SEQ ID NO: 742468 - protein, 224 aa, Homo sapiens
MSETAPAETATPAPVEKSPAKKKATKKAAGAGAAKRKATGPPVSELITKAVAASKERNGLSLAALKKALAAGGYDVEKNNSRIKLGLKSLVSKGTLVQTKGTGASGSFKLNKKAASGEAKPKAKKAGAAKAKKPAGATPKKAKKAAGAKKAVKKTPKKAKKPAAAGVKKVAKSPKKAKAAAKPKKATKSPAKPKAVKPKAAKPKAAKPKAAKPKAAKAKKAAAK

SEQ ID NO: 742469 - protein, 131 aa, Homo sapiens
MSETAPAETATPAPVEKSPAKKKATKKAAGAGAAKRKATGPPVSELITKAVAASKERNGLSLAALKKALAAGGYDVEKNNSRIKLGLKSLVISSETGGPVALCAVVRRQSHYARRVGDGASDAAADKYACC

SEQ ID NO: 742470 - protein, 130 aa, Homo sapiens
MSGRGKQGGKARAKAKTRSSRAGLQFPVGRVHRLLRKGNYAERVGAGAPVYLAAVLEYLTAEILELAGNAARDNKKTRIIPRHLQLAIRNDEELNKLLGKVTIAQGGVLPNIQAVLLPKKTESHHKAKGK

SEQ ID NO: 742471 - protein, 713 aa, Homo sapiens
MRYVKACFLIMNLNEAEESEIISFGLMFNQKLIFTALVHSREPVTEVFECMIVFQNQFKITRSVTLEKMTIRLYRNRYFFRGFTLENLKKKFLFCHSCVILSAYENGISSLINPKLFYSEGEYTFRMNTGMCLKYSLEMLVAFQRAVLCLIEWWIHWLECVFSFLIDTKPTYFENLLCKCSVQIRDLSQKQEGPGHSHSLHKKEKKVDILGTFILASYLATYACQVRQKDNQTFFLQDIKDEKGLGDDQIQSLYFLKKLRLGIIDLTDRNCWKILVLLLTCCETILKIDIISCFNYPRLQKEAFQDKPICIWGNKSEAQLTEDNRKSNNIKMSPEDKALDLRFGSWKNSWKLSKIVYNQAHMKWSAVASYCAEEVEALRPKCWQMAWIWNNEEERPRANPKVMTGSWWVSQREVTSGKEHRERMEAEESCKLKSSDFGNKMSLPVCLNKVLESKPTFSCSQCIYQDENILTHRKMHIIHRYNTLHKNITHHIVQILICLVLGIQKYLLNEMKTPSSATYLINHKKNCVVSKMDMVIHTSWSEIIYMKYPEHIKHLINNSCYCCFKYGSNIVVNAYKNLKFIPQKTFSMSCEKYVMFCILKRKMCLNNQIKCLIHIILTVYEINSSIINMLVISKTNVVVYHFLAHLGCTNMWVCYNVRNAGSYMRFQPSIFPSVKELMNQEPNKKHSTLSDNLSTNLQSCQACYMITNCSMLL

SEQ ID NO: 742472 - protein, 81 aa, Homo sapiens
WAFRHRRAKLRLQQQQRQREINLLAYHGACHGAGPFPTGSLLDLRLLSTFKPPAYEDVVHRPGTTPRPPPPCLILSPQAAP

SEQ ID NO: 742473 - protein, 125 aa, Homo sapiens
GLGRGRCVCDFVSVSFCVCLRSAVPGGASVSCSAGWLHAWCWGLLSSCCATLWAVSAMPAFLVASLFLSHLSLSLFCVSFHTWSLPSRLVHAASSVLTPPAAAHSLPAVVMPSTLSLAEGILKTA

SEQ ID NO: 742474 - protein, 142 aa, Homo sapiens
PRRFYVCPAVLGSQRFSSGRHYWEVEVGNKPKWILGVCQDCLLRNWQDQPSVLGGFWAIGRYMKSGYVASGPKTTQLLPVVKPSKIGIFLDYELGDLSFYNMNDRSILYTFNDCFTEAVWPYFYTGTDSEPLKICSVSDSER

SEQ ID NO: 742475 - protein, 110 aa, Homo sapiens
LKSHCKLAHLCGVLSILQSFLAFPVQFSFHIFERPRPGSWLCYLETRRWGGFTGSTAAGFGGRRGSSGLGVLNVSARAALLVRCAWYPVCITLLTPSRTLAVHSDSEVSP

SEQ ID NO: 742476 - protein, 48 aa, Homo sapiens
MQNLRTWPSLGGVLGKQEVFRPDCLQISAMGSLVSHLRGIGNMDAAPE

SEQ ID NO: 742477 - protein, 816 aa, Homo sapiens
MAVSLDDDVPLILTLDEGGSAPLAPSNGLGQEELPSKNGGSYAIHDSQAPSLSSGGESSPSSPAHNWEMNYQEAAIYLQEGENNDKFFTHPKDAKALAAYLFAHNHLFYLMELATALLLLLLSLCEAPAVPALRLGIYVHATLELFALMVVVFELCMKLRWLGLHTFIRHKRTMVKTSVLVVQFVEAIVVLVRQMSHVRVTRALRCIFLVDCRYCGGVRRNLRQIFQSLPPFMDILLLLLFFMIIFAILGFYLFSPNPSDPYFSTLENSIVSLFVLLTTANFPDVMMPSYSRNPWSCVFFIVYLSIELYFIMNLLLAVVFDTFNDIEKRKFKSLLLHKRTAIQHAYRLLISQRRPAGISYRQFEGLMRFYKPRMSARERYLTFKALNQNNTPLLSLKDFYDIYEVAALKWKAKKNREHWFDELPRTALLIFKGINILVKSKAFQYFMYLVVAVNGVWILVETFMLKGGNFFSKHVPWSYLVFLTIYGVELFLKVAGLGPVEYLSSGWNLFDFSVTVFAFLGLLALALNMEPFYFIVVLRPLQLLRLFKLKERYRNVLDTMFELLPRMASLGLTLLIFYYSFAIVGMEFFCGIVFPNCCNTSTVADAYRWRNHTVGNRTVVEEGYYYLNNFDNILNSFVTLFELTVVNNWYIIMEGVTSQTSHWSRLYFMTFYIVTMVVMTIIVAFILEAFVFRMNYSRKNQDSEVDGGITLEKEISKEELVAVLELYREARGASSDVTRLLETLSQMERYQQHSMVFLGRRSRTKSDLSLKMYQEEIQEWYEEHAREQEQQRQLSSSAAPAAQQPPGSRQRSQTVT

SEQ ID NO: 742478 - protein, 902 aa, Homo sapiens
MERLGTPSGLDSTKMESCYIAQAGLELLGSSSSPTLTSQSAEITEDASNGGVSEQHPWPSGFERELKPETISSPGYHILRATGEENMAVSLDDDVPLILTLDEGGSAPLAPSNGLGQEELPSKNGGSYAIHDSQAPSLSSGGESSPSSPAHNWEMNYQEAAIYLQEGENNDKFFTHPKDAKALAAYLFAHNHLFYLMELATALLLLLLSLCEAPAVPALRLGIYVHATLELFALMVVVFELCMKLRWLGLHTFIRHKRTMVKTSVLVVQFVEAIVVLVRQMSHVRVTRALRCIFLVDCRYCGGVRRNLRQIFQSLPPFMDILLLLLFFMIIFAILGFYLFSPNPSDPYFSTLENSIVSLFVLLTTANFPDVMMPSYSRNPWSCVFFIVYLSIELYFIMNLLLAVVFDTFNDIEKRKFKSLLLHKRTAIQHAYRLLISQRRPAGISYRQFEGLMRFYKPRMSARERYLTFKALNQNNTPLLSLKDFYDIYEVAALKWKAKKNREHWFDELPRTALLIFKGINILVKSKAFQYFMYLVVAVNGVWILVETFMLKGGNFFSKHVPWSYLVFLTIYGVELFLKVAGLGPVEYLSSGWNLFDFSVTVFAFLGLLALALNMEPFYFIVVLRPLQLLRLFKLKERYRNVLDTMFELLPRMASLGLTLLIFYYSFAIVGMEFFCGIVFPNCCNTSTVADAYRWRNHTVGNRTVVEEGYYYLNNFDNILNSFVTLFELTVVNNWYIIMEGVTSQTSHWSRLYFMTFYIVTMVVMTIIVAFILEAFVFRMNYSRKNQDSEVDGGITLEKEISKEELVAVLELYREARGASSDVTRLLETLSQMERYQQHSMVFLGRRSRTKSDLSLKMYQEEIQEWYEEHAREQEQQRQLSSSAAPAAQQPPGSRQRSQTVT

SEQ ID NO: 742479 - protein, 971 aa, Homo sapiens
MAVSLDDDVPLILTLDEGGSAPLAPSNGLGQEELPSKNGGSYAIHDSQAPSLSSGGESSPSSPAHNWEMNYQEAAIYLQEGENNDKFFTHPKDAKALAAYLFAHNHLFYLMELATALLLLLLSLCEAPAVPALRLGIYVHATLELFALMVVVFELCMKLRWLGLHTFIRHKRTMVKTSVLVVQFVEAIVVLVRQMSHVRVTRALRCIFLVDCRYCGGVRRNLRQIFQSLPPFMDILLLLLFFMIIFAILGFYLFSPNPSDPYFSTLENSIVSLFVLLTTANFPDVMMPSYSRNPWSCVFFIVYLSIELYFIMNLLLAVVFDTFNDIEKRKFKSLLLHKRTAIQHAYRLLISQRRPAGISYRQFEGLMRFYKPRMSARERYLTFKALNQNNTPLLSLKDFYDIYEVAALKWKAKKNREHWFDELPRTALLIFKGINILVKSKAFQYFMYLVVAVNGVWILVETFMLKGGNFFSKHVPWSYLVFLTIYGVELFLKVAGLGPVEYLSSGWNLFDFSVTVFAFLGLLALALNMEPFYFIVVLRPLQLLRLFKLKERYRNVLDTMFELLPRMARYCQPPPWPAGPGAVWQCPVGAGAEWQSGERSSTKDCNRGPDGAPRSLESGPPQVSWAPFFSTDLSDIFSREGRELSTRLPPVSTFTGKGSPVSLPSQVRGESLGKGHLFIAPDLSCFSPQSCPTRPLPRRHFPVGEPTRGMALQSAPRVRGGRGCRGAVPSCRPRVTLPLSPHSLGLTLLIFYYSFAIVGMEFFCGIVFPNCCNTSTVADAYRWRNHTVGNRTVVEEGYYYLNNFDNILNSFVTLFELTVVNNWYIIMEGVTSQTSHWSRLYFMTFYIVTMVVMTIIVAFILEAFVFRMNYSRKNQDSEVDGGITLEKEISKEELVAVLELYREARGASSDVTRLLETLSQMERYQQHSMVFLGRRSRTKSDLSLKMYQEEIQRWYRSVTWAGVQWRDHSSL

SEQ ID NO: 742480 - protein, 157 aa, Homo sapiens
MGTPSLAASLGLQEGVTSQTSHWSRLYFMTFYIVTMVVMTIIVAFILEAFVFRMNYSRKNQDSEVDGGITLEKEISKEELVAVLELYREARGASSDVTRLLETLSQMERYQQHSMVFLGRRSRTKSDLSLKMYQEEIQRWYRSVTWAGVQWRDHSSL

SEQ ID NO: 742481 - protein, 816 aa, Homo sapiens; identical to SEQ ID NO: 742477

SEQ ID NO: 742482 - protein, 816 aa, Homo sapiens; identical to SEQ ID NO: 742477

SEQ ID NO: 742483 - protein, 816 aa, Homo sapiens; identical to SEQ ID NO: 742477

SEQ ID NO: 742484 - protein, 816 aa, Homo sapiens; identical to SEQ ID NO: 742477

SEQ ID NO: 742485 - protein, 671 aa, Homo sapiens
MAVSLDDDVPLILTLDEGGSAPLAPSNGLGQEELPSKNGGSYAIHDSQAPSLSSGGESSPSSPAHNWEMNYQEAAIYLQEGENNDKFFTHPKDAKALAAYLFAHNHLFYLMELATALLLLLLSLCEAPAVPALRLGIYVHATLELFALMVVVFELCMKLRWLGLHTFIRHKRTMVKTSVLVVQFVEAIVVLVRQMSHVRVTRALRCIFLVDCRYCGGVRRNLRQIFQSLPPFMDILLLLLFFMIIFAILGFYLFSPNPSDPYFSTLENSIVSLFVLLTTANFPDVMMPSYSRNPWSCVFFIVYLSIELYFIMNLLLAVVFDTFNDIEKRKFKSLLLHKRTAIQHAYRLLISQRRPAGISYRQFEGLMRFYKPRMSARERYLTFKALNQNNTPLLSLKDFYDIYEVAALKWKAKKNREHWFDELPRTALLIFKGINILVKSKAFQYFMYLVVAVNGVWILVETFMLKGGNFFSKHVPWSYLVFLTIYGVELFLKVAGLGPVEYLSSGWNLFDFSVTVFAFLGLLALALNMEPFYFIVVLRPLQLLRLFKLKERYRNVLDTMFELLPRMASLGLTLLIFYYSFAIVGMEFFCGIVFPNCCNTSTVADAYRWRNHTVGNRTVVEEGYYYLNNFDNILNSFVTLFELTEKSNKFHPEDKYSTGPRPATFRNSSTP

SEQ ID NO: 742486 - protein, 220 aa, Homo sapiens [sequence omitted]

SEQ ID NO: 742487 - protein, 224 aa, Homo sapiens
IPAVTQPFHSSGATHLCQHLEFFFFWGCLMLAGSVRGLERGEGLPRPEWALPLQPPVPGMQDDGWAAGADGAPCLPPTDLGAGGAVCRGHRGVGTADVPCAGDPSTALHFPGGLSVLRWRPAVRPGWGAGQSLSWHGLTSGPVGQELVSQLVMRSTLHAGGVHADSLSLCHSIHAQEKAVFLPQCRFAASGSRAFSHLIRSLPELLPRSRHVIYPNAGSSAASM

SEQ ID NO: 742488 - protein, 748 aa, Homo sapiens
MNYQEAAIYLQEGENNDKFFTHPKDAKALAAYLFAHNHLFYLMELATALLLLLLSLCEAPAVPALRLGIYVHATLELFALMVVVFELCMKLRWLGLHTFIRHKRTMVKTSVLVVQFVEAIVVLVRQMSHVRVTRALRCIFLVDCRYCGGVRRNLRQIFQSLPPFMDILLLLLFFMIIFAILGFYLFSPNPSDPYFSTLENSIVSLFVLLTTANFPDVMMPSYSRNPWSCVFFIVYLSIELYFIMNLLLAVVFDTFNDIEKRKFKSLLLHKRTAIQHAYRLLISQRRPAGISYRQFEGLMRFYKPRMSARERYLTFKALNQNNTPLLSLKDFYDIYEVAALKWKAKKNREHWFDELPRTALLIFKGINILVKSKAFQYFMYLVVAVNGVWILVETFMLKGGNFFSKHVPWSYLVFLTIYGVELFLKVAGLGPVEYLSSGWNLFDFSVTVFAFLGLLALALNMEPFYFIVVLRPLQLLRLFKLKERYRNVLDTMFELLPRMASLGLTLLIFYYSFAIVGMEFFCGIVFPNCCNTSTVADAYRWRNHTVGNRTVVEEGYYYLNNFDNILNSFVTLFELTVVNNWYIIMEGVTSQTSHWSRLYFMTFYIVTMVVMTIIVAFILEAFVFRMNYSRKNQDSEVDGGITLEKEISKEELVAVLELYREARGASSDVTRLLETLSQMERYQQHSMVFLGRRSRTKSDLSLKMYQEEIQEWYEEHAREQEQQRQLSSSAAPAAQQPPGSRQRSQTVT

SEQ ID NO: 742489 - protein, 797 aa, Homo sapiens [sequence omitted]

SEQ ID NO: 742490 - protein, 242 aa, Homo sapiens
FLTAEGALATPLDDWIQNQGSLYPSEGWESGKFKEWNKEISNARHFVTRGASFLSSISHNQPQITVGSAKSRGHGAACVDGDLPCMGTPSLAASLGLQEGVTSQTSHWSRLYFMTFYIVTMVVMTIIVAFILEAFVFRMNYSRKNQDSEVDGGITLEKEISKEELVAVLELYREARGASSDVTRLLETLSQMERYQQHSMVFLGRRSRTKSDLSLKMYQEEIQRWYRSVTWAGVQWRDHSSL

SEQ ID NO: 742491 - protein, 816 aa, Homo sapiens; identical to SEQ ID NO: 742477

SEQ ID NO: 742492 - protein, 816 aa, Homo sapiens; identical to SEQ ID NO: 742477

SEQ ID NO: 742493 - protein, 714 aa, Homo sapiens
MAVSLDDDVPLILTLDEGGSAPLAPSNGLGQEELPSKNGGSYAIHDSQAPSLSSGGESSPSSPAHNWEMNYQEAAIYLQEGENNDKFFTHPKDAKALAAYLFAHNHLFYLMELATALLLLLLSLCEAPAVPALRLGIYVHATLELFALMVVVFELCMKLRWLGLHTFIRHKRTMVKTSVLVVQFVEAIVVLVRQMSHVRVTRALRCIFLVDCRYCGGVRRNLRQIFQSLPPFMDILLLLLFFMIIFAILGFYLFSPNPSDPYFSTLENSIVSLFVLLTTANFPDVMMPSYSRNPWSCVFFIVYLSIELYFIMNLLLAVVFDTFNDIEKRKFKSLLLHKRTAIQHAYRLLISQRRPAGISYRQFEGLMRFYKPRMSARERYLTFKALNQNNTPLLSLKDFYDIYEVAALKWKAKKNREHWFDELPRTALLIFKGINILVKSKAFQYFMYLVVAVNGVWILVETFMLKGGNFFSKHVPWSYLVFLTIYGVELFLKVAGLGPVEYLSSGWNLFDFSVTVFAFLGLLALALNMEPFYFIVVLRPLQLLRLFKLKERYRNVLDTMFELLPRMASLGLTLLIFYYSFAIVGMEFFCGIVFPNCCNTSTVADAYRWRNHTVGNRTVVEEGYYYLNNFDNILNSFVTLFELTVVNNWYIIMEGVTSQTSHWSRLYFMTFYIVTMVVMTIIVAFILEAFVFRMNYSRKNQDSEGLCRDDALGI

SEQ ID NO: 742494 - protein, 455 aa, Homo sapiens [sequence omitted]

SEQ ID NO: 742495 - protein, 112 aa, Homo sapiens
VCEEPGPWSSLCRRGPALHGHPLTGCFPWSPGRRHLSDLPLEPPLLHDLLHCDHGRSRTTERSLSFVFHITSCPCSSACSVREWGWVPSGRTLLGVGCAATDTYPPSSPASA

SEQ ID NO: 742496 - protein, 265 aa, Homo sapiens
AWLRRCFRSVGRRASLREISSSDSRASASRVAGITGIWKLFFRKKPISLELENSFASDTKMKEPLLGGECDKAVASQLGLLDEIKTEPDNAQEYCHRQQSRTQENELKINAVFSESASQLTAGIQLSLASSGMNKMLPSVSTTAIQVSCAGCKKILQKGQTAYQRKGSAQLFCSIPCITEYISSASSPVPSKRTCSNCSKDILNPKDVISVQLEDTTSCKTFCSLSCLSSYEEKRKPFVTICTNSILTKCSMCQKTAIIQYEVKY

SEQ ID NO: 742497 - protein, 271 aa, Homo sapiens
RHSLTLSPRLECSGSMSIHCDLHLPGSSDSRASASRVAGITGIWKLFFRKKPISLELENSFASDTKMKEPLLGGECDKAVASQLGLLDEIKTEPDNAQEYCHRQQSRTQENELKINAVFSESASQLTAGIQLSLASSGMNKMLPSVSTTAIQVSCAGCKKILQKGQTAYQRKGSAQLFCSIPCITEYISSASSPVPSKRTCSNCSKDILNPKDVISVQLEDTTSCKTFCSLSCLSSYEEKRKPFVTICTNSILTKCSMCQKTAIIQYEVKY

SEQ ID NO: 742498 - protein, 151 aa, Homo sapiens
VSNSLTAKQEHNPSLCLRGQINYFLESLIFFKMTMYKSKRRHQRYINMAGEPKPYRPKPGNKRPLSALYRLESKEPFLSVGGYVFDYDYYRDDFYNRLFDYHGRVPPPPRAVIPLKRPRVAVTTTRRGKGVFSMKGGSRSTASGSTGSKCK

SEQ ID NO: 742499 - protein, 250 aa, Homo sapiens
VSNSLTAKQEHNPSLCLRGQINYFLESLIFFKMTMYKSKRRHQRYINMAGEPKPYRPKPGNKRPLSALYRLESKEPFLSVGGYVFDYDYYRDDFYNRLFDYHGRVPPPPRAVIPLKRPRVAVTTTRRGKGVFSMKGGSRSTASGSTGSKLKSDELQTIKKELTQIKTKIDSLLGRLEKIEKQQKAEAEAQKKQLEESLVLIQEECVSEIADHSTEEPAEGGPDADGEEMTDGIEEDFDEDGGHELFLQIK

SEQ ID NO: 742500 - protein, 395 aa, Homo sapiens
RRELPLPLLPPLVLPLSGARLPVAAAAASPARVGLRGLPPSQPRSFPAACKSAWLRVTCQCLRQRLREKNALHSFFHRHTVFYTKSHFYSNILLPLGLKQGEPIMTGKTQTSNVTNKNDPKSINSRVFIGNLNTAIVKKVDIEAIFSKYGKIVGCSVHKGYAFVQYMSERHARAAVAGENARVIAGQPLDINMAGEPKPYRPKPGNKRPLSALYRLESKEPFLSVGGYVFDYDYYRDDFYNRLFDYHGRVPPPPRAVIPLKRPRVAVTTTRRGKGVFSMKGGSRSTASGSTGSKLKSDELQTIKKELTQIKTKIDSLLGRLEKIEKQQKAEAEAQKKQLEESLVLIQEECVSEIADHSTEEPAEGGPDADGEEMTDGIEEDFDEDGGHELFLQIK

SEQ ID NO: 742501 - protein, 304 aa, Homo sapiens
MSKRRRLKQGEPIMTGKTQTSNVTNKNDPKSINSRVFIGNLNTAIVKKVDIEAIFSKYGKIVGCSVHKGYAFVQYMSERHARAAVAGENARVIAGQPLDINMAGEPKPYRPKPGNKRPLSALYRLESKEPFLSVGGYVFDYDYYRDDFYNRLFDYHGRVPPPPRAVIPLKRPRVAVTTTRRGKGVFSMKGGSRSTASGSTGSKLKSDELQTIKKELTQIKTKIDSLLGRLEKIEKQQKAEAEAQKKQLEESLVLIQEECVSEIADHSTEEPAEGGPDADGEEMTDGIEEDFDEDGGHELFLQIK

SEQ ID NO: 742502 - protein, 250 aa, Homo sapiens; identical to SEQ ID NO: 742499

SEQ ID NO: 742503 - protein, 196 aa, Homo sapiens
MGSEQSSEAESRPNDLNSSVTPSPAKHRAKMDDIVVVAQGSQASRNVSNDPDVIKLQEIPTFQPLLKGLLSGQTSPTNAKLEKLDSQQVLQLCLRYQDHLHQCAEAVAFDQNALVKRIKEMDLSVETLFSFMQERQKRYAKYAEQIQKVNEMSAILRRIQMGIDQTVPLLDRLNSMLPEGERLEPFSMKPDRELRL

SEQ ID NO: 742504 - protein, 153 aa, Homo sapiens
QNIEPGTVPSQFSSKGGSGTTVDKAVSLKGFLALGASCKTCQLPLDLRDCVPHRLDTRPCGEDLIKQGIMYFSFPSKMDLSVETLFSFMQERQKRYAKYAEQIQKVNEMSAILRRIQMGIDQTVPLLDRLNSMLPEGERLEPFSMKPDRELRL

SEQ ID NO: 742505 - protein, 153 aa, Homo sapiens; identical to SEQ ID NO: 742504

SEQ ID NO: 742506 - protein, 121 aa, Homo sapiens
MGSEQSSEAESRPNDLNSSVTPSPAKHRAKMDDIVVVAQGSQASRNVSNDPDVIKLQEIPTFQPLLKGLLSGQTSPTNAKLEKLDSQQVLQLCLRYQDHLHQCAEAVAFDQNALVKRIKER

SEQ ID NO: 742507 - protein, 196 aa, Homo sapiens; identical to SEQ ID NO: 742503

SEQ ID NO: 742508 - protein, 196 aa, Homo sapiens; identical to SEQ ID NO: 742503

SEQ ID NO: 742509 - protein, 148 aa, Homo sapiens
MGSEQSSEAESRPNDLNSSGLLSGQTSPTNAKLEKLDSQQVLQLCLRYQDHLHQCAEAVAFDQNALVKRIKEMDLSVETLFSFMQERQKRYAKYAEQIQKVNEMSAILRRIQMGIDQTVPLLDRLNSMLPEGERLEPFSMKPDRELRL

SEQ ID NO: 742510 - protein, 368 aa, Homo sapiens
MPSSQNTQVLPQSIPAPPSGCGSSIENLVSSLGLWLFPEVIRHLPCIVVLPQSILSRPPTTYPKASRINRRTTQAPPPGPPRLLPCSGSTPGPPRLLPQALAPPQGHPGFSSRFWFHPRTTQAPPPGPPRPLPQALVPPQDHPGSSPRTTQAPPLLWLHPRTTQTPPPGPPRPLPQALAPLQDHPDSSPRTTQDPPPGSGSTPGSPRLLPQALAPPQDHPGSSPRLWLLPRTTQAPPQALVPPQNHQGSSPRGSQARTSPNVVQMCRTFIKMEPALSLPPRNPESWLGDGGIEADCCLAGGALERTAAASTSSGSAFWMCMKRKWSSSQPHLTRSFSGLRGAADRSPTSSPTLARASATYLLSSTGET

SEQ ID NO: 742511 - protein, 368 aa, Homo sapiens; identical to SEQ ID NO: 742510

SEQ ID NO: 742512 - protein, 334 aa, Homo sapiens
ATPRERTDRPDRRSRGPLGHADHGEPLDCLPEQSGKGKLSPPLPPPSSPPGLWLLEMGARLSRRRLPADPSLALDALPPELLVQVLSHVPPRSLVTRCRPVCRAWRDIVDGPTVWLLQLARDRSAEGRALYAVAQRCLPSNEDKEEFPLCALARYCLRAPFGRNLIFNSCGEQGFRGWEVEHGGNGWAIEKNLTPVPGAPSQTCFVTSFEWCSKRQLVDLVMEGVWQELLDSAQIEICVADWWGARENCGCVYQLRVRLLDVYEKEVVKFSASPDPVLQWTERGCRQVSHVFTNFGKGIRYVSFEQYGRDVSSWVGHYGALVTHSSVRVRIRLS

SEQ ID NO: 742513 - protein, 291 aa, Homo sapiens
ATPRERTDRPDRRSRGPLGHADHGEPLDCLPEQSGKGKLSPPLPPPSSPPGLWLLEMGARLSRRRLPADPSLALDALPPELLVQVLSHVPPRSLVTRCRPVCRAWRDIVDGPTVWLLQLARDRSAEGRALYAVAQRCLPSNEDKEEFPLCALARYCLRAPFGRNLIFNSCGEQGFRGWEVEHGGNGWAIEKNLTPVPGAPSQTCFVTSFEWCSKRQLVDLVMEGVWQELLDSAQIEICVADWWGARENCGCVYQLRVRLLDVYEKEVVKFSASPDPVLQWTERGCRQVGPD

SEQ ID NO: 742514 - protein, 242 aa, Homo sapiens
ATPRERTDRPDRRSRGPLGHADHGEPLDCLPEQSGKGKLSPPLPPPSSPPGLWLLEMGARLSRRRLPADPSLALDALPPELLVQVLSHVPPRSLVTRCRPVCRAWRDIVDGPTVWLLQLARDRSAEGRALYAVAQRCLPSNEDKEEFPLCALARYCLRAPFGRNLIFNSCGEQGFRGWEVEHGGNGWAIEKNLTPVPGAPSQTCFVTSFEWCSKRQLVDLVMEGVWQELLDSAQIEICVADW

SEQ ID NO: 742515 - protein, 1401 aa, Homo sapiens
MKSCGVSLATAAAAAAAFGDEEKKMAAGKASGESEEASPSLTAEEREALGGLDSRLFGFVRFHEDGARTKALLGKAVRCYESLILKAEGKVESDFFCQLGHFNLLLEDYPKALSAYQRYYSLQSDYWKNAAFLYGLGLVYFHYNAFQWAIKAFQEVLYVDPSFCRAKEIHLRVGLMFKVNTDYESSLKHFQLALVDCNPCTLSNAEIQFHIAHLYETQRKYHSAKEAYEQLLQTENLSAQVKATVLQQLGWMHHTVDLLGDKATKESYAIQYLQKSLEADPNSGQSWYFLGRCYSSIGKVQDAFISYRQSIDKSEASADTWCSIGVLYQQQNQPMDALQAYICAVQLDHGHAAAWMDLGTLYESCNQPQDAIKCYLNATRSKSCSNTSALAARIKYLQAQLCNLPQGSLQNKTKLLPSIEEAWSLPIPAELTSRQGAMNTAQQNTSDNWSGGHAVSHPPVQQQAHSWCLTPQKLQHLEQLRANRNNLNPAQKLMLEQLESQFVLMQQHQMRPTGVAQVRSTGIPNGPTADSSLPTNSVSGQQPQLALTRVPSVSQPGVRPACPGQPLANGPFSAGHVPCSTSRTLGSTDTILIGNNHITGSGSNGNVPYLQRNALTLPHNRTNLTSSAEEPWKNQLSNSTQGLHKGQSSHSAGPNGERPLSSTGPSQHLQAAGSGIQNQNGHPTLPSNSVTQGAALNHLSSHTATSGGQQGITLTKESKPSGNILTVPETSRHTGETPNSTASVEGLPNHVHQMTADAVCSPSHGDSKSPGLLSSDNPQLSALLMGKANNNVGTGTCDKVNNIHPAVHTKTDNSVASSPSSAISTATPSPKSTEQTTTNSVTSLNSPHSGLHTINGEGMEESQSPMKTDLLLVNHKPSPQIIPSMSVSIYPSSAEVLKACRNLGKNGLSNSSILLDKCPPPRPPSSPYPPLPKDKLNPPTPSIYLENKRDAFFPPLHQFCTNPNNPVTVIRGLAGALKLDLGLFSTKTLVEANNEHMVEVRTQLLQPADENWDPTGTKKIWHCESNRSHTTIAKYAQYQASSFQESLREENEKRSHHKDHSDSESTSSDNSGRRRKGPFKTIKFGTNIDLSDDKKWKLQLHELTKLPAFVRVVSAGNLLSHVGHTILGMNTVQLYMKVPGSRTPGHQENNNFCSVNINIGPGDCEWFVVPEGYWGVLNDFCEKNNLNFLMGSWWPNLEDLYEANVPVYRFIQRPGDLVWINAGTVHWVQAIGWCNNIAWNVGPLTACQYKLAVERYEWNKLQSVKSIVPMVHLSWNMARNIKVSDPKLFEMIKYCLLRTLKQCQTLREALIAAGKEIIWHGRTKEEPAHYCSICEVEVFDLLFVTNESNSRKTYIVHCQDCARKTSGNLENFVVLEQYKMEDLMQVYDQFTLAPPLPSASS

SEQ ID NO: 742516 - protein, 1367 aa, Homo sapiens
MKSCGVSLATAAAAAAAFGDEEKKMAAGKASGESEEASPSLTAEEREALGGLDSRLFGFVRFHEDGARTKALLGKAVRCYESLILKAEGKVESDFFCQLGHFNLLLEDYPKALSAYQRYYSLQSDYWKNAAFLYGLGLVYFHYNAFQWAIKAFQEVLYVDPSFCRAKEIHLRVGLMFKVNTDYESSLKHFQLALVDCNPCTLSNAEIQFHIAHLYETQRKYHSAKEAYEQLLQTENLSAQVKATVLQQLGWMHHTVDLLGDKATKESYAIQYLQKSLEADPNSGQSWYFLGRCYSSIGKVQDAFISYRQSIDKSEASADTWCSIGVLYQQQNQPMDALQAYICAVQLDHGHAAAWMDLGTLYESCNQPQDAIKCYLNATRSKSCSNTSALAARIKYLQAQLCNLPQGSLQNKTKLLPSIEEAWSLPIPAELTSRQGAMNTAQQNTSDNWSGGHAVSHPPVQQQAHSWCLTPQKLQMRPTGVAQVRSTGIPNGPTADSSLPTNSVSGQQPQLALTRVPSVSQPGVRPACPGQPLANGPFSAGHVPCSTSRTLGSTDTILIGNNHITGSGSNGNVPYLQRNALTLPHNRTNLTSSAEEPWKNQLSNSTQGLHKGQSSHSAGPNGERPLSSTGPSQHLQAAGSGIQNQNGHPTLPSNSVTQGAALNHLSSHTATSGGQQGITLTKESKPSGNILTVPETSRHTGETPNSTASVEGLPNHVHQMTADAVCSPSHGDSKSPGLLSSDNPQLSALLMGKANNNVGTGTCDKVNNIHPAVHTKTDNSVASSPSSAISTATPSPKSTEQTTTNSVTSLNSPHSGLHTINGEGMEESQSPMKTDLLLVNHKPSPQIIPSMSVSIYPSSAEVLKACRNLGKNGLSNSSILLDKCPPPRPPSSPYPPLPKDKLNPPTPSIYLENKRDAFFPPLHQFCTNPNNPVTVIRGLAGALKLDLGLFSTKTLVEANNEHMVEVRTQLLQPADENWDPTGTKKIWHCESNRSHTTIAKYAQYQASSFQESLREENEKRSHHKDHSDSESTSSDNSGRRRKGPFKTIKFGTNIDLSDDKKWKLQLHELTKLPAFVRVVSAGNLLSHVGHTILGMNTVQLYMKVPGSRTPGHQENNNFCSVNINIGPGDCEWFVVPEGYWGVLNDFCEKNNLNFLMGSWWPNLEDLYEANVPVYRFIQRPGDLVWINAGTVHWVQAIGWCNNIAWNVGPLTACQYKLAVERYEWNKLQSVKSIVPMVHLSWNMARNIKVSDPKLFEMIKYCLLRTLKQCQTLREALIAAGKEIIWHGRTKEEPAHYCSICEVEVFDLLFVTNESNSRKTYIVHCQDCARKTSGNLENFVVLEQYKMEDLMQVYDQFTLAPPLPSASS

SEQ ID NO: 742517 - protein, 1337 aa, Homo sapiens
MKSCGVSLATAAAAAAAFGDEEKKMAAGKASGESEEASPSLTAEEREALGGLDSRLFGFVRFHEDGARTKALLGKAVRCYESLILKAEGKVESDFFCQLGHFNLLLEDYPKALSAYQRYYSLQSDYWKNAAFLYGLGLVYFHYNAFQWAIKAFQEVLYVDPSFCRAKEIHLRVGLMFKVNTDYESSLKHFQLALVDCNPCTLSNAEIQFHIAHLYETQRKYHSAKEAYEQLLQTENLSAQVKATVLQQLGWMHHTVDLLGDKATKESYAIQYLQKSLEADPNSGQSWYFLGRCYSSIGKVQDAFISYRQSIDKSEASADTWCSIGVLYQQQNQPMDALQAYICAVQLDHGHAAAWMDLGTLYESCNQPQDAIKCYLNATRSKSCSNTSALAARIKYLQAQLCNLPQGSLQNKTKLLPSIEEAWSLPIPAELTSRQGAMNTAQQNTSDNWSGGHAVSHPPVQQQAHSWCLTPQKLQMRPTGVAQVRSTGIPNGPTADSSLPTNSVSGQQPQLALTRVPSVSQPGVRPACPGQPLANGPFSAGHVPCSTSRTLGSTDTILIGNNHITGSGSNGNVPYLQRNALTLPHNRTNLTSSAEEPWKNQLSNSTQGLHKGQSSHSAGPNGERPLSSTGPSQHLQAAGSGIQNQNGHPTLPSNSVTQGAALNHLSSHTATSGGQQGITLTKESKPSGNILTVPETSRHTGETPNSTASVEGLPNHVHQMTADAVCSPSHGDSKSPGLLSSDNPQLSALLMGKANNNSISTATPSPKSTEQTTTNSVTSLNSPHSGLHTINGEGMEESQSPMKTDLLLVNHKPSPQIIPSMSVSIYPSSAEVLKACRNLGKNGLSNSSILLDKCPPPRPPSSPYPPLPKDKLNPPTPSIYLENKRDAFFPPLHQFCTNPNNPVTVIRGLAGALKLDLGLFSTKTLVEANNEHMVEVRTQLLQPADENWDPTGTKKIWHCESNRSHTTIAKYAQYQASSFQESLREENEKRSHHKDHSDSESTSSDNSGRRRKGPFKTIKFGTNIDLSDDKKWKLQLHELTKLPAFVRVVSAGNLLSHVGHTILGMNTVQLYMKVPGSRTPGHQENNNFCSVNINIGPGDCEWFVVPEGYWGVLNDFCEKNNLNFLMGSWWPNLEDLYEANVPVYRFIQRPGDLVWINAGTVHWVQAIGWCNNIAWNVGPLTACQYKLAVERYEWNKLQSVKSIVPMVHLSWNMARNIKVSDPKLFEMIKYCLLRTLKQCQTLREALIAAGKEIIWHGRTKEEPAHYCSICEVEVFDLLFVTNESNSRKTYIVHCQDCARKTSGNLENFVVLEQYKMEDLMQVYDQFTLAPPLPSASS

SEQ ID NO: 742518 - protein, 273 aa, Homo sapiens [sequence omitted]

SEQ ID NO: 742519 - protein, 704 aa, Homo sapiens
MKSCGVSLATAAAAAAAFGDEEKKMAAGKASGESEEASPSLTAEEREALGGLDSRLFGFVRFHEDGARTKALLGKAVRCYESLILKAEGKVESDFFCQLGHFNLLLEDYPKALSAYQRYYSLQSDYWKNAAFLYGLGLVYFHYNAFQWAIKAFQEVLYVDPSFCRAKEIHLRVGLMFKVNTDYESSLKHFQLALVDCNPCTLSNAEIQFHIAHLYETQRKYHSAKEAYEQLLQTENLSAQVKATVLQQLGWMHHTVDLLGDKATKESYAIQYLQKSLEADPNSGQSWYFLGRCYSSIGKVQDAFISYRQSIDKSEASADTWCSIGVLYQQQNQPMDALQAYICAVQLDHGHAAAWMDLGTLYESCNQPQDAIKCYLNATRSKSCSNTSALAARIKYLQAQLCNLPQGSLQNKTKLLPSIEEAWSLPIPAELTSRQGAMNTAQQNTSDNWSGGHAVSHPPVQQQAHSWCLTPQKLQMRPTGVAQVRSTGIPNGPTADSSLPTNSVSGQQPQLALTRVPSVSQPGVRPACPGQPLANGPFSAGHVPCSTSRTLGSTDTILIGNNHITGSGSNGNVPYLQRNALTLPHNRTNLTSSAEEPWKNQLSNSTQGLHKGQSSHSAGPNGERPLSSTGPSQHLQAAGSGIQNQNGHPTLPSNSVTQGAALNHLSSHTATSGGQQGLPRAPRSWERGLEQLLTQKKPTLHDGW

SEQ ID NO: 742520 - protein, 38 aa, Homo sapiens
HNRTNLTSSAEEPWKNQLSNSTQVIGGLASLLAFHINV

SEQ ID NO: 742521 - protein, 98 aa, Homo sapiens
LLATLSSVPGAPEPCPQDGSPASHPLHPPLCISTGATVPYFAEGSGGPVPTTSTLILPPEYSSWGYPYGESTARAWQGGDAKSPTQTLLSSRRGPTVL

SEQ ID NO: 742522 - protein, 207 aa, Homo sapiens
NQSGKDTSPVVASLLQKVSYKAKRWIHDVRTIAEVEGAGVKAWRRAQWHEQILVPALPQSALPGCSLIHIDYYLQVSLKAPEATVTLPVFIGNIAVNHAPVSPRPGLGLPPGAPPLVVPSAPPQEEAEAEAAAGGPHFLDPVFLSTKSHSQRQPLLATLSSVPGAPEPCPQDGSPASHPLHPPLCISTGATRPHRLMSRAAAAWNPA

SEQ ID NO: 742523 - protein, 233 aa, Homo sapiens
LVRLLQKVSYKAKRWIHDVRTIAEVEGAGVKAWRRAQWHEQILVPALPQSALPGCSLIHIDYYLQVSLKAPEATVTLPVFIGNIAVNHAPVSPRPGLGLPPGAPPLVVPSAPPQEEAEAEAAAGGPHFLDPVFLSTKSHSQRQPLLATLSSVPGAPEPCPQDGSPASHPLHPPLCISTGATVPYFAEGSGGPVPTTSTLILPPEYSSWGYPYEAPPSYEQSCGGVEPSLTPES

SEQ ID NO: 742524 - protein, 113 aa, Homo sapiens
  misc_feature (6)..(6): Xaa can be any naturally occurring amino acid
  misc_feature (21)..(21): Xaa can be any naturally occurring amino acid
  misc_feature (23)..(23): Xaa can be any naturally occurring amino acid
  misc_feature (27)..(28): Xaa can be any naturally occurring amino acid
  misc_feature (31)..(31): Xaa can be any naturally occurring amino acid
HPKETXFRHDGQTPLTWTQHXEXTDDXXKKXERHMTLQEWTDTLTLNNPLHPPLCISTGATVPYFAEGSGGPVPTTSTLILPPEYSSWGYPYEAPPSYEQSCGGVEPSLTPES

SEQ ID NO: 742525 - protein, 107 aa, Homo sapiens
KVTQYALGSWVTSYVPLEARAKRPSRHGVKRGLGREVAEEAPGGGLLFPSFSGPGILGSRVGSPGLTLAPVTQSTERLTCCCASDMVVGTLEIPAALQTASLSTRIL

SEQ ID NO: 742526 - protein, 272 aa, Homo sapiens
MVRCYVEIVEKLPERRPDPATIEGCAQLKPNNYLLAWHTPFNEKGSGFGAATKAMCIGLRYWKPERLETLIEVSVECGRMTHNHPTGFLGSLCTALFVSFAAQGKPLVQWGRDMLRAVPLAEEYCRKTIRHTAEYQEHWFYFEAKWQFYLEERKISKDSENKAIFPDNYDAEEREKTYRKWSSEGRGGRRGHDAPMIAYDALLAAGNSWTELCHRAMFHGGESAATGTIAGCLFGLLYGLDLVPKGLYQDLEDKEKLEDLGAALYRLSTEEK

SEQ ID NO: 742527 - protein, 347 aa, Homo sapiens
MLLGSVGDALGYRNVCKENSTVGMKIQEELQRSGGLDHLVLSPGEWPVSDNTIMHIATAEALTTDYWCLDDLYREMVRCYVEIVEKLPERRPDPATIEGCAQLKPNNYLLAWHTPFNEKGSGFGAATKAMCIGLRYWKPERLETLIEVSVECGRMTHNHPTGFLGSLCTALFVSFAAQGKPLVQWGRDMLRAVPLAEEYCRKTIRHTAEYQEHWFYFEAKWQFYLEERKISKDSENKAIFPDNYDAEEREKTYRKWSSEGRGGRRGHDAPMIAYDALLAAGNSWTELCHRAMFHGGESAATGTIAGCLFGLLYGLDLVPKGLYQDLEDKEKLEDLGAALYRLSTEEK

SEQ ID NO: 742528 - protein, 103 aa, Homo sapiens
MRTVLFKLSAHTSLSQVGLLFHLRVSIRGSINIFPFKFYRMCFTIESRTAFGFTWLCGMRYEDRCIQVYRLYFTAESDCRQICMTDCCIRFLRVRHYPVYFFH

SEQ ID NO: 742529 - protein, 103 aa, Homo sapiens
MRTVLFKLSAHTSLSQVGLLFHLRVSIRGSINIFPFKFDRMCFTIESRTAFGFTWLCGMRYEDRCIQVYRLYFTAESDCRQICMTDCCIRFLRVRHYPVYFFH

SEQ ID NO: 742530 - protein, 103 aa, Homo sapiens; identical to SEQ ID NO: 742529

SEQ ID NO: 742531 - protein, 103 aa, Homo sapiens [sequence omitted]

SEQ ID NO: 742532 - protein, 1417 aa, Homo sapiens
MSPLLFLTWCSSSFLLWIYQFCSSFPKAPGFGFTGFAVCLLSHGSLRPALRTFREFNWCLERNASLPNPCIREEGREIYHLSFPFRKLEKVSVTCCGPAAGAADVCHFSRLRAGVGAAQPALLVRVSREAGVSRGLSCSPLKFNWAWGSASKVLTWLLIRERVRCDAQSFETVKPRPAACRRICFGKCETVHLRRMYFELLGTLFCVCQVTLTNPVAQSSCTLTADLSLVSQLLREACEQFYAMIMNMCFLLSYVSFCYTCFGAILSDAYKFRIVLSSCRTDLVIIMNYFSSPLLFTSCLLWILSDTNPGTLLLFVVSVFIMHLLPSFYCTGFKAHLIETSYTRDSFSFSSCQFCVSVTVFGPHIEGACAYGGFRAHLMFLFPLFFFCCFLIVINFFIYISCIRVLVISFNIILLGVALEISYMPLSSLAFPEGANDPEKVPPICQFPAIDAVALVRLPSTGKHARHRYRVPQRCLDSLFLDISVCFTLPIPMLFFLQLHAPMRADFHLAKNFFLSISLYHGYALTGRKFSQLLFAENKFSSPLFCTGQNSRWMIFAIPRTLKMGSTVFWLPCVLLKIQCSGRVLWLTPVIPALWEAEASGSRGQEIETILANTVKPRLYKKYKKLAGRGGPVVAATQEAEAGEWREPRRRSLQEPRSRHCTPAWATERDSVSKKKKKDSMFIVICCSFEGNGSFFFVLKLFLLIFGFQQSVLCLDVIFFLRIFLGIYRTQIWELASFISFGKFLAIFFFFTIFSPVLPLLPETSVLCVCAHVCMHSCVRVCACVRPCVCAYVSVCGCNLHVSSVMCSIFHSSLYIRLDASCLRGFRFTESCLLLCPTEKPMRFFNIKNSSFDDREKNTNIDDCTIALRRNIPGPEQRVFSSAESGFLVSLRECMVSDAILLFSSISTHLRVLGECVVSDPILLLSRVSGHLRVLRECVVLDAILLISSISSHLRVLGECVVSDPILLISSISSHLCVLGECVVSDPILLLSSISSHLRVLGECVVSDPILLLSRVSSHLRVLGECVVSDPILLLSRVSSHLRVLRECVVLDAILLISSISSHLRVLGECVVSDPILLLSSISSHLRALGECVVSDPILLLSRVSSHLRVLVLISAGIPHLLVHAIHLFHQILLHHHYNDFFLISVFFQFEISDVVFFRSKVSGEFFVDADSLLKFSIFSFPLYLFSSFFYNILHFSNKFLVSVQHCISGPLNKSLNYKGPLISGFLKKYILQKFLEICNNLKNFADEPHSLEISEEKKKLCHECIKYTDHTWTIHSREKCRRKDAALAELQWLTPVIPALWEAEVGRSPKVRSSRPAWPTWRNPVTTKNKKLARHGGTCLELQLLGRLRQENHLNPEGRGCSEPRSRHCTPAWATRAKLCLKKKKNAALNYNCMKLTAVHSVLLEELQSHLLLLLQ

SEQ ID NO: 742533 - protein, 1455 aa, Homo sapiens
MSPLLFLTWCSSSFLLWIYQFCSSFPKAPGFGFTGFAVCLLSHGSLRPALRTFREFNWCLERNASLPNPCIREEGREIYHLSFPFRKLEKVSVTCCGPAAGAADVCHFSRLRAGVGAAQPALLVRVSREAGVSRGLSCSPLKFNWAWGSASKVLTWLLIRERVRCDAQSFETVKPRPAACRRICFGKCETVHLRRMYFELLGTLFCVCQVTLTNPVAQSSCTLTADLSLVSQLLREACEQFYAMIMNMCFLLSYVSFCYTCFGAILSDAYKFRIVLSSCRTDLVIIMNYFSSPLLFTSCLLWILSDTNPGTLLLFVVSVFIMHLLPSFYCTGFKAHLIETSYTRDSFSFSSCQFCVSVTVFGPHIEGACAYGGFRAHLMFLFPLFFFCCFLIVINFFIYISCIRVLVISFNIILLGVALEISYMPLSSLAFPECANDPEKVPPICQFPAIDAVALVRLPSTGKHARHRYRVPQRCLDSLFLDISVCFTLPIPMLFFLQLHAPMRADFHLAKNFFLSISLYHGYALTGRKFSQLLFAENKFSSPLFCTGQNSRWMIFAIPRTLKMGSTVFWLPCVLLKIQCSGRVLWLTPVIPALWEAEASGSRGQEIETILANTVKPRLYKKYKKLAGRGGPVVAATQEAEAGEWRETQETELAVSRDRATALQPGRQSETPSQKKKKKDSMFIVICCSFEGNGSFFFVLKLFLLIFGFQQSVLCLDVIFFLRIFLGIYRTQIWELASFISFGKFLAIFFFFTIFSPVLPLLPETSVLCVCAHVCMHSCVRVCACVRPCVCAYVSVCGCNLHVSSVMCSIFHSSLYIRLDASCLRGFRFTESCLLLCPTEKPMRFFNIKNSSFYDREKNTNIDDCTIALRRNIPGPEQRVFSSAESGFLVSLRECMVSDAILLFSSISTHLRVLGECVVSDPILLLSRVSGHLRVLRECVVLDAILLISSISSHLRVLGECVVSDPILLISSISSHLCVLGECVVSDPILLLSSISSHLRVLGECVVSDPILLLSRVSSHLRVLGECVVSDPILLLSRVSSHLRVLRECVVLDAILLISSISSHLRVLGECVVSDPILLLSSISSHLRALGECVVSDPILLLSRVSSHLRVLVLISAGIPHLLVHAIHLFHQILLHHHYNDFFLISVFFQFEISDVVFFRSKVSGEFFVDADSLLKFSIFSFPLYLFSSFFYNILHFSNKFLVSVQHCISGPLNKSLNYKGPLISGFLKKYILQKFLEICNNLKNFADEPHSLEISEEKKKLCHECIKYTDHTWTIHSREKCRRKDAALAELQWLTPVIPALWEAEVGRSPKVRSSRPAWPTWRNPVTTKNKKLARHGGTCLELQLLGRLRQENHLNPEGRGCSEPRSRHCTPAWATRAKLCLKKKKNAALNYNCMKLTAVHSVLLEIITKPPPVAIAVSASMSRIRLKHRVVLISARAVHVFSTLCITVKSDLF

SEQ ID NO: 742534 - protein, 1455 aa, Homo sapiens; identical to SEQ ID NO: 742533

SEQ ID NO: 742535 - protein, 1456 aa, Homo sapiens
MSPLLFLTWCSSSFLLWIYQFCSSFPKAPGFGFTGFAVCLLSHGSLRPALRTFREFNWCLERNASLPNPCIREEGREIYHLSFPFRKLEKVSVTCCGPAAGAADVCHFSRLRAGVGAAQPALLVRVSREAGVSRGLSCSPLKFNWAWGSASKVLTWLLIRERVRCDAQSFETVKPRPAACRRICFGKCETVHLRRMYFELLGTLFCVCQVTLTNPVAQSSCTLTADLSLVSQLLREACEQFYAMIMNMCFLLSYVSFCYTCFGAILSDAYKFRIVLSSCRTDLVIIMNYFSSPLLFTSCLLWILSDTNPGTLLLFVVSVFIMHLLPSFYCTGFKAHLIETSYTRDSFSFSSCQFCVSVTVFGPHIYGACAYGGFRAHLMFLFPLFFFCCFLIVINFFIYISCIRVLVISFNIILLGVALEISYMPLSSLAFPEGANDPEKVPPICQFPAIDAVALVRLPSTGKHARHRYRVPQRCLDSLFLDISVCFTLPIPMLFLPAASCSNEELIFIELNNFFLSISLYHGYALTGRKFSQLLFAENKFSSPLFCTGQNSRWMIFAIPRTLKMGSTVFWLPCVLLKIQCSGRVLWLTPVIPALWEAEASGSRGQEIETILANTVKPRLYKKYKKLAGRGRPVVAATQEAEAGEWRETQETELAVSRDRATALQPGRQSETPSQKKKKKIQMFIVICCSFEGNGSFFFVLKLFLLIFGFQQSVLCLDVIFFLRIFLGIYRTQIWELASFISFGKFLAIFFFFTIFSPVLPLLPETSVLCVCAHVCMHSCVRVCACVRPCVCAYVSVCGCNLHVSSVMCSIFHSSLYIRLDASCLRGFRFTESCLLLCPTEKPMRFFNIKNSSFDDREKNTNIDDCTIALRRNIPGPEQRVFSSAESGFLVSLRECMVSDAILLFSSISTHLRVLGECVVSDPILLLSRVSGHLRVLRECVVLDAILLISSISSHLRVLGECVVSDPILLISSISSHLCVLGECVVSDPILLLSSISSHLRVLGECVVSDPILLLSRVSSHLRVLGECVVSDPILLLSRVSSHLRVLRECVVLDAILLISSISSHLRVLGECVVSDPILLLSSISSHLRALGECVVSDPILLLSRVSSHLRVLVLISAGIPHLLVHAIHLFHYILLHHHYNDFFLISVFFQFLISDVVFFRSKVSGEFFVDADSLLKFSIFSFPLYLFSSFFYNILHFSNKFLVSVQHCISGPLNKSLNYKGPLISGFLKKYILQKFLEICNNLKNFADEPHSLEISEEKKKLCHECIKYTDHTWTIHSREKCRRKDAALAECSGYTPVIPALWEAEVGRSPKVRSSRPAWPTWRNPVTTKNKKLARHGGYMPVTPATWEAEAGESLEPGRQRLQWAEITPLHSSLGNKSKTLSQKKKNAALNYNCMKLTAVHSVLLEIITKPPPVAIAVSASMSRIRLKHRVVLISARAVHVFSTLCITVKSDLF

SEQ ID NO: 742536 - protein, 530 aa, Homo sapiens
MEGSSSYEVPSVAAADLEEGAGQTRSLPATPSKDVHKGVGGIIFSSSPILDLSESGLCRLEEVFRIPSLQQLHLQRNALCVIPQDFFQLLPNLTWLDLRYNRIKALPSGIGAHQHLKTLLLERNPIKMLPVELGSVTTLKALNLRHCPLEFPPQLVVQKGLVAIQRFLRMWAVEHSLPRNPTSQEAPPVREMTLRDLPSPGLELSGDHASNQGAVNAQDPEGAVMKEKASFLPPVEKPDLSELRKSADSSENWPSEEEIRRFWKLRQEIVEHVKADVLGDQLLTRELPPNLKAALNIEKELPKPRHVFRRKTASSRSILPDLLSPYQMAIRAKRLEESRAAALRELQEKQALMEQQRREKRALQEWRERAQRMRKRKEELSKLLPPRRSMVASKIPSATDLTDNRKVPLNPPGKMKPSKEKSPQASKEMSALQERNLEEKIKQHVLQMREQRRFHGQAPLEEMRKAAEDLEIATELQDEVLKLKLGLTLNKDRRRAALTGNLSLGLPAAQPQNTFFNTKYGESGNVRRYQ

SEQ ID NO: 742537 - protein, 473 aa, Homo sapiens
MEGSSSYEVPSVAAADLEEGAGQTRSLPATPSKDVHKGVGGIIFSSSPILDLSESGLCRLEEVFRIPSLQQLHLQRNALCVIPQDFFQLLPNLTWLDLRYNRIKALPSGIGAHQHLKTLLLERNPIKMLPVELGSVTTLKALNLRHCPLEFPPQLVVQKGLVAIQRFLRMWAVEHSLPRNPTSQEAPPVREMTLRDLPSPGLELSGDHASNQGAVNAQDPEGAVMKEKASFLPPVEKPDLSELRKSADSSENWPSEEEIRRFWKLRQEIVEHVKADVLGDQLLTRELPPNLKAALNIEKELPKPRHVFRRKTASSRSILPDLLSPYQMAIRAKRLEESRAAALRELQEKQALMEQQRREKRALQEWRERAQRMRKRKEELSKLLPPRRSMVASKIPSATDLTDNRKVPLNPPGKMKPSKEKSPQASKEMSALQERNLEEKIKQHVLQMREQRRFHGQAPLEEMRKAAEDLEIP

SEQ ID NO: 742538 - protein, 79 aa, Homo sapiens
KTLGKGQTGLVKLGVHCITGQKVAIKIVNREKLSESVLMKVEREIAILKLIEHPHVLKLHDVYENKKYLVPGSGARLGG

SEQ ID NO: 742539 - protein, 741 aa, Homo sapiens
KTLGKGQTGLVKLGVHCITGQKVAIKIVNREKLSESVLMKVEREIAILKLIEHPHVLKLHDVYENKKYLYLVLEHVSGGELFDYLVKKGRLTPKEARKFFRQIVSALDFCHSYSICHRDLKPENLLLDEKNNIRIADFGMASLQVGDSLLETSCGSPHYACPEVIKGEKYDGRRADMWSCGVILFALLVGALPFDDDNLRQLLEKVKRGVFHMPHFIPPDCQSLLRGMIEVEPEKRLSLEQIQKHPWYLGGKHEPDPCLEPAPGRRVAMRSLPSNGELDPDVLESMASLGCFRDRERLHRELRSEEENQEKMIYYLLLDRKERYPSCEDQDLPPRNDVDPPRKRVDSPMLSRHGKRRPERKSMEVLSITDAGGGGSPVPTRRALEMAQHSQRSRSVSGASTGLSSSPLSSPRSPVFSFSPEPGAGDEARGGGSPTSKTQTLPSRGPRGGGAGEQPPPPSARSTPLPGPPGSPRSSGGTPLHSPLHTPRASPTGTPGTTPPPSPGGGVGGAAWRSRLNSIRNSFLGSPRFHRRKMQVPTAEEMSSLTPESSPELAKRSWFGNFISLDKEEQIFLVLKDKPLSSIKADIVHAFLSIPSLSHSVLSQTSFRAEYKASGGPSVFQKPVRFQVDISSSEGPEPSPRRDGSGGGGIYSVTFTLISGPSRRFKRVVETIQAQLLSTHDQPSVQALADEKNGAQTRPAGAPPRSLQPPPGRPDPELSSSPRRGPPKDKKLLATNGTPLP

SEQ ID NO: 742540 - protein, 744 aa, Homo sapiens
KTLGKGQTGLVKLGVHCITGQKVAIKIVNREKLSESVLMKVEREIAILKLIEHPHVLKLHDVYENKKYLVSPHGKLSARRSWDLLSGFPRYLVLEHVSGGELFDYLVKKGRLTPKEARKFFRQIVSALDFCHSYSICHRDLKPENLLLDEKNNIRIADFGMASLQVGDSLLETSCGSPHYACPEVIKGEKYDGRRADMWSCGVILFALLVGALPFDDDNLRQLLEKVKRGVFHMPHFIPPDCQSLLRGMIEVEPEKRLSLEQIQKHPWYLGGKHEPDPCLEPAPGRRVAMRSLPSNGELDPDVLESMASLGCFRDRERLHRELRSEEENQEKMIYYLLLDRKERYPSCEDQDLPPRNDVDPPRKRVDSPMLSRHGKRRPERKSMEVLSITDAGGGGSPVPTRRALEMAQHSQRSRSVSGASTGLSSSPLSSPRSPVFSFSPEPGAGDEARGGGSPTSKTQTLPSRGPRGGGAGEQPPPPSARSTPLPGPPGSPRSSGGTPLHSPLHTPRASPTGTPGTTPPPSPGGGVGGAAWRSRLNSIRNSFLGSPRFHRRKMQVPTAEEMSSLTPESSPELAKRSWFGNFISLDKEEQIFLVLKDKPLSSIKADIVHAFLSIPSLSHSVLSQTSFRAEYKASGGPSVFQKPVRFQVDISSSEGPEPSPRRDGSGGGGIYSVTFTLISGPSRRFKRVVETIQAQLLSTHDQPSVQALADEKNGAQTRPAGAPPRSLQPPPGRPDPDCFYFIY

SEQ ID NO: 742541 - protein, 757 aa, Homo sapiens
LDTPTMGRLRRSESLSQSQSPARKDGGGGPAVQTPENGPLCPNSGDPKDSWAGKPERGQPSCSPPAPSPPDELTSGPSMLAQVSPHGKLSARRSWDLLSGFPRYLVLEHVSGGELFDYLVKKGRLTPKEARKFFRQIVSALDFCHSYSICHRDLKPENLLLDEKNNIRIADFGMASLQVGDSLLETSCGSPHYACPEVIKGEKYDGRRADMWSCGVILFALLVGALPFDDDNLRQLLEKVKRGVFHMPHFIPPDCQSLLRGMIEVEPEKRLSLEQIQKHPWYLGGKHEPDPCLEPAPGRRVAMRSLPSNGELDPDVLESMASLGCFRDRERLHRELRSEEENQEKMIYYLLLDRKERYPSCEDQDLPPRNDVDPPRKRVDSPMLSRHGKRRPERKSMEVLSITDAGGGGSPVPTRRALEMAQHSQRSRSVSGASTGLSSSPLSSPRSPVFSFSPEPGAGDEARGGGSPTSKTQTLPSRGPRGGGAGEQPPPPSARSTPLPGPPGSPRSSGGTPLHSPLHTPRASPTGTPGTTPPPSPGGGVGGAAWRSRLNSIRNSFLGSPRFHRRKMQVPTAEEMSSLTPESSPELAKRSWFGNFISLDKEEQIFLVLKDKPLSSIKADIVHAFLSIPSLSHSVLSQTSFRAEYKASGGPSVFQKPVRFQVDISSSEGPEPSPRRDGSGGGGIYSVTFTLISGPSRRFKRVVETIQAQLLSTHDQPSVQALADEKNGAQTRPAGAPPRSLQPPPGRPDPDCFYFIY

SEQ ID NO: 742542 - protein, 455 aa, Homo sapiens
MRSLPSNGELDPDVLESMASLGCFRDRERLHRELRSEEENQEKMIYYLLLDRKERYPSCEDQDLPPRNDVDPPRKRVDSPMLSRHGKRRPERKSMEVLSITDAGGGGSPVPTRRALEMAQHSQRSRSVSGASTGLSSSPLSSPRSPVFSFSPEPGAGDEARGGGSPTSKTQTLPSRGPRGGGAGEQPPPPSARSTPLPGPPGSPRSSGGTPLHSPLHTPRASPTGTPGTTPPPSPGGGVGGAAWRSRLNSIRNSFLGSPRFHRRKMQVPTAEEMSSLTPESSPELAKRSWFGNFISLDKEEQIFLVLKDKPLSSIKADIVHAFLSIPSLSHSVLSQTSFRAEYKASGGPSVFQKPVRFQVDISSSEGPEPSPRRDGSGGGGIYSVTFTLISGPSRRFKRVVETIQAQLLSTHDQPSVQALADEKNGAQTRPAGAPPRSLQPPPGRPDPDCFYFIY

SEQ ID NO: 742543 - protein, 183 aa, Homo sapiens
MQYDLKLLRHHLQIPIHFPKDFLSVMLEKGSLSAMRFLTAVNLEHPEMLEKASRELWMRVWSRNEDITEPQSIMAAAEKAGMSAEQAQGLLEKIATPKVKNQLKETTEAACRYGAFGLPITVAHVDGQTHMLFGSDRMELVAHLLGEKWMGPIPPTFTSMPHKCLSESPNSAFPQNKPNAIRQ

SEQ ID NO: 742544 - protein, 1332 aa, Homo sapiens
MTGEVGSEVHLEINDPNVISQEEADSPSDSGQGSYETIGPLSEGDSDEEIFVSKKLKNRKVLQDSDSETEDTNASPEKTTYDSAEEENKENLYAGKNTKIKRIYKTVADSDESYMEKSLYQENLEAQVKPCLELSLQSGNSTDFTTDRKSSKKHIHDKEGTAGKAKVKSKRRLEKEERKMEKIRQLKKKETKNQEDDVEQPFNDSGCLLVDKDLFETGLEDENNSPLEDEESLESIRAAVKNKVKKHKKKEPSLESGVHSFEEGSELSKGTTRKERKAARLSKEALKQLHSETQRLIRESALNLPYHMPENKTIHDFFKRKPRPTCHGNAMALLKSSKYQSSHHKEIIDTANTTEMNSDHHSKGSEQTTGAENEVETNALPVVSKETQIITGSDESCRKDLVKNEELEIQEKQKQSDIRPSPGDSSVLQQESNFLGNNHSEECQVGGLVAFEPHALEGEGPQNPEETDEKVEEPEQQNKSSAVGPPEKVRRFTLDRLKQLGVDVSIKPRLGADEDSFVILEPETNRELEALKQRFWKHANPAAKPRAGQTVNVNVIVKDMGTDGKEELKADVVPVTLAPKKLDGASHTKPGEKLQVLKAKLQEAMKLRRFEERQKRQALFKLDNEDGFEEEEEEEEEMTDESEEDGEEKVEKEEKEEELEEEEEKEEEEEEEGNQETAEFLLSSEEIETKDEKEMDKENNDGSSEIGKAVGFLSVPKSLSSDSTLLLFKDSSSKMGYFPTEEKSETDENSGKQPSKLDEDDSCSLLTKESSHNSSFELIGSTIPSYQPCNRQTGRGTSFFPTAGGFRSPSPGLFRASLVSSASKSSGKLSEPSLPIEDSQDLYNASPEPKTLFLGAGDFQFCLEDDTQSQLLDADGFLNVRNHRNQYQALKPRLPLASMDENAMDANMDELLDLCTGKFTSQAEKHLPRKSDKKENMEELLNLCSGKFTSQDASTPASSELNKQEKESSMGDPMEEALALCSGSFPTDKEEEDEEEEFGDFRLVSNDNEFDSDEDEHSDSGNDLALEDHEDDDEEELLKRSEKLKRQMRLRKYLEDEAEVSGSDVGSEDEYDGEEIDEYEEDVIDEVLPSDEELQSQIKKIHMKTMLDDDKRQLRLYQERYLADGDLHSDGPGRMRKFRWKNIDDASQMDLFHRDSDDDQTEEQLDESEARWRKERIEREQWLRDMAQQGKITAEEEEEIGEDSQFMILAKKVTAKALQKNASRPMVIQESKSLLRNPFEAIRPGSAQQVKTGSLLNQPKAVLQKLAALSDHNPSAPRNSRNFVFHTLSPVKAEAAKESSKSQKIPEKDSDWLTWSGAPIPGFFRLSFDPHG

SEQ ID NO: 742545 - protein, 1279 aa, Homo sapiens
MTGEVGSEVHLEINDPNVISQEEADSPSDSGQGSYETIGPLSEGDSDEEIFVSKKLKNRKVLQDSDSETEDTNASPEKTTYDSAEEENKENLYAGKNTKIKRIYKTVADSDESYMEKSLYQENLEAQVKPCLELSLQSGNSTDFTTDRKSSKKHIHDKEGTAGKAKVKSKRRLEKEERKMEKIRQLKKKETKNQEDDVEQPFNDSGCLLVDKDLFETGLEDENNSPLEDEESLESIRAAVKNKVKKHKKKEPSLESGVHSFEEGSELSKGTTRKERKAARLSKEALKQLHSETQRLIRESALNLPYHMPENKTIHDFFKRKPRPTCHGNAMALLKSSKYQSSHHKEIIDTANTTEMNSDHHSKGSEQTTGAENEVETNALPVVSKETQIITGSDESCRKDLVKNEELEIQEKQKQSDIRPSPGDSSVLQQESNFLGNNHSEECQVGGLVAFEPHALEGEGPQNPEETDEKVEEPEQQNKSSAVGPPEKVRRFTLDRLKQLGVDVSIKPRLGADEDSFVILEPETNRELEALKQRFWKHANPAAKPRAGQTVNVNVIVKDMGTDGKEELKADVVPVTLAPKKLDGASHTKPGEKLQVLKAKLQEAMKLRRFEERQKRQALFKLDNEDGFEEEEEEEEEMTDESEEDGEEKVEKEEKEEELEEEEEKEEEEEEEGNQEDSSSKMGYFPTEEKSETDENSGKQPSKLDEDDSCSLLTKESSHNSSFELIGSTIPSYQPCNRQTGRGTSFFPTAGGFRSPSPGLFRASLVSSASKSSGKLSEPSLPIEDSQDLYNASPEPKTLFLGAGDFQFCLEDDTQSQLLDADGFLNVRNHRNQYQALKPRLPLASMDENAMDANMDELLDLCTGKFTSQAEKHLPRKSDKKENMEELLNLCSGKFTSQDASTPASSELNKQEKESSMGDPMEEALALCSGSFPTDKEEEDEEEEFGDFRLVSNDNEFDSDEDEHSDSGNDLALEDHEDDDEEELLKRSEKLKRQMRLRKYLEDEAEVSGSDVGSEDEYDGEEIDEYEEDVIDEVLPSDEELQSQIKKIHMKTMLDDDKRQLRLYQERYLADGDLHSDGPGRMRKFRWKNIDDASQMDLFHRDSDDDQTEEQLDESEARWRKERIEREQWLRDMAQQGKITAEEEEEIGEDSQFMILAKKVTAKALQKNASRPMVIQESKSLLRNPFEAIRPGSAQQVKTGSLLNQPKAVLQKLAALSDHNPSAPRNSRNFVFHTLSPVKAEAAKESSKSQKIPEKDSDWLTWSGAPIPGFFRLSFDPHG

SEQ ID NO: 742546 - protein, 773 aa, Homo sapiens
MGTDGKEELKADVVPVTLAPKKLDGASHTKPGEKLQVLKAKLQEAMKLRRFEERQKRQALFKLDNEDGFEEEEEEEEEMTDESEEDGEEKVEKEEKEEELEEEEEKEEEEEEEGNQETAEFLLSSEEIETKDEKEMDKENNDGSSEIGKAVGFLSVPKSLSSDSTLLLFKDSSSKMGYFPTEEKSETDENSGKQPSKLDEDDSCSLLTKESSHNSSFELIGSTIPSYQPCNRQTGRGTSFFPTAGGFRSPSPGLFRASLVSSASKSSGKLSEPSLPIEDSQDLYNASPEPKTLFLGAGDFQFCLEDDTQSQLLDADGFLNVRNHRNQYQALKPRLPLASMDENAMDANMDELLDLCTGKFTSQAEKHLPRKSDKKENMEELLNLCSGKFTSQDASTPASSELNKQEKESSMGDPMEEALALCSGSFPTDKEEEDEEEEFGDFRLVSNDNEFDSDEDEHSDSGNDLALEDHEDDDEEELLKRSEKLKRQMRLRKYLEDEAEVSGSDVGSEDEYDGEEIDEYEEDVIDEVLPSDEELQSQIKKIHMKTMLDDDKRQLRLYQERYLADGDLHSDGPGRMRKFRWKNIDDASQMDLFHRDSDDDQTEEQLDESEARWRKERIEREQWLRDMAQQGKITAEEEEEIGEDSQFMILAKKVTAKALQKNASRPMVIQESKSLLRNPFEAIRPGSAQQVKTGSLLNQPKAVLQKLAALSDHNPSAPRNSRNFVFHTLSPVKAEAAKESSKSQKIPEKDSDWLTWSGAPIPGFFRLSFDPHG

SEQ ID NO: 742547 - protein, 662 aa, Homo sapiens
MRLLPSALPTCLISGTLYSMYSSKQAEAQRRYNGHRDTTGGTADGTASLSSDSTLLLFKDSSSKMGYFPTEEKSETDENSGKQPSKLDEDDSCSLLTKESSHNSSFELIGSTIPSYQPCNRQTGRGTSFFPTAGGFRSPSPGLFRASLVSSASKSSGKLSEPSLPIEDSQDLYNASPEPKTLFLGAGDFQFCLEDDTQSQLLDADGFLNVRNHRNQYQALKPRLPLASMDENAMDANMDELLDLCTGKFTSQAEKHLPRKSDKKENMEELLNLCSGKFTSQDASTPASSELNKQEKESSMGDPMEEALALCSGSFPTDKEEEDEEEEFGDFRLVSNDNEFDSDEDEHSDSGNDLALEDHEDDDEEELLKRSEKLKRQMRLRKYLEDEAEVSGSDVGSEDEYDGEEIDEYEEDVIDEVLPSDEELQSQIKKIHMKTMLDDDKRQLRLYQERYLADGDLHSDGPGRMRKFRWKNIDDASQMDLFHRDSDDDQTEEQLDESEARWRKERIEREQWLRDMAQQGKITAEEEEEIGEDSQFMILAKKVTAKALQKNASRPMVIQESKSLLRNPFEAIRPGSAQQVKTGSLLNQPKAVLQKLAALSDHNPSAPRNSRNFVFHTLSPVKAEAAKESSKSQKIPEKDSDWLTWSGAPIPGFFRLSFDPHG

SEQ ID NO: 742548 - protein, 285 aa, Homo sapiens
MRLRKYLEDEAEVSGSDVGSEDEYDGEEIDEYEEDVIDEVLPSDEELQSQIKKIHMKTMLDDDKRQLRLYQERYLADGDLHSDGPGRMRKFRWKNIDDASQMDLFHRDSDDDQTEEQLDESEARWRKERIEREQWLRDMAQQGKITAEEEEEIGEDSQFMILAKKVTAKALQKNASRPMVIQESKSLLRNPFEAIRPGSAQQVKTGSLLNQPKAVLQKLAALSDHNPSAPRNSRNFVFHTLSPVKAEAAKESSKSQKIPEKDSDWLTWSGAPIPGFFRLSFDPHG

SEQ ID NO: 742549 - protein, 112 aa, Homo sapiens
MFRMLQALEREPMNLASQMNKPGMQESADKPTRRENPHKYLLYKPTFSQLYTFLAASFKELPANSVLLIYLSATGVFPTGRSDSEGPYDFGGVLTNSNRDIINGDAIHKRNQ

SEQ ID NO: 742550 - protein, 416 aa, Homo sapiens
MGPYPGYRDQKRSVFLLTLGLHLLVGDFLGFRPCHLLHFGEQDLSVSGTGGPGFCTGEAECGEQALSPQLPVSPAPQVYSATNVELVTRTRTEHLSDQDKSRSKAGKTPFQSFLGMAQQHSSHTGAPVQQAASPTNPTAISPEEYFDPNFSLESRNIGRPIEMSSKVQRFKATLWLSEEHPLSLGDQVTPIIDLMAISNAHFAKLRDFITLRLPPGFPVKIEIPLFHVLNARITFSNLCGCDEPLSSVWVPAPSSAVAASGNPFPCEVDPTVFEVPNGYSVLGMERNEPLRDEDDDLLQFAIQQSLLEAGTEAEQVTVWEALTNTRPGARPPPQATVYEEQLQLERALQESLQLSTEPRGPGSPPRTPPAPGPPSFEEQLRLALELSSREQEERERRGQQEEEDLQRILQLSLTEH

SEQ ID NO: 742551 - protein, 616 aa, Homo sapiens
RRGRDAALRPSMAGPGPTFPLHRLVWANRHRELEAALHSHQHDIEQEDPRGRTPLELAVSLGNLESVRVLLRHNANVGKENRQGWAVLQEAVSTGDPEMVQLVLQYRDYQRATQRLAGIPELLNKLRQAPDFYVEMKWEFTSWVPLVSKMCPSDVYRVWKRGESLRVDTSLLGFEHMTWQRGRRSFIFKGQEAGALVMEVDHDRQVVHVETLGLTLQEPETLLAAMRPSEEHVASRLTSPIVSTHLDTRNVAFERNKCGIWGWRSEKMETVSGYEAKVYSATNVELVTRTRTEHLSDQDKSRSKAGKTPFQSFLGMAQQHSSHTGAPVQQAASPTNPTAISPEEYFDPNFSLESRNIGRPIEMSSKVQRFKATLWLSEEHPLSLGDQVTPIIDLMAISNAHFAKLRDFITLRLPPGFPVKIEIPLFHVLNARITFSNLCGCDEPLSSVWVPAPSSAVAASGNPFPCEVDPTVFEVPNGYSVLGMERNEPLRDEDDDLLQFAIQQSLLEAGTEAEQVTVWEALTNTRPGARPPPQATVYEEQLQLERALQESLQLSTEPRGPGSPPRTPPAPGPPSFEEQLRLALELSSREQEERERRGQQEEEDLQRILQLSLTEH

SEQ ID NO: 742552 - protein, 406 aa, Homo sapiens
NGRLVPAGDLGLLAAMRPSEEHVASRLTSPIVSTHLDTRNVAFERNKCGIWGWRSEKMETVSGYEAKVYSATNVELVTRTRTEHLSDQDKSRSKAGKTPFQSFLGMAQQHSSHTGAPVQQAASPTNPTAISPEEYFDPNFSLESRNIGRPIEMSSKVQRFKATLWLSEEHPLSLGDQVTPIIDLMAISNAHFAKLRDFITLRLPPGFPVKIEIPLFHVLNARITFSNLCGCDEPLSSVWVPAPSSAVAASGNPFPCEVDPTVFEVPNGYSVLGMERNEPLRDEDDDLLQFAIQQSLLEAGTEAEQVTVWEALTNTRPGARPPPQATVYEEQLQLERALQESLQLSTEPRGPGSPPRTPPAPGPPSFEEQLRLALELSSREQEERERRGQQEEEDLQRILQLSLTEH

SEQ ID NO: 742553 - protein, 348 aa, Homo sapiens
YDPNDYGEKVYSATNVELVTRTRTEHLSDQDKSRSKAGKTPFQSFLGMAQQHSSHTGAPVQQAASPTNPTAISPEEYFDPNFSLESRNIGRPIEMSSKVQRFKATLWLSEEHPLSLGDQVTPIIDLMAISNAHFAKLRDFITLRLPPGFPVKIEIPLFHVLNARITFSNLCGCDEPLSSVWVPAPSSAVAASGNPFPCEVDPTVFEVPNGYSVLGMERNEPLRDEDDDLLQFAIQQSLLEAGTEAEQVTVWEALTNTRPGARPPPQATVYEEQLQLERALQESLQLSTEPRGPGSPPRTPPAPGPPSFEEQLRLALELSSREQEERERRGQQEEEDLQRILQLSLTEH

SEQ ID NO: 742554 - protein, 742 aa, Homo sapiens
RRGRDAALRPSMAGPGPTFPLHRLVWANRHRELEAALHSHQHDIEQEDPRGRTPLELAVSLGNLESVRVLLRHNANVGKENRQGWAVLQEAVSTGDPEMVQLVLQYRDYQRATQRLAGIPELLNKLRQAPDFYVEMKWEFTSWVPLVSKMCPSDVYRVWKRGESLRVDTSLLGFEHMTWQRGRRSFIFKGQEAGALVMEVDHDRQVVHVETLGLTLQEPETLLAAMRPSEEHVASRLTSPIVSTHLDTRNVAFERNKCGIWGWRSEKMETVSGYEAKVYSATNVELVTRTRTEHLSDQDKSRSKAGKTPFQSFLGMAQQHSSHTGAPVQQAASPTNPTAISPEEYFDPNFSLESRNIGRPIEMSSKVQRLRSEELAGDLPRDKGSCRPLSGPVIVRDPLPRLASLWTPLLEGRSHVCLIHGPQPLARGLAQKTGSLSLMNGCATHVWFSIEFHEYLLGPAWHSGKGPQRRGLGVERLPWWNRTVTLLPREEPVSRFKATLWLSEEHPLSLGDQVTPIIDLMAISNAHFAKLRDFITLRLPPGFPVKIEIPLFHVLNARITFSNLCGCDEPLSSVWVPAPSSAVAASGNPFPCEVDPTVFEVPNGYSVLGMERNEPLRDEDDDLLQFAIQQSLLEAGTEAEQVTVWEALTNTRPGARPPPQATVYEEQLQLERALQESLQLSTEPRGPGSPPRTPPAPGPPSFEEQLRLALELSSREQEERERRGQQEEEDLQRILQLSLTEH

SEQ ID NO: 742555 - protein, 646 aa, Homo sapiens
RRGRDAALRPSMAGPGPTFPLHRLVWANRHRELEAALHSHQHDIEQEDPRGRTPLELAVSLGNLESVRVLLRHNANVGKENRQGWAVLQEAVSTGDPEMVQLVLQYRDYQRATQRLAGIPELLNKLRQAPDFYVEMKWEFTSWVPLVSKMCPSDVYRVWKRGESLRVDTSLLGFEHMTWQRGRRSFIFKGQEAGALVMEVDHDRQVVHVETLGLTLQEPETLLAAMRPSEEHVASRLTSPIVSTHLDTRNVAFERNKCGIWGWRSEKMETVSGYEAKVYSATNVELVTRTRTEHLSDQDKSRSKAGKTPFQSFLGMAQQHSSHTGAPVQQAASPTNPTAISPEEYFDPNFSLESRNIGRPIEMSSKVQRFKATLWLSEEHPLSLGDQVTPIIDLMAISNAHFAKLRDFITLRLPPGFPVKIEIPLFHVLNARITFSNLCGCDEPLSSVWVPAPSSAVAASGTPTGGRGSLHSFLVTKPRGLSVAPLPPAYGNPFPCEVDPTVFEVPNGYSVLGMERNEPLRDEDDDLLQFAIQQSLLEAGTEAEQVTVWEALTNTRPGARPPPQATVYEEQLQLERALQESLQLSTEPRGPGSPPRTPPAPGPPSFEEQLRLALELSSREQEERERRGQQEEEDLQRILQLSLTEH

SEQ ID NO: 742556 - protein, 504 aa, Homo sapiens
RRGRDAALRPSMAGPGPTFPLHRLVWANRHRELEAALHSHQHDIEQEDPRGRTPLELAVSLGNLESVRVLLRHNANVGKENRQGWAVLQEAVSTGDPEMVQLVLQYRDYQRATQRLAGIPELLNKLRQAPDFYVEMKWEFTSWVPLVSKMCPSDVYRVWKRGESLRVDTSLLGFEHMTWQRGRRSFIFKGQEAGALVMEVDHDRQVVHVETLGLTLQEPETLLAAMRPSEEHVASRLTSPIVSTHLDTRNVAFERNKCGIWGWRSEKMETVSGYEAKVYSATNVELVTRTRTEHLSDQDKSRSKAGKTPFQSFLGMAQQHSSHTGAPVQQAASPTNPTAISPEEYFDPNFSLESRNIGRPIEMSSKVQRFKATLWLSEEHPLSLGDQVTPIIDLMAISNAHFAKLRDFITLRLPPGFPVKIEIPLFHVLNARITFSNLCGCDEPLSSVWVPAPSSAVAASGNPFPCEVDPTVFEVPNGYSVLGMERNEPLRDEGLTADPAAVTH

SEQ ID NO: 742557 - protein, 137 aa, Homo sapiens
GEARWKAQSDEVAQLGKVSVLMAIRSMMGVTWSPRESGCSSLSHSVALNLPSRPQDMVYEEQLQLGRALQESLQLSTEPRGPGSPPRTPPAPGPPSFEEQLRLALELSSREQEERERRGQQEEEDLQRILQLSLTEH

SEQ ID NO: 742558 - protein, 274 aa, Homo sapiens
RRGRDAALRPSMAGPGPTFPLHRLVWANRHRELEAALHSHQHDIEQEDPRGRTPLELAVSLGNLESVRVLLRHNANVGKENRQGWAVLQEAVSTGDPEMVQLVLQYRDYQRATQRLAGIPELLNKLRQAPDFYVEMKWEFTSWVPLVSKMCPSDVYRVWKRGESLRVDTSLLGFEHMTWQRGRRSFIFKGQEAGALVMEVDHDRQVVHVETLGLTLQEPETLLAAMRPSEEHVASRLTSPIVSTHLDTRNVAFERSVGSWHTVGGMGTDSKSHH

SEQ ID NO: 742559 - protein, 369 aa, Homo sapiens
RRGRDAALRPSMAGPGPTFPLHRLVWANRHRELEAALHSHQHDIEQEDPRGRTPLELAVSLGNLESVRVLLRHNANVGKENRQGWAVLQEAVSTGDPEMVQLVLQYRDYQRATQRLAGIPELLNKLRQAPDFYVEMKWEFTSWVPLVSKMCPSDVYRVWKRGESLRVDTSLLGFEHMTWQRGRRSFIFKGQEAGALVMEVDHDRQVVHVETLGLTLQEPETLLAAMRPSEEHVASRLTSPIVSTHLDTRNVAFERNKCGIWGWRSEKMETVSGYEAKVYSATNVELVTRTRTEHLSDQDKSRSKAGKTPFQSFLGMAQQHSSHTGAPVQQAASPTNPTAISPEEYFDPNFSLESRNIGRPIEMSSKVQR

SEQ ID NO: 742560 - protein, 283 aa, Homo sapiens
LSACSSECRHKPAEAVTMLSGIEAAAGEYEDSELRCRVAVEELSPGGQPRRRQALRTAELSLGRNERRELMLRLQAPGPAGRPRCFPLRAARLFTRFAEAGRSTLRLPAHDTPGAGAVQLLLSDCPPDRLRRFLRTLRLKLAAAPGPGPASARAQLLGPRPRDFVTISPVQPEERRLRAATRVPDTTLVKRPVEPQAGAEPSTEAPRWPLPVKRLSLPSTKPQLSEEQAAVLRAVLKGQSIFFTGSAGSGGREEVGGQWWGGIEEQGDLSNFAPVQEQGSHIC

SEQ ID NO: 742561 - protein, 687 aa, Homo sapiens
LSACSSECRHKPAEAVTMLSGIEAAAGEYEDSELRCRVAVEELSPGGQPRRRQALRTAELSLGRNERRELMLRLQAPGPAGRPRCFPLRAARLFTRFAEAGRSTLRLPAHDTPGAGAVQLLLSDCPPDRLRRFLRTLRLKLAAAPGPGPASARAQLLGPRPRDFVTISPVQPEERRLRAATRVPDTTLVKRPVEPQAGAEPSTEAPRWPLPVKRLSLPSTKPQLSEEQAAVLRAVLKGQSIFFTGSAGSGGREEVGGQWWGGIEEQGDLSNFAPVQEQGSHICYKRILGSLPPTGTVATASTGVAACHIGGTTLHAFAGIGSGQAPLAQCVALAQRPGVRQGWLNCQRLVIDEISMVEADLFDKLEAVARAVRQQNKPFGGIQLIICGDFLQLPPVTKGSQPPRFCFQSKSWKRCVPVTLELTKVWRQADQTFISLLQAVRLGRCSDEVTRQLQATASHKVGRDGIVATRLCTHQDDVALTNERRLQELPGKVHRFEAMDSNPELASTLDAQCPVSQLLQLKLGAQVMLVKNLSVSRGLVNGARGVVVGFEAEGRGLPQVRFLCGVTEVIHADRWTVQATGGQLLSRQQLPLQLAWAMSIHKSQGMTLDCVEISLGRVFASGQAYVALSRARSLQGLRVLDFDPMAVRCDPRVLHFYATLRRGRSLSLESPDDDEAASDQENMDPIL

SEQ ID NO: 742562 - protein, 640 aa, Homo sapiens
LSACSSECRHKPAEAVTMLSGIEAAAGEYEDSELRCRVAVEELSPGGQPRRRQALRTAELSLGRNERRELMLRLQAPGPAGRPRCFPLRAARLFTRFAEAGRSTLRLPAHDTPGAGAVQLLLSDCPPDRLRRFLRTLRLKLAAAPGPGPASARAQLLGPRPRDFVTISPVQPEERRLRAATRVPDTTLVKRPVEPQAGAEPSTEAPRWPLPVKRLSLPSTKPQLSEEQAAVLRAVLKGQSIFFTGSAGSGGREEVGGQWWGGIEEQGDLSNFAPVQEQGSHICYKRILGSLPPTGTVATASTGVAACHIGGTTLHAFAGIGSGQAPLAQCVALAQRPGVRQGWLNCQRLVIDEISMVEADLFDKLEAVARAVRQQNKPFGGIQLIICGDFLQLPPVTKGSQPPRFCFQSKSWKRCVPVTLELTKVWRQADQTFISLLQAVRLGRKVHRFEAMDSNPELASTLDAQCPVSQLLQLKLGAQVMLVKNLSVSRGLVNGARGVVVGFEAEGRGLPQVRFLCGVTEVIHADRWTVQATGGQLLSRQQLPLQLAWAMSIHKSQGMTLDCVEISLGRVFASGQAYVALSRARSLQGLRVLDFDPMAVRCDPRVLHFYATLRRGRSLSLESPDDDEAASDQENMDPIL

SEQ ID NO: 742563 - protein, 498 aa, Homo sapiens
LSACSSECRHKPAEAVTMLSGIEAAAGEYEDSELRCRVAVEELSPGGQPRRRQALRTAELSLGRNERRELMLRLQAPGPAGRPRCFPLRAARLFTRFAEAGRSTLRLPAHDTPGAGAVQLLLSDCPPDRLRRFLRTLRLKLAAAPGPGPASARAQLLGPRPRDFVTISPVQPEERRLRAATRVPDTTLVKRPVEPQAGAEPSTEAPRWPLPVKRLSLPSTKPQLSEEQAAVLRAVLKGQSIFFTGSAGSGGREEVGGQWWGGIEEQGDLSNFAPVQEQGSHICYKRILGSLPPTGTVATASTGVAACHIGGTTLHAFAGIGSGQAPLAQCVALAQRPGVRQGWLNCQRLVIDEISMVEADLFDKLEAVARAVRQQNKPFGGIQLIICGDFLQLPPVTKGLDTELQSPEHPSFQAAEGRGNEDRCSGSSIRALGGDWWGLRLGAASKQRTELRCVSTARPSLAQPRTNTLQSLTKEHKLQNVHPYFKLLFQGINSVWGH

SEQ ID NO: 742564 - protein, 76 aa, Homo sapiens
GSVLAVSGSVCCFPRDIRRAQEYMSAHSFGVSQMMLYDTKCYRSQRLGKGNGSNRKPDGTKANMETMITAKSHPCI

SEQ ID NO: 742565 - protein, 35 aa, Homo sapiens
MQNALENLSNRIEQVEERNSELKDKVFELTQSNKD

SEQ ID NO: 742566 - protein, 74 aa, Homo sapiens
ATALLEPPGLPSHVAPSPVQPCPWLPWPRPLSIQGRQAQFPRASAWASLSQTSPWPSGPSQGMASSVRRTDHCI

SEQ ID NO: 742567 - protein, 85 aa, Homo sapiens
MPAVAVHTGHCCTKPQGQAARWPWLANVAHPVSRSSAWRDDCWKPGQTQSLHECGPGCGSRSTATTRAGAQGESPASSNPPLKKK

SEQ ID NO: 742568 - protein, 94 aa, Homo sapiens
PPSELNLLCSRSTPSGSVSSAKPNPLSKETFLEGNTELVNVMRGRTEQLRCRLCTYHNVDESHLMLGEKSQAQKSIYCVNLLTRSSRAGKTNLR

SEQ ID NO: 742569 - protein, 114 aa, Homo sapiens
APPGPTRLACGLWRIHSYPNPHPIPSLLLETPHCWMWDFRSSTSHGNWHFKQRQREGNTRKTKKLVHRTDVEFSCSDTSTPGADDQPHPCLHSEHINTAQLSSPCCHLPEPPVF

SEQ ID NO: 742570 - protein, 119 aa, Homo sapiens
SGAAGRKTRAARSGSGRLEKMVLRRLLAALLHSPQLVERLSESRPIRRAAQLTAFALLQAQLRGQDAARRLQDLAAGPVGSLCRRAERFRDAFTQELRRGLRGRSGPPPGSQRGPGANI

SEQ ID NO: 742571 - protein, 119 aa, Homo sapiens; identical to SEQ ID NO: 742570

SEQ ID NO: 742572 - protein, 112 aa, Homo sapiens
LRLVEAGLMAEEKMVLRRLLAALLHSPQLVERLSESRPIRRAAQLTAFALLQAQLRGQDAARRLQDLAAGPVGSLCRRAERFRDAFTQELRRGLRGRSGPPPGSQRGPGANI

SEQ ID NO: 742573 - protein, 128 aa, Homo sapiens
MTSLFAQEIRLSKRHEEIVSQRLMLLQQMENKLGDQHTEKASQLQTVETAFKRNLSLLKDIEAAEKSLQTRIHPLPRPEVVSLETRYWASVEEYIPKWEQFLLGRAPYPFAVENQNEAENTIQNEAQR

SEQ ID NO: 742574 - protein, 128 aa, Homo sapiens; identical to SEQ ID NO: 742573

SEQ ID NO: 742575 - protein, 128 aa, Homo sapiens; identical to SEQ ID NO: 742573

SEQ ID NO: 742576 - protein, 128 aa, Homo sapiens; identical to SEQ ID NO: 742573

SEQ ID NO: 742577 - protein, 128 aa, Homo sapiens; identical to SEQ ID NO: 742573

SEQ ID NO: 742578 - protein, 131 aa, Homo sapiens
NWWVLGLTDLRKKPRTLGNSWRAEACCIFIIALPPPNTIGGPALIISLQVYPAAPERQRPARRGHDDGGGFVKTKMGICREKKERSDCYCVYIEREDIRDSILKKTCTLNNCFAEMLLICSFAPATLPQPL

SEQ ID NO: 742579 - protein, 214 aa, Homo sapiens
KQYPVSLGSAAATLRETSGRAGAGSWRTVFGSGGGAMTTLRAFTCDDLFRFNNINLDPLTETYGIPFYLQYLAHWPEYFIVAEAPGGELMGYIMGKAEGSVAREEWHGHVTALSVAPEFRRLGLAAKLMELLEEISERKGGFFVDLFVRVSNQVAVNMYKQLGYSVYRTVIEYYSASNGEPDEDAYDMRKALSRDTEKKSIIPLPHPVRPEDIE

SEQ ID NO: 742580 - protein, 172 aa, Homo sapiens
MINTFTCDDLFRFNNINLDPLTETYGIPFYLQYLAHWPEYFIVAEAPGGELMGYIMGKAEGSVAREEWHGHVTALSVAPEFRRLGLAAKLMELLEEISERKGGFFVDLFVRVSNQVAVNMYKQLGYSVYRTVIEYYSASNGEPDEDAYGKLPSMAVSPRSRNSYILSTDCSI

SEQ ID NO: 742581 - protein, 82 aa, Homo sapiens
KQYPVSLGSAAATLRETSGRAGAGSWRTVFGSGGGAMTTLRAFTCDDLFRFNNINLDPLTETYGIPFYLQYLAHWTAAYICF

SEQ ID NO: 742582 - protein, 214 aa, Homo sapiens; identical to SEQ ID NO: 742579

SEQ ID NO: 742583 - protein, 214 aa, Homo sapiens; identical to SEQ ID NO: 742579

SEQ ID NO: 742584 - protein, 214 aa, Homo sapiens; identical to SEQ ID NO: 742579

SEQ ID NO: 742585 - protein, 166 aa, Homo sapiens
MLSQSCNLDPLTETYGIPFYLQYLAHWPEYFIVAEAPGGELMGYIMGKAEGSVAREEWHGHVTALSVAPEFRRLGLAAKLMELLEEISERKGGFFVDLFVRVSNQVAVNMYKQLGYSVYRTVIEYYSASNGEPDEDAYDMRKALSRDTEKKSIIPLPHPVRPEDIE

SEQ ID NO: 742586 - protein, 176 aa, Homo sapiens
MINTFTCDDLFRFNNINLDPLTETYGIPFYLQYLAHWPEYFIVAEAPGGELMGYIMGKAEGSVAREEWHGHVTALSVAPEFRRLGLAAKLMELLEEISERKGGFFVDLFVRVSNQVAVNMYKQLGYSVYRTVIEYYSASNGEPDEDAYDMRKALSRDTEKKSIIPLPHPVRPEDIE

SEQ ID NO: 742587 - protein, 211 aa, Homo sapiens
KQYPVSLGSAAATLRETSGRAGAGSWRTVFGSGGGAMTTLRAFTCDDLFRFNNIPLQTLYGIPFYLQYLAHWPEYFIVAEAPGGELMGYIMGKAEGSVAREEWHGHVTALSVAPEFRRLGLAAKLMELLEEISERKGGFFVDLFVRVSNQVAVNMYKQLGYSVYRTVIEYYSASNGEPDEDAYDMRKALSRDTEKKSIIPLPHPVRPEDIE

SEQ ID NO: 742588 - protein, 201 aa, Homo sapiens
KQYPVSLGSAAATLRETSGRAGAGSWRTVFGSGGGAMTTLRAFTCDDLFRFNNINLDPLTETPEYFIVAEAPGGELMGYIMGKAEGSVAREEWHGHVTALSVAPEFRRLGLAAKLMELLEEISERKGGFFVDLFVRVSNQVAVNMYKQLGYSVYRTVIEYYSASNGEPDEDAYDMRKALSRDTEKKSIIPLPHPVRPEDIE

SEQ ID NO: 742589 - protein, 78 aa, Homo sapiens
GLLALPYCLLVRGRAAPLLGRGHRRRPGRRGGLRGSEAGQQLLGCVHREAHLVAVVKLYPNEMTLITASPAADAVSVM

SEQ ID NO: 742590 - protein, 91 aa, Homo sapiens
TSNDYFSPNRAPESSNENNIVHKASRVSNQVAVNMYKQLGYSVYRTVIEYYSASNGEPDEDAYDMRKALSRDTEKKSIIPLPHPVRPEDIE

SEQ ID NO: 742591 - protein, 147 aa, Homo sapiens
KQYPVSLGSAAATLRETSGRAGAGSWRTVFGSGGGAMTTLRAFTCDDLFRFNNINLDPLTETYGIPFYLQYLAHWPEYFIVAEAPGGELMGYIMGKAEGSVAREEWHGHVTALSVAPEFRRLGLAAKLMELLEEISERYEESTFQGY

SEQ ID NO: 742592 - protein, 214 aa, Homo sapiens; identical to SEQ ID NO: 742579

SEQ ID NO: 742593 - protein, 210 aa, Homo sapiens
KQYPVSLGSAAATLRETSGRAGAGSWRTVFGSGGGAMTTLRAFTCDDLFRFNNINLDPLTETYGIPFYLQYLAHWPEYFIVAEAPGGELMGYIMGKAEGSVAREEWHGHVTALSVAPEFRRLGLAAKLMELLEEISERKGGFFVDLFVRVSNQVAVNMYKQLGYSVYRTVIEYYSASNGEPDEDAYGKLPSMAVSPRSRNSYILSTDCSI

SEQ ID NO: 742594 - protein, 878 aa, Homo sapiens
MATAPSYPAGLPGSPGPGSPPPPGGLELQSPPPLLPQIPAPGSGVSFHIQIGLTREFVLLPAASELAHVKQLACSIVDQKFPECGFYGLYDKILLFKHDPTSANLLQLVRSSGDIQEGDLVEVVLSASATFEDFQIRPHALTVHSYRAPAFCDHCGEMLFGLVRQGLKCDGCGLNYHKRCAFSIPNNCSGARKRRLSSTSLASGHSVRLGTSESLPCTAEELSRSTTELLPRRPPSSSSSSSASSYTGRPIELDKMLLSKVKVPHTFLIHSYTRPTVCQACKKLLKGLFRQGLQCKDCKFNCHKRCATRVPNDCLGEALINGDVPMEEATDFSEADKSALMDESEDSGVIPGSHSENALHASEEEEGEGGKAQSSLGYIPLMRVVQSVRHTTRKSSTTLREGWVVHYSNKDTLRKRHYWRLDCKCITLFQNNTTNRYYKEIPLSEILTVESAQNFSLVPPGTNPHCFEIVTANATYFVGEMPGGTPGGPSGQGAEAARGWETAIRQALMPVILQDAPSAPGHAPHRQASLSISVSNSQIQENVDIATVYQIFPDEVLGSGQFGVVYGGKHRKTGRDVAVKVIDKLRFPTKQESQLRNEVAILQSLRHPGIVNLECMFETPEKVFVVMEKLHGDMLEMILSSEKGRLPERLTKFLITQILVALRHLHFKNIVHCDLKPENVLLASADPFPQVKLCDFGFARIIGEKSFRRSVVGTPAYLAPEVLLNQGYNRSLDMWSVGVIMYVSLSGTFPFNEDEDINDQIQNAAFMYPASPWSHISAGAIDLINNLLQVKMRKRYSVDKSLSHPWLQEYQTWLDLRELEGKMGERYITHESDDARWEQFAAEHPLPGSGLPTDRDLGGACPPQDHDMQGLAERISVL

SEQ ID NO: 742595 - protein, 904 aa, Homo sapiens
SASPPTSARFRKIRGVHAPGATLPPTPAPPSSHQTHAGAPSPYNWGAGILPGSRWGWEGAGRKRGPAGSLRFRGKQPALPWEGHSPPAAEGGSELFRRHIPLPPLQFPECGFYGLYDKILLFKHDPTSANLLQLVRSSGDIQEGDLVEVVLSASATFEDFQIRPHALTVHSYRAPAFCDHCGEMLFGLVRQGLKCDGCGLNYHKRCAFSIPNNCSGARKRRLSSTSLASGHSVRLGTSESLPCTAEELSRSTTELLPRRPPSSSSSSSASSYTGRPIELDKMLLSKVKVPHTFLIHSYTRPTVCQACKKLLKGLFRQGLQCKDCKFNCHKRCATRVPNDCLGEALINGDVPMEEATDFSEADKSALMDESEDSGVIPGSHSENALHASEEEEGEGGKAQSSLGYIPLMRVVQSVRHTTRKSSTTLREGWVVHYSNKDTLRKRHYWRLDCKCITLFQNNTTNRYYKEIPLSEILTVESAQNFSLVPPGTNPHCFEIVTANATYFVGEMPGGTPGGPSGQGAEAARGWETAIRQALMPVILQDAPSAPGHAPHRQASLSISVSNSQIQENVDIATVYQIFPDEVLGSGQFGVVYGGKHRKTGRDVAVKVIDKLRFPTKQESQLRNEVAILQSLRHPGIVNLECMFETPEKVFVVMEKLHGDMLEMILSSEKGRLPERLTKFLITQILVALRHLHFKNIVHCDLKPENVLLASADPFPQVKLCDFGFARIIGEKSFRRSVVGTPAYLAPEVLLNQGYNRSLDMWSVGVIMYVSLSGTFPFNEDEDINDQIQNAAFMYPASPWSHISAGAIDLINNLLQVKMRKRYSVDKSLSHPWLQEYQTWLDLRELEGKMGERYITHESDDARWEQFAAEHPLPGSGLPTDRDLGGACPPQDHDMQGLAERISVL

SEQ ID NO: 742596 - protein, 871 aa, Homo sapiens
MATAPSYPAGLPGSPGPGSPPPPGGLELQSPPPLLPQIPAPGSGVSFHIQIGLTREFVLLPAASELAHVKQLACSIVDQKFPECGFYGLYDKILLFKHDPTSANLLQLVRSSGDIQEGDLVEVVLSASATFEDFQIRPHALTVHSYRAPAFCDHCGEMLFGLVRQGLKCDGCGLNYHKRCAFSIPNNCSGARKRRLSSTSLASGHSVRLGTSESLPCTAEELSRSTTELLPRRPPSSSSSSSASSYTGRPIELDKMLLSKVKVPHTFLIHSYTRPTVCQACKKLLKGLFRQGLQCKDCKFNCHKRCATRVPNDCLGEATYQWSDFSEADKSALMDESEDSGVIPGSHSENALHASEEEEGEGGKAQSSLGYIPLMRVVQSVRHTTRKSSTTLREGWVVHYSNKDTLRKRHYWRLDCKCITLFQNNTTNRYYKEIPLSEILTVESAQNFSLVPPGTNPHCFEIVTANATYFVGEMPGGTPGGPSGQGAEAARGWETAIRQALMPVILQDAPSAPGHAPHRQASLSISVSNSQIQENVDIATVYQIFPDEVLGSGQFGVVYGGKHRKTGRDVAVKVIDKLRFPTKQESQLRNEVAILQSLRHPGIVNLECMFETPEKVFVVMEKLHGDMLEMILSSEKGRLPERLTKFLITQILVALRHLHFKNIVHCDLKPENVLLASADPFPQVKLCDFGFARIIGEKSFRRSVVGTPAYLAPEVLLNQGYNRSLDMWSVGVIMYVSLSGTFPFNEDEDINDQIQNAAFMYPASPWSHISAGAIDLINNLLQVKMRKRYSVDKSLSHPWLQEYQTWLDLRELEGKMGERYITHESDDARWEQFAAEHPLPGSGLPTDRDLGGACPPQDHDMQGLAERISVL

SEQ ID NO: 742597 - protein, 621 aa, Homo sapiens
QTNRKPTLNFPTESILEATVLPRAPKNPHNEYFITITQFSFLKFTNIINILCNQEIHSRHILQYWNVPMEEATDFSEADKSALMDESEDSGVIPGSHSENALHASEEEEGEGGKAQSSLGYIPLMRVVQSVRHTTRKSSTTLREGWVVHYSNKDTLRKRHYWRLDCKCITLFQNNTTNRYYKEIPLSEILTVESAQNFSLVPPGTNPHCFEIVTANATYFVGEMPGGTPGGPSGQGAEAARGWETAIRQALMPVILQDAPSAPGHAPHRQASLSISVSNSQIQENVDIATVYQIFPDEVLGSGQFGVVYGGKHRKTGRDVAVKVIDKLRFPTKQESQLRNEVAILQSLRHPGIVNLECMFETPEKVFVVMEKLHGDMLEMILSSEKGRLPERLTKFLITQILVALRHLHFKNIVHCDLKPENVLLASADPFPQVKLCDFGFARIIGEKSFRRSVVGTPAYLAPEVLLNQGYNRSLDMWSVGVIMYVSLSGTFPFNEDEDINDQIQNAAFMYPASPWSHISAGAIDLINNLLQVKMRKRYSVDKSLSHPWLQEYQTWLDLRELEGKMGERYITHESDDARWEQFAAEHPLPGSGLPTDRDLGGACPPQDHDMQGLAERISVL

SEQ ID NO: 742598 - protein, 896 aa, Homo sapiens
MATAPSYPAGLPGSPGPGSPPPPGGLELQSPPPLLPQIPAPGSGVSFHIQIGLTREFVLLPAASELAHVKQLACSIVDQKFPECGFYGLYDKILLFKHDPTSANLLQLVRSSGDIQEGDLVEVVLSASATFEDFQIRPHALTVHSYRAPAFCDHCGEMLFGLVRQGLKCDGCGLNYHKRCAFSIPNNCSGARKRRLSSTSLASGHSVRLGTSESLPCTAEELSRSTTELLPRRPPSSSSSSSASSYTGRPIELDKMLLSKVKVPHTFLIHSYTRPTVCQACKKLLKGLFRQGLQCKDCKFNCHKRCATRVPNDCLGEALINGDVPMEEATDFSEADKSALMDESEDSGVIPGSHSENALHASEEEEGEGGKAQSSLGYIPLMRVVQSVRHTTRKSSTTLREGWVVHYSNKDTLRKRHYWRLDCKCITLFQNNTTNRYYKEIPLSEILTVESAQNFSLVPPGTNPHCFEIVTANATYFVGEMPGGTPGGPSGQGAEAARGWETAIRRPDGPSSFRAWRMAVSQPQALMPVILQDAPSAPGHAPHRQASLSISVSNSQIQENVDIATVYQIFPDEVLGSGQFGVVYGGKHRKTGRDVAVKVIDKLRFPTKQESQLRNEVAILQSLRHPGIVNLECMFETPEKVFVVMEKLHGDMLEMILSSEKGRLPERLTKFLITQILVALRHLHFKNIVHCDLKPENVLLASADPFPQVKLCDFGFARIIGEKSFRRSVVGTPAYLAPEVLLNQGYNRSLDMWSVGVIMYVSLSGTFPFNEDEDINDQIQNAAFMYPASPWSHISAGAIDLINNLLQVKMRKRYSVDKSLSHPWLQEYQTWLDLRELEGKMGERYITHESDDARWEQFAAEHPLPGSGLPTDRDLGGACPPQDHDMQGLAERISVL

SEQ ID NO: 742599 - protein, 878 aa, Homo sapiens; identical to SEQ ID NO: 742594

SEQ ID NO: 742600 - protein, 514 aa, Homo sapiens
VGWGYGVGEVLELRRARGAPGTWSPKQLHGIGTGQESLAVHVTLQTSLQRKRHYWRLDCKCITLFQNNTTNRYYKEIPLSEILTVESAQNFSLVPPGTNPHCFEIVTANATYFVGEMPGGTPGGPSGQGAEAARGWETAIRQALMPVILQDAPSAPGHAPHRQASLSISVSNSQIQENVDIATVYQIFPDEVLGSGQFGVVYGGKHRKTGRDVAVKVIDKLRFPTKQESQLRNEVAILQSLRHPGIVNLECMFETPEKVFVVMEKLHGDMLEMILSSEKGRLPERLTKFLITQILVALRHLHFKNIVHCDLKPENVLLASADPFPQVKLCDFGFARIIGEKSFRRSVVGTPAYLAPEVLLNQGYNRSLDMWSVGVIMYVSLSGTFPFNEDEDINDQIQNAAFMYPASPWSHISAGAIDLINNLLQVKMRKRYSVDKSLSHPWLQEYQTWLDLRELEGKMGERYITHESDDARWEQFAAEHPLPGSGLPTDRDLGGACPPQDHDMQGLAERISVL

SEQ ID NO: 742601 - protein, 860 aa, Homo sapiens
MATAPSYPAGLPGSPGPGSPPPPGGLELQSPPPLLPQIPAPGSGVSFHIQIGLTREFVLLPAASELAHVKQLACSIVDQKFPECGFYGLYDKILLFKHDPTSANLLQLVRSSGDIQEGDLVEVVLSASATFEDFQIRPHALTVHSYRAPAFCDHCGEMLFGLVRQGLKCDGCGLNYHKRCAFSIPNNCSGARKRRLSSTSLASGHSVRLGTSESLPCTAEELSRSTTELLPRRPPSSSSSSSASSYTGRPIELDKMLLSKVKVPHTFLIHSYTRPTVCQACKKLLKGLFRQGLQCKDCKFNCHKRCATRVPNDCLGEALINGDVPMEEATDFSEADKSALMDESEDSGVIPGSHSENALHASEEEEGEGGKAQSSLGYIPLMRVVQSVRHTTRKSSTTLREGWVVHYSNKDTLRKRHYWRLDCKCITLFQNNTTNRYYKEIPLSEILTVESAQNFSLVPPGTNPHCFEIVTANATYFVGEMPGGTPGGPSGQGAEAARGWETAIRQALMPVILQDAPSAPGHAPHRQASLSISVSNSQIQENVDIATVYQIFPDEVLGSGQFGVVYGGFPTKQESQLRNEVAILQSLRHPGIVNLECMFETPEKVFVVMEKLHGDMLEMILSSEKGRLPERLTKFLITQILVALRHLHFKNIVHCDLKPENVLLASADPFPQVKLCDFGFARIIGEKSFRRSVVGTPAYLAPEVLLNQGYNRSLDMWSVGVIMYVSLSGTFPFNEDEDINDQIQNAAFMYPASPWSHISAGAIDLINNLLQVKMRKRYSVDKSLSHPWLQEYQTWLDLRELEGKMGERYITHESDDARWEQFAAEHPLPGSGLPTDRDLGGACPPQDHDMQGLAERISVL

SEQ ID NO: 742602 - protein, 349 aa, Homo sapiens
FPFAPLTCPVFTLEDIATVYQIFPDEVLGSGQFGVVYGGKHRKTGRDVAVKVIDKLRFPTKQESQLRNEVAILQSLRHPGIVNLECMFETPEKVFVVMEKLHGDMLEMILSSEKGRLPERLTKFLITQILVALRHLHFKNIVHCDLKPENVLLASADPFPQVKLCDFGFARIIGEKSFRRSVVGTPAYLAPEVLLNQGYNRSLDMWSVGVIMYVSLSGTFPFNEDEDINDQIQNAAFMYPASPWSHISAGAIDLINNLLQVKMRKRYSVDKSLSHPWLQEYQTWLDLRELEGKMGERYITHESDDARWEQFAAEHPLPGSGLPTDRDLGGACPPQDHDMQGLAERISVL

SEQ ID NO: 742603 - protein, 878 aa, Homo sapiens; identical to SEQ ID NO: 742594

SEQ ID NO: 742604 - protein, 145 aa, Homo sapiens
MWSVGVIMYVSLSGTFPFNEDEDINDQIQNAAFMYPASPWSHISAGAIDLINNLLQVKMRKRYSVDKSLSHPWLQEYQTWLDLRELEGKMGERYITHESDDARWEQFAAEHPLPGSGLPTDRDLGGACPPQDHDMQGLAERISVL

SEQ ID NO: 742605 - protein, 250 aa, Homo sapiens
MDGFGGLAAEVGIWLSTIYLSYWAICSPQILVALRHLHFKNIVHCDLKPENVLLASADPFPQVKLCDFGFARIIGEKSFRRSVVGTPAYLAPEVLLNQGYNRSLDMWSVGVIMYVSLSGTFPFNEDEDINDQIQNAAFMYPASPWSHISAGAIDLINNLLQVKMRKRYSVDKSLSHPWLQEYQTWLDLRELEGKMGERYITHESDDARWEQFAAEHPLPGSGLPTDRDLGGACPPQDHDMQGLAERISVL

SEQ ID NO: 742606 - protein, 809 aa, Homo sapiens
MATAPSYPAGLPGSPGPGSPPPPGGLELQSPPPLLPQIPAPGSGVSFHIQIGLTREFVLLPAASELAHVKQLACSIVDQKFPECGFYGLYDKILLFKHDPTSANLLQLVRSSGDIQEGDLVEVVLSASATFEDFQIRPHALTVHSYRAPAFCDHCGEMLFGLVRQGLKCDGCGLNYHKRCAFSIPNNCSGARKRRLSSTSLASGHSVRLGTSESLPCTAEELSRSTTELLPRRPPSSSSSSSASSYTGRPIELDKMLLSKVKVPHTFLIHSYTRPTVCQACKKLLKGLFRQGLQCKDCKFNCHKRCATRVPNDCLGEALINGDVPMEEATDFSEADKSALMDESEDSGVIPGSHSENALHASEEEEGEGGKAQSSLGYIPLMRVVQSVRHTTRKSSTTLREGWVVHYSNKDTLRKRHYWRLDCKCITLFQNNTTNRYYKEIPLSEILTVESAQNFSLVPPGTNPHCFEIVTANATYFVGEMPGGTPGGPSGQGAEAARGWETAIRQALMPVILQDAPSAPGHAPHRQASLSISVSNSQIQENVDIATVYQIFPDEVLGSGQFGVVYGGKHRKTGRDVAVKVIDKLRFPTKQESQLRNEVAILQSLRHPGIVNLECMFETPEKVFVVMEKLHGDMLEMILSSEKGRLPERLTKFLITQILVALRHLHFKNIVHCDLKPENVLLASADPFPQVKLCDFGFARIIGEKSFRRSVVGTPAYLAPEVLLNQGYNRSLDMWSVGVIMYVSLSGTFPFNEDEDINDQIQNAAFMYPASPWSHISAGARAGRVHEGAKPPGKPTFSKLGSPFGPSFN

SEQ ID NO: 742607 - protein, 696 aa, Homo sapiens
MATAPSYPAGLPGSPGPGSPPPPGGLELQSPPPLLPQIPAPGSGVSFHIQIGLTREFVLLPAASELAHVKQLACSIVDQKFPECGFYGLYDKILLFKHDPTSANLLQLVRSSGDIQEGDLVEVVLSASATFEDFQIRPHALTVHSYRAPAFCDHCGEMLFGLVRQGLKCDGCGLNYHKRCAFSIPNNCSGARKRRLSSTSLASGHSVRLGTSESLPCTAEELSRSTTELLPRRPPSSSSSSSASSYTGRPIELDKMLLSKVKVPHTFLIHSYTRPTVCQACKKLLKGLFRQGLQCKDCKFNCHKRCATRVPNDCLGEALINGDVPMEEATDFSEADKSALMDESEDSGVIPGSHSENALHASEEEEGEGGKAQSSLGYIPLMRVVQSVRHTTRKSSTTLREGWVVHYSNKDTLRKRHYWRLDCKCITLFQNNTTNRYYKEIPLSEILTVESAQNFSLVPPGTNPHCFEIVTANATYFVGEMPGGTPGGPSGQGAEAARGWETAIRQALMPVILQDAPSAPGHAPHRQASLSISVSNSQIQENVDIATVYQIFPDEVLGSGQFGVVYGGKHRKTGRDVAVKVIDKLRFPTKQESQLRNEVAILQSLRHPGIVNLECMFETPEKVFVVMEKLHGDMLEMILSSEKGRLPERLTKFLITQILVALRHLHFKNIVHCDLKPENVLLASADPFPQVSYVPS

SEQ ID NO: 742608 - protein, 612 aa, Homo sapiens
MATAPSYPAGLPGSPGPGSPPPPGGLELQSPPPLLPQIPAPGSGVSFHIQIGLTREFVLLPAASELAHVKQLACSIVDQKFPECGFYGLYDKILLFKHDPTSANLLQLVRSSGDIQEGDLVEVVLSASATFEDFQIRPHALTVHSYRAPAFCDHCGEMLFGLVRQGLKCDGCGLNYHKRCAFSIPNNCSGARKRRLSSTSLASGHSVRLGTSESLPCTAEELSRSTTELLPRRPPSSSSSSSASSYTGRPIELDKMLLSKVKVPHTFLIHSYTRPTVCQACKKLLKGLFRQGLQCKDCKFNCHKRCATRVPNDCLGEALINGDVPMEEATDFSEADKSALMDESEDSGVIPGSHSENALHASEEEEGEGGKAQSSLGYIPLMRVVQSVRHTTRKSSTTLREGWVVHYSNKDTLRKRHYWRLDCKCITLFQNNTTNRYYKEIPLSEILTVESAQNFSLVPPGTNPHCFEIVTANATYFVGEMPGGTPGGPSGQGAEAARGWETAIRQALMPVILQDAPSAPGHAPHRQASLSISVSNSQIQENVDIATVYQIFPDEVLGLGCPRTGISVGPVHHRTTTCRGWRSASVFSEVLCPRPAAALHSGSSQDPSNELF

SEQ ID NO: 742609 - protein, 487 aa, Homo sapiens
MATAPSYPAGLPGSPGPGSPPPPGGLELQSPPPLLPQIPAPGSGVSFHIQIGLTREFVLLPAASELAHVKQLACSIVDQKFPECGFYGLYDKILLFKHDPTSANLLQLVRSSGDIQEGDLVEVVLSASATFEDFQIRPHALTVHSYRAPAFCDHCGEMLFGLVRQGLKCDGCGLNYHKRCAFSIPNNCSGARKRRLSSTSLASGHSVRLGTSESLPCTAEELSRSTTELLPRRPPSSSSSSSASSYTGRPIELDKMLLSKVKVPHTFLIHSYTRPTVCQACKKLLKGLFRQGLQCKDCKFNCHKRCATRVPNDCLGEALINGDVPMEEATDFSEADKSALMDESEDSGVIPGSHSENALHASEEEEGEGGKAQSSLGYIPLMRVVQSVRHTTRKSSTTLREGWVVHYSNKDTLRKRHYWRLDCKCITLFQNNTTNRYYKEIPLSEILTVESAQNGWDTWGVGWGELFPRPLPVSPAIKTDSSLAPWP

SEQ ID NO: 742610 - protein, 335 aa, Homo sapiens
MATAPSYPAGLPGSPGPGSPPPPGGLELQSPPPLLPQIPAPGSGVSFHIQIGLTREFVLLPAASELAHVKQLACSIVDQKFPECGFYGLYDKILLFKHDPTSANLLQLVRSSGDIQEGDLVEVVLSASATFEDFQIRPHALTVHSYRAPAFCDHCGEMLFGLVRQGLKCDGCGLNYHKRCAFSIPNNCSGARKRRLSSTSLASGHSVRLGTSESLPCTAEELSRSTTELLPRRPPSSSSSSSASSYTGRPIELDKMLLSKVKVPHTFLIHSYTRPTVCQACKKLLKGLFRQGLQCKDCKFNCHKRCATRVPNDCLGEATYQWRCADGGGHRFQRG

SEQ ID NO: 742611 - protein, 373 aa, Homo sapiens
MATAPSYPAGLPGSPGPGSPPPPGGLELQSPPPLLPQIPAPGSGVSFHIQIGLTREFVLLPAASELAHVKQLACSIVDQKFPECGFYGLYDKILLFKHDPTSANLLQLVRSSGDIQEGDLVEVVLSASATFEDFQIRPHALTVHSYRAPAFCDHCGEMLFGLVRQGLKCDGCGLNYHKRCAFSIPNNCSGARKRRLSSTSLASGHSVRLGTSESLPCTAEELSRSTTELLPRRPPSSSSSSSASSYTGRPIELDKMLLSKVKVPHTFLIHSYTRPTVCQACKKLLKGLFRQGLQCKDCKFNCHKRCATRVPNDCLGEALINGAISARLTRAPSWMSQRTPVSSLAPTQRMRSTPVRRRKAREARPRAPWGTSP

SEQ ID NO: 742612 - protein, 727 aa, Homo sapiens
SAQWPSELFLLDRHTQLASSLSFPSTAGPKPAFQGAAMPYLYRAPGPQAHPVPKDARITHSSGQSFEQMRQECLQRGTLFEDADFPASNSSLFYSERPQIPFVWKRPGEIVKNPEFILGGATRTDICQGELGDCWLLAAIASLTLNQKALARVIPQDQSFGPGYAGIFHFQFWQHSEWLDVVIDDRLPTFRDRLVFLHSADHNEFWSALLEKAYAKLNGSYEALKGGSAIEAMEDFTGGVAETFQTKEAPENFYEILEKALKRGSLLGCFIDTRSAAESEARTPFGLIKGHAYSVTGIDQVSFRGQRIELIRIRNPWGQVEWNGSWSDSSPEWRSVGPAEQKRLCHTALDDGEFWMAFKDFKAHFDKVEICNLTPDALEEDAIHKWEVTVHQGSWVRGSTAGGCRNFLDTFWTNPQIKLSLTEKDEGQEECSFLVALMQKDRRKLKRFGANVLTIGYAIYECPDKDEHLNKDFFRYHASRARSKTFINLREVSDRFKLPPGEYILIPSTFEPHQEADFCLRIFSEKKAITRDMDGNVDIDLPEPPKPTPPDQETEEEQRFRALFEQVAGEDMEVTAEELEYVLNAVLQKKKDIKFKKLSLISCKNIISLMDTSGNGKLEFDEFKVFWDKLKQWINLFLRFDADKSGTMSTYELRTALKAAGFQLSSHLLQLIVLRYADEELQLDFDDFLNCLVRLENASRVFQALSTKNKEFIHLNINEFIHLTMNI

SEQ ID NO: 742613 - protein, 701 aa, Homo sapiens
SAQWPSELFLLDRHTQLASSLSFPSTAGPKPAFQGAAMPYLYRAPGPQAHPVPKDARITHSSGQSFEQMRQECLQRGTLFEDADFPASNSSLFYSERPQIPFVWKRPGEIVKNPEFILGGATRTDICQGELGDCWLLAAIASLTLNQKALARVIPQDQSFGPGYAGIFHFQFWQHSEWLDVVIDDRLPTFRDRLVFLHSADHNEFWSALLEKAYAKLNGSYEALKGGSAIEAMEDFTGGVAETFQTKEAPENFYEILEKALKRGSLLGCFIDTRSAAESEARTPFGLIKGHAYSVTGIDQVSFRGQRIELIRIRNPWGQVEWNGSWSDRMAFKDFKAHFDKVEICNLTPDALEEDAIHKWEVTVHQGSWVRGSTAGGCRNFLDTFWTNPQIKLSLTEKDEGQEECSFLVALMQKDRRKLKRFGANVLTIGYAIYECPDKDEHLNKDFFRYHASRARSKTFINLREVSDRFKLPPGEYILIPSTFEPHQEADFCLRIFSEKKAITRDMDGNVDIDLPEPPKPTPPDQETEEEQRFRALFEQVAGEDMEVTAEELEYVLNAVLQKKKDIKFKKLSLISCKNIISLMDTSGNGKLEFDEFKVFWDKLKQWINLFLRFDADKSGTMSTYELRTALKAAGFQLSSHLLQLIVLRYADEELQLDFDDFLNCLVRLENASRVFQALSTKNKEFIHLNINEFIHLTMNI

SEQ ID NO: 742614 - protein, 154 aa, Homo sapiens
  misc_feature (23)..(23): Xaa can be any naturally occurring amino acid
  misc_feature (30)..(30): Xaa can be any naturally occurring amino acid
TVLSFDDEVKGVCTPVTCTSHPXRRQRMVXLRLTPQEPSQTGVLFRIPSGLGYSESWVSSFVPTGFQLSSHLLQLIVLRYADEELQLDFDDFLNCLVRLENASRKCPARLRVHLGVASSVTLHERMRNSLVKVMAKIDHREPWSDVCGPMGLCG

SEQ ID NO: 742615 - protein, 669 aa, Homo sapiens
SAQWPSELFLLDRHTQLASSLSFPSTAGPKPAFQGAAMPYLYRAPGPQAHPVPKDARITHSSGQSFEQMRQECLQRGTLFEDADFPASNSSLFYSERPQIPFVWKRPGFWQHSEWLDVVIDDRLPTFRDRLVFLHSADHNEFWSALLEKAYAKLNGSYEALKGGSAIEAMEDFTGGVAETFQTKEAPENFYEILEKALKRGSLLGCFIDTRSAAESEARTPFGLIKGHAYSVTGIDQVSFRGQRIELIRIRNPWGQVEWNGSWSDRMAFKDFKAHFDKVEICNLTPDALEEDAIHKWEVTVHQGSWVRGSTAGGCRNFLDTFWTNPQIKLSLTEKDEGQEECSFLVALMQKDRRKLKRFGANVLTIGYAIYECPDKDEHLNKDFFRYHASRARSKTFINLREVSDRFKLPPGEYILIPSTFEPHQEADFCLRIFSEKKAITRDMDGNVDIDLPEPPKPTPPDQETEEEQRFRALFEQVAGEDMEVTAEELEYVLNAVLQKKKDIKFKKLSLISCKNIISLMDTSGNGKLEFDEFKVFWDKLKQWINLFLRFDADKSGTMSTYELRTALKAAGFQLSSHLLQLIVLRYADEELQLDFDDFLNCLVRLENASLHPFDNEHLRLPCRDAACPAESWLLDLDLQNFSWCGTITPRVHSPLIVRPSPFILIWEE

SEQ ID NO: 742616 - protein, 661 aa, Homo sapiens
SAQWPSELFLLDRHTQLASSLSFPSTAGPKPAFQGAAMPYLYRAPGPQAHPVPKDARITHSSGQSFEQMRQECLQRGTLFEDADFPASNSSLFYSERPQIPFVWKRPGFWQHSEWLDVVIDDRLPTFRDRLVFLHSADHNEFWSALLEKAYAKLNGSYEALKGGSAIEAMEDFTGGVAETFQTKEAPENFYEILEKALKRGSLLGCFIDTRSAAESEARTPFGLIKGHAYSVTGIDQVSFRGQRIELIRIRNPWGQVEWNGSWSDRMAFKDFKAHFDKVEICNLTPDALEEDAIHKWEVTVHQGSWVRGSTAGGCRNFLDTFWTNPQIKLSLTEKDEGQEECSFLVALMQKDRRKLKRFGANVLTIGYAIYECPDKDEHLNKDFFRYHASRARSKTFINLREVSDRFKLPPGEYILIPSTFEPHQEADFCLRIFSEKKAITRDMDGNVDIDLPEPPKPTPPDQETEEEQRFRALFEQVAGEDMEVTAEELEYVLNAVLQKKKDIKFKKLSLISCKNIISLMDTSGNGKLEFDEFKVFWDKLKQWINLFLRFDADKSGTMSTYELRTALKAAGFQLSSHLLQLIVLRYADEELQLDFDDFLNCLVRLENASRKCPARLRVHLGVASSVTLHERMRNSLVKVMAKIDHREPWSDVCGPMGLCG

SEQ ID NO: 742617 - protein, 135 aa, Homo sapiens
PVVMGLLLHLLKNFVSSRRPLHVLSHGCAALRSCVHVCGVACVQPVMRRSGRVGGCPGKTDAPGSAPRSSATSPGGERRWGRFVICLRLSPAAVWPPWGKSFTLSVPQCLCEVGGSFWKIKWANTRQMLEHTGTW

SEQ ID NO: 742618 - protein, 319 aa, Homo sapiens
MAGRSDMDPPAAFSGFPALPAVAPSGPPPSPLAGAEPGREPEEAAAGRGEAAPTPAPGPGRRRRRPLQRGKPPYSYIALIAMALAHAPGRRLTLAAIYRFITERFAFYRDSPRKWQNSIRHNLTLNDCFVKVPREPGNPGKGNYWTLDPAAADMFDNGSFLRRRKRFKRAELPAHAAAAPGPPLPFPYAPYAPAPGPALLVPPPSAGPGPSPPARLFSVDSLVNLQPELAGLGAPEPPCCAAPDAAAAAFPPCAAAASPPLYSQVPDRLVLPATRPGPGPLPAEPLLALAGPAAALGPLSPGEAYLRQPGFASGLERYL

SEQ ID NO: 742619 - protein, 130 aa, Homo sapiens
MGVSRSARAPPDGELAGGGGSSSSSLGGTSLSQLRQGKRELRTLTPTHAHTQGSVGWEREGRFSFCSLGLPRAFPAAERDTSSQVKGHSGPGPDPVVTHLGTFPDQLRLPCPPLSRKEPEPSPLSHPPQG

SEQ ID NO: 742620 - protein, 130 aa, Homo sapiens; identical to SEQ ID NO: 742619

SEQ ID NO: 742621 - protein, 96 aa, Homo sapiens
GRRLNEAWDAGAAPRAVSAVPEVWEAPGEASLLQVMMMSDNAKGRAAHSWKKRGSISSLSNHEFWRKEIHGRIKDPGSLWITHTMPFTGGKLTIKE

SEQ ID NO: 742622 - protein, 214 aa, Homo sapiens
GRRLNEAWDAGAAPRAVSAVPEVWEAPGEASLLQVMMMSDNAKGRAAHSWKKRGSISSLSNHEFWRKEIHGRIKDSMSTVSYMEEPSQRDDISRLTVQMENTYQLGPPKHFPVVTVNHILKDVVTSYLQVEEYEPELCRQMTKTISEVIKAQVKDLMIPRYKLIVIVHIGQLNRQSILIGSRCLWDPKSDTFSSYVFRNSSLFALANVYAVYLE

SEQ ID NO: 742623 - protein, 214 aa, Homo sapiens; identical to SEQ ID NO: 742622

SEQ ID NO: 742624 - protein, 107 aa, Homo sapiens
GRRLNEAWDAGAAPRAVSAVPEVWEAPGEASLLQVMMMSDNAKGRAAHSWKKRGSISSLSNHEFWRKEIHGRIKDSMSTVSYMEEPSQRDDISRLTVQMENTYQLGY

SEQ ID NO: 742625 - protein, 43 aa, Homo sapiens
MGWEEREEWVLPALLASQLVNHSSDGQSLSSLALPGPEIPAGA

SEQ ID NO: 742626 - protein, 411 aa, Homo sapiens
MQCSWKAVLLLALASIAIQYTAIRTFTAKSFHTCPGLAEAGLAERLCEESPTFAYNLSRKTHILILATTRSGSSFVGQLFNQHLDVFYLFEPLYHVQNTLIPRFTQGKSPADRRVMLGASRDLLRSLYDCDLYFLENYIKPPPVNHTTDRIFRRGASRVLCSRPVCDPPGPADLVLEEGDCVRKCGLLNLTVAAEACRERSHVAIKTVRVPEVNDLRALVEDPRLNLKVIQLVRDPRGILASRSETFRDTYRLWRLWYGTGRKPYNLDVTQLTTVCEDFSNSVSTGLMRPPWLKGKYMLVRYEDLARNPMKKTEEIYGFLGIPLDSHVARWIQNNTRGDPTLGKHKYGTVRNSAATAEKWRFRLSYDIVAFAQNACQQVLAQLGYKIAASEEELKNPSVSLVEERDFRPFS

SEQ ID NO: 742627 - protein, 411 aa, Homo sapiens; identical to SEQ ID NO: 742626

SEQ ID NO: 742628 - protein, 411 aa, Homo sapiens; identical to SEQ ID NO: 742626

SEQ ID NO: 742629 - protein, 536 aa, Homo sapiens
AGSHRPSWWWSRHHARCGVTRQSWKGEVQPQVKRQKLSLLRFLSAELTRGYFLEHNEAKYTERRERVYTCLRIPRELEKLMVFGIFLCLDAFLYVFTLLPLRVFLALFRLLTLPCYGLRDRRLLQPAQVCDILKGVILVICYFMMHYVDYSMMYHLIRGQSVIKLYIIYNMLEVADRLFSSFGQDILDALFGQQQSLKKETRAHIGVIPHFFMAVLYVFLHAILIMVQATTLNVAFNSHNKSLLTIMMSNNFVEIKGSVFKKFEKNNLFQMSNSDIKERFTNYVLLLIVCLRNMEQFSWNPDHLWVLFPDVCMVIASEIAVDIVKHAFITKFNDITADVYSEYRASLAFDLVSSRQKNAYTDYSDSVARRMGFIPLPLAVLLIRVVTSSIKVQGILSYACVILFYFGLISLKVLNSIVLLGKSCQYVKEAKMEEKLSNPPATCTPGKPSSKSQNKCKPSQGLSTEENLSASITKQPIHQKENIIPLLVTSNSDQFLTTPDGDEKDITQDNSELKHRSSKKDLLEIDRFTICGNRID

SEQ ID NO: 742630 - protein, 536 aa, Homo sapiens; identical to SEQ ID NO: 742629

SEQ ID NO: 742631 - protein, 536 aa, Homo sapiens; identical to SEQ ID NO: 742629

SEQ ID NO: 742632 - protein, 536 aa, Homo sapiens; identical to SEQ ID NO: 742629

SEQ ID NO: 742633 - protein, 536 aa, Homo sapiens; identical to SEQ ID NO: 742629

SEQ ID NO: 742634 - protein, 91 aa, Homo sapiens
QLGLSSTLHGQKGPLSLSTEENLSASITKQPIHQKENIIPLLVTSNSDQFLTTPDGDEKDITQDNSELKHRSSKKDLLEIDRFTICGNRID

SEQ ID NO: 742635 - protein, 333 aa, Homo sapiens
AGSHRPSWWWSRHHARCGVTRQSWKGEVQPQVKRQKLSLLRFLSAELTRGYFLEHNEAKYTERRERVYTCLRIPRELEKLMVFGIFLCLDAFLYVFTLLPLRVFLALFRLLTLPCYGLRDRRLLQPAQVCDILKGVILVICYFMMHYVDYSMMYHLIRGQSVIKLYIIYNMLEVADRLFSSFGQDILDALFGQQQSLKKETRAHIGVIPHFFMAVLYVFLHAILIMVQATTLNVAFNSHNKSLLTIMMSNNFVEIKGSVFKKFEKNNLFQMSNSDIKERFTNYVLLLIVCLRNMEQFSWNPGNSLLTKQCLIILLLSQNHSFTWNKMNIAENS

SEQ ID NO: 742636 - protein, 206 aa, Homo sapiens
MAVKKIAIFGATGQTGLTTLAQAVQAGYEVTVLVRDSSRLPSEGPRPAHVVVGDVLQAADVDKTVAGQDAVIVLLGTRNDLSPTTVMSEGARNIVAAMKAHGVDKVVACTSAFLLWDPTKVPPRLQAVTDDHIRMHKVLRESGLKYVAVMPPHIGDQPLTGAYTVTLDGRGPSRVISKHDLGHFMLRCLTTDEYDGHSTYPSHQYQ

SEQ ID NO: 742637 - protein, 206 aa, Homo sapiens; identical to SEQ ID NO: 742636

SEQ ID NO: 742638 - protein, 209 aa, Homo sapiens
ESSWWLLGPSSWTQECQPTDQALCSSLPTGYEVTVLVRDSSRLPSEGPRPAHVVVGDVLQAADVDKTVAGQDAVIVLLGTRNDLSPTTVMSEGARNIVAAMKAHGVDKVVACTSAFLLWDPTKVPPRLQAVTDDHIRMHKVLRESGLKYVAVMPPHIGDQPLTGAYTVTLDGRGPSRVISKHDLGHFMLRCLTTDEYDGHSTYPSHQYQ

SEQ ID NO: 742639 - protein, 206 aa, Homo sapiens; identical to SEQ ID NO: 742636

SEQ ID NO: 742640 - protein, 206 aa, Homo sapiens; identical to SEQ ID NO: 742636

SEQ ID NO: 742641 - protein, 206 aa, Homo sapiens; identical to SEQ ID NO: 742636

SEQ ID NO: 742642 - protein, 206 aa, Homo sapiens; identical to SEQ ID NO: 742636

SEQ ID NO: 742643 - protein, 206 aa, Homo sapiens; identical to SEQ ID NO: 742636

SEQ ID NO: 742644 - protein, 121 aa, Homo sapiens
VPHLHRESHTCTGSPTPAPESHTCTSAFLLWDPTKVPPRLQAVTDDHIRMHKVLRESGLKYVAVMPPHIGDQPLTGAYTVTLDGRGPSRVISKHDLGHFMLRCLTTDEYDGHSTYPSHQYQ

SEQ ID NO: 742645 - protein, 163 aa, Homo sapiens
MAVKKIAIFGATGQTGLTTLAQAVQAGYEVTVLVRDSSRLPSEGPRPAHVVVGDVLQAADVDKTVAGQDAVIVLLGTRNDLSPTTVMSEGARNIVAAMKAHGVDKVVACTSGDQPLTGAYTVTLDGRGPSRVISKHDLGHFMLRCLTTDEYDGHSTYPSHQYQ

SEQ ID NO: 742646 - protein, 178 aa, Homo sapiens
IRMPPSQMGAESTAQQPVGSRVVVGDVLQAADVDKTVAGQDAVIVLLGTRNDLSPTTVMSEGARNIVAAMKAHGVDKVVACTSAFLLWDPTKVPPRLQAVTDDHIRMHKVLRESGLKYVAVMPPHIGDQPLTGAYTVTLDGRGPSRVISKHDLGHFMLRCLTTDEYDGHSTYPSHQYQ

SEQ ID NO: 742647 - protein, 185 aa, Homo sapiens
MAVKKIAIFGATGQTGLTTLAQAVQAGYEVTVLVRDSSRLPSEGPRPAHVVVGDVLQAADVDKTVAGQDAVIVLLGTRNDLSPTTVMSEGARNIVAAMKAHGVDKVVACTSAFLLWDPTKVPPRLQAVTDDHIRMHKVLRESGLNLDGRGPSRVISKHDLGHFMLRCLTTDEYDGHSTYPSHQYQ

SEQ ID NO: 742648 - protein, 94 aa, Homo sapiens
MAVKKIAIFGATGQTGLTTLAQAVQAGYEVTVLVRDSSRLPSEGPRPAHVVVGDVLQAADVDKTVAGQDAVIVLLGTRNDLSTEPPLCPRPSPT

SEQ ID NO: 742649 - protein, 98 aa, Homo sapiens
FLRHFSKLELSMSLVPFSPRFPFPRVKWFLAYFSRMSIAPSPLQSHRWVAETRSANPATGGVSLNLKKGTSKPTSVNCHVKFDANNVQIMTKIANHAL

SEQ ID NO: 742650 - protein, 88 aa, Homo sapiens
FLIPVELNLTAFPSCKYFSCFPSLPVPDIPLLSCRMAVEVAETPPTSFWGGRGNLVAAPQLVGRELVHVLGESVEQQERFDIHTDIGN

SEQ ID NO: 742651 - protein, 106 aa, Homo sapiens
GCGPTSVVRELHGPAQAYRKQQGQLHLPATLPASSCTPGRQMQPLPPSLTHQERGLRLPRSRATFETLVPGTWEPWACARSQGATGGGDRPWPESPPPQTPHGSVL

SEQ ID NO: 742652 - protein, 132 aa, Homo sapiens
MVEAFCATWKLTNSQNFDEYMKALGVGFATRQVGNVTKPTVIISQEGDKVVIRTLSTFKNTEISFQLGEEFDETTADDRNCKSVVSLDGDKLVHIQKWDGKETNFVREIKDGKMVMTLTFGDVVAVRHYEKA

SEQ ID NO: 742653 - protein, 132 aa, Homo sapiens; identical to SEQ ID NO: 742652

SEQ ID NO: 742654 - protein, 132 aa, Homo sapiens; identical to SEQ ID NO: 742652

SEQ ID NO: 742655 - protein, 166 aa, Homo sapiens
MVEAFCATWKLTNSQNFDEYMKALGVGFATRQVGNVTKPTVIISQEGDKVVIRTLSTFKNTEISFQLGEEFDETTADDRNCKSVVSLDGDKLVHIQKWDGKETNFVREIKDGKMVMVSNDNSPFFLVFFSSPHTSHLLPSSSLLLPFFLLPSFFNNTSLARFFNYM

SEQ ID NO: 742656 - protein, 81 aa, Homo sapiens
GTIIWLPVHETKVQKQFFLTWDLPKNTPICAPVGMLADFIPTVNLEAVLKPSSSPKTYLQSLSTKVWEQSCPPRNLEGEMP

SEQ ID NO: 742657 - protein, 97 aa, Homo sapiens
MVGCVYRLPLSSHAHDRRVWMYFTGSFSEAKWFYFVLTSALWCLIHANVVPFQLVITGCCYKDMAKTLFNLLKKKKKMTKKKTKKKKLPALFFFLFF

SEQ ID NO: 742658 - protein, 803 aa, Homo sapiens
MIPVTEFRQFSEQQPAFRVLKPWWDVFTDYLSVAMLMIGVFGCTLQVMQDKIICLPKRVQPAQNHSSLSNVSQAVASTTPLPPPKPSPANPITVEMKGLKTDLDLQQYSFINQMCYERALHWYAKYFPYLVLIHTLVFMLCSNFWFKFPGSSSKIEHFISILGKCFDSPWTTRALSEVSGEDSEEKDNRKNNMNRSNTIQSGPEGSLVNSQSLKSIPEKFVVDKSTAGALDKKEGEQAKALFEKVKKFRLHVEEGDILYAMYVRQTVLKVIKFLIIIAYNSALVSKVQFTVDCNVDIQDMTGYKNFSCNHTMAHLFSKLSFCYLCFVSIYGLTCLYTLYWLFYRSLREYSFEYVRQETGIDDIPDVKNDFAFMLHMIDQYDPLYSKRFAVFLSEVSENKLKQLNLNNEWTPDKLRQKLQTNAHNRLELPLIMLSGLPDTVFEITELQSLKLEIIKNVMIPATIAQLDNLQELSLHQCSVKIHSAALSFLKENLKVLSVKFDDMRELPPWMYGLRNLEELYLVGSLSHDISRNVTLESLRDLKSLKILSIKSNVSKIPQAVVDVSSHLQKMCIHNDGTKLVMLNNLKKMTNLTELELVHCDLERIPHAVFSLLSLQELDLKENNLKSIEEIVSFQHLRKLTVLKLWHNSITYIPEHIKKLTSLERLSFSHNKIEVLPSHLFLCNKIRYLDLSYNDIRFIPPEIGVLQSLQYFSITCNKVESLPDELYFCKKLKTLKIGKNSLSVLSPKIGNLLFLSYLDVKGNHFEILPPELGDCRALKRAGLVVEDALFETLPSDVREQMKTE

SEQ ID NO: 742659 - protein, 141 aa, Homo sapiens
PLWARTNGLSLGGAAVGRPGPIRGAGGQSVGGAARARARNCPGAVAYGKTGEELRLCPVGAGGAAGRRLQLQLRREGSLAGPSSPTPGALRQGRAVQRASVLSVGLEPITESNPRAEESEDSQLAAAPSSACAPPIEGVLI

SEQ ID NO: 742660 - protein, 142 aa, Homo sapiens
PLWARTNGLSLGGAAVGRPGPIRGAGGQSVGGAARARARNCPGAVAYGKTGEELRLCPVGAGGAAGRRLQLQLRREGSLAGPSSPTPGALRQGRAVQRASVLSVGSQASITIQELQACSVYQHGITNHIASGQESHFIAKEP

SEQ ID NO: 742661 - protein, 141 aa, Homo sapiens; identical to SEQ ID NO: 742659

SEQ ID NO: 742662 - protein, 77 aa, Homo sapiens
AVSTRVRVCMRNVGCEHACLSLRADVGCEHACPSLRADVGCDVYCCTPGGGTTVSRGDCVLNVGGTASLFSVAAVAT

SEQ ID NO: 742663 - protein, 379 aa, Homo sapiens
MARRSAFPAAALWLWSILLCLLALRAEAGPPQEESLYLWIDAHQARVLIGFEEDILIVSEGKMAPFTHDFRKAQQRMPAIPVNIHSMNFTWQAAGQAEYFYEFLSLRSLDKGIMADPTVNVPLLGTVPHKASVVQVGFPCLGKQDGVAAFEVDVIVMNSEGNTILQTPQNAIFFKTCQQAECPGGCRNGGFCNERRICECPDGFHGPHCEKALCTPRCMNGGLCVTPGFCICPPGFYGVNCDKANCSTTCFNGGTCFYPGKCICPPGLEGEQCEISKCPQPCRNGGKCIGKSKCKCSKGYQGDLCSKPVCEPGCGAHGTCHEPNKCQCQEGWHGRHCNKRYEASLIHALRPAGAQLRQHTPSLKKAEERRDPPESNYIW

SEQ ID NO: 742664 - protein, 379 aa, Homo sapiens; identical to SEQ ID NO: 742663

SEQ ID NO: 742665 - protein, 379 aa, Homo sapiens; identical to SEQ ID NO: 742663

SEQ ID NO: 742666 - protein, 379 aa, Homo sapiens; identical to SEQ ID NO: 742663

SEQ ID NO: 742667 - protein, 82 aa, Homo sapiens
  misc_feature (7)..(7): Xaa can be any naturally occurring amino acid
EGGKTIXNQANAHNPVEMEVNALVKANVSVPKVTRETSVQSLSASLAVVHMEPAMNPTNANVKKVGMEDTAIKGTKPASYMP

SEQ ID NO: 742668 - protein, 132 aa, Homo sapiens
  misc_feature (1)..(1): Xaa can be any naturally occurring amino acid
XSERGVNCDKANCSTTCFNGGTCFYPGKCICPPGLEGEQCEISKCPQPCRNGGKCIGKSKSVCEPGCGAHGTCHEPNKCQCQEGWHGRHCNKRYEASLIHALRPAGAQLRQHTPSLKKAEERRDPPESNYIW

SEQ ID NO: 742669 - protein, 320 aa, Homo sapiens
  misc_feature (315)..(317): Xaa can be any naturally occurring amino acid
MARRSAFPAAALWLWSILLCLLALRAEAGPPQEESLYLWIDAHQARVLIGFEEDILIVSEGKMAPFTHDFRKAQQRMPAIPVNIHSMNFTWQAAGQAEYFYEFLSLRSLDKGIMADPTVNVPLLGTVPHKASVVQVGFPCLGKQDGVAAFEVDVIVMNSEGNTILQTPQNAIFFKTCQQAECPGGCRNGGFCNERRICECPDGFHGPHCEKALCTPRCMNGGLCVTPGFCICPPGFYGVNCDKANCSTTCFNGGTCFYPGKCICPPGLEGEQCEISKCPQPCRNGGKCIGKSKCKCSKGYQGDLCSKLFGAWVGXXXEPA

SEQ ID NO: 742670 - protein, 107 aa, Homo sapiens
MSRQLSLVRASRLLHPLCPITDPVADINSQAHVLVSFPPPARHQCLVWPNASAAPRQNHFCQPAQLQFGFWSSPIYGQRRGVDSFSQHKFVSSFHPFPRGKISKPKG

SEQ ID NO: 742671 - protein, 347 aa, Homo sapiens
MALLFSLILAICTRPGFLASPSGVRLVGGLHRCEGRVEVEQKGQWGTVCDDGWDIKDVAVLCRELGCGAASGTPSGILYEPPAEKEQKVLIQSVSCTGTEDTLAQCEQEEVYDCSHDEDAGASCENPESSFSPVPEGVRLADGPGHCKGRVEVKHQNQWYTVCQTGWSLRAAKVVCRQLGCGRAVLTQKRCNKHAYGRKPIWLSQMSCSGREATLQDCPSGPWGKNTCNHDEDTWVECEDPFDLRLVGGDNLCSGRLEVLHKGVWGSVCDDNWGEKEDQVVCKQLGCGKSLSPSFRDRKCYGPGVGRIWLDNVRCSGEEQSLEQCQHRFWGFHDCTHQEDVAVICSG

SEQ ID NO: 742672 - protein, 347 aa, Homo sapiens; identical to SEQ ID NO: 742671

SEQ ID NO: 742673 - protein, 351 aa, Homo sapiens
SCHGSEASPAMWNSICTRPGFLASPSGVRLVGGLHRCEGRVEVEQKGQWGTVCDDGWDIKDVAVLCRELGCGAASGTPSGILYEPPAEKEQKVLIQSVSCTGTEDTLAQCEQEEVYDCSHDEDAGASCENPESSFSPVPEGVRLADGPGHCKGRVEVKHQNQWYTVCQTGWSLRAAKVVCRQLGCGRAVLTQKRCNKHAYGRKPIWLSQMSCSGREATLQDCPSGPWGKNTCNHDEDTWVECEDPFDLRLVGGDNLCSGRLEVLHKGVWGSVCDDNWGEKEDQVVCKQLGCGKSLSPSFRDRKCYGPGVGRIWLDNVRCSGEEQSLEQCQHRFWGFHDCTHQEDVAVICSG

SEQ ID NO: 742674 - protein, 71 aa, Homo sapiens
RQLGCGRAVLTQKRCNKHAYGRKPIWLSQMSCSGREATLQDCPSGPWGKNTCNHDEDTWVECEGNACASKD

SEQ ID NO: 742675 - protein, 94 aa, Homo sapiens
LRTVGACGVGGRERSGFGGGGGEERVLRVGGRSGGVEPGRACRVQTRDGRSWEVALWAELRGAGSYGAGLVGLFQTEARGSTRSVLDQPLKLQL

SEQ ID NO: 742676 - protein, 470 aa, Homo sapiens
GKRSEGVPVSGPMLIEKAKDFYEQMQLTEPCVFSGGWLWRFKARHGIKKLDASSEKQSADHQAAEQFCAFFRSLAAEHGLSAEQVYNADETGLFWRCLPNPTPEGGAVPGPKQGKDRLTVLMCANATGSHRLKPLAIGKCSGPRAFKGIQHLPVAYKAQGNAWVDKEIFSDWFHHIFVPSVREHFRTIGLPEDSKAVLLLDSSRAHPQEAELVSSNVFTIFLPASVASLVQPMEQGIRRDFMRNFINPPVPLQGPHARYNMNDAIFSVACAWNAVPSHVFRRAWRKLWPSVAFAEGSSSEEELEAECFPVKPHNKSFAHILELVKEGSSCPGQLRQRQAASWGVAGREAEGGRPPAATSPAEVVWSSEKTPKADQDGGGDPGEGEEVAWEQAAVAFDAVLRFAERQPCFSAQEVGQLRALRAVFRSQQQVRRRRGALGAVVKVEALQEGPGGCGATAQSPLPCSSTAGDN

SEQ ID NO: 742677 - protein, 458 aa, Homo sapiens
GKRSEGVPVSGPMLIEKAKDFYEQMQLTEPCVFSGGWLWRFKARHGIKKLDASSEKQSADHQAAEQFCAFFRSLAAEHGLSAEQVYNADETGLFWRCLPNPTPEGGAVPGPKQGKDRLTVLMCANATGSHRLKPLAIGKCSGPRAFKGIQHLPVAYKAQGNAWVDKEIFSDWFHHIFVPSVREHFRTIGLPEDSKAVLLLDSSRAHPQEAELVSSNVFTIFLPASVASLVQPMEQGIRRDFMRNFINPPVPLQGPHARYNMNDAIFSVACAWNAVPSHVFRRAWRKLWPSVAFAEGSSSEEELEAECFPVKPHNKSFAHILELVKEGSSCPGQLRQRQAASWGVAGREAEGGRPPAATSPAEVVWSSEKTPKADQDGGGDPGEGEEVAWEQAAVAFDAVLRFAERQPCFSAQEVGQLRALRAVFRSQQQETVGLEDVVVTSPEELAIPKCCLEASTET

SEQ ID NO: 742678 - protein, 1205 aa, Homo sapiens
MHVVCIPASAVDSTETSVLMKEEDLARCGFSYFHISVDTGAKVIADRALSMSWKCVFLALNACVKIIKAKEFLKISVLNDSPSSHLCPIVFVVSPALFASLSGELLHIMYFVPFLGSRVTPNESLLTKTAGLQLLEATQEVRTCPEGSETVGHPGWVELGRAWAGQLAELLAGSPESSGHGLSLSDCSSSGPELFPFLTCSCADCAGLMGRRLSPVSGCVLRVPLFQTNCSKAWSLTLGAALVAGIPCATQGTRALLLLQPLLTWARCWSEVFREPRAYSSLSCWAQLPGAYLLPRSCPPERFMETAVPPSTLFSLPDPSQKLKWLNVLASESFSPSLSGGAPLYQTPQHSSVRLCLFTLFLGLLRPLGSPGACQSRARKSLVLFKCLRVLSVSTRLEPLPVFSQCPCKLQPQFSSGSWGEQVLRHMVWDLCGCFQPANRTSFHHCLHLWGGTPECSGLRALLCPHSGQAASTLGAPIPRDAQERPYFQGGMVNSGVRMGRWSFSPFYVGVGLQNTCPACASLAFCEHPRHAVLEVVCLLHRRVRADLALGLSVRDFHMLHSCSAMAEHAMESTWTAPDVAGHCSYPVGQVIDVLVVGLIGRKEVAAPAHGFPSSLGLEDCHQLSPVKVHLEEVQGPQWLDVLVEGHGLRQGFAEGVDCIHSWEAVAQGSDNLGQIKTRPHCTSGTSPHAPHKCAYWGSGCGGFCLKSQYSGRPRQEDHFSSGVCNQPGQHRETPSLQKVKENEPGVVACACNPSYSGGRGGRIPKPRSLGCSELWPLHSSLGDRVRDQSLKTKNNKMCFGVRCGDQGRGGHEVGRGQDVDSHGLVGVAAVGVGGGLGGRAWAGLLHFCCLPSPLWVRGLSLTRAELSGTALDSAAYWEAGENGPVRPCLSSSLPSSCRPQAWLSAGPGAAAMAATSLPHEPQLPAPHAHSFAHVVSALASASTHGPSDLAHLLFPLQGSDDDMNEVGSLLFRDETGAQGGAGVKLLRAEGDPGLPAPNDQPHVLHCSLPAVHQLHDLEQLHSTVNRGENTPLPTVLGATLVGGLEPPFSSVVVLSLCIWVWPLLGPGLLGSTMASLLKALHPGADCGRPTGHGWALSQRACQHGHFHTQAGWEASYEVLKGPLCLQVAPSHTGEDRWASLVAKGTEVQSRECVAQCQHGLLWGQASCPGPKPPQAKACPWAHFLSRGLGFPISDVCERKACPLG

SEQ ID NO: 742679 - protein, 109 aa, Homo sapiens
MGRRLSPVSGCVLRVPLFQTNCSKAWSLTLGAALVAGIPCATQGTRALLLLQPLLTWARCWSEVFREPRAYSSLSCWAQLPGAYLLPRSCPPERFMETAVSSEHFVFTS

SEQ ID NO: 742680 - protein, 1205 aa, Homo sapiens; identical to SEQ ID NO: 742678

SEQ ID NO: 742681 - protein, 470 aa, Homo sapiens; identical to SEQ ID NO: 742676

SEQ ID NO: 742682 - protein, 470 aa, Homo sapiens; identical to SEQ ID NO: 742676

SEQ ID NO: 742683 - protein, 204 aa, Homo sapiens
MEAAGSPAATETGKYIASTQRPDGTWRKQRRVKEGYVPQEEVPVYENKYVKFFKSKPELPPGLSPEATAPVTPSRPEGGEPGLSKTAKRNLKRKEKRRQQQEKGEAEALSRTLDKVSLEETAQLPSAPQGSRAAPTAASDQPDSAATTEKAKKIKNLKKKLRQVEELQQRIQAGEVSQPSKEQLEKLARRRALEEELEDLELGL

SEQ ID NO: 742684 - protein, 198 aa, Homo sapiens
MQALSNGKYIASTQRPDGTWRKQRRVKEGYVPQEEVPVYENKYVKFFKSKPELPPGLSPEATAPVTPSRPEGGEPGLSKTAKRNLKRKEKRRQQQEKGEAEALSRTLDKVSLEETAQLPSAPQGSRAAPTAASDQPDSAATTEKAKKIKNLKKKLRQVEELQQRIQAGEVSQPSKEQLEKLARRRALEEELEDLELGL

SEQ ID NO: 742685 - protein, 198 aa, Homo sapiens; identical to SEQ ID NO: 742684

SEQ ID NO: 742686 - protein, 203 aa, Homo sapiens
MATPYVTDETGGKYIASTQRPDGTWRKQRRVKEGYVPQEEVPVYENKYVKFFKSKPELPPGLSPEATAPVTPSRPEGGEPGLSKTAKRNLKRKEKRRQQQEKGEAEALSRTLDKVSLEETAQLPSAPQGSRAAPTAASDQPDSAATTEKAKKIKNLKKKLRQVEELQQRIQAGEVSQPSKEQLEKLARRRALEEELEDLELGL

SEQ ID NO: 742687 - protein, 195 aa, Homo sapiens
MKIGKYIASTQRPDGTWRKQRRVKEGYVPQEEVPVYENKYVKFFKSKPELPPGLSPEATAPVTPSRPEGGEPGLSKTAKRNLKRKEKRRQQQEKGEAEALSRTLDKVSLEETAQLPSAPQGSRAAPTAASDQPDSAATTEKAKKIKNLKKKLRQVEELQQRIQAGEVSQPSKEQLEKLARRRALEEELEDLELGL

SEQ ID NO: 742688 - protein, 195 aa, Homo sapiens; identical to SEQ ID NO: 742687

SEQ ID NO: 742689 - protein, 204 aa, Homo sapiens; identical to SEQ ID NO: 742683

SEQ ID NO: 742690 - protein, 102 aa, Homo sapiens
MEAAGSPAATETASPLFLLLHLRPEMVHSPFKTKMVACYDRDSTSGGEGGGTPARSRRKWFAFSRWRLPMLLTRPAGWEPPNLSLLFDFTLGYHQGQRMEPR

SEQ ID NO: 742691 - protein, 198 aa, Homo sapiens
MLSAFQRLFRVLFVIETVSEYGVLIFIYGWPFLQTLAMLLIGTVSFHLWIRRNRERNSRSGKTRCRSKRSGAEHGHWERVLSARTVVDPASKLSLHQWLFPLGRGQEGTHLPACTHTFADLGGQTNLIRWSGSRYGQSCLVRPQPARPALCVVGRATSSRRRGGCDAFTRRPFAHGGFPEECVPPPGGVLYPGGKRGP

SEQ ID NO: 742692 - protein, 103 aa, Homo sapiens
RDRLTELSRAPWGTRHDPPPWSQRNLGPRNRKGPRRHFSTRCRMTPPEQMTAPKLLGLVFMMVYKLFINRQGLQTYFFLDTPTVRPRRPVVLVCWPRTRRPQK

SEQ ID NO: 742693 - protein, 198 aa, Homo sapiens
  misc_feature (8)..(8): Xaa can be any naturally occurring amino acid
DAWVDPRXRTHACGEAAAGKMADGKAGDEKPEKSQRAGAAGGPEEEAEKPVKTKTVSSSNGGESSSRSAEKRSAEEEAADLPTKPTKISKFGFAIGSQTTKKASAISIKLGSSKPKETVPTLAPKTLSVAAAFNEDEDSEPEEMPPEAKMRMKNIGRDTPTSAGPNSFNKGKHGFSDNQKLWERNIKSHLGNVHDQDN

SEQ ID NO: 742694 - protein, 71 aa, Homo sapiens
TSLAWLQGEAAAGKMADGKAGDEKPEKSQRAGAAGVMEGKVPVAALRSDQLKKKLPTSQQSLQRSPSLDLP

SEQ ID NO: 742695 - protein, 71 aa, Homo sapiens
VSSPPTPREAAAGKMADGKAGDEKPEKSQRAGAAGVMEGKVPVAALRSDQLKKKLPTSQQSLQRSPSLDLP

SEQ ID NO: 742696 - protein, 198 aa, Homo sapiens; identical to SEQ ID NO: 742693
  misc_feature (8)..(8): Xaa can be any naturally occurring amino acid

SEQ ID NO: 742697 - protein, 82 aa, Homo sapiens
  misc_feature (8)..(8): Xaa can be any naturally occurring amino acid
TRGSTHAXGPTRAGRPRRGKWRTGRRETRSLKSRSELEPPEVYKLFINRQGLQTYFFLDTPTVRPRRPVVLVCWPRTRRPQK

SEQ ID NO: 742698 - protein, 70 aa, Homo sapiens
  misc_feature (8)..(8): Xaa can be any naturally occurring amino acid
TRGSTHAXGPTRAGRPRRGKWRTGRRETRSLKSRSELEPPELIHGSLFYCHTISVPAVYSNKQWKRLLGQ

SEQ ID NO: 742699 - protein, 158 aa, Homo sapiens
MLFEVAAPINLLSKNSSSCNGGESSSRSAEKRSAEEEAADLPTKPTKISKFGFAIGSQTTKKASAISIKLGSSKPKETVPTLAPKTLSVAAAFNEDEDSEPEEMPPEAKMRMKNIGRDTPTSAGPNSFNKGKHGFSDNQKLWERNIKSHLGNVHDQDN

SEQ ID NO: 742700 - protein, 132 aa, Homo sapiens
TAKARETHTRRPADLPTKPTKISKFGFAIGSQTTKKASAISIKLGSSKPKETVPTLAPKTLSVAAAFNEDEDSEPEEMPPEAKMRMKNIGRDTPTSAGPNSFNKGKHGFSDNQKLWERNIKSHLGNVHDQDN

SEQ ID NO: 742701 - protein, 198 aa, Homo sapiens; identical to SEQ ID NO: 742693
  misc_feature (8)..(8): Xaa can be any naturally occurring amino acid

SEQ ID NO: 742702 - protein, 126 aa, Homo sapiens
  misc_feature (8)..(8): Xaa can be any naturally occurring amino acid
TRGSTHAXGPTRAGRPRRGKWRTGRRETRSLKSRSELEPPEKPKETVPTLAPKTLSVAAAFNEDEDSEPEEMPPEAKMRMKNIGRDTPTSAGPNSFNKGKHGFSDNQKLWERNIKSHLGNVHDQDN

SEQ ID NO: 742703 - protein, 198 aa, Homo sapiens; identical to SEQ ID NO: 742693
  misc_feature (8)..(8): Xaa can be any naturally occurring amino acid

SEQ ID NO: 742704 - protein, 82 aa, Homo sapiens; identical to SEQ ID NO: 742697
  misc_feature (8)..(8): Xaa can be any naturally occurring amino acid

SEQ ID NO: 742705 - protein, 150 aa, Homo sapiens
  misc_feature (8)..(8): Xaa can be any naturally occurring amino acid
DAWVDPRXRTHACGEAAAGKMADGKAGDEKPEKSQRAGAAGGPEEEAEKPVKTKTVSSSNGGESSSRSAEKRSAEEEAADLPTKPTKISKFGFAIGSQTTKKASAISIKLGSSKPKETVPTLAPKTLSVAAAFNEDEDGYTNISWTKLLQ

SEQ ID NO: 742706 - protein, 101 aa, Homo sapiens
  misc_feature (8)..(8): Xaa can be any naturally occurring amino acid
TRGSTHAXGPTRAGRPRRGKWRTGRRETRSLKSRSELEPPESEPEEMPPEAKMRMKNIGRDTPTSAGPNSFNKGKHGFSDNQKLWERNIKSHLGNVHDQDN

SEQ ID NO: 742707 - protein, 82 aa, Homo sapiens; identical to SEQ ID NO: 742697
  misc_feature (8)..(8): Xaa can be any naturally occurring amino acid

SEQ ID NO: 742708 - protein, 125 aa, Homo sapiens
  misc_feature (8)..(8): Xaa can be any naturally occurring amino acid
DAWVDPRXRTHACGEAAAGKMADGKAGDEKPEKSQRAGAAGGPEEEAEKPVKTKTVSSSNGGESSSRSAEKRSAEEEAADLPTKPTKISKFGFAIGSQTTKKASAISIKLGSSGYTNISWTKLLQ

SEQ ID NO: 742709 - protein, 198 aa, Homo sapiens; identical to SEQ ID NO: 742693
  misc_feature (8)..(8): Xaa can be any naturally occurring amino acid

SEQ ID NO: 742710 - protein, 82 aa, Homo sapiens; identical to SEQ ID NO: 742697
  misc_feature (8)..(8): Xaa can be any naturally occurring amino acid

SEQ ID NO: 742711 - protein, 82 aa, Homo sapiens; identical to SEQ ID NO: 742697
  misc_feature (8)..(8): Xaa can be any naturally occurring amino acid

SEQ ID NO: 742712 - protein, 629 aa, Homo sapiens
MLWTSGPFCRVPSEAGNLCSTLRLSREALGGDTELQTNIRARGCGTEERRRPLGTEVGPGLELSWRGWRWCRSHAVVGTELRAGGRGSAEGAGRERARGVGQRLAPTATDYSLRPPLFVAVTCFRQSTRSSLLGACLRVLRLSCFSLSILLCLSLPSLGAGASSGLRRMRPADLPPRPMEESPASSSAPTETEEPGSSAEVMEEVTTCSFNSPLFRQEDDRGITYRIPALLYIPPTHTFLAFAEKRSTRRDEDALHLVLRRGLRIGQLVQWGPLKPLMEATLPGHRTMNPCPVWEQKSGCVFLFFICVRGHVTERQQIVSGRNAARLCFIYSQDAGCSWSEVRDLTEEVIGSELKHWATFAVGPGHGIQLQSGRLVIPAYTYYIPSWFFCFQLPCKTRPHSLMIYSDDLGVTWHHGRLIRPMVTVECEVAEVTGRAGHPVLYCSARTPNRCRAEALSTDHGEGFQRLALSRQLCEPPHGCQGSVVSFRPLEIPHRCQDSSSKDAPTIQQSSPGSSLRLEEEAGTPSESWLLYSHPTSRKQRVDLGIYLNQTPLEAACWSRPWILHCGPCGYSDLAALEEEGLFGCLFECGTKQECEQIAFRLFTHREILSHLQGDCTSPGRNPSQFKSN

SEQ ID NO: 742713 - protein, 338 aa, Homo sapiens
MLWTSGPFCRVPSEAGNLCSTLRLSREALGGDTELQTNIRARGCGTEERRRPLGTEVGPGLELSWRGWRWCRSHAVVGTELRAGGRGSAEGAGRERARGVGQRLAPTATDYSLRPPLFVAVTCFRQSTRSSLLGACLRVLRLSCFSLSILLCLSLPSLGAGASSGLRRMRPADLPPRPMEESPASSSAPTETEEPGSSAEVMEEVTTCSFNSPLFRQEDDRGITYRIPALLYIPPTHTFLAFAEKRSTRRDEDALHLVLRRGLRIGQLVQVTLHPRSESGPQFLFTKLRALQDLCLFSSVQESPVWGAEAEKTAKTMALTECLLCARGTLGPHSHSVS

SEQ ID NO: 742714 - protein, 461 aa, Homo sapiens
MRPADLPPRPMEESPASSSAPTETEEPGSSAEVMEEVTTCSFNSPLFRQEDDRGITYRIPALLYIPPTHTFLAFAEKRSTRRDEDALHLVLRRGLRIGQLVQWGPLKPLMEATLPGHRTMNPCPVWEQKSGCVFLFFICVRGHVTERQQIVSGRNAARLCFIYSQDAGCSWSEVRDLTEEVIGSELKHWATFAVGPGHGIQLQSGRLVIPAYTYYIPSWFFCFQLPCKTRPHSLMIYSDDLGVTWHHGRLIRPMVTVECEVAEVTGRAGHPVLYCSARTPNRCRAEALSTDHGEGFQRLALSRQLCEPPHGCQGSVVSFRPLEIPHRCQDSSSKDAPTIQQSSPGSSLRLEEEAGTPSESWLLYSHPTSRKQRVDLGIYLNQTPLEAACWSRPWILHCGPCGYSDLAALEEEGLFGCLFECGTKQECEQIAFRLFTHREILSHLQGDCTSPGRNPSQFKSN

SEQ ID NO: 742715 - protein, 226 aa, Homo sapiens
MLWTSGPFCRVPSEAGNLCSTLRLSREALGGDTELQTNIRARGCGTEERRRPLGTEVGPGLELSWRGWRWCRSHAVVGTELRAGGRGSAEGAGRERARGVGQRLAPTATDYSLRPPLFVAVTCFRQSTRSSLLGACLRVLRLSCFSLSILLCLSLPSLGAGASSGLRRMRPADLPPRPMEESPASSSAPTETEEPGSSAAPDLCETFWVAMPESPSILLLSSTRSA

SEQ ID NO: 742716 - protein, 309 aa, Homo sapiens
GRPGRRRARVDGVRLHDPTGAGGQQRGGGHRAVVVRVLAGRRAAAAAHVRVAAVGRQVGHRVAGQGHAVHVARQVAVHHAQAALQRQAVGRAREAAGRALEAVGVREVVEAEPVHHAVHGLERLAFPSEAARPPPKGALLEHELAGRVDGPVVALAGPPKALGELDEALVEREVVAHGVLPALVGAPEEGEAALQELVDLAQRQALGGGTLDGHDDERDVGIGRLLRAPDAGVGLLGLGRAGRRGVHGRAASPAAAAAAAVRWLLLLGRRRHRVAAAAAAAAAAALRRGPSCRIRHEVLPLFEYLSLST

SEQ ID NO: 742717 - protein, 109 aa, Homo sapiens
TAAEFAPPVGAAMPGAGSWSASQNRTKAKTKPSLRSRNRTDVAGESQIFPAVLVNTIEQGSEANIIRWLDSDTSRSSLGSKVLLSGFSPALPKMIDYAGPTGCPAIPNK

SEQ ID NO: 742718 - protein, 123 aa, Homo sapiens
PSAPVESALVSVYVHLDFPDKTWPPELSRTLTLPAASASSSPRPLLTGLRLTTECNVNHKGNFYCACLSGYQWNTSICLHYPPCQSLHNHQPCGCLVFSHPEPGYCQLLPPGEEGWELGNQWP

SEQ ID NO: 742719 - protein, 168 aa, Homo sapiens
KLTRQDQNPGQPHPALPCHWRSMATGAWVLAKLQTSLPTVSSFLFSQGSVSLSGNSEIFLVPPTPHSNPGRTLGLRQHHRAAAGGAWHSSLAENMKLLLWGLALVTPMWQPLFRLFNNLENAYNSAGSFISGFRNTMPWGLLPAKSEIPLVTVTEDVSLFLEGALVSG

SEQ ID NO: 742720 - protein, 146 aa, Homo sapiens
LILVPGFWFTGARGPSWLPGCQQGLGREIHRPRLISSLLRGLSSPDRPSCVQWLLEESVGTVAWRLVAGRLVPSDLVLAVGVAAPAAFPTRLGAEPVAKRPMPLGCLRVRALPLCPNGCSQMKETEGQGRCQVDQSFLRSAITMKW

SEQ ID NO: 742721 - protein, 133 aa, Homo sapiens
SEAGVGCCSLLRAQGSRGFSGAGWRPRQAAAMNFSEVFKLSSLLCKFSPDGKYLASCVQYRLVVRDVNTLQILQLYTCLDQIQHIEWSADSLFILCAMYKRGLVQVCAAVSLRIWTPSEGPWEGGVLFCAFLV

SEQ ID NO: 742722 - protein, 466 aa, Homo sapiens
SEAGVGCCSLLRAQGSRGFSGAGWRPRQAAAMNFSEVFKLSSLLCKFSPDGKYLASCVQYRLVVRDVNTLQILQLYTCLDQIQHIEWSADSLFILCAMYKRGLVQVWSLEQPEWHCKIDEGSAGLVASCWSPDGRHILNTTEFHLRITVWSLCTKSVSYIKYPKACLQGITFTRDGRYMALAERRDCKDYVSIFVCSDWQLLRHFDTDTQDLTGIEWAPNGCVLAVWDTCLEYKILLYSLDGRLLSTYSAYEWSLGIKSVAWSPSSQFLAVGSYDGKVRILNHVTWKMITEFGHPAAINDPKIVVYKEAEKSPQLGLGCLSFPPPRAGAGPLPSSESKYEIASVPVSLQTLKPVTDRANPKIGIGMLAFSPDSYFLATRNDNIPNAVWVWDIQKLRLFAVLEQLSPVRAFQWDPQQPRLAICTGGSRLYLWSPAGCMSVQVPGEGKHIPEATDVAALLCAVWHHTG

SEQ ID NO: 742723 - protein, 491 aa, Homo sapiens
SEAGVGCCSLLRAQGSRGFSGAGWRPRQAAAMNFSEVFKLSSLLCKFSPDGKYLASCVQYRLVVRDVNTLQILQLYTCLDQIQHIEWSADSLFILCAMYKRGLVQVWSLEQPEWHCKIDEGSAGLVASCWSPDGRHILNTTEFHLRITVWSLCTKSVSYIKYPKACLQGITFTRDGRYMALAERRDCKDYVSIFVCSDWQLLRHFDTDTQDLTGIEWAPNGCVLAVWDTCLEYKILLYSLDGRLLSTYSAYEWSLGIKSVAWSPSSQFLAVGSYDGKVRILNHVTWKMITEFGHPAAINDPKIVVYKEAEKSPQLGLGCLSFPPPRAGAGPLPSSESKYEIASVPVSLQTLKPVTDRANPKIGIGMLAFSPDSYFLATRNDNIPNAVWVWDIQKLRLFAVLEQLSPVRAFQWDPQQPRLAICTGGSRLYLWSPAGCMSVQVPGEGDFAVLSLCWHLSGDSMALLSKDHFCLCFLETEAVVGTACRQLGGHT

SEQ ID NO: 742724 - protein, 340 aa, Homo sapiens
SEAGVGCCSLLRAQGSRGFSGAGWRPRQAAAMNFSEVFKLSSLLCKFSPDGKYLASCVQYRLVVRDVNTLQILQLYTCLDQIQHIEWSADSLFILCAMYKRGLVQVWSLEQPEWHCKIDEGSAGLVASCWSPDGRHILNTTEFHLRITVWSLCTKSVSYIKYPKACLQGITFTRDGRYMALAERRDCKDYVSIFVCSDWQLLRHFDTDTQDLTGIEWAPNGCVLAVWDTCLEYKILLYSLDGRLLSTYSAYEWSLGIKSVAWSPSSQFLAVGSYDGKVRILNHVTWKMITEFGHPAAINDPKIVVYKEAEKSPQLGLGCLSFPPPRAGAGPLPSSESKCK

SEQ ID NO: 742725 - protein, 340 aa, Homo sapiens
SEAGVGCCSLLRAQGSRGFSGAGWRPRQAAAMNFSEVFKLSSLLCKFSPDGKYLASCVQYRLVVRDVNTLQILQLYTCLDQIQHIEWSADSLFILCAMYKRGLVQVWSLEQPEWHCKIDEGSAGLVASCWSPDGRHILNTTEFHLRITVWSLCTKSVSYIKYPKACLQGITFTRDGRYMALAERRDCKDYVSIFVCSDWQLLRHFDTDTQDLTGIEWAPNGCVLAVWDTCLEYKILLYSLDGRLLSTYSAYEWSLGIKSVAWSPSSQFLAVGSYDGKVRILNHVTWKMITEFGHPAAINDPKIVSLEHVFLPEQAVGEGGGKLLLHFAFLIVVYYLTGHF

SEQ ID NO: 742726 - protein, 491 aa, Homo sapiens; identical to SEQ ID NO: 742723

SEQ ID NO: 742727 - protein, 161 aa, Homo sapiens
LSTSWQFQLFHGHADSPASFVLSAPMSLCSTRVCGVFLATGVYSLLTEMSHLQYKILLYSLDGRLLSTYSAYEWSLGIKSVAWSPSSQFLAVGSYDGKVRILNHVTWKMITEFGHPAAINDPKIVVYKEAEKSPQLGLGCLSFPPPRAGAGPLPSSESKCK

SEQ ID NO: 742728 - protein, 384 aa, Homo sapiens
SEAGVGCCSLLRAQGSRGFSGAGWRPRQAAAMNFSEVFKLSSLLCKFSPDGKYLASCVQYRLVVRDVNTLQILQLYTCLDQIQHIEWSADSLFILCAMYKRGLVQVWSLEQPEWHCKIDEGSAGLVASCWSPDGRHILNTTEFHLRITVWSLCTKSVSYIKYPKACLQGITFTRDGRYMALAERRDCKDYVSIFVCSDWQLLRHFDTDTQDLTGIEWAPNGCVLAVWDTCLEYKILLYSLDGRLLSTYSAYEWSLGIKSVAWSPSSQFLAVGSYDGKVRILNHVTWKMITEFGHPAAINDPKIVVYKEAEKSPQLGLGCLSFPPPRAGAGPLPSSESKYEIASVPVSLQTLKPVTDRANPKIGIGMLAFSPDSYFLATRNGQLC

SEQ ID NO: 742729 - protein, 446 aa, Homo sapiens
SEAGVGCCSLLRAQGSRGFSGAGWRPRQAAAMNFSEVFKLSSLLCKFSPDGKYLASCVQYRLVVRDVNTLQILQLYTCLDQIQHIEWSADSLFILCAMYKRGLVQVWSLEQPEWHCKIDEGSAGLVASCWSPDGRHILNTTEFHLRITVWSLCTKSVSYIKYPKACLQGITFTRDGRYMALAERRDCKDYVSIFVCSDWQLLRHFDTDTQDLTGIEWAPNGCVLAVWDTCLEVRILNHVTWKMITEFGHPAAINDPKIVVYKEAEKSPQLGLGCLSFPPPRAGAGPLPSSESKYEIASVPVSLQTLKPVTDRANPKIGIGMLAFSPDSYFLATRNDNIPNAVWVWDIQKLRLFAVLEQLSPVRAFQWDPQQPRLAICTGGSRLYLWSPAGCMSVQVPGEGDFAVLSLCWHLSGDSMALLSKDHFCLCFLETEAVVGTACRQLGGHT

SEQ ID NO: 742730 - protein, 194 aa, Homo sapiens
SEAGVGCCSLLRAQGSRGFSGAGWRPRQAAAMNFSEVFKLSSLLCKFSPDGKYLASCVQYRLVVRDVNTLQILQLYTCLDQIQHIEWSADSLFILCAMYKRGLVQVWSLEQPEWHCKIDEGSAGLVASCWSPDGRHILNTTEFHLRITVWSLCTKSVSYIKYPKACLQGITFTRDGRHILNTTEFHLRITVWSS

SEQ ID NO: 742731 - protein, 313 aa, Homo sapiens
MNQLSFLLFLIATTRGWSTDEANTYFKEWTCSSSPSLPRSCKEIKDECPSAFDGLYFLRTENGVIYQTFCDMTSGGGGWTLVASVHENDMRGKCTVGDRWSSQQGNKADYPEGDGNWANYNTFGSAEAATSDDYKNPGYYDIQAKDLGIWHVPNKSPMQHWRNSALLRYRTNTGFLQRLGHNLFGIYQKYPVKYRSGKCWNDNGPAIPVVYDFGDAKKTASYYSPYGQREFVAGFVQFRVFNNERAANALCAGIKVTGCNTEHHCIGGGGFFPQGKPRQCGDFSAFDWDGYGTHVKSSCSREITEAAVLLFYR

SEQ ID NO: 742732 - protein, 199 aa, Homo sapiens
MWTFCLLVPPGPAGSVSVAFQNPGYYDIQAKDLGIWHVPNKSPMQHWRNSALLRYRTNTGFLQRLGHNLFGIYQKYPVKYRSGKCWNDNGPAIPVVYDFGDAKKTASYYSPYGQREFVAGFVQFRVFNNERAANALCAGIKVTGCNTEHHCIGGGGFFPQGKPRQCGDFSAFDWDGYGTHVKSSCSREITEAAVLLFYR

SEQ ID NO: 742733 - protein, 242 aa, Homo sapiens
MTSGGGGWTLVASVHENDMRGKCTVGDRWSSQQGNKADYPEGDGNWANYNTFGSAEAATSDDYKNPGYYDIQAKDLGIWHVPNKSPMQHWRNSALLRYRTNTGFLQRLGHNLFGIYQKYPVKYRSGKCWNDNGPAIPVVYDFGDAKKTASYYSPYGQREFVAGFVQFRVFNNERAANALCAGIKVTGCNTEHHCIGGGGFFPQGKPRQCGDFSAFDWDGYGTHVKSSCSREITEAAVLLFYR

SEQ ID NO: 742734 - protein, 130 aa, Homo sapiens; identical to SEQ ID NO: 742470

SEQ ID NO: 742735 - protein, 691 aa, Homo sapiens
MDQNQHLNKTAEAQPSENKKTRYCNGLKMFLAALSLSFIAKTLGAIIMKSSIIHIERRFEISSSLVGFIDGSFEIGNLLVIVFVSYFGSKLHRPKLIGIGCFIMGIGGVLTALPHFFMGYYRYSKETNINSSENSTSTLSTCLINQILSLNRASPEIVGKGCLKESGSYMWIYVFMGNMLRGIGETPIVPLGLSYIDDFAKEGHSSLYLGILNAIAMIGPIIGFTLGSLFSKMYVDIGYVDLSTIRITPTDSRWVGAWWLNFLVSGLFSIISSIPFFFLPQTPNKPQKERKASLSLHVLETNDEKDQTANLTNQGKNITKNVTGFFQSFKSILTNPLYVMFVLLTLLQVSSYIGAFTYVFKYVEQQYGQPSSKANILLGVITIPIFASGMFLGGYIIKKFKLNTVGIAKFSCFTAVMSLSFYLLYFFILCENKSVAGLTMTYDGNNPVTSHRDVPLSYCNSDCNCDESQWEPVCGNNGITYISPCLAGCKSSSGNKKPIVFYNCSCLEVTGLQNRNYSAHLGECPRDDACTRKFYFFVAIQVLNLFFSALGGTSHVMLIVKIVQPELKSLALGFHSMVIRALGGILAPIYFGALIDTTCIKWSTNNCGTRGSCRTYNSTSFSRVYLGLSSMLRVSSLVLYIILIYAMKKKYQEKDINASENGSVMDEANLESLNKNKHFVPSAGADSETHC

SEQ ID NO: 742736 - protein, 691 aa, Homo sapiens; identical to SEQ ID NO: 742735

SEQ ID NO: 742737 - protein, 83 aa, Homo sapiens
LRAVGAQGWVLGWKDVSERGCSHRVDRRSRKQEGCVWSGGAWNAALWFPWGGVGGSGLEQADTALWTLRPLNWDRSAPWWGGA

SEQ ID NO: 742738 - protein, 98 aa, Homo sapiens
VLAPLTAAGSLTCELQVCSRWSLDARNGARTLDVERGGGGTRSGDLHLGWSALRMPSKVTAWSTSRRGLCASVGIAADGETFGVAEECPQTSEVAREN

SEQ ID NO: 742739 - protein, 113 aa, Homo sapiens
VLAPLTAAGSLTCELQVCSRWSLDARNGARTLDVERGGGGTRSGDLHLGWSALRMPSKVTAWSTSRRGLCASVGIAADGETFGVAEECPQTSEGPRRQGPCSHGVTPGCRSLG

SEQ ID NO: 742740 - protein, 106 aa, Homo sapiens
CASVGIAADGETFGVAEECPQTSEGIRYILHSRVSLPRAIFWGSGKSCSRARAGWLEPLVRRTLAEVQAAPVSQAAVSDASLGPEWSQEGCRPGLTSGQHGGRDGR

SEQ ID NO: 742741 - protein, 102 aa, Homo sapiens
PARDTCIKPHFPQQQSLVPVCPLADSSPDQPVLSPPARTHSKDRGRLSSASLLPRARLQPFEALSIDYGDAPSHCPSPSLFNSQQNSILQNDTKLILILEFK

SEQ ID NO: 742742 - protein, 174 aa, Homo sapiens
MEIAPQEAPPVPGADGDIEEAPAEAGSPSPASPPADGRLKAAAKRVTFPSDEDIVSGAVEPKDPWRHAQNVTVDEVIGAYKQACQKLNCRQIPKLLRQLQEFTDLGHRLDCLDLKGEKLDYKTCEALEEVFKRLQFKVVDLEQTNLDEDGASALFDMIEYYESATHLNISFNKH

SEQ ID NO: 742743 - protein, 179 aa, Homo sapiens
MPCVGRTAAGAVTEHGGQKPVFTKAPQVVLTTSLGCLCALLRHPSLSPKPAFRPQFRGGWHGPQSLFWSKLTAQNVTVDEVIGAYKQACQKLNCRQIPKLLRQLQEFTDLGHRLDCLDLKGEKLDYKTCEALEEVFKRLQFKVVDLEQTNLDEDGASALFDMIEYYESATHLNISFNKH

SEQ ID NO: 742744 - protein, 126 aa, Homo sapiens
MEIAPQEAPPVPGADGDIEEAPAEAGSPSPASPPADGRLKAAAKRVTFPSDEDIVSGAVEPKDPWRHGEKLDYKTCEALEEVFKRLQFKVVDLEQTNLDEDGASALFDMIEYYESATHLNISFNKH

SEQ ID NO: 742745 - protein, 153 aa, Homo sapiens
AEARLGSRRRRLRPLGERTEAAPEAAAEPMPRDGGRTRRDKSGARGMSPGPREEAAAAMEIAPQEAPPVPGADGDIEEAPAEAGSPSPASPPADGRLKAAAKRVTFPSDEDIVSGAVEPKDPWRHGWSAMARSQVITTSASQVQAILLPQPPE

SEQ ID NO: 742746 - protein, 160 aa, Homo sapiens
MEIAPQEAPPVPGADGDIEEAPAEAGSPSPASPPADGRLKAAAKRVTFPSDEDIVSGAVEPKDPWRHAQNVTVDEVIGAYKQACQKLNCRQIPKLLRQLQEFTDLGHRLDCLDLKGEKLDYKTCEALEEVFKRLQFKVVDLEQTNLDEDVSGPATAHLAP

SEQ ID NO: 742747 - protein, 505 aa, Homo sapiens
NSGFVHPLWNRSCVACRNDIALISLRTRFRRWQRWPSPELPAMAGAPGPLRLALLLLGMVGRAGPRPQGATVSLWETVQKWREYRRQCQRSLTEDPPPATDLFCNRTFDEYACWPDGEPGSFVNVSCPWYLPWASSVPQGHVYRFCTAEGLWLQKDNSSLPWRDLSECEESKRGERSSPEEQLLFLYIIYTVGYALSFSALVIASAILLGFRHLHCTRNYIHLNLFASFILRALSVFIKDAALKWMYSTAAQQHQWDGLLSYQDSLSCRLVFLLMQYCVAANYYWLLVEGVYLYTLLAFSVLSEQWIFRLYVSIGWGVPLLFVVPWGIVKYLYEDEGCWTRNSNMNYWLIIRLPILFAIGVNFLIFVRVICIVVSKLKANLMCKTDIKCRLAKSTLTLIPLLGTHEVIFAFVMDEHARGTLRFIKLFTELSFTSFQGLMVAILYCFVNNEVQLEFRKSWERWRLEHLHIQRDSSMKPLKCPTSSLSSGATAGSSMYTATCQASCS

SEQ ID NO: 742748 - protein, 505 aa, Homo sapiens; identical to SEQ ID NO: 742747

SEQ ID NO: 742749 - protein, 505 aa, Homo sapiens; identical to SEQ ID NO: 742747

SEQ ID NO: 742750 - protein, 206 aa, Homo sapiens
ELNVQKPSERLYVSIGWGVPLLFVVPWGIVKYLYEDEGCWTRNSNMNYWLIIRLPILFAIGVNFLIFVRVICIVVSKLKANLMCKTDIKCRLAKSTLTLIPLLGTHEVIFAFVMDEHARGTLRFIKLFTELSFTSFQGLMVAILYCFVNNEVQLEFRKSWERWRLEHLHIQRDSSMKPLKCPTSSLSSGATAGSSMYTATCQASCS

SEQ ID NO: 742751 - protein, 120 aa, Homo sapiens
MAGAPGPLRLALLLLGMVGRAGPRPQVRSRDPDDTGGGGWLCGLQAQCPGGGPRDLNETPRPLAGASESLGGSRDWRLGAPGLEGPGEGLDYRGFPPTPARRPLPRHPGPSARAPAAPRP

SEQ ID NO: 742752 - protein, 651 aa, Homo sapiens
MAAPLLHTRLPGDAAASSSAVKKLGASRTGISNMRALENDFFNSPPRKTVRFGGTVTEVLLKYKKGETNDFELLKNQLLDPDIKDDQIINWLLEFRSSIMYLTKDFEQLISIILRLPWLNRSQTVVEEYLAFLGNLVSAQTVFLRPCLSMIASHFVPPRVIIKEGDVDVSDSDDEDDNLPANFDTCHRALQIIARYVPSTPWFLMPILVEKFPFVRKSERTLECYVHNLLRISVYFPTLRHEILELIIEKLLKLDVNASRQGIEDAEETATQTCGGTDSTEGLFNMDEDEETEHETKAGPERLDQMVHPVAERLDILMSLVLSYMKDVCYVDGKVDNGKTKDLYRDLINIFDKLLLPTHASCHVQFFMFYLCSFKLGFAEAFLEHLWKKLQDPSNPAIIRQAAGNYIGSFLARAKFIPLITVKSCLDLLVNWLHIYLNNQDSGTKAFCDVALHGPFYSACQAVFYTFVFRHKQLLSGNLKEGLQYLQSLNFERIVMSQLNPLKICLPSVVNFFAAITNKYQLVFCYTIIERNNRQMLPVIRSTAGGDSVQICTNPLDTFFPFDPCVLKRSKKFIDPIYQVWEDMSAEELQEFKKPMKKDIVEDEDDDFLKGEVPQNDTVIGITPSSFDTHFRSPSSSVGSPPVLYMQPSPL

SEQ ID NO: 742753 - protein, 170 aa, Homo sapiens
MAAPLLHTRLPGDAAASSSAVKKLGASRTGISNMRALENDFFNSPPRKTVRFGGTVTEVLLKYKKLHPHADDNSQDTCRASAGGRNSTRQRMIRLKTHFRAISSHPHSTHQTPPLTQHDKYQEHLARDDLREGRIPPVRRDEYSYKTPFRGVSIDSPACAHISIHTIRKN

SEQ ID NO: 742754 - protein, 89 aa, Homo sapiens
ISSVPDLDSEDDVNASRQGIEDAEETATQTCGGTDSTEGLFNMDEDEETEHETKAGPERLDQMVHPVAEPFRTSLCVMFSLHLHLQNPN

SEQ ID NO: 742755 - protein, 651 aa, Homo sapiens; identical to SEQ ID NO: 742752

SEQ ID NO: 742756 - protein, 454 aa, Homo sapiens
MAAPLLHTRLPGDAAASSSAVKKLGASRTGISNMRALENDFFNSPPRKTVRFGGTVTEVLLKYKKGETNDFELLKNQLLDPDIKDDQIINWLLEFRSSIMYLTKDFEQLISIILRLPWLNRSQTVVEEYLAFLGNLVSAQTVFLRPCLSMIASHFVPPRVIIKEGDVDVSDSDDEDDNLPANFDTCHRALQIIARYVPSTPWFLMPILVEKFPFVRKSERTLECYVHNLLRISVYFPTLRHEILELIIEKLLKLDVNASRQGIEDAEETATQTCGGTDSTEGLFNMDEDEETEHETKAGPERLDQMVHPVAERLDILMSLVLSYMKDVCYVDGKVDNGKTKDLYRDLINIFDKLLLPTHASCHVQFFMFYLCSFKLGFAEAFLEHLWKKLQDPSNPAIIRQAAGNYIGSFLARAKFIPLMIREQRHSAMLLSMDHFTQPAKLCSTPLFLDTSSF

SEQ ID NO: 742757 - protein, 634 aa, Homo sapiens
MAAPLLHTRLPGDAAASSSAVKKLGASRTGISNMRALENDFFNSPPRKTVRFGGTVTEVLLKYKKGETNDFELLKNQLLDPDIKDDQIINWLLEFRSSIMYLTKDFEQLISIILRLPWLNRSQTVVEEYLAFLGNLVSAQTVFLRPCLSMIASHFVPPRVIIKEGDVDVSDSDDEDDNLPANFDTCHRALQIIARYVPSTPWFLMPILVEKFPFVRKSERTLECYVHNLLRISVYFPTLRHEILELIIEKLLKLDVNASRQGIEDAEETATQTCGGTDSTEGLFNMDEDEETEHETKAGPERLDQMVHPVAERLDILMSLVLSYMKDVCYVDGKVDNGKTKDLYRDLINIFDKLLLPTHASCHVQFFMFYLCSFKLGFAEAFLEHLWKKLQDPSNPAIIRQAAGNYIGSFLARAKFIPLITVKSCLDLLVNWLHIYLNNQDSGTKAFCDVALHGPFYSACQAVFYTFVFRHKQLLSGNLKEGLQYLQSLNFERIVMSQLNPLKICLPSVVNFFAAITNKYQLVFCYTIIERNNRQMLPVIRSTAGGDSVQICTNPLDTFFPFDPCVLKRSKKFIDPIYQVWEDMSAEELQEFKKPMKKNDTVIGITPSSFDTHFRSPSSSVGSPPVLYMQPSPL

SEQ ID NO: 742758 - protein, 621 aa, Homo sapiens
MAAPLLHTRLPGDAAASSSAVKKLGASRTGISNMRALENDFFNSPPRKTVRFGGTVTEVLLKYKKGETNDFELLKNQLLDPDIKRLPWLNRSQTVVEEYLAFLGNLVSAQTVFLRPCLSMIASHFVPPRVIIKEGDVDVSDSDDEDDNLPANFDTCHRALQIIARYVPSTPWFLMPILVEKFPFVRKSERTLECYVHNLLRISVYFPTLRHEILELIIEKLLKLDVNASRQGIEDAEETATQTCGGTDSTEGLFNMDEDEETEHETKAGPERLDQMVHPVAERLDILMSLVLSYMKDVCYVDGKVDNGKTKDLYRDLINIFDKLLLPTHASCHVQFFMFYLCSFKLGFAEAFLEHLWKKLQDPSNPAIIRQAAGNYIGSFLARAKFIPLITVKSCLDLLVNWLHIYLNNQDSGTKAFCDVALHGPFYSACQAVFYTFVFRHKQLLSGNLKEGLQYLQSLNFERIVMSQLNPLKICLPSVVNFFAAITNKYQLVFCYTIIERNNRQMLPVIRSTAGGDSVQICTNPLDTFFPFDPCVLKRSKKFIDPIYQVWEDMSAEELQEFKKPMKKDIVEDEDDDFLKGEVPQNDTVIGITPSSFDTHFRSPSSSVGSPPVLYMQPSPL

SEQ ID NO: 742759 - protein, 339 aa, Homo sapiens
MAAPLLHTRLPGDAAASSSAVKKLGASRTGISNMRALENDFFNSPPRKTVRFGGTVTEVLLKYKKGETNDFELLKNQLLDPDIKDDQIINWLLEFRSSIMYLTKDFEQLISIILRLPWLNRSQTVVEEYLAFLGNLVSAQTVFLRPCLSMIASHFVPPRVIIKEGDVDVSDSDDEDDNLPANFDTCHRALQIIARYVPSTPWFLMPILVEKFPFVRKSERTLECYVHNLLRISVYFPTLRHEILELIIEKLLKLDVNASRQGIEDAEETATQTCGGTDSTEGLFNMDEDEETEHETKAGPERLDQMVHPVAERLDILMSLVLSYMKDVCYVDGVGRHEC

SEQ ID NO: 742760 - protein, 241 aa, Homo sapiens
KVDLNFSFLSTVKSCLDLLVNWLHIYLNNQDSGTKAFCDVALHGPFYSACQAVFYTFVFRHKQLLSGNLKEGLQYLQSLNFERIVMSQLNPLKICLPSVVNFFAAITNKYQLVFCYTIIERNNRQMLPVIRSTAGGDSVQICTNPLDTFFPFDPCVLKRSKKFIDPIYQVWEDMSAEELQEFKKPMKKDIVEDEDDDFLKGEVPQNDTVIGITPSSFDTHFRSPSSSVGSPPVLYMQPSPL

SEQ ID NO: 742761 - protein, 120 aa, Homo sapiens
  misc_feature (46)..(46): Xaa can be any naturally occurring amino acid
VVNRWGLHCQLGALSTGQSSWCLHGQKEVVKVANSPGEREFCSRTXGCKSTITNLLVGEKFKKPMKKDIVEDEDDDFLKGEVPQNDTVIGITPSSFDTHFRSPSSSVGSPPVLYMQPSPL

SEQ ID NO: 742762 - protein, 412 aa, Homo sapiens
MAAPLLHTRLPGDAAASSSAVKKLGASRTGISNMRALENDFFNSPPRKTVRFGGTVTEVLLKYKKGETNDFELLKNQLLDPDIKDDQIINWLLEFRSSIMYLTKDFEQLISIILRLPWLNRSQTVVEEYLAFLGNLVSAQTVFLRPCLSMIASHFVPPRVIIKEGDVDVSDSDDEDDNLPANFDTCHRALQIIARYVPSTPWFLMPILVEKFPFVRKSERTLECYVHNLLRISVYFPTLRHEILELIIEKLLKLDVNASRQGIEDAEETATQTCGGTDSTEGLFNMDEDEETEHETKAGPERLDQMVHPVAERLDILMSLVLSYMKDVCYVDGKVDNGKTKDLYRDLINIFDKLLLPTHASCHVQFFMFYLCSFKLVSKNVINIILAYFVFAQKFSLKTGVDGDHEVNNSFL

SEQ ID NO: 742763 - protein, 454 aa, Homo sapiens; identical to SEQ ID NO: 742756

SEQ ID NO: 742764 - protein, 328 aa, Homo sapiens
HEGGKGDGMEEVPHDCPGADSAQAGRGASCQGCPNQRLCASGAGATPDTAIEEIKEKMKTVKHKILVLSGKGGVGKSTFSAHLAHGLAEDENTQIALLDIDICGPSIPKIMGLEGEQVHQSGSGWSPVYVEDNLGVMSVGFLLSSPDDAVIWRGPKKNGMIKQFLRDVDWGEVDYLIVDTPPGTSDEHLSVVRYLATAHIDGAVIITTPQEVSLQDVRKEINFCRKVKLPIIGVVENMSGFICPKCKKESQIFPPTTGGAELMCQDLEVPLLGRVPLDPLIGKNCDKGQSFFIDAPDSPATLAYRSIIQRIQEFCNLHQSKEENLISS

SEQ ID NO: 742765 - protein, 95 aa, Homo sapiens
AGCIAQPCRIDTKMESKEISGTREVFENHPFRFKRREPHQFLKRENVQDQAVTERGTHWAAHPARPDQLRDGVGHSKRTRCWCGPKPLSQRHFNH

SEQ ID NO: 742766 - protein, 328 aa, Homo sapiens; identical to SEQ ID NO: 742764

SEQ ID NO: 742767 - protein, 328 aa, Homo sapiens; identical to SEQ ID NO: 742764

SEQ ID NO: 742768 - protein, 328 aa, Homo sapiens; identical to SEQ ID NO: 742764

SEQ ID NO: 742769 - protein, 328 aa, Homo sapiens; identical to SEQ ID NO: 742764

SEQ ID NO: 742770 - protein, 310 aa, Homo sapiens
PRRRQRRRNGGGASRLSRGRQRPGGQRGFMSGMPQPAAVRFWSGGHSGHGSGKGGVGKSTFSAHLAHGLAEDENTQIALLDIDICGPSIPKIMGLEGEQVHQSGSGWSPVYVEDNLGVMSVGFLLSSPDDAVIWRGPKKNGMIKQFLRDVDWGEVDYLIVDTPPGTSDEHLSVVRYLATAHIDGAVIITTPQEVSLQDVRKEINFCRKVKLPIIGVVENMSGFICPKCKKESQIFPPTTGGAELMCQDLEVPLLGRVPLDPLIGKNCDKGQSFFIDAPDSPATLAYRSIIQRIQEFCNLHQSKEENLISS

SEQ ID NO: 742771 - protein, 305 aa, Homo sapiens
HEGGKGDGMEEVPHDCPGADSAQAGRGASCQGCPNQRLCASGAGATPDTAIEEIKEKMKTVKHKILVLSGKGGVGKSTFSAHLAHGLAEDENTQVHQSGSGWSPVYVEDNLGVMSVGFLLSSPDDAVIWRGPKKNGMIKQFLRDVDWGEVDYLIVDTPPGTSDEHLSVVRYLATAHIDGAVIITTPQEVSLQDVRKEINFCRKVKLPIIGVVENMSGFICPKCKKESQIFPPTTGGAELMCQDLEVPLLGRVPLDPLIGKNCDKGQSFFIDAPDSPATLAYRSIIQRIQEFCNLHQSKEENLISS

SEQ ID NO: 742772 - protein, 328 aa, Homo sapiens
VQTFGVCAWLRSQWGKGDGMEEVPHDCPGADSAQAGRGASCQGCPNQRLCASGAGATPDTAIEEIKEKMKTVKHKILVLSGKGGVGKSTFSAHLAHGLAEDENTQIALLDIDICGPSIPKIMGLEGEQYVEDNLGVMSVGFLLSSPDDAVIWRGPKKNGMIKQFLRDVDWGEVDYLIVDTPPGTSDEHLSVVRYLATAHIDGAVIITTPQEVSLQDVRKEINFCRKVKLPIIGVVENMSGFICPKCKKESQIFPPTTGGAELMCQDLEVPLLGRVPLDPLIGKNCDKGQSFFIDAPDSPATLAYRSIIQRIQEFCNLHQSKEENLISS

SEQ ID NO: 742773 - protein, 316 aa, Homo sapiens
HEGGKGDGMEEVPHDCPGADSAQAGRGASCQGCPNQRLCASGAGATPDTAIEEIKEKMKTVKHKILVLSGKGGVGKSTFSAHLAHGLAEDENTQIALLDIDICGPSIPKIMGLEGEQVHQSGSGWSPVYVEDNLGVMSVGFLLSSPDDAVIWRGPKKNGMIKQFLRDVDWGEVDYLIVDTPPGTSDEHLSVVRYLATAHIDGAVIITTPQEVSLQDVRKEINFCRKVKLPIIGVVENMSGFICPKCKKESQIFPPTTGGAELMCQDLEVPLLGRVPLDPLIGKNCDKGQSFFIDAPDSPATLAYRSIIQSKYFHEY

SEQ ID NO: 742774 - protein, 300 aa, Homo sapiens
HEGGKGDGMEEVPHDCPGADSAQAGRGASCQGCPNQRLCASGAGATPDTAIEEIKEKMKTVKHKILVLSGKGGVGKSTFSAHLAHGLAEDENTQIALLDIDICGPSIPKIMGLEGEQVHQSGSGWSPVYVEDNLGVMSVGFLLSSPDDAVIWRGPKKNGMIKQFLRDVDWGEVDYLIVDTPPGTSDEHLSVVRYLATAHIDGAVIITTPQEVSLQDVRKEINFCRKVKLPIIGVVENMSGFICPKCKKESQIFPPTTGGAELMCQDLEVPLLGRVPLDPLIGIQEFCNLHQSKEENLISS

SEQ ID NO: 742775 - protein, 300 aa, Homo sapiens; identical to SEQ ID NO: 742774

SEQ ID NO: 742776 - protein, 92 aa, Homo sapiens
HEGGKGDGMEEVPHDCPGADSAQAGRGASCQGCPNQRLCASGAGATPDTAIEEIKEKMKTVKHKILVLSGKGGVGKTAHHRGGGEHEWLHLS

SEQ ID NO: 742777 - protein, 283 aa, Homo sapiens
HEGGKGDGMEEVPHDCPGADSAQAGRGASCQGCPNQRLCASGAGATPDTAIEEIKEKMKTVKHKILVLSGKGGVGKSTFSAHLAHGLAEDENTQIALLDIDICGPSIPKIMGLEGEQVHQSGSGWSPVYVEDNLGVMSVGFLLSSPDDAVIWRGPKKNGMIKQFLRDVDWGEVDYLIVDTPPGTSDEHLSVVRYLATAHIDGAVIITTPQEVSLQDVRKEINFCRKVKLPIIGVVENMSGFICPKCKIDAPDSPATLAYRSIIQRIQEFCNLHQSKEENLISS

SEQ ID NO: 742778 - protein, 249 aa, Homo sapiens
HEGGKGDGMEEVPHDCPGADSAQAGRGASCQGCPNQRLCASGAGATPDTAIEEIKEKMKTVKHKILVLSGKGGVGKSTFSAHLAHGLAEDENTQIALLDIDICGPSIPKIMGLEGEQVHQSGSGWSPVYVEDNLGVMSVGFLLSSPDDAVIWRGPKKNGMIKQFLRADKPILKAGRAYHKYKAKRNCWPRVRGVAMNPVEHPFGGGNHQHIGKPSTIRRDAPAGRKVGLIAARRTGRLRGTKTVQEKEN

SEQ ID NO: 742779 - protein, 134 aa, Homo sapiens
HEGGKGDGMEEVPHDCPGADSAQAGRGASCQGCPNQRLCASGAGATPDTAIEEIKEKMKTVKHKILVLSGKGGVGKSTFSAHLAHGLAEDENTQIALLDIDICGPSIPKIMGLEGEQVIAGYRTQEIILLRQTL

SEQ ID NO: 742780 - protein, 126 aa, Homo sapiens
VFFCRDEGFAMLSRLVSNSWAQAVLHLGPPECWDYRCEPPYPAYLKPFSLFSKLQKREDSEKLKSVGAVEGSRIDVVFDICIEKIANFFFFLMVILDTSLIILEIFKTVNMRNNSYMCTFFLQMSN

SEQ ID NO: 742781 - protein, 117 aa, Homo sapiens
  misc_feature (2)..(2): Xaa can be any naturally occurring amino acid
  misc_feature (23)..(23): Xaa can be any naturally occurring amino acid
AXRFLLFIIIVCFEMQSCSVTQXGVHWATRARLYLNTTTRLLITEEKLGAEGTVGREGRREPRLQNESEWAEGHLRPQGQGTHNGSHTVSAVLLGEPVCSQRSIQTHYQSGFFSGTP

SEQ ID NO: 742782 - protein, 82 aa, Homo sapiens
MDHSHPAEQVSNLGVNLDTFLLIPMFLVSQSSPLIPKNLECLPGTSMSLAGHLGLSTHHLFPASVQCPTDRSFPRTLAFSNS

SEQ ID NO: 742783 - protein, 229 aa, Homo sapiens
SLPGGSILTTAVSVPRSPAVQCEGALGPEPLLPHYPDAQPRRHTGLPSPVLTAEEISQTQALGAGQLAAGTCEIVTLDRDSSQPRRTIARQTARCACRKGQIAGTTRARPACVDARIIKTKQWCDMLPCLEGEGCDLLINRSGWTCTQPGGAERAAVVEASTPGAPRAPSEDGLRLRGGRGTPAGGSDGPHADAGNAGRFIPLYLDQLDRTKIPFCFNQLNMPLLQLHF

SEQ ID NO: 742784 - protein, 125 aa, Homo sapiens
MQLLKALWALAGAALCCFLVLVIHAQFLKEGQLAAGTCEIVTLDRDSSQPRRTIARQTARCACRKGQIAGTTRARPACVDARIIKTKQWCDMLPCLEGEGCDLLINRSGWTCTQPGGRIKTTTVS

SEQ ID NO: 742785 - protein, 125 aa, Homo sapiens; identical to SEQ ID NO: 742784

SEQ ID NO: 742786 - protein, 195 aa, Homo sapiens
MQLLKALWALAGAALCCFLVLVIHAQFLKEGQLAAGTCEIVTLDRDSSQPRRTIARQTARCACRKGQIAGTTRARPACVDARIIKTKQWCDMLPCLEGEGCDLLINRSGWTCTQPGGAERAAVVEASTPGAPRAPSEDGLRLRGGRGTPAGGSDGPHADAGNAGRFIPLYLDQLDRTKIPFCFNQLNMPLLQLHF

SEQ ID NO: 742787 - protein, 171 aa, Homo sapiens
AAAAEDGARGARTWRPARGRGQGRLLRRAAAPRAGAAASMAPSPRTGSRQDATALPSMSSTFWAFMILASLLIAYCSQLAAGTCEIVTLDRDSSQPRRTIARQTARCACRKGQIAGTTRARPACVDARIIKTKQWCDMLPCLEGEGCDLLINRSGWTCTQPGGRIKTTTVS

SEQ ID NO: 742788 - protein, 159 aa, Homo sapiens
SLPGGSILTTAVSVPRSPAVQCEGALGPEPLLPHYPDAQPRRHTGLPSPVLTAEEISQTQALGAGQLAAGTCEIVTLDRDSSQPRRTIARQTARCACRKGQIAGTTRARPACVDARIIKTKQWCDMLPCLEGEGCDLLINRSGWTCTQPGGRIKTTTVS

SEQ ID NO: 742789 - protein, 138 aa, Homo sapiens
NDSRGVGPKEDYKMHFLNALWALGGALLCCLLTLTIHAQNIKQRQLGTSRWEMATSDTHSLQTVTTIASQPSDVRVEMSGSGWTMTAWSSCVDSRIIKTKQWCDMLPCLEGEGCDLLINRSGWTCTQPGGRIKTTTVS

SEQ ID NO: 742790 - protein, 111 aa, Homo sapiens
MQQHLFPLGNTPESVNPLFACWFSAQKGPKQQVSLNVQFSELLSCVPRKHSSCKNQALQTSRTPVEGTGERNHSYFYPLIPGPVNPGYRRDNTCKAEPWGQHPKVVSQVVL

SEQ ID NO: 742791 - protein, 421 aa, Homo sapiens
MAESWLRLSGAGPAEEAGPEGGLEEPDALDDSLTSLQWLQEFSILNAKAPALPPGGTDPHGYHQVPGSAAPGSPLAADPACLGQPHTPGKPTSSCTSRSAPPGLQAPPPDDVDYATNPHVKPPYSYATLICMAMQASKATKITLSAIYKWITDNFCYFRHADPTWQNSIRHNLSLNKCFIKVPREKDEPGKGGFWRIDPQYAERLLSGAFKKRRLPPVHIHPAFARQAAQEPSAVPRAGPLTVNTEAQQLLREFEEATGEAGWGAGEGRLGHKRKQPLPKRVAKVPRPPSTLLPTPEEQGELEPLKGNFDWEAIFDAGTLGGELGALEALELSPPLSPASHVDVDLTIHGRHIDCPATWGPSVEQAADSLDFDETFLATSFLQHPWDESGSGCLPPEPLFEAGDATLASDLQDWASVGAFL

SEQ ID NO: 742792 - protein, 421 aa, Homo sapiens; identical to SEQ ID NO: 742791

SEQ ID NO: 742793 - protein, 421 aa, Homo sapiens; identical to SEQ ID NO: 742791

SEQ ID NO: 742794 - protein, 240 aa, Homo sapiens [sequence omitted]

SEQ ID NO: 742795 - protein, 132 aa, Homo sapiens
MSQRDTLVHLFAGGCGGTVGAILTCPLEVVKTRLQSSSVTLYISEVQLNTMAGASVNRVVSPGPLHCLKVILEKEGPRSLFRGLGPNLVGVAPSRAIYFAAYSNCKEKLNDVFDPDSTQVHMISAAMAGMNV

SEQ ID NO: 742796 - protein, 167 aa, Homo sapiens
MSQRDTLVHLFAGGCGGTVGAILTCPLEVVKTRLQSSSVTLYISEVQLNTMAGASVNRVVSPGPLHCLKVILEKEGPRSLFRGLGPNLVGVAPSRAIYFAAYSNCKAAMASIYWTFFPRKSEIVSSHAPHSQVTFCRNMANKLRLLEYRTNPFGYKDRYQLMQDRGK

SEQ ID NO: 742797 - protein, 311 aa, Homo sapiens
MSQRDTLVHLFAGGCGGTVGAILTCPLEVVKTRLQSSSVTLYISEVQLNTMAGASVNRVVSPGPLHCLKVILEKEGPRSLFRGLGPNLVGVAPSRAIYFAAYSNCKEKLNDVFDPDSTQVHMISAAMAGFTAITATNPIWLIKTRLQLDARNRGERRMGAFECVRKVYQTDGLKGFYRGMSASYAGISETVIHFVIYESIKQKLLEYKTASTMENDEESVKEASDFVGMMLAAATSKTCATTIAYPHEVVRTRLREEGTKYRSFFQTLSLLVQEEGYGSLYRGLTTHLVRQIPNTAIMMATYELVVYLLNG

SEQ ID NO: 742798 - protein, 261 aa, Homo sapiens [sequence omitted]

SEQ ID NO: 742799 - protein, 340 aa, Homo sapiens
MSQRDTLVHLFAGGCGGTVGAILTCPLEVVKTRLQSSSVTLYISEVQLNTMAGASVNRVVSPGPLHCLKVILEKEGPRSLFRGLGPNLVGVAPSRAIYFAAYSNCKEKLNDVFDPDSTQVHMISAAMAEHKKLNTKECKIFHKYGCAILLAIVQKVKGFTAITATNPIWLIKTRLQLDARNRGERRMGAFECVRKVYQTDGLKGFYRGMSASYAGISETVIHFVIYESIKQKLLEYKTASTMENDEESVKEASDFVGMMLAAATSKTCATTIAYPHEVVRTRLREEGTKYRSFFQTLSLLVQEEGYGSLYRGLTTHLVRQIPNTAIMMATYELVVYLLNG

SEQ ID NO: 742800 - protein, 311 aa, Homo sapiens; identical to SEQ ID NO: 742797

SEQ ID NO: 742801 - protein, 311 aa, Homo sapiens; identical to SEQ ID NO: 742797

SEQ ID NO: 742802 - protein, 311 aa, Homo sapiens; identical to SEQ ID NO: 742797

SEQ ID NO: 742803 - protein, 311 aa, Homo sapiens; identical to SEQ ID NO: 742797

SEQ ID NO: 742804 - protein, 311 aa, Homo sapiens; identical to SEQ ID NO: 742797

SEQ ID NO: 742805 - protein, 311 aa, Homo sapiens; identical to SEQ ID NO: 742797

SEQ ID NO: 742806 - protein, 268 aa, Homo sapiens
MSQRDTLVHLFAGGCGGTVGAILTCPLEVVKTRLQSSSVTLYISEVQLNTMAGASVNRVVSPGPLHCLKVILEKEGPRSLFRGLGPNLVGVAPSRAIYFAAYSNCKEKLNDVFDPDSTQVHMISAAMAGFTAITATNPIWLIKTRLQLDARNRGERRMGAFECVRKVYQTDGLKGFYRGMSASYAGISETVIHFVIYESIKQKLLEYKTASTMENDEESVKEASDFVGMMLAAATSKTCATTIAYPHEVVRTRTTCQPLTGPLRSHQV

SEQ ID NO: 742807 - protein, 106 aa, Homo sapiens
MSQRDTLVHLFAGGCGGTVGAILTCPLEVVKTRLQSSSVTLYISEVQLNTMAGASVNRVVSPGPLHCLKAIYFAAYSNCKEKLNDVFDPDSTQVHMISAAMAGMNV

SEQ ID NO: 742808 - protein, 297 aa, Homo sapiens
MSQRDTLVHLFAGGCGGTVGAILTCPLEVVKTRLQSSSVTLYISEVQLNTMAGASVNRVVSPGPLHCLKVILEKEGPRSLFRGLGPNLVGVAPSRAIYFAAYSNCKEKLNDVFDPDSTQVHMISAAMAEHKKLNTKECKIFHKYGCAILLAIVQKVKGFTAITATNPIWLIKTRLQLDARNRGERRMGAFECVRKVYQTDGLKGFYRGMSASYAGISETVIHFVIYESIKQKLLEYKTASTMENDEESVKEASDFVGMMLAAATSKTCATTIAYPHEVVRTRTTCQPLTGPLRSHQV

SEQ ID NO: 742809 - protein, 140 aa, Homo sapiens
MAGASVNRVVSPGPLHCLKVILEKEGPRSLFRGLGPNLVGVAPSRAIYTMYRLCESVRSAGSVLARSRRLGRGGGGTSREGRAGPTPSWHSRRAGEEVPMAPPDTKHGENSLNNGTKLRLSPEEPPWASGWGRTAVQSLQ

SEQ ID NO: 742810 - protein, 112 aa, Homo sapiens
MDGEEKTYGGCEGPDAMYVKLISSDGHEFIVKREHALTSGTIKAMLSGPGQFAENETNEVNFREIPSHVLSKVCMYFTYKVRYTNSSTEIPEFPIAPEIALELLMAANFLDC

SEQ ID NO: 742811 - protein, 112 aa, Homo sapiens; identical to SEQ ID NO: 742810

SEQ ID NO: 742812 - protein, 73 aa, Homo sapiens
NPKARYEAWVLAATGTDLPRVAESGSDPAEVILSTAPEPTGAGSWGWGGGPGIGAVAVRGDPAAVAAGLTRNY

SEQ ID NO: 742813 - protein, 107 aa, Homo sapiens
TTTKFAAASDAMYVKLISSDGHEFIVKREHALTSGTIKAMLSGPGQFAENETNEVNFREIPSHVLSKVCMYFTYKVRYTNSSTEIPEFPIAPEIALELLMAANFLDC

SEQ ID NO: 742814 - protein, 79 aa, Homo sapiens
INRIHTCVYLYYLFKPGQFAENETNEVNFREIPSHVLSKVCMYFTYKVRYTNSSTEIPEFPIAPEIALELLMAANFLDC

SEQ ID NO: 742815 - protein, 112 aa, Homo sapiens; identical to SEQ ID NO: 742810

SEQ ID NO: 742816 - protein, 112 aa, Homo sapiens; identical to SEQ ID NO: 742810

SEQ ID NO: 742817 - protein, 112 aa, Homo sapiens; identical to SEQ ID NO: 742810

SEQ ID NO: 742818 - protein, 112 aa, Homo sapiens; identical to SEQ ID NO: 742810

SEQ ID NO: 742819 - protein, 112 aa, Homo sapiens; identical to SEQ ID NO: 742810

SEQ ID NO: 742820 - protein, 181 aa, Homo sapiens
NPKARYEAWVLAATGTDLPRVAESGSDPAEVILSTAPEPTGAGSWGWGGGPGIGAVAVRGDPAAVAAGLTNGEEKTYGGCEGPDAMYVKLISSDGHEFIVKREHALTSGTIKAMLSGPGQFAENETNEVNFREIPSHVLSKVCMYFTYKVRYTNSSTEIPEFPIAPEIALELLMAANFLDC

SEQ ID NO: 742821 - protein, 112 aa, Homo sapiens; identical to SEQ ID NO: 742810

SEQ ID NO: 742822 - protein, 112 aa, Homo sapiens; identical to SEQ ID NO: 742810

SEQ ID NO: 742823 - protein, 90 aa, Homo sapiens
NPKARYEAWVLAATGTDLPRVAESGSDPAEVILSTAPEPTGAGSWGWGGGPGIGAVAVRGDPAAVAAGLTKSCCVAQAGVPGWSQIPDLK

SEQ ID NO: 742824 - protein, 181 aa, Homo sapiens; identical to SEQ ID NO: 742820

SEQ ID NO: 742825 - protein, 90 aa, Homo sapiens; identical to SEQ ID NO: 742823

SEQ ID NO: 742826 - protein, 88 aa, Homo sapiens
NPKARYEAWVLAATGTDLPRVAESGSDPAEVILSTAPEPTGAGSWGWGGGPGIGAVAVRGDPAAVAAGLTRSSGKEDLSEELMFYLET

SEQ ID NO: 742827 - protein, 104 aa, Homo sapiens
NPKARYEAWVLAATGTDLPRVAESGSDPAEVILSTAPEPTGAGSWGWGGGPGIGAVAVRGDPAAVAAGLTKIGSHCVVQAGLSLLGSGSTPASAIQSAGITGNY

SEQ ID NO: 742828 - protein, 112 aa, Homo sapiens; identical to SEQ ID NO: 742810

SEQ ID NO: 742829 - protein, 144 aa, Homo sapiens
MDGEEKTYGGCEGPDAMYVKLISSDGHEFIVKREHALTSGTIKAMLSGPGQFAENETNEVNFREIPSHVLSKVCMYFTYKVRYTNSSTEIPEFPIAPEIALELLMAVIPALSEDEAGRSLEARSLRPAWPPWQNPISTKNAKIS

SEQ ID NO: 742830 - protein, 114 aa, Homo sapiens
MDGEEKTYGGCEGPDAMYVKLISSDGHEFIVKREHALTSGTIKAMLSGPGQFAENETNEVNFREIPSHVLSKVCMYFTYKVRYTNSSTEIPEFPIAPEIALELLMGAKLRGTEL

SEQ ID NO: 742831 - protein, 90 aa, Homo sapiens; identical to SEQ ID NO: 742823

SEQ ID NO: 742832 - protein, 135 aa, Homo sapiens
  misc_feature (60)..(60): Xaa can be any naturally occurring amino acid
  misc_feature (84)..(84): Xaa can be any naturally occurring amino acid
MERRKPMVAVKDLMPCMSKIGIFILDWAMKLYWLKTRRTIAIKHSRARTKKGPMLGVGPXGQVWLRNGKPNERQPFSRRLPFDXVAYSGTGLLQLFILYRYPRVPAYKLNQASHRKNSVKISANLATLNIGHWKL

SEQ ID NO: 742833 - protein, 105 aa, Homo sapiens
GEARGVRAAASRCGRSGQARGVCRTSAHDLPRWEVRAAGQALTATWPRGPSPQARFSGEATAWPPVLISPPRRPRPSRCSPTACSPRRATSTIVGGRTAAGTESA

SEQ ID NO: 742834 - protein, 126 aa, Homo sapiens
ACPNPCYRPHHPPPHPGWEPTVQQLSKPQPLAFPLVGCGRGELPLDSSRAPRPLPLTQTNGHSPLEGAPHAALAWGSPPVGSHPRISQRLCTGKLGIAMKVLGGVALFWIIFILGYLTGYYVHKCK

SEQ ID NO: 742835 - protein, 131 aa, Homo sapiens
VRRAGSGLRLPGAAAVGRCDCARPRWLRTGGGGGVPWTDPHRPNPRCGARAGTARPAPCPAPCGCWGPPTPATFPSRPLARSASPVTFIFLGSRRLPHLSPRPAPLGGAGRWPGPDRNLAQRPQPSGKVLR

SEQ ID NO: 742836 - protein, 131 aa, Homo sapiens; identical to SEQ ID NO: 742835

SEQ ID NO: 742837 - protein, 90 aa, Homo sapiens
THMCVCTDSLASTKNQVLGYSLHGSSCLVTIAIAAVLVANEITQYTLAPRFELQEMRHFPQRAIKFGIPFPWSDITLEYSSSGSLQTTSS

SEQ ID NO: 742838 - protein, 103 aa, Homo sapiens
HTPLTPSSVLTPGRQSTCRRRVHISEGRKEHKANADHKTAPRKRREAPPFREFHSQDVASEKDRPDARTPELLPSTDSCKPGHTHSTEPRLTPRSLDFTITGA

SEQ ID NO: 742839 - protein, 236 aa, Homo sapiens
SPPVFPEHLTMCTGKCARCVGLSLITLCLVCIVANALLLVPNGETSWTNTNHLSLQVWLMGGFIGGGLMVLCPGIAAVRAGGKGCCGAGCCGNRCRMLRSVFSSAFGVLGAIYCLSVSGAGLRNGPRCLMNGEWGYHFEDTAWFSLYSCPPFSASSLPPFPRGLGHLGGTRLRGHSLHVGYLGLSKSPGTYSWGRGGARARCLLPRGLTPPTGELTCSTALYGIGARRPLAWSPGM

SEQ ID NO: 742840 - protein, 207 aa, Homo sapiens
SPPVFPEHLTMCTGKCARCVGLSLITLCLVCIVANALLLVPNGETSWTNTNHLSLQVWLMGGFIGGGLMVLCPGIAAVRAGGKGCCGAGCCGNRCRMLRSVFSSAFGVLGAIYCLSVSGAGLRNGPRCLMNGEWGYHFEDTAGAYLLNRTLWDRCEAPPRVVPWNVTLFSLLVAASCLEIVLCGIQLVNATIGVFCGDCRKKQDTPH

SEQ ID NO: 742841 - protein, 120 aa, Homo sapiens
RSAGVMAASAHGSVWGPLRLGIPGLCCRRPPLGLYARMRRLPGPEVSGRSVAAASGPGAWGTDHYCLELLRKRDYEGYLCSLLLPAESRSSVFALRAFNVELAQADYSCCCLAVLYATGI

SEQ ID NO: 742842 - protein, 222 aa, Homo sapiens
MRMQFWKKTVEDIYCDNPPHQPVAIELWKAVKRHNLTKRWLMKIVDEREKNLDDKAYRNIKELENYAENTQSSLLYLTLEILGIKDLHADHAASHIGKAQGIVTCLRATPYHGSRRKVFLPMDICMLHGVSQEDFLRRNQDKNVRDVIYDIASQAHLHLKHARSFHKTVPVKAFPAFLQTVSLEDFLKKIQRVDFDIFHPSLQQKNTLLPLYLYIQSWRKTY

SEQ ID NO: 742843 - protein, 103 aa, Homo sapiens
MEPGPTCCRNRHREPAGLAARSGFRLPIGEAQGTARPGLKAERSAGSGASAPADNKRTGRERPPPQALQPSSHVTQELSPSVLFAYLQIVGIHAGTANSPGYL

SEQ ID NO: 742844 - protein, 403 aa, Homo sapiens
RSAGVMAASAHGSVWGPLRLGIPGLCCRRPPLGLYARMRRLPGPEVSGRSVAAASGPGAWGTDHYCLELLRKRDYEGYLCSLLLPAESRSSVFALRAFNVELAQAVKDSVSEKTIGLMRMQFWKKTVEDIYCDNPPHQPVAIELWKCCQKRVSVTGATHRPDSGTPLLRSAHQQRQAQFLGPRLTSQSPSKDGKPEPPNWGLRRKSGWEAAVKRHNLTKRWLMKIVDEREKNLDDKAYRNIKELENYAENTQSSLLYLTLEILGIKDLHADHAASHIGKAQGIVTCLRATPYHGSRRKVFLPMDICMLHGVSQEDFLRRNQDKNVRDVIYDIASQAHLHLKHARSFHKTVPVKAFPAFLQTVSLEDFLKKIQRVDFDIFHPSLQQKNTLLPLYLYIQSWRKTY

SEQ ID NO: 742845 - protein, 103 aa, Homo sapiens; identical to SEQ ID NO: 742843

SEQ ID NO: 742846 - protein, 127 aa, Homo sapiens
PGQVRLCSPQSRSATTRSPLRRPCAARPGKAFPARPPRTVLEKVLKAYPPTDDPETVPAQSLLLLTLAPAQGWRLSTGLVLHGGLFFGLSDMVPALLESAGVQHNRWWSVVTSAQAVREEWLVAMES

SEQ ID NO: 742847 - protein, 339 aa, Homo sapiens
RSAGVMAASAHGSVWGPLRLGIPGLCCRRPPLGLYARMRRLPGPEVSGRSVAAASGPGAWGTDHYCLELLRKRDYEGYLCSLLLPAESRSSVFALRAFNVELAQAVKDSVSEKTIGLMRMQFWKKTVEDIYCDNPPHQPVAIELWKAVKRHNLTKRWLMKIVDEREKNLDDKAYRNIKELENYAENTQSSLLYLTLEILGIKDLHADHAASHIGKAQGIVTCLRATPYHGSRRKVFLPMDICMLHGVSQEDFLRRNQDKNVRDVIYDIASQAHLHLKHARSFHKTVPVKAFPAFLQTVSLEDFLKKIQRVDFDIFHPSLQQKNTLLPLYLYIQSWRKTY

SEQ ID NO: 742848 - protein, 222 aa, Homo sapiens; identical to SEQ ID NO: 742842

SEQ ID NO: 742849 - protein, 222 aa, Homo sapiens; identical to SEQ ID NO: 742842

SEQ ID NO: 742850 - protein, 81 aa, Homo sapiens
LAKCGSALPSPGPRPPGARSAGLARRAQGRHFQPAHPGLFFGLSDMVPALLESAGVQHNRWWSVVTSAQAVREEWLVAMES

SEQ ID NO: 742851 - protein, 76 aa, Homo sapiens
NLFSLGVLSLLECKLSTSSCTCLNIHKSDNECKESENSIEDISLPERTAMPRSIVRAHTVNSLNKKVQTRHVTWAL

SEQ ID NO: 742852 - protein, 108 aa, Homo sapiens
MQFLWTVYKREAPHVVPYGQCVTLGEQVGWQDRRPQAGRRRHSQVLSSTPAGDLPARPRSVPDDGSPVTLPALPSFAPMSACPQPQCCRLTYLSPRPALFFPTPRGRS

SEQ ID NO: 742853 - protein, 293 aa, Homo sapiens
MGFPAAALLCALCCGLLAPAARAGYSEERCSWRGSGLTQEPGSVGQLALACAEGAVEWLYPAGALRLTLGGPDPRARPGIACLRPVRPFAGAQVFAERAGGALELLLAEGPGPAGGRCVRWGPRERRALFLQATPHQDISRRVAAFRFELREDGRPELPPQAHGLGVDGACRPCSDAELLLAACTSDFVIHGIIHGVTHDVELQESVITVVAARVLRQTPPLFQAGRSGDQGLTSIRTPLRCGVHPGPGTFLFMGWSRFGEARLGCAPRFQEFRRAYEAARAAHLHPCEVALH

SEQ ID NO: 742854 - protein, 448 aa, Homo sapiens
NHQVGHLPYRHPEVPVDIKTSAPSEAPGLRSGQRGGRGQGEGAAKERRTARGGQGASLPRQGPPQPSRRLDRGIVLRRRPSSGPAPAPPRACYWRKVPGRAATGRHAAGPAPFPTRSKAAPALGLRGRRSGRGLGGFAGAGGGESPDSPDAARRAMGFPAAALLCALCCGLLAPAARAGYSEERCSWRGSGLTQEPGSVGQLALACAEGAVEWLYPAGALRLTLGGPDPRARPGIACLRPVRPFAGAQVFAERAGGALELLLAEGPGPAGGRCVRWGPRERRALFLQATPHQDISRRVAAFRFELREDGRPELPPQAHGLGVDGACRPCSDAELLLAACTSDFVIHGIIHGVTHDVELQESVITVVAARVLRQTPPLFQAGRSGDQGLTSIRTPLRCGVHPGPGTFLFMGWSRFGEARLGCAPRFQEFRRAYEAARAAHLHPCEVALH

SEQ ID NO: 742855 - protein, 223 aa, Homo sapiens
MGFPAAALLCALCCGLLAPAARAGYSEERCSWRGSGLTQEPGSVGQLALACAEGAVEWLYPAGALRLTLGGPDPRARPGIACLRPVRPFAGAQVFAERAGGALELLLAEGPGPAGGRCVRWGPRERRALFLQATPHQDISRRVAAFRFELREDGRPELPPQAHGLGVDGACRPCSDAELLLAACTSDFVSPPWGEPGACLPLNAYRSHMPPHSNSRDHPWGHP

SEQ ID NO: 742856 - protein, 223 aa, Homo sapiens; identical to SEQ ID NO: 742855

SEQ ID NO: 742857 - protein, 197 aa, Homo sapiens
MGFPAAALLCALCCGLLAPAARAGYSEERCSWRGSGLTQEPGSVGQLALACAEGAVEWLYPAGALRLTLGGPDPRARPGIACLRPVRPFAGAQVFAERAGGALELLLAEGPGPAGGRCVRWGPRERRALFLQATPHQDISRRVAAFRFELREDGRPELPPQAHGLGVDGACRPCSDAELLLAACTSDFGGWGPLLWR

SEQ ID NO: 742858 - protein, 293 aa, Homo sapiens; identical to SEQ ID NO: 742853

SEQ ID NO: 742859 - protein, 115 aa, Homo sapiens [sequence omitted]

SEQ ID NO: 742860 - protein, 308 aa, Homo sapiens
MGFPAAALLCALCCGLLAPAARAGYSEERCSWRGSGLTQEPGSVGQLALACAEGAVEWLYPAGALRLTLGGPDPRARPGIACLRPVRPFAGAQVFAERAGGALELLLAEGPGPAGGRCVRWGPRERRALFLQATPHQDISRRVAAFRFELREDGRPELPPQAHGLGVDGACRPCSDAELLLAACTSDFVIHGIIHGVTHDVELQESVITVEGGAHCFGGDGTINKNSVHAKKKKKKKKKKKKKKTKGGRKKNTPEGGPKKSENPNVCMVHKEGDDQKERNGNIKANGRKERTVTTHRSKSEKKVHKQE

SEQ ID NO: 742861 - protein, 358 aa, Homo sapiens
MGAVWSALLVGGGLAGALFVWLLRGGPGDTGKDGDAEQEKDAPLGGAAIPGGHQSGSSGLSPGPSGQELVTKPEHLQESNGHLISKTKDLGKLQAASWRLQNPSREVCDNSREHVPSGQFPDTEAPATSETSNSRSYSEVSRNESLESPMGEWGFQKGQEISAKAATCFAEKLPSSNLLKNRAKEEMSLSDLNSQDRVDHEEWEMVPRHSSWGDVGVGGSLKAPVLNLNQGMDNGRSTLVEARGQQVHGKMERVAVMPAGSQQVSVRFQVHYVTSTDVQFIAVTGDHECLGRWNTYIPLHYNKDGFWSHSIFLPADTVVEWKFVLVENGGVTRWEECSNRFLETGHEDKVVHAWWGIH

SEQ ID NO: 742862 - protein, 366 aa, Homo sapiens
MADRRRRLRPGTLAPVREGVNCRSRCFTKHKNGLKFPTSLHSRQLVFPRKGLDDFRKGCPPCTGLVTQVPVEGFLPQIYHRAPQLAPKKRQIKLLKEADVLSKLSPAQQARKAFLEDVEAHLTPHPLALYLNLEEAMPIELLSKVLEVLDPDRKLEDTWAYCQDTRKGMKEPTKLLKKHSTQVYLGPSKKTSVSNAGQWLYEEKPHKMDLLHENGPRPGLHENVCKAVSDFCKWVTTFGISDIDEEFILKQFDIDYETKPSHDALHTMKLNQVPLELKRSVGLSKLQETEFFQKLGYERKLQKPQNPYKPKWVKMRYGAWYLNPKLWKKQRVDEPLVDPEVSHKAQEENFKKELQEQSIFKKAMDI

SEQ ID NO: 742863 - protein, 165 aa, Homo sapiens
MGAVWSALLVGGGLAGALFVWLLRGGPGDTGKDGDAEQEKDAPLGGAAIPGGHQSGSSGLSPGPSGQELVTKPGILPPVTPGHICQSFEVHRGREQRDKPTWSFPRGPFLRTGSPKGTGPSPRPSVSQAGWYAQAGFLSGPPRAAPLPSPSAPAPEDLVLPLRRG

SEQ ID NO: 742864 - protein, 358 aa, Homo sapiens; identical to SEQ ID NO: 742861

SEQ ID NO: 742865 - protein, 408 aa, Homo sapiens
MADRRRRLRPGTLAPVREGVNCRSRCFTKHKNGLKFPTSLHSRQLVFPRKGLDDFRKGCPPCTGLVTQVPVEGFLPQIYHRAPQLAPKKRQIKLLKEADVLSKLSPAQQARKAFLEDVEAHLTPHPLALYLNLEEAMPIELLSKVLEVLDPDRKLEDTWAYCQDTRKGMKEPTKLLKKHSTQVYLGPSKKTSVSNAGQWLYEEKPHKMDLLHENGPRPGLHENVCKAVSDFCKWVTTFGISDIDEEFILKQFDIDYETKPSHDALHTMKLNQVPLELKRSVGLSKLQETEFFQKLGYERKLQKPQNPYKPKWVKMRYGAWYLNPKLWKKQRVDEPLVDPEVSHKAQEENFKKELQEQEELLADLHGTVAFKDFILSRGYRMPRFLENMYIGKECKRACNKTPIKRTQA

SEQ ID NO: 742866 - protein, 240 aa, Homo sapiens
MADRRRRLRPGTLAPVREGVNCRSRCFTKHKNGLKFPTSLHSRQLVFPRKGLDDFRKGCPPCTGLVTQVPVEGFLPQIYHRAPQLAPKKRQIKLLKEADVLSKLSPAQQARKAFLEDVEAHLTPHPLALYLNLEEAMPIELLSKVLEVLDPDRKLEDTWAYCQDTRKGMKEPTKLLKKHSTQVYLGPSKKTSVSNAGQWLYEEKPHKMDLLHENGPRPGLHENVCKAVSDFCKWVTTFVS

SEQ ID NO: 742867 - protein, 258 aa, Homo sapiens
SGDQPFDPAADFLFFWGTVFLITTTLVALLKKENEVSVVKEETQGITDTYKLLFAIIKMPAVLTFCLLILTAKIGFSAADAVTGLKLVEEGVPKEHLALLAVPMVPLQIILPLIISKYTAGPQPLNTFYKAMPYRLLLGLEYALLVWWTPKVEHQGGFPIYYYIVVLLSYALHQVTVYSMYVSIMAFNAKVSDPLIGGTYMTLLNTVSNLGGNWPSTVALWLVDPLTVKECVGASNQNCRTPDAVELCKKGADWILKR

SEQ ID NO: 742868 - protein, 549 aa, Homo sapiens
MSPTISHKDSSRQRRPGNFSHSLDMKSGPLPPGGWDDSHLDSAGREGDREALLGDTGTGDFLKAPQSFRAELSSILLLLFLYVLQGIPLGLAGSIPLILQSKNVSYTDQAFFSFVFWPFSLKLLWAPLVDAVYVKNFGRRKSWLVPTQYILGLFMIYLSTQVDRLLGNTDDRTPDVIALTVAFFLFEFLAATQDIAVDGWALTMLSRENVGYASTCNSVGQTAGYFLGNVLFLALESADFCNKYLRFQPQPRGIVTLSDFLFFWGTVFLITTTLVALLKKENEVSVVKEETQGITDTYKLLFAIIKMPAVLTFCLLILTAKIGFSAADAVTGLKLVEEGVPKEHLALLAVPMVPLQIILPLIISKYTAGPQPLNTFYKAMPYRLLLGLEYALLVWWTPKVEHQGGFPIYYYIVVLLSYALHQVTVYSMYVSIMAFNAKVSDPLIGGTYMTLLNTVSNLGGNWPSTVALWLVDPLTVKECVGASNQNCRTPDAVELCKKLGGSCVTALDGYYVESIICVFIGFGWWFFLGPKFKKLQDEGSSSWKCKRNN

SEQ ID NO: 742869 - protein, 549 aa, Homo sapiens; identical to SEQ ID NO: 742868

SEQ ID NO: 742870 - protein, 549 aa, Homo sapiens; identical to SEQ ID NO: 742868

SEQ ID NO: 742871 - protein, 448 aa, Homo sapiens
MSPTISHKDSSRQRRPGNFSHSLDMKSGPLPPGGWDDSHLDSAGREGDREALLGDTGTGDFLKAPQSFRAELSSILLLLFLYVLQGIPLGLAGSIPLILQSKNVSYTDQAFFSFVFWPFSLKLLWAPLVDAVYVKNFGRRKSWLVPTQYILGLFMIYLSTQVDRLLGNTDDRTPDVIALTVAFFLFEFLAATQDIAVDGWALTMLSRENVGYASTCNSVGQTAGYFLGNVLFLALESADFCNKYLRFQPQPRGIVTLSDFLFFWGTVFLITTTLVALLKKENEVSVVKEETQGITDTYKLLFAIIKMPAVLTFCLLILTAKVTVYSMYVSIMAFNAKVSDPLIGGTYMTLLNTVSNLGGNWPSTVALWLVDPLTVKECVGASNQNCRTPDAVELCKKLGGSCVTALDGYYVESIICVFIGFGWWFFLGPKFKKLQDEGSSSWKCKRNN

SEQ ID NO: 742872 - protein, 506 aa, Homo sapiens
MSPTISHKDSSRQRRPGNFSHSLDMKSGPLPPGGWDDSHLDSAGREGDREALLGDTGTGDFLKAPQSFRAELSSILLLLFLYVLQGIPLGLAGSIPLILQSKNVSYTDQAFFSFVFWPFSLKLLWAPLVDAVYVKNFGRRKSWLVPTQYILGLFMIYLSTQVDRLLGNTDDRTPDVIALTVAFFLFEFLAATQDIAVDGWALTMLSRENVGYASTCNSVGQTAGYFLGNVLFLALESADFCNKYLRFQPQPRGIVTLSDFLFFWGTVFLITTTLVALLKKENEVSVVKEETQGITDTYKLLFAIIKMPAVLTFCLLILTAKIGFSAADAVTGLKLVEEGVPKEHLALLAVPMVPLQIILPLIISKYTAGPQPLNTFYKAMPYRLLLGLEYALLVWWTPKVEHQGGFPIYYYIVVLLSYALHQVTVYSMYVSIMAFNAKVSDPLIGGTYMTLLNTVSNLGGNWPSTVALWLVDPLTVKECVGASNQNCRTPDAVELCKKGADWILKR

SEQ ID NO: 742873 - protein, 549 aa, Homo sapiens; identical to SEQ ID NO: 742868

SEQ ID NO: 742874 - protein, 549 aa, Homo sapiens; identical to SEQ ID NO: 742868

SEQ ID NO: 742875 - protein, 549 aa, Homo sapiens; identical to SEQ ID NO: 742868

SEQ ID NO: 742876 - protein, 194 aa, Homo sapiens
CFYIADWFFSSRCCNRTEIGRRGSTQRTFSLIGSSNGSFADNTASDYQQIHCRSPAIKHILQSHALQVTVYSMYVSIMAFNAKVSDPLIGGTYMTLLNTVSNLGGNWPSTVALWLVDPLTVKECVGASNQNCRTPDAVELCKKLGGSCVTALDGYYVESIICVFIGFGWWFFLGPKFKKLQDEGSSSWKCKRNN

SEQ ID NO: 742877 - protein, 448 aa, Homo sapiens; identical to SEQ ID NO: 742871

SEQ ID NO: 742878 - protein, 448 aa, Homo sapiens; identical to SEQ ID NO: 742871

SEQ ID NO: 742879 - protein, 225 aa, Homo sapiens
MATHALEIAGLFLGGVGMVGTVAVTVMPQWRVSAFIENNIVVFENFWEGLWMNCVRQANIRMQCKIYDSLLALSPDLQAARGLMCAASVMSFLAFMMAILGMKCTRCTGDNEKVKAHILLTAGIIFIITGMVVLIPVSWVANAIIRDFYNSIVNVAQKRELGEALYLGWTTALVLIVGGALFCCVFCCNEKSSSYRYSIPSHRTTQKSYHTGKKSPSVYSRSQYV

SEQ ID NO: 742880 - protein, 1616 aa, Homo sapiens
GHPSKPYYAPGAPTPRPLHGKLESLHGCVQALLREPAQPGLWEQLGQLYESEHDSEEATRCYHSALRYGGSFAELGPRIGRLQQAQLWNFHTGSCQHRAKVLPPLEQVWNLLHLEHKRNYGAKRGGPPVKRAAEPPVVQPVPPAALSGPSGEEGLSPGGKRRRGCNSEQTGLPPGLPLPPPPLPPPPPPPPPPPPPPPLPGLATSPPFQLTKPGLWSTLHGDAWGPERKGSAPPERQEQRHSLPHPYPYPAPAYTAHPPGHRLVPAAPPGPGPRPPGAESHGCLPATRPPGSDLRESRVQRSRMDSSVSPAATTACVPYAPSRPPGLPGTTTSSSSSSSSNTGLRGVEPNPGIPGADHYQTPALEVSHHGRLGPSAHSSRKPFLGAPAATPHLSLPPGPSSPPPPPCPRLLRPPPPPAWLKGPACRAAREDGEILEELFFGTEGPPRPAPPPLPHREGFLGPPASRFSVGTQDSHTPPTPPTPTTSSSNSNSGSHSSSPAGPVSFPPPPYLARSIDPLPRPPSPAQNPQDPPLVPLTLALPPAPPSSCHQNTSGSFRRPESPRPRVSFPKTPEVGPGPPPGPLSKAPQPVPPGVGELPARGPRLFDFPPTPLEDQFEEPAEFKILPDGLANIMKMLDESIRKEEEQQQHEAGVAPQPPLKEPFASLQSPFPTDTAPTTTAPAVAVTTTTTTTTTTTATQEEEKKPPPALPPPPPLAKFPPPSQPQPPPPPPPSPASLLKSLASVLEGQKYCYRGTGAAVSTRPGPLPTTQYSPGPPSGATALPPTSAAPSAQGSPQPSASSSSQFSTSGGPWARERRAGEEPVPGPMTPTQPPPPLSLPPARSESEVLEEISRACETLVERVGRSATDPADPVDTAEPADSGTERLLPPAQAKEEAGGVAAVSGSCKRRQKEHQKEHRRHRRACKDSVGRRPREGRAKAKAKVPKEKSRRVLGNLDLQSEEIQGREKSRPDLGGASKAKPPTAPAPPSAPAPSAQPTPPSASVPGKKAREEAPGPPGVSRADMLKLRSLSEGPPKELKIRLIKVESGDKETFIASEVEERRLRMADLTISHCAADVVRASRNAKVKGKFRESYLSPAQSVKPKINTEEKLPREKLNPPTPSIYLESKRDAFSPVLLQFCTDPRNPITVIRGLAGSLRLNLGLFSTKTLVEASGEHTVEVRTQVQQPSDENWDLTGTRQIWPCESSRSHTTIAKYAQYQASSFQESLQEEKESEDEESEEPDSTTGTPPSSAPDPKNHHIIKFGTNIDLSDAKRWKPQLQELLKLPAFMRVTSTGNMLSHVGHTILGMNTVQLYMKVPGSRTPGHQENNNFCSVNINIGPGDCEWFAVHEHYWETISAFCDRHGVDYLTGSWWPILDDLYASNIPVYRFVQRPGDLVWINAGTVHWVQATGWCNNIAWNVGPLTAYQYQLALERYEWNEVKNVKSIVPMIHVSWNVARTVKISDPDLFKMIKFCLLQSMKHCQVQRESLVRAGKKIAYQGRVKDEPAYYCNECDVEVFNILFVTSENGSRNTYLVHCEGCARRRSAGLQGVVVLEQYRTEELAQAYDAFTLVRARRARGQRRRALGQAAGTGFGSPAAPFPEPPPAFSPQAPASTSR

SEQ ID NO: 742881 - protein, 1577 aa, Homo sapiens
GHPSKPYYAPGAPTPRPLHGKLESLHGCVQALLREPAQPGLWEQLGQLYESEHDSEEATRCYHSALRYGGSFAELGPRIGRLQQAQLWNFHTGSCQHRAKVLPPLEQVWNLLHLEHKRNYGAKRGGPPVKRAAEPPVVQPVPPAALSGPSGEEGLSPGGKRRRGCNSEQTGLPPGLPLPPPPLPPPPPPPPPPPPPPPLPGLATSPPFQLTKPGLWSTLHGDAWGPERKGSAPPERQEQRHSLPHPYPYPAPAYTAHPPGHRLVPAAPPGPGPRPPGAESHGCLPATRPPGSDLRESRVQRSRMDSSVSPAATTACVPYAPSRPPGLPGTTTSSSSSSSSNTGLRGVEPNPGIPGADHYQTPALEVSHHGRLGPSAHSSRKPFLGAPAATPHLSLPPGPSSPPPPPCPRLLRPPPPPAWLKGPACRAAREDGEILEELFFGTEGPPRPAPPPLPHREGFLGPPASRFSVGTQDSHTPPTPPTPTTSSSNSNSGSHSSSPAGPVSFPPPPYLARSIDPLPRPPSPAQNPQDPPLVPLTLALPPAPPSSCHQNTSGSFRRPESPRPRVSFPKTPEVGPGPPPGPLSKAPQPVPPGVGELPARGPRLFDFPPTPLEDQFEEPAEFKILPDGLANIMKMLDESIRKEEEQQQHEAGVAPQPPLKEPFASLQSPFPTDTAPTTTAPAVAVTTTTTTTTTTTATQEEEKKPPPALPPPPPLAKFPPPSQPQPPPPPPPSPASLLKSLASVLEGQKYCYRGTGAAVSTRPGPLPTTQYSPGPPSGATALPPTSAAPSAQGSPQPSASSSSQFSTSGGPWARERRAGEEPVPGPMTPTQPPPPLSLPPARSESEVLEEISRACETLVERVGRSATDPADPVDTAEPADSGTERLLPPAQAKEEAGGVAAVSGSCKRRQKEHQKEHRRHRRACKDSVGRRPREGRAKAKAKVPKEKSRRVLGNLDLQSEEIQGREKSRPDLGGASKAKPPTAPAPPSAPAPSAQPTPPSASVPGKKAREEAPGPPGVSRADMLKLRSLSEGPPKELKIRLIKVESGDKETFIASEVEERRLRMADLTISHCAADVVRASRNAKVKGKFRESYLSPAQSVKPKINTEEKLPREKLNPPTPSIYLESKRDAFSPVLLQFCTDPRNPITVIRGLAGSLRLNLGLFSTKTLVEASGEHTVEVRTQVQQPSDENWDLTGTRQIWPCESSRSHTTIAKYAQYQASSFQESLQEEKESEDEESEEPDSTTGTPPSSAPDPKNHHIIKFGTNIDLSDAKRWKPQLQELLKLPAFMRVTSTGNMLSHVGHTILGMNTVQLYMKVPGSRTPGHQENNNFCSVNINIGPGDCEWFAVHEHYWETISAFCDRHGVDYLTGSWWPILDDLYASNIPVYRFVQRPGDLVWINAGTVHWVQATGWCNNIAWNVGPLTAYQYQLALERYEWNEVKNVKSIVPMIHVSWNVARTVKISDPDLFKMIKFCLLQSMKHCQVQRESLVRAGKKIAYQGRVKDEPAYYCNECDVEVFNILFVTSENGSRNTYLVHCEGCARRRSAGLQGVVVLEQYRTEELAQAYDAFTLAPASTSR

SEQ ID NO: 742882 - protein, 458 aa, Homo sapiens
AGGYPRGYLGLFSTKTLVEASGEHTVEVRTQVQQPSDENWDLTGTRQIWPCESSRSHTTIAKYAQYQASSFQESLQEEKESEDEESEEPDSTTGTPPSSAPDPKNHHIIKFGTNIDLSDAKRSVGLRPGKLGQECCWTSWRGRGVASRALPHRRWKPQLQELLKLPAFMRVTSTGNMLSHVGHTILGMNTVQLYMKVPGSRTPGHQENNNFCSVNINIGPGDCEWFAVHEHYWETISAFCDRHGVDYLTGSWWPILDDLYASNIPVYRFVQRPGDLVWINAGTVHWVQATGWCNNIAWNVGPLTAYQYQLALERYEWNEVKNVKSIVPMIHVSWNVARTVKISDPDLFKMIKFCLLQSMKHCQVQRESLVRAGKKIAYQGRVKDEPAYYCNECDVEVFNILFVTSENGSRNTYLVHCEGCARRRSAGLQGVVVLEQYRTEELAQAYDAFTLAPASTSR

SEQ ID NO: 742883 - protein, 355 aa, Homo sapiens
SSSSPYYRLWKDEESEEPDSTTGTPPSSAPDPKNHHIIKFGTNIDLSDAKRWKPQLQELLKLPAFMRVTSTGNMLSHVGHTILGMNTVQLYMKVPGSRTPGHQENNNFCSVNINIGPGDCEWFAVHEHYWETISAFCDRHGVDYLTGSWWPILDDLYASNIPVYRFVQRPGDLVWINAGTVHWVQATGWCNNIAWNVGPLTAYQYQLALERYEWNEVKNVKSIVPMIHVSWNVARTVKISDPDLFKMIKFCLLQSMKHCQVQRESLVRAGKKIAYQGRVKDEPAYYCNECDVEVFNILFVTSENGSRNTYLVHCEGCARRRSAGLQGVVVLEQYRTEELAQAYDAFTLAPASTSR

SEQ ID NO: 742884 - protein, 978 aa, Homo sapiens
GHPSKPYYAPGAPTPRPLHGKLESLHGCVQALLREPAQPGLWEQLGQLYESEHDSEEATRCYHSALRYGGSFAELGPRIGRLQQAQLWNFHTGSCQHRAKVLPPLEQVWNLLHLEHKRNYGAKRGGPPVKRAAEPPVVQPVPPAALSGPSGEEGLSPGGKRRRGCNSEQTGLPPGLPLPPPPLPPPPPPPPPPPPPPPLPGLATSPPFQLTKPGLWSTLHGDAWGPERKGSAPPERQEQRHSLPHPYPYPAPAYTAHPPGHRLVPAAPPGPGPRPPGAESHGCLPATRPPGSDLRESRVQRSRMDSSVSPAATTACVPYAPSRPPGLPGTTTSSSSSSSSNTGLRGVEPNPGIPGADHYQTPALEVSHHGRLGPSAHSSRKPFLGAPAATPHLSLPPGPSSPPPPPCPRLLRPPPPPAWLKGPACRAAREDGEILEELFFGTEGPPRPAPPPLPHREGFLGPPASRFSVGTQDSHTPPTPPTPTTSSSNSNSGSHSSSPAGPVSFPPPPYLARSIDPLPRPPSPAQNPQDPPLVPLTLALPPAPPSSCHQNTSGSFRRPESPRPRVSFPKTPEVGPGPPPGPLSKAPQPVPPGVGELPARGPRLFDFPPTPLEDQFEEPAEFKILPDGLANIMKMLDESIRKEEEQQQHEAGVAPQPPLKEPFASLQSPFPTDTAPTTTAPAVAVTTTTTTTTTTTATQEEEKKPPPALPPPPPLAKFPPPSQPQPPPPPPPSPASLLKSLASVLEGQKYCYRGTGAAVSTRPGPLPTTQYSPGPPSGATALPPTSAAPSAQGSPQPSASSSSQFSTSGGPWARERRAGEEPVPGPMTPTQPPPPLSLPPARSESEVLEEISRACETLVERVGRSATDPADPVDTAEPADSGTERLLPPAQAKEEAGGVAAVSGSCKRRQKEHQKEHRRHRRACKDSVGRRPREGRAKAKAKVPKEKSRRVLGTHCPMPPSDACPQEAAQKVQENQGD

SEQ ID NO: 742885 - protein, 1577 aa, Homo sapiens; identical to SEQ ID NO: 742881

SEQ ID NO: 742886 - protein, 179 aa, Homo sapiens
RWSAIADAASCRESPHCGPLLCTMSGGLLKALRSDSYVELSQYRDQHFRGDNEEQEKLLKKSCTLYVGNLSFYTTEEQIYELFSKSGDIKKIIMGLDKMKKTACGFCFVEYYSRADAENAMRYINGTRLDDRIIRTDWDAGFKEGRQYGRGRSGGQVRDEYRQDYDAGRGGYGKLAQNQ

SEQ ID NO: 742887 - protein, 123 aa, Homo sapiens
RWSAIADAASCRESPHCGPLLCTMSGGLLKALRSDSYVELSQYRDQHFRGDNEEQEKLLKKSCTLYVGNLSFYTTEEQIYELFSKSGDIKKIIMGLDKMKKTACGFCFVEYPSHGSNVAAEPG

SEQ ID NO: 742888 - protein, 77 aa, Homo sapiens
RWSAIADAASCRESPHCGPLLCTMSGGLLKALRSDSYVELSQYRDQHFRVREAGPRDGKALGKNAEKRVTMKNKKNY

SEQ ID NO: 742889 - protein, 138 aa, Homo sapiens
MVLRKLYAGDNEEQEKLLKKSCTLYVGNLSFYTTEEQIYELFSKSGDIKKIIMGLDKMKKTACGFCFVEYYSRADAENAMRYINGTRLDDRIIRTDWDAGFKEGRQYGRGRSGGQVRDEYRQDYDAGRGGYGKLAQNQ

SEQ ID NO: 742890 - protein, 76 aa, Homo sapiens
RWSAIADAASCRESPHCGPLLCTMSGGLLKALRSDSYVELSQYRDQHFRGDNEEQEKLLKKSYITHAQMRKTPCGT

SEQ ID NO: 742891 - protein, 145 aa, Homo sapiens
MNNESIYLKHKGHDFVYLVGNACFLTQLEERPLYELFSPEWCTIMEDISGVRFWSIYASKRHAILDLWIFVLYSLTYYSRADAENAMRYINGTRLDDRIIRTDWDAGFKEGRQYGRGRSGGQVRDEYRQDYDAGRGGYGKLAQNQ

SEQ ID NO: 742892 - protein, 179 aa, Homo sapiens; identical to SEQ ID NO: 742886

SEQ ID NO: 742893 - protein, 179 aa, Homo sapiens; identical to SEQ ID NO: 742886

SEQ ID NO: 742894 - protein, 199 aa, Homo sapiens
RWSAIADAASCRESPHCGPLLCTMSGGLLKALRSDSYVELSQYRDQHFRGDNEEQEKLLKKSCTLYVGNLSFYTTEEQIYELFSKSGDIKKIIMGLDKMKKTACGFCFVEYYSRADAENAMRYINGTRLDDRIIRTDWDAGFKEGRQYGRGRSGGQVRDEYRQDYDAGRGGYGKLALWPVEFAEEHHLKSAHEPIFTKI

SEQ ID NO: 742895 - protein, 179 aa, Homo sapiens; identical to SEQ ID NO: 742886

SEQ ID NO: 742896 - protein, 76 aa, Homo sapiens; identical to SEQ ID NO: 742890

SEQ ID NO: 742897 - protein, 569 aa, Homo sapiens
MGSTLGCHRSIPRDPSDLSHSRKFSAACNFSNILVNQERLNINTATEEELMTLPGVTRAVARSIVEYREYIGGFKKVEDLALVSGVGATKLEQVKFEICVSSKGSSAQHSPSSLRRDLLAEQQPHHLATAVPLTPRVNINTATPAQLMSVRGLSEKMALSIVDFRREHGPFRSVEDLVRMDGINAAFLDRIRHQVFAERSRPPSTHTNGGLTFTAKPHPSPTSLSLQSEDLDLPPGGPTQIISTRPSVEAFGGTRDGRPVLRLATWNLQGCSVEKANNPGVREVVCMTLLENSIKLLAVQELLDREALEKFCTELNQPTLPNIRKWKGPRGCWKAVVAEKPSNQLQKGAGYAGFLWDAAAGMELRDAGSQESSPSNGHGKLAGPSPYLGRFKVGSHDLTLVNLHLAALTLLGSENPSKNHSDGHRLASFAQTLQETLKGEKDVIILGDFGQGPDSNDYDILRKEKFHHLIPAHTFTNISTKNPQGSKSLDNIWISKSLKKVFTGHWAVVREGLTNPWIPDNWSWGGVASEHCPVLAEFYTEKDWSKKDAPRNGSGVALERSEANIKHER

SEQ ID NO: 742898 - protein, 569 aa, Homo sapiens; identical to SEQ ID NO: 742897

SEQ ID NO: 742899 - protein, 289 aa, Homo sapiens
MQCLASQAAASRDCFRREPTLLTCALSLQFFCTELNQPTLPNIRKWKGPRGCWKAVVAEKPSNQLQKGAGYAGFLWDAAAGMELRDAGSQESSPSNGHGKLAGPSPYLGRFKVGSHDLTLVNLHLAALTLLGSENPSKNHSDGHRLASFAQTLQETLKGEKDVIILGDFGQGPDSNDYDILRKEKFHHLIPAHTFTNISTKNPQGSKSLDNIWISKSLKKVFTGHWAVVREGLTNPWIPDNWSWGGVASEHCPVLAEFYTEKDWSKKDAPRNGSGVALERSEANIKHER

SEQ ID NO: 742900 - protein, 569 aa, Homo sapiens; identical to SEQ ID NO: 742897

SEQ ID NO: 742901 - protein, 398 aa, Homo sapiens
RGSQPRPIDVQTLNRNPGSCRHWHSYSEGLGHPRVSQVTFPPPQEAMTEAGKLPLPLPPRLDWFVHTQMGQLAQDGVPEWFHGAISREDAENLLESQPLGSFLIRVSHSHVGYTLSYKAQSSCCHFMVKLLDDGTFMIPGEKVAHTSLDALVTFHQQKPIEPRRELLTQPCRQKDPANVDYEDLFLYSNAVAEEAACPVSAPEEASPKPVLCHQSKERKPSAEMNRITTKEATSSCPPKSPLGETRQKLWRSLKMLPERGQRVRQQLKSHLATVNLSSLLDVRRSTVISGPGTGKGSQDHSGDPTSGDRGYTDPCVATSLKSPSQPQAPKDRKVPTRKAERSVSCIEVTPGDRSWHQMVVRALSSQESKPEHQGLAEPENDQLPEEYQQPPPFAPGYC

SEQ ID NO: 742902 - protein, 358 aa, Homo sapiens
QGGHPKVSQVTFPPPQEAMTEAGKLPLPLPPRLDWFVHTQMGQLAQDGVPEWFHGAISREDAENLLESQPLGSFLIRVSHSHVGYTLSYKAQSSCCHFMVKLLDDGTFMIPGEKVAHTSLDALVTFHQQKPIEPRRELLTQPCRQKDPANVDYEDLFLYSNAVAEEAACPVSAPEETESCFVDQAGVEWHSLGSLQPPPPRFKRFSCLSLLSSWDYSLPKASPVSPIKGKEAVSRDEQNNHQGSHFLLPPKIPSWRDPPETLEEPQNAPRERPEGPAAAKKPPRHCELVVTLGCPEIHGDLRPWDRKRQPRSLRGSHLGGQRLHGSLCGHISQKPLTAPGTKRQKGPHQEGREVGQLH

SEQ ID NO: 742903 - protein, 501 aa, Homo sapiens
FPPFSTQVTFPPPQEAMTEAGKLPLPLPPRLDWFVHTQMGQLAQDGVPEWFHGAISREDAENLLESQPLGSFLIRVSHSHVGYTLSYKKAWAGIQGRGRWALGFPWRGQGVLHVIASQKAAVTEAVDLRTGAASQAMSEAFVRSGMFYLRPAFVLLCYKWGKLRHSEVSNLLGVAWPVSEEACMGTWGSLAVAVTLPAQGLGTWGRDEGEWMSQPPQCLRRAQSSCCHFMVKLLDDGTFMIPGEKVAHTSLDALVTFHQQKPIEPRRELLTQPCRQKDPANVDYEDLFLYSNAVAEEAACPVSAPEEASPKPVLCHQSKERKPSAEMNRITTKEATSSCPPKSPLGETRQKLWRSLKMLPERGQRVRQQLKSHLATVNLSSLLDVRRSTVISGPGTGKGSQDHSGDPTSGDRGYTDPCVATSLKSPSQPQAPKDRKVPTRKAERSVSCIEVTPGDRSWHQMVVRALSSQESKPEHQGLAEPENDQLPEEYQQPPPFAPGYC

SEQ ID NO: 742904 - protein, 398 aa, Homo sapiens; identical to SEQ ID NO: 742901

SEQ ID NO: 742905 - protein, 310 aa, Homo sapiens
FPPFSTQVTFPPPQEAMTEAGKLPLPLPPRLDWFVHTQMGQLAQDGVPEWFHGAISREDAENLLESQPLGSFLIRVSHSHVGYTLSYKKAWAGIQGRGRWALGFPWRGQGVLHVIASQKAAVTEAVDLRTGAASQAMSEAFVRSGMFYLRPAFVLLCYKWGKLRHSEVSNLLGVAWPVSEEACMGTWGSLAVAVTLPAQGLGTWGRDEGEWMSQPPQCLRRAQSSCCHFMVKLLDDGTFMIPGEKVAHTSLDALVTFHQQKPIEPRRELLTQPCRQKDPANVDYEDLFLYSNAVAEEAACPVSAPEEVCI

SEQ ID NO: 742906 - protein, 179 aa, Homo sapiens
QGGHPKVSQVTFPPPQEAMTEAGKLPLPLPPRLDWFVHTQMGQLAQDGVPEWFHGAISREDAENLLESQPLGSFLIRVSHSHVGYTLSYKAQSSCCHFMVKLLDDGTFMIPGEKVAHTSLDALVTFHQQKPIEPRRELLTQPCRQKDPANVDYEDLFLYSNAVAEEAACPVSAPEEVCI

SEQ ID NO: 742907 - protein, 74 aa, Homo sapiens
ENCPGARPGGDEIPGDEAAIAQRDTWGWEVQGQDAGRDVGASLSSIRGREWRGLCQRVSGEGEVGTAQRSQWAG

SEQ ID NO: 742908 - protein, 123 aa, Homo sapiens
GLYVELQGQRHLGSTLLRTRSKSPVRTHIQAASTSALPQERGSLLHVGKSCPCFPSGQLGVWSLGSKVKHTLLLPSFPAVETGVLLCCPGWSQTPGFKQSFHFGLPKCWDYRHEPPCPASFSY

SEQ ID NO: 742909 - protein, 152 aa, Homo sapiens
DYHAKRQQISAFSSLQNTWTIQSSISLLFRMKSVYNIRPLTPQYVRLFLVAGNFFRIQKLLMEASVFVIKEGAVCGIARPKTSRVNSSQDQIQVASENTHSGSLHQRPASGARLPASCGQELPLFSQRAVGGLEPRKQSEAHTPASFLPCSW

SEQ ID NO: 742910 - protein, 105 aa, Homo sapiens [sequence omitted]

SEQ ID NO: 742911 - protein, 252 aa, Homo sapiens
MSGRRTRSGGAAQRSGPRAPSPTKPLRRSQRKSGSELPSILPEIWPKTPSAAAVRKPIVLKRIVAHAVEVPAVQSPRRSPRISFFLEKENEPPGRELTKEDLFKTHSVPATPTSTPVPNPEAESSSKEGELDARDLEMSKKVRRSYSRLETLGSASTSTPGRRSCFGFEGLLGAEDLSGVSPVVCSKLTEVPRVCAKPWAPDMTLPGISPPPEKQKRKKKKMPEILKTELDEWAAAMNAEFEAAEQFDLLVE

SEQ ID NO: 742912 - protein, 252 aa, Homo sapiens; identical to SEQ ID NO: 742911

SEQ ID NO: 742913 - protein, 252 aa, Homo sapiens; identical to SEQ ID NO: 742911

SEQ ID NO: 742914 - protein, 252 aa, Homo sapiens; identical to SEQ ID NO: 742911

SEQ ID NO: 742915 - protein, 252 aa, Homo sapiens; identical to SEQ ID NO: 742911

SEQ ID NO: 742916 - protein, 115 aa, Homo sapiens
MSKKVRRSYSRLETLGSASTSTPGRRSCFGFEGLLGAEDLSGVSPVVCSKLTEVPRVCAKPWAPDMTLPGISPPPEKQKRKKKKMPEILKTELDEWAAAMNAEFEAAEQFDLLVE

SEQ ID NO: 742917 - protein, 123 aa, Homo sapiens
MSGRRTRSGGAAQRSGPRAPSPTKPLRRSQRKSGSELPSILPEIWPKTPSAAAVRKPIVLKRIVAHAVEVPAVQSPRRSPRAAGPALASRGCWGQKTCPESRQWCAPNSPRSPGFVQSPGPQT

SEQ ID NO: 742918 - protein, 252 aa, Homo sapiens; identical to SEQ ID NO: 742911

SEQ ID NO: 742919 - protein, 105 aa, Homo sapiens [sequence omitted]

SEQ ID NO: 742920 - protein, 69 aa, Homo sapiens
KALYGRSNRWNTCAVAITNRDDVLCKNINETHEKKSALILVFAGLLLAFECVCSSVSSSFRVVMLGCQF

SEQ ID NO: 742921 - protein, 105 aa, Homo sapiens [sequence omitted]

SEQ ID NO: 742922 - protein, 129 aa, Homo sapiens
MSGRRTRSGGAAQRSGERRARGRREVEPFGGRSPVKDGLFPPAAAAGGGALKRACLGIFSLSLEPVLWTLRSRVLLYHLTFFSFQGQGPHLLLSLCGGPSGNQALNSRASSLKSGRRHPVRLQSESPSS

SEQ ID NO: 742923 - protein, 396 aa, Homo sapiens
MAVQESAAQLSMTLKVQEYPTLKVPYETLNKRFRAAQKNIDRETSHVTMVVAELEKTLSGCPAVDSVVSLLDGVVEKLSVLKRKAVESIQAEDESAKLCKRRIEHLKEHSSDQPAAASVWKRKRMDRMMVEHLLRCGYYNTAVKLARQSGIEDLVNIEMFLTAKEVEESLERRETATCLAWCHDNKSRLRKMKSCLEFSLRIQEFIELIRQNKRLDAVRHARKHFSQAEGSQLDEVRQAMGMLAFPPDTHISPYKDLLDPARWRMLIQQFRYDNYRLHQLGNNSVFTLTLQAGLSAIKTPQCYKEDGSSKSPDCPVCSRSLNKLAQPLPMAHCANSRLVCKISGDVMNENNPPMMLPNGYVYGYNSLLSIRQDDKVVCPRTKEVFHFSQAEKVYIM

SEQ ID NO: 742924 - protein, 355 aa, Homo sapiens
MAVQESAAQLSMTLKVQEYPTLKVPYETLNKRFRAAQKNIDRETSHVTMVVAELEKTLSGCPAVDSVVSLLDGVVEKLSVLKRKAVESIQAEDESAKLCKRRIEHLKEHSSDQPAAASVWKRKRMDRMMVEHLLRCGYYNTAVKLARQSGIESCLEFSLRIQEFIELIRQNKRLDAVRHARKHFSQAEGSQLDEVRQAMGMLAFPPDTHISPYKDLLDPARWRMLIQQFRYDNYRLHQLGNNSVFTLTLQAGLSAIKTPQCYKEDGSSKSPDCPVCSRSLNKLAQPLPMAHCANSRLVCKISGDVMNENNPPMMLPNGYVYGYNSLLSIRQDDKVVCPRTKEVFHFSQAEKVYIM

SEQ ID NO: 742925 - protein, 245 aa, Homo sapiens
MAVQESAAQLSMTLKVQEYPTLKVPYETLNKRFRAAQKNIDRETSHVTMVVAELEKTLSGCPAVDSVVSLLDGVVEKLSVLKRKAVESIQAEDESAKLCKRRIEHLKEHSSDQPAAASVWKRKRMDRMMVEHLLRCGYYNTAVKLARQSGIETCKKALQPSRREPAGRGAPGHGHAGLPARHAHLPVQGPSGPCTVADADPAVPVRQLPTTPAGKQFCVHPHPAGWPLSHQDTTVLQGGRQLQEP

SEQ ID NO: 742926 - protein, 367 aa, Homo sapiens
ERPPGQVESAAQLSMTLKVQEYPTLKVPYETLNKRFRAAQKNIDRETSHVTMVVAELEKTLSGCPAVDSVVSLLDGVVEKLSVLKRKAVESIQAEDESAKLCKRRIEHLKEHSSDQPAAASVWKRKRMDRMMVEHLLRCGYYNTAVKLARQSGIESCLEFSLRIQEFIELIRQNKRLDAVRHARKHFSQAEGSQLDEVRQAMGMLAFPPDTHISPYKDLLDPARWRNLLDPARWRMLIQQFRYDNYRLHQLGNNSVFTLTLQAGLSAIKTPQCYKEDGSSKSPDCPVCSRSLNKLAQPLPMAHCANSRLVCKISGDVMNENNPPMMLPNGYVYGYNSLLSIRQDDKVVCPRTKEVFHFSQAEKVYIM

SEQ ID NO: 742927 - protein, 107 aa, Homo sapiens
MAVQESAAQLSMTLKVQEYPTLKVPYETLNKRFRAAQKNIDRETSHVTMVVAELEKTLSGCPAVDSVVSLLDGVVEKLSVLKRKVGPAWRSLFSLGHGHPFCLENES

SEQ ID NO: 742928 - protein, 389 aa, Homo sapiens
MAVQESAAQLSMTLKVQEYPTLKVPYETLNKRFRAAQKNIDRETSHVTMVVAELEKTLSGCPAVDSVVSLLDGVVEKLSVLKRKAVESIQAEDESAKLCKRRIEHLKEHSSDQPAAASVWKRKRMDRMMVEHLLRCGYYNTAVKLARQSGIEDLVNIEMFLTAKEVEESLERRETATCLAWCHDNKSRLRKMKSCLEFSLRIQEFIELIRQNKRLDAVRHARKHFSQAEGSQLDEVRQAMGMLAFPPDTHISPYKDLLDPARWRMLIQQFRYDNYRLHQLGNNSVFTLTLQAGLSAIKTPYPTSRAQCRLAWGWHLWITILHTLTSALCHSLSFPPQTSPELSVCCTCVVSGWSGWGRVEGPRMRRAAFTLGSGALPLSSSQRPPWALI

SEQ ID NO: 742929 - protein, 396 aa, Homo sapiens; identical to SEQ ID NO: 742923

SEQ ID NO: 742930 - protein, 396 aa, Homo sapiens; identical to SEQ ID NO: 742923

SEQ ID NO: 742931 - protein, 286 aa, Homo sapiens
MAVQESAAQLSMTLKVQEYPTLKVPYETLNKRFRAAQKNIDRETSHVTMVVAELEKTLSGCPAVDSVVSLLDGVVEKLSVLKRKAVESIQAEDESAKLCKRRIEHLKEHSSDQPAAASVWKRKRMDRMMVEHLLRCGYYNTAVKLARQSGIEDLVNIEMFLTAKEVEESLERRETATCLAWCHDNKSRLRKMKTCKKALQPSRREPAGRGAPGHGHAGLPARHAHLPVQGPSGPCTVADADPAVPVRQLPTTPAGKQFCVHPHPAGWPLSHQDTTVLQGGRQLQEP

SEQ ID NO: 742932 - protein, 396 aa, Homo sapiens; identical to SEQ ID NO: 742923

SEQ ID NO: 742933 - protein, 331 aa, Homo sapiens
ERPPGQVESAAQLSMTLKVQEYPTLKVPYETLNKRFRAAQKNIDRETSHVTMVVAELEKTLSGCPAVDSVVSLLDGVVEKLSVLKRKDLVNIEMFLTAKEVEESLERRETATCLAWCHDNKSRLRKMKSCLEFSLRIQEFIELIRQNKRLDAVRHARKHFSQAEGSQLDEVRQAMGMLAFPPDTHISPYKDLLDPARWRMLIQQFRYDNYRLHQLGNNSVFTLTLQAGLSAIKTPQCYKEDGSSKSPDCPVCSRSLNKLAQPLPMAHCANSRLVCKISGDVMNENNPPMMLPNGYVYGYNSLLSIRQDDKVVCPRTKEVFHFSQAEKVYIM

SEQ ID NO: 742934 - protein, 239 aa, Homo sapiens
MNETQAPSLVPSLWNSGREGWRACPLPVPRCQQNVPAGWLLSCLERLRGRGEGGGRRSHSVPVVLVLEAGVRRRRLLVSTEASVGLFSCRVQHFLCLERQPRVVSMAPTYQKGTQPRAEWPQGAGLTPAALSGPQPFLDPMLRQCYKEDGSSKSPDCPVCSRSLNKLAQPLPMAHCANSRLVCKISGDVMNENNPPMMLPNGYVYGYNSLLSIRQDDKVVCPRTKEVFHFSQAEKVYIM

SEQ ID NO: 742935 - protein, 389 aa, Homo sapiens; identical to SEQ ID NO: 742928

SEQ ID NO: 742936 - protein, 196 aa, Homo sapiens
MAVQESAAQLSMTLKVQEYPTLKVPYETLNKRFRAAQKNIDRETSHVTMVVAELEKTLSGCPAVDSVVSLLDGVVEKLSVLKRKAVESIQAEDESAKLCKRRIEHLKEHSSDQPAAASVWKRKRMDRMMVEHLLRCGYYNTAVKLARQSGIEDLVNIEMFLTAKEVEESLERRETATCHVPGVPVLPKQYPPRVVA

SEQ ID NO: 742937 - protein, 348 aa, Homo sapiens
MVVAELEKTLSGCPAVDSVVSLLDGVVEKLSVLKRKAVESIQAEDESAKLCKRRIEHLKEHSSDQPAAASVWKRKRMDRMMVEHLLRCGYYNTAVKLARQSGIEDLVNIEMFLTAKEVEESLERRETATCLAWCHDNKSRLRKMKSCLEFSLRIQEFIELIRQNKRLDAVRHARKHFSQAEGSQLDEVRQAMGMLAFPPDTHISPYKDLLDPARWRMLIQQFRYDNYRLHQLGNNSVFTLTLQAGLSAIKTPQCYKEDGSSKSPDCPVCSRSLNKLAQPLPMAHCANSRLVCKISGDVMNENNPPMMLPNGYVYGYNSLLSIRQDDKVVCPRTKEVFHFSQAEKVYIM

SEQ ID NO: 742938 - protein, 348 aa, Homo sapiens
MAVQESAAQLSMTLKVQEYPTLKVPYETLNKRFRAAQKNIDRETSHVTMVVAELEKTLSGCPAVDSVVSLLDGVVEKLSVLKRKAVESIQAEDESAKLCKRRIEHLKEHSSDQPAAASVWKRKRMDRMMVEHLLRCGYYNTAVKLARQSGIESCLEFSLRIQEFIELIRQNKRLDAVRHARKHFSQAEGSQLDEVRQAMGMLAFPPDTHISPYKDLLDPARWRMLIQQFRYDNYRLHQLGNNSVFTLTLQAGLSAIKTPYPTSRAQCRLAWGWHLWITILHTLTSALCHSLSFPPQTSPELSVCCTCVVSGWSGWGRVEGPRMRRAAFTLGSGALPLSSSQRPPWALI

SEQ ID NO: 742939 - protein, 392 aa, Homo sapiens
MAVQESAAQLSMTLKVQEYPTLKVPYETLNKRFRAAQKNIDRETSHVTMVVAELEKTLSGCPAVDSVVSLLDGVVEKLSVLKRKAVESIQAEDESAKLCKRRIEHLKEHSSDQPAAASVWKRKRMDRMMVEHLLRCGYYNTAVKLARQSGIEDLVNIEMFLTAKEVEESLERRETATCLAWCHDNKSRLRKMKSCLEFSLRIQEFIELIRQNKRLDAVRHARKHFSQAEGSQLDEVRQAMGMLAFPPDTHISPYKDLLDPARWRMLIQQFRYDNYRLHQLGNNSVFTLTLQAGLSAIKTPQCYKEDGSSKSPDCPVCSRSLNKLAQPLPMAHCANSRLVCKISGDVMNENNPPMMLPNGYVYGYNVRGAGQGGQAGTHRHRDRAVWDGQGRG

SEQ ID NO: 742940 - protein, 70 aa, Homo sapiens
ERPPGQVESAAQLSMTLKVQEYPTLKNIPAWKPRCARPLHWPQKPHLSAEEPGCCLEWVSSTAWQHSHAS

SEQ ID NO: 742941 - protein, 370 aa, Homo sapiens
MAQGWAGFSEEELRRLKQTKDPFEPQRRLPAKKSRQQLQREKALVEQSQKLGLQDGSTSLLPEQLLSAPKQRVNVQKPPFSSPTLPSHFTLTSPVGDGQPQGIESQPKELGLENSHDGHNNVEILPPKPDCKLEKKKVELLQEKSRWEVLQQEQRLMEEKNKRKKALLAKAIAERSKRTQAETMKLKRIQKELQALDDMVSADIGILRNRIDQASLDYSYARKRFDRAEAEYIAAKLDIQRKTEIKEQLTEHLCTIIQQNELRKAKKLEELMQQLDVEADEETLELEVEVERLLHEQEVESRRPVVRLERPFQPAEESVTLEFAKENRKCQEQAVSPKVDDQCGNSSSIPFLSPNCPNQEGNDISAALAT

SEQ ID NO: 742942 - protein, 77 aa, Homo sapiens
MEEKNKRKKALLAKAIAERSKRTQAETMKLKRIQKELQALDDMVSADIGILRNRIDQASLDYSYARELGKLNLNKEY

SEQ ID NO: 742943 - protein, 214 aa, Homo sapiens
MEEKNKRKKALLAKAIAERSKRTQAETMKLKRIQKELQALDDMVSADIGILRNRIDQASLDYSYARKRFDRAEAEYIAAKLDIQRKTEIKEQLTEHLCTIIQQNELRKAKKLEELMQQLDVEADEETLELEVEVERLLHEQEVESRRPVVRLERPFQPAEESVTLEFAKENRKCQEQAVSPKVDDQCGNSSSIPFLSPNCPNQEGNDISAALAT

SEQ ID NO: 742944 - protein, 214 aa, Homo sapiens; identical to SEQ ID NO: 742943

SEQ ID NO: 742945 - protein, 214 aa, Homo sapiens; identical to SEQ ID NO: 742943

SEQ ID NO: 742946 - protein, 214 aa, Homo sapiens; identical to SEQ ID NO: 742943

SEQ ID NO: 742947 - protein, 370 aa, Homo sapiens; identical to SEQ ID NO: 742941

SEQ ID NO: 742948 - protein, 370 aa, Homo sapiens; identical to SEQ ID NO: 742941

SEQ ID NO: 742949 - protein, 140 aa, Homo sapiens
SSIFFYIDPFEPQRRLPAKKSRQQLQREKALVEQSQKLGLQDGSTSLLPEQLLSAPKQRVNVQKPPFSSPTLPSHFTLTSPVGDGQPQGIESQPKELGLENSHDGHNNVEILPPKPDCKLEKKKVELLVSLCEKSMRLFI

SEQ ID NO: 742950 - protein, 340 aa, Homo sapiens
MLTQLKAKSEGKLAKQICKVVLDHFEKQYSKELGDAWNTVREILTSPSCWQYAVLLNRFNYPFELEKDLHLKGYHTLSQGSLPNYPKSVKCYLSRTPGRIPSERHQIGNLKKYYLLNAASLLPVLALELRDGEKVLDLCAAPGGKSIALLQCACPGYLHCNEYDSLRLRWLRQTLESFIPQPLINVIKVSELDGRKMGDAQPEMFDKVLVDAPCSNDRSWLFSSDSQKASCRISQRRNLPLLQIELLRSAIKALRPGGILVYSTCTLSKAENQDVISEILNSHGNIMPMDIKGIARTCSHDFTFAPTGQECGLLVIPDKGKAWGPMYVAKLKKSWSTGKW

SEQ ID NO: 742951 - protein, 125 aa, Homo sapiens
  misc_feature (2)..(2): Xaa can be any naturally occurring amino acid
  misc_feature (9)..(9): Xaa can be any naturally occurring amino acid
YXGTRPRAXDSQKASCRISQRRNLPLLQIELLRSAIKALRPGGILVYSTCTLSKAENQDVISEILNSHGNIMPMDIKGIARTCSHDFTFAPTGQECGLLVIPDKGKAWGPMYVAKLKKSWSTGKW

SEQ ID NO: 742952 - protein, 340 aa, Homo sapiens; identical to SEQ ID NO: 742950

SEQ ID NO: 742953 - protein, 322 aa, Homo sapiens
MLTQLKAKSEGKLAKQICKVVLDHFEKQYSKELGDAWNTVREILTSPSCWQYAVLLNRFNYPFELEKDLHLKGYHTLSQGSLPNYPKSVKCYLSRTPGRIPSERHQIGNLKKYYLLNAASLLPVLALELRDGEKVLDLCAAPGGKSIALLQCACPGYLHCNEYDSLRLRWLRQTLESFIPQPLINVIKVSELDGRKMGDAQPEMFDKVLVDAPCSNDRSWLFSSDSQKASCRISQRRNLPLLQIELLRSAIKALRPGGILVYSTCTLSKAVDIKGIARTCSHDFTFAPTGQECGLLVIPDKGKAWGPMYVAKLKKSWSTGKW

SEQ ID NO: 742954 - protein, 1249 aa, Homo sapiens
MSSMWSEYTIGGVKIYFPYKAYPSQLAMMNSILRGLNSKQHCLLESPTGSGKSLALLCSALAWQQSLSGKPADEGVSEKAEVQLSCCCACHSKDFTNNDMNQGTSRHFNYPSTPPSERNGTSSTCQDSPEKTTLAAKLSAKKQASIYRDENDDFQVEKKRIRPLETTQQIRKRHCFGTEVHNLDAKVDSGKTVKLNSPLEKINSFSPQKPPGHCSRCCCSTKQGNSQESSNTIKKDHTGKSKIPKIYFGTRTHKQIAQITRELRRTAYSGVPMTILSSRDHTCVHPEVVGNFNRNEKCMELLDGKNGKSCYFYHGVHKISDQHTLQTFQGMCKAWDIEELVSLGKKLKACPYYTARELIQDADIIFCPYNYLLDAQIRESMDLNLKEQVVILDEAHNIEDCARESASYSVTEVQLRFARDELDSMVNNNIRKKDHEPLRAVCCSLINWLEANAEYLVERDYESACKIWSGNEMLLTLHKMGITTATFPILQGHFSAVLQKEEKISPIYGKEEAREVPVISASTQIMLKGLFMVLDYLFRQNSRFADDYKIAIQQTYSWTNQIDISDKNGLLVLPKNKKRSRQKTAVHVLNFWCLNPAVAFSDINGKVQTIVLTSGTLSPMKSFSSELGVTFTIQLEANHIIKNSQVWVGTIGSGPKGRNLCATFQNTETFEFQDEVGALLLSVCQTVSQGILCFLPSYKLLEKLKERWLSTGLWHNLELVKTVIVEPQGGEKTNFDELLQVYYDAIKYKGEKDGALLVAVCRGKVSEGLDFSDDNARAVITIGIPFPNVKDLQVELKRQYNDHHSKLRGLLPGRQWYEIQAYRALNQALGRCIRHRNDWGALILVDDRFRNNPSRYISGLSKWVRQQIQHHSTFESALESLAEFSKKHQKVLNVSIKDRTNIQDNESTLEVTSLKYSTPPYLLEAASHLSPENFVEDEAKICVQELQCPKIITKNSPLPSSIISRKEKNDPVFLEEAGKAEKIVISRSTSPTFNKQTKRVSWSSFNSLGQYFTGKIPKATPELGSSENSASSPPRFKTEKMESKTVLPFTDKCESSNLTVNTSFGSCPQSETIISSLKIDATLTRKNHSEHPLCSEEALDPDIELSLVSEEDKQSTSNRDFETEAEDESIYFTPELYDPEDTDEEKNDLAETDRGNRLANNSDCILAKDLFEIRTIKEVDSAREVKAEDCIDTKLNGILHIEESKIDDIDGNVKTTWINELELGKTHEIEIKNFKPSPSKNKGMFPGFK

SEQ ID NO: 742955 - protein, 1048 aa, Homo sapiens
MALHQLVKPPGHCSRCCCSTKQGNSQESSNTIKKDHTGKSKIPKIYFGTRTHKQIAQITRELRRTAYSGVPMTILSSRDHTCVHPEVVGNFNRNEKCMELLDGKNGKSCYFYHGVHKISDQHTLQTFQGMCKAWDIEELVSLGKKLKACPYYTARELIQDADIIFCPYNYLLDAQIRESMDLNLKEQVVILDEAHNIEDCARESASYSVTEVQLRFARDELDSMVNNNIRKKDHEPLRAVCCSLINWLEANAEYLVERDYESACKIWSGNEMLLTLHKMGITTATFPILQGHFSAVLQKEEKISPIYGKEEAREVPVISASTQIMLKGLFMVLDYLFRQNSRFADDYKIAIQQTYSWTNQIDISDKNGLLVLPKNKKRSRQKTAVHVLNFWCLNPAVAFSDINGKVQTIVLTSGTLSPMKSFSSELGVTFTIQLEANHIIKNSQVWVGTIGSGPKGRNLCATFQNTETFEFQDEVGALLLSVCQTVSQGILCFLPSYKLLEKLKERWLSTGLWHNLELVKTVIVEPQGGEKTNFDELLQVYYDAIKYKGEKDGALLVAVCRGKVSEGLDFSDDNARAVITIGIPFPNVKDLQVELKRQYNDHHSKLRGLLPGRQWYEIQAYRALNQALGRCIRHRNDWGALILVDDRFRNNPSRYISGLSKWVRQQIQHHSTFESALESLAEFSKKHQKVLNVSIKDRTNIQDNESTLEVTSLKYSTPPYLLEAASHLSPENFVEDEAKICVQELQCPKIITKNSPLPSSIISRKEKNDPVFLEEAGKAEKIVISRSTSPTFNKQTKRVSWSSFNSLGQYFTGKIPKATPELGSSENSASSPPRFKTEKMESKTVLPFTDKCESSNLTVNTSFGSCPQSETIISSLKIDATLTRKNHSEHPLCSEEALDPDIELSLVSEEDKQSTSNRDFETEAEDESIYFTPELYDPEDTDEEKNDLAETDRGNRLANNSDCILAKDLFEIRTIKEVDSAREVKAEDCIDTKLNGILHIEESKIDDIDGNVKTTWINELELGKTHEIEIKNFKPSPSKNKGMFPGFK

SEQ ID NO: 742956 - protein, 630 aa, Homo sapiens
MALHQLVKPPGHCSRCCCSTKQGNSQESSNTIKKDHTGKSKIPKIYFGTRTHKQIAQITRELRRTAYSGVPMTILSSRDHTCVHPEVVGNFNRNEKCMELLDGKNGKSCYFYHGVHKISDQHTLQTFQGMCKAWDIEELVSLGKKLKACPYYTARELIQDADIIFCPYNYLLDAQIRESMDLNLKEQVVILDEAHNIEDCARESASYSVTEVQLRFARDELDSMVNNNIRKKDHEPLRAVCCSLINWLEANAEYLVERDYESACKIWSGNEMLLTLHKMGITTATFPILQGHFSAVLQKEEKISPIYGKEEAREVPVISASTQIMLKGLFMVLDYLFRQNSRFADDYKIAIQQTYSWTNQIDISDKNGLLVLPKNKKRSRQKTAVHVLNFWCLNPAVAFSDINGKVQTIVLTSGTLSPMKSFSSELGVTFTIQLEANHIIKNSQVWVGTIGSGPKGRNLCATFQNTETFEFQDEVGALLLSVCQTVSQGILCFLPSYKLLEKLKERWLSTGLWHNLELVKTVIVEPQGGEKTNFDELLQVYYDAIKYKGEKDGALLVAVCRGKVSEGLDFSDDNARAVITIGIPFPNVKDLQVELKRQYNDHHSKLRGLLPGRQWYEIQAYRALNQALGR

SEQ ID NO: 742957 - protein, 651 aa, Homo sapiens
MALHQLVKPPGHCSRCCCSTKQGNSQESSNTIKKDHTGKSKIPKIYFGTRTHKQIAQITRELRRTAYSGVPMTILSSRDHTCVHPEVVGNFNRNEKCMELLDGKNGKSCYFYHGVHKISDQHTLQTFQGMCKAWDIEELVSLGKKLKACPYYTARELIQDADIIFCPYNYLLDAQIRESMDLNLKEQVVILDEAHNIEDCARESASYSVTEVQLRFARDELDSMVNNNIRKKDHEPLRAVCCSLINWLEANAEYLVERDYESACKIWSGNEMLLTLHKMGITTATFPILQGHFSAVLQKEEKISPIYGKEEAREVPVISASTQIMLKGLFMVLDYLFRQNSRFADDYKIAIQQTYSWTNQIDISDKNGLLVLPKNKKRSRQKTAVHVLNFWCLNPAVAFSDINGKVQTIVLTSGTLSPMKSFSSELGVTFTIQLEANHIIKNSQVWVGTIGSGPKGRNLCATFQNTETFEFQDEVGALLLSVCQTVSQGILCFLPSYKLLEKLKERWLSTGLWHNLELVKTVIVEPQGGEKTNFDELLQVYYDAIKYKGEKDGALLVAVCRGKVSEGLDFSDDNARAVITIGIPFPNVKDLQLTSATAEGTNGYAQSWVSYSKMADAALTTATDETVDIYPRNLLSPSTALVLHSTEVECY

SEQ ID NO: 742958 - protein, 630 aa, Homo sapiens; identical to SEQ ID NO: 742956

SEQ ID NO: 742959 - protein, 120 aa, Homo sapiens
RERTDTGQGAGRLGRNEWRGVFLSSAAHPPQHTTHTHTQSNKFLSLKCGRGGPSLSLVGGVVRGRSQGWGRGSETVWGGEVCKSSNSGANGGSSQPTRRAGREGSAWPLPQASPTPTLGA

SEQ ID NO: 742960 - protein, 113 aa, Homo sapiens
MIVSSGCPKSICLEYHSLITLVNLEGIIRSEKRHHSLITRMNLEGIIRSEKRLRSLITRVNLEGITRSEKRPCSLVRRVNPEGITQSGKKTPLTDNAGEPRRNYTEWKKGPAH

SEQ ID NO: 742961 - protein, 828 aa, Homo sapiens
MDESALTLGTIDVSYLPHSSEYSVGRCKHTSEEWGECGFRPTIFRSATLKWKESLMSRKRPFVGRCCYSCTPQSWDKFFNPSIPSLGLRNVIYINETHTRHRGWLARRLSYVLFIQERDVHKGMFATNVTENVLNSSRVQEAIAEVAAELNPDGSAQQQSKAVNKVKKKAKRILQEMVATVSPAMIRLTGWVLLKLFNSFFWNIQIHKGQLEMVKAATETNLPLLFLPVHRSHIDYLLLTFILFCHNIKAPYIASGNNLNIPIFSTLIHKLGGFFIRRRLDETPDGRKDVLYRALLHGHIVELLRQQQFLEIFLEGTRSRSGKTSCARAGLLSVVVDTLSTNVIPDILIIPVGISYDRIIEGHYNGEQLGKPKKNESLWSVARGVIRMLRKNYGCVRVDFAQPFSLKEYLESQSQKPVSALLSLEQALLPAILPSRPSDAADEGRDTSINESRNATDESLRRRLIANLAEHILFTASKSCAIMSTHIVACLLLYRHRQGIDLSTLVEDFFVMKEEVLARDFDLGFSGNSEDVVMHAIQLLGNCVTITHTSRNDEFFITPSTTVPSVFELNFYSNGVLHVFIMEAIIACSLYAVLNKRGLGGPTSTPPNLISQEQLVRKAASLCYLLSNEGTISLPCQTFYQVCHETVGKFIQYGILTVAEHDDQEDISPSLAEQQWDKKLPEPLSWRSDEEDEDSDFGEEQRDCYLKVSQSKEHQQFITFLQRLLGPLLEAYSSAAIFVHNFSGPVPEPEYLQKLHKYLITRTERNVAVYAESATYCLVKNAVKMFKDIGVFKETKQKRVSVLELSSTFLPQCNRQKLLEYILSFVVL

SEQ ID NO: 742962 - protein, 828 aa, Homo sapiens; identical to SEQ ID NO: 742961

SEQ ID NO: 742963 - protein, 828 aa, Homo sapiens; identical to SEQ ID NO: 742961

SEQ ID NO: 742964 - protein, 828 aa, Homo sapiens; identical to SEQ ID NO: 742961

SEQ ID NO: 742965 - protein, 828 aa, Homo sapiens; identical to SEQ ID NO: 742961

SEQ ID NO: 742966 - protein, 828 aa, Homo sapiens; identical to SEQ ID NO: 742961

SEQ ID NO: 742967 - protein, 828 aa, Homo sapiens; identical to SEQ ID NO: 742961

SEQ ID NO: 742968 - protein, 828 aa, Homo sapiens; identical to SEQ ID NO: 742961

SEQ ID NO: 742969 - protein, 828 aa, Homo sapiens; identical to SEQ ID NO: 742961

SEQ ID NO: 742970 - protein, 828 aa, Homo sapiens; identical to SEQ ID NO: 742961

SEQ ID NO: 742971 - protein, 356 aa, Homo sapiens
MGLLRIMMPPKLQLLAVVAFAVAMLFLENQIQKLEESRSKLERAIARHEVREIEQRHTMDGPRQDATLDEEEDMVIIYNRVPKTASTSFTNIAYDLCAKNKYHVLHINTTKNNPVMSLQDQVRFVKNITSWKEMKPGFYHGHVSYLDFAKFGVKKKPIYINVIRDPIERLVSYYYFLRFGDDYRPGLRRRKQGDKKTFDECVAEGGSDCAPEKLWLQIPFFCGHSSECWNVGSRWAMDQAKYNLINEYFLVGVTEELEDFIMLLEAALPRFFRGATELYRTGKKSHLRKTTEKKLPTKQTIAKLQQSDIWKMENEFYEFALEQFQFIRAHAVREKDGDLYILAQNFFYEKIYPKSN

SEQ ID NO: 742972 - protein, 329 aa, Homo sapiens
KSVGRVPLTEESYDWHQGKVTKSFLYMLFIKFIHLEVFSMPERAIARHEVREIEQRHTMDGPRQDATLDEEEDMVIIYNRVPKTASTSFTNIAYDLCAKNKYHVLHINTTKNNPVMSLQDQVRFVKNITSWKEMKPGFYHGHVSYLDFAKFGVKKKPIYINVIRDPIERLVSYYYFLRFGDDYRPGLRRRKQGDKKTFDECVAEGGSDCAPEKLWLQIPFFCGHSSECWNVGSRWAMDQAKYNLINEYFLVGVTEELEDFIMLLEAALPRFFRGATELYRTAPDTATPSHRHGPICGSKSISSLLVKVSPVCKDSHCLGKCSRNGLSAV

SEQ ID NO: 742973 - protein, 122 aa, Homo sapiens
RGRSRGALATVLWNSLVFHARSGVLLAPSRHPALPSEARLLAGEGRMLARRDLGLVPHGVSGVSIAASSTPQGQAVCSPSVAAPSTLLLLRTHLLGAASLQGCGVAAPLSRTTQGLDPRALV

SEQ ID NO: 742974 - protein, 128 aa, Homo sapiens
RGRSRGALATVLWNSLVFHARSGVLLAPSRHPALPSEARLLAGEGRMLARRDLGLVPHGVSGVSIAASSTPQGQAVCSPSVAAPSTLLLLRTHLLGAASLQGCGHQILLHHLIGMDLYVAASPSHRFW

SEQ ID NO: 742975 - protein, 350 aa, Homo sapiens
MMPPKLQLLAVVAFAVAMLFLENQIQKLEESRSKLERAIARHEVREIEQRHTMDGPRQDATLDEEEDMVIIYNRVPKTASTSFTNIAYDLCAKNKYHVLHINTTKNNPVMSLQDQVRFVKNITSWKEMKPGFYHGHVSYLDFAKFGVKKKPIYINVIRDPIERLVSYYYFLRFGDDYRPGLRRRKQGDKKTFDECVAEGGSDCAPEKLWLQIPFFCGHSSECWNVGSRWAMDQAKYNLINEYFLVGVTEELEDFIMLLEAALPRFFRGATELYRTGKKSHLRKTTEKKLPTKQTIAKLQQSDIWQMENEFYEFALEQFQFIRAHAVREKDGDLYILAQNFFYEKIYPKSN

SEQ ID NO: 742976 - protein, 315 aa, Homo sapiens
MMPPKLQLLAVVAFAVAMLFLENQIQKLEESRSKLERAIARHEVREIEQRHTMDGPRQDATLDEEEDMVIIYNRVPKTASTSFTNIAYDLCAKNKYHVLHINTTKNNPVMSLQDQVRFVKNITSWKEMKPGFYHGHVSYLDFAKFGVKKKPIYINVIRDPIERLVSYYYFLRFGDDYRPGLRRRKQGDKKTFDECVAEGGSDCAPEKLWLQIPFFCGHSSECWNVGSRWAMDQAKYNLINEYFLVGVTEELEDFIMLLEAALPRFFRGATELYRTGKKSHLRKTTEKKLPTKQTIAKLQQSDHLGKWRMSSMNLH

SEQ ID NO: 742977 - protein, 315 aa, Homo sapiens; identical to SEQ ID NO: 742976

SEQ ID NO: 742978 - protein, 342 aa, Homo sapiens
MMPPKLQLLAVVAFAVAMLFLENQIQKLEESRSKLERAIARHEVREIEQRHTMDGPRQDATLDEEEDMVIIYNRVPKTASTSFTNIAYDLCAKNKYHVLHINTTKNNPVMSLQDQVRFVKNITSWKEMKPGFYHGHVSYLDFAKFGVKKKPIYINVIRDPIERLVSYYYFLRFGDDYRPGLRRRKQGDKKTFDECVAEGGSDCAPEKLWLQIPFFCGHSSECWNVGSRWAMDQAKYNLINEYFLVGVTEELEDFIMLLEAALPRFFRGATELYRTAPDTATPSHRHGPICGSKSISSLLVKVSPVCKDSHCHCRRGTGTPKGETLATLAPCSQSWSSVTHRW

SEQ ID NO: 742979 - protein, 223 aa, Homo sapiens [sequence omitted]

SEQ ID NO: 742980 - protein, 356 aa, Homo sapiens; identical to SEQ ID NO: 742971

SEQ ID NO: 742981 - protein, 444 aa, Homo sapiens
MEEEGKKGKKPGIVSPFKRVFLKGEKSRDKKAHEKVTERRPLHTVVLSLPERVEPDRLLSDYIEKEVKYLGQLTSIPGYLNPSSRTEILHFIDNAKRAHQLPGHLTQEHDAVLSLSAYNVKLAWRDGEDIILRVPIHDIAAVSYVRDDAAHLVVLKTAQDPGISPSQSLCAESSRGLSAGSLSESAVGPVEACCLVILAAESKVAAEELCCLLGQVFQVVYTESTIDFLDRAIFDGASTPTHHLSLHSDDSSTKVDIKETYEVEASTFCFPESVDVGGASPHSKTISESELSASATELLQDYMLTLRTKLSSQEIQQFAALLHEYRNGASIHEFCINLRQLYGDSRKFLLLGLRPFIPEKDSQHFENFLETIGVKDGRGIITDSFGRHRRALSTTSSSTTNGNRATGSSDDRSAPSEGDEWDRMISDISSDIEALGCSMDQDSA

SEQ ID NO: 742982 - protein, 465 aa, Homo sapiens
MHSSCRQRRNQNLSKEIPQTEFHTGYSMENEPGIVSPFKRVFLKGEKSRDKKAHEKVTERRPLHTVVLSLPERVEPDRLLSDYIEKEVKYLGQLTSIPGYLNPSSRTEILHFIDNAKRAHQLPGHLTQEHDAVLSLSAYNVKLAWRDGEDIILRVPIHDIAAVSYVRDDAAHLVVLKTAQDPGISPSQSLCAESSRGLSAGSLSESAVGPVEACCLVILAAESKVAAEELCCLLGQVFQVVYTESTIDFLDRAIFDGASTPTHHLSLHSDDSSTKVDIKETYEVEASTFCFPESVDVGGASPHSKTISESELSASATELLQDYMLTLRTKLSSQEIQQFAALLHEYRNGASIHEFCINLRQLYGDSRKFLLLGLRPFIPEKDSQHFENFLETIGVKDGRGIITDSFGRHRRALSTTSSSTTNGNRATGSSDDRSAPSEGDEWDRMISDISSDIEALGCSMDQDSA

SEQ ID NO: 742983 - protein, 468 aa, Homo sapiens
AGWEVGRRKDGGKLKKLELLPRALSGRSEQGAGQPGIVSPFKRVFLKGEKSRDKKAHEKVTERRPLHTVVLSLPERVEPDRLLSDYIEKEVKYLGQLTSIPGYLNPSSRTEILHFIDNAKRAHQLPGHLTQEHDAVLSLSAYNVKLAWRDGEDIILRVPIHDIAAVSYVRDDAAHLVVLKTAQDPGISPSQSLCAESSRGLSAGSLSESAVGPVEACCLVILAAESKVAAEELCCLLGQVFQVVYTESTIDFLDRAIFDGASTPTHHLSLHSDDSSTKVDIKETYEVEASTFCFPESVDVGGASPHSKTISESELSASATELLQDYMLTLRTKLSSQEIQQFAALLHEYRNGASIHEFCINLRQLYGDSRKFLLLGLRPFIPEKDSQHFENFLETIGVKDGRGIITDSFGRHRRALSTTSSSTTNGNRATGSSDDRSAPSEGDEWDRMISDISSDIEALGCSMDQDSA

SEQ ID NO: 742984 - protein, 769 aa, Homo sapiens
MEEEGKKGKKPGIVSPFKRVFLKGEKSRDKKAHEKVTERRPLHTVVLSLPERVEPDRLLSDYIEKEVKYLGQLTSIPGYLNPSSRTEILHFIDNAKRAHQLPGHLTQEHDAVLSLSAYNVKLAWRDGEDIILRVPIHDIAAVSYVRDDAAHLVVLKTAQDPGISPSQSLCAESSRGLSAGSLSESAVGPVEACCLVILAAESKVAAEELCCLLGQVFQVVYTESTIDFLDRAIFDGASTPTHHLSLHSASHVTSSTVTSSFDCQLPLHFRTLAITLSPPKFSRVISLFQGQLISILYSPLKLVTYSPIPGIRMWTSLGGHYSALHTYLVPSARNVPFISQPLPLLHLKSYPLCNTHLPRSQSFHSLSVLEVKCAFLRFEIANYSLCHTDLMSFVECSCSVPDPLLVWGSWESCGFTGFRWGVRLPGSDCGFCCVTWAKLCNISDLLPNLQVKTGVIYAWVKGDKAPVTLPGTGVILKDSFCWLWPWVNGTSDQRAAGFAFARIPRRGVCGLKSGKPCPEAHSTFQSAGSLMKDSRVPEDQGCRFSCKYSSGLDSKCLPTMSLKVILVFCIFLTDDSSTKVDIKETYEVEASTFCFPESVDVGGASPHSKTISESELSASATELLQDYMLTLRTKLSSQEIQQFAALLHEYRNGASIHEFCINLRQLYGDSRKFLLLGLRPFIPEKDSQHFENFLETIGVKDGRGIITDSFGRHRRALSTTSSSTTNGNRATGSSDDRSAPSEGDEWDRMISDISSDIEALGCSMDQDSA

SEQ ID NO: 742985 - protein, 485 aa, Homo sapiens
MEEEGKKGKKPGIVSPFKRVFLKGEKSRDKKAHEKVTERRPLHTVVLSLPERVEPDRLLSDYIEKEVKYLGQLTSIPGYLNPSSRTEILHFIDNAKRAHQLPGHLTQEHDAVLSLSAYNVKLAWRDGEDIILRVPIHDIAAVSYVRDDAAHLVVLKTAQDPGISPSQSLCAESSRGLSAGSLSESAVGPVEACCLVILAAESKVAAEELCCLLGQVFQVVYTESTIDFLDRAIFDGASTPTHHLSLHSASHVTSSTVTSSFDCQLPLHFRTLAITLSPPKFSRVISLFQDDSSTKVDIKETYEVEASTFCFPESVDVGGASPHSKTISESELSASATELLQDYMLTLRTKLSSQEIQQFAALLHEYRNGASIHEFCINLRQLYGDSRKFLLLGLRPFIPEKDSQHFENFLETIGVKDGRGIITDSFGRHRRALSTTSSSTTNGNRATGSSDDRSAPSEGDEWDRMISDISSDIEALGCSMDQDSA

SEQ ID NO: 742986 - protein, 444 aa, Homo sapiens; identical to SEQ ID NO: 742981

SEQ ID NO: 742987 - protein, 498 aa, Homo sapiens
MEEEGKKGKKPGIVSPFKRVFLKGEKSRDKKAHEKVTERRPLHTVVLSLPERVEPDRLLSDYIEKEVKYLGQLTSIPGYLNPSSRTEILHFIDNAKRAHQLPGHLTQEHDAVLSLSAYNVKLAWRDGEDIILRVPIHDIAAVSYVRDDAAHLVVLKTAQDPGISPSQSLCAESSRGLSAGSLSESAVGPVEACCLVILAAESKVAAEELCCLLGQVFQVVYTESTIDFLDRAIFDGASTPTHHLSLHSEPNSEPCPRGAPGPGQADHPACPVSSPLIIIIITYIPLFKDRDPHTRHGLGFLKRVWDGGSGEATRSHTTFFRSCFPESVDVGGASPHSKTISESELSASATELLQDYMLTLRTKLSSQEIQQFAALLHEYRNGASIHEFCINLRQLYGDSRKFLLLGLRPFIPEKDSQHFENFLETIGVKDGRGIITDSFGRHRRALSTTSSSTTNGNRATGSSDDRSAPSEGDEWDRMISDISSDIEALGCSMDQDSA

SEQ ID NO: 742988 - protein, 407 aa, Homo sapiens
MHSSCRQRRNQNLSKEIPQTEFHTGYSMENEYLGQLTSIPGYLNPSSRTEILHFIDNAKRAHQLPGHLTQEHDAVLSLSAYNVKLAWRDGEDIILRVPIHDIAAVSYVRDDAAHLVVLKTAQDPGISPSQSLCAESSRGLSAGSLSESAVGPVEACCLVILAAESKVAAEELCCLLGQVFQVVYTESTIDFLDRAIFDGASTPTHHLSLHSDDSSTKVDIKETYEVEASTFCFPESVDVGGASPHSKTISESELSASATELLQDYMLTLRTKLSSQEIQQFAALLHEYRNGASIHEFCINLRQLYGDSRKFLLLGLRPFIPEKDSQHFENFLETIGVKDGRGIITDSFGRHRRALSTTSSSTTNGNRATGSSDDRSAPSEGDEWDRMISDISSDIEALGCSMDQDSA

SEQ ID NO: 742989 - protein, 386 aa, Homo sapiens
MEEEGKKGKKYLGQLTSIPGYLNPSSRTEILHFIDNAKRAHQLPGHLTQEHDAVLSLSAYNVKLAWRDGEDIILRVPIHDIAAVSYVRDDAAHLVVLKTAQDPGISPSQSLCAESSRGLSAGSLSESAVGPVEACCLVILAAESKVAAEELCCLLGQVFQVVYTESTIDFLDRAIFDGASTPTHHLSLHSDDSSTKVDIKETYEVEASTFCFPESVDVGGASPHSKTISESELSASATELLQDYMLTLRTKLSSQEIQQFAALLHEYRNGASIHEFCINLRQLYGDSRKFLLLGLRPFIPEKDSQHFENFLETIGVKDGRGIITDSFGRHRRALSTTSSSTTNGNRATGSSDDRSAPSEGDEWDRMISDISSDIEALGCSMDQDSA

SEQ ID NO: 742990 - protein, 410 aa, Homo sapiens
AGWEVGRRKDGGKLKKLELLPRALSGRSEQGAGQYLGQLTSIPGYLNPSSRTEILHFIDNAKRAHQLPGHLTQEHDAVLSLSAYNVKLAWRDGEDIILRVPIHDIAAVSYVRDDAAHLVVLKTAQDPGISPSQSLCAESSRGLSAGSLSESAVGPVEACCLVILAAESKVAAEELCCLLGQVFQVVYTESTIDFLDRAIFDGASTPTHHLSLHSDDSSTKVDIKETYEVEASTFCFPESVDVGGASPHSKTISESELSASATELLQDYMLTLRTKLSSQEIQQFAALLHEYRNGASIHEFCINLRQLYGDSRKFLLLGLRPFIPEKDSQHFENFLETIGVKDGRGIITDSFGRHRRALSTTSSSTTNGNRATGSSDDRSAPSEGDEWDRMISDISSDIEALGCSMDQDSA

SEQ ID NO: 742991 - protein, 506 aa, Homo sapiens
MHSSCRQRRNQNLSKEIPQTEFHTGYSMENEPGIVSPFKRVFLKGEKSRDKKAHEKVTERRPLHTVVLSLPERVEPDRLLSDYIEKEVKMEFCSCCPGWSIMAQSWLTTTSASRVQAIILPQPPEELRLQYLGQLTSIPGYLNPSSRTEILHFIDNAKRAHQLPGHLTQEHDAVLSLSAYNVKLAWRDGEDIILRVPIHDIAAVSYVRDDAAHLVVLKTAQDPGISPSQSLCAESSRGLSAGSLSESAVGPVEACCLVILAAESKVAAEELCCLLGQVFQVVYTESTIDFLDRAIFDGASTPTHHLSLHSDDSSTKVDIKETYEVEASTFCFPESVDVGGASPHSKTISESELSASATELLQDYMLTLRTKLSSQEIQQFAALLHEYRNGASIHEFCINLRQLYGDSRKFLLLGLRPFIPEKDSQHFENFLETIGVKDGRGIITDSFGRHRRALSTTSSSTTNGNRATGSSDDRSAPSEGDEWDRMISDISSDIEALGCSMDQDSA

SEQ ID NO: 742992 - protein, 393 aa, Homo sapiens
MVPEEKSSVILVLAILKYLGQLTSIPGYLNPSSRTEILHFIDNAKRAHQLPGHLTQEHDAVLSLSAYNVKLAWRDGEDIILRVPIHDIAAVSYVRDDAAHLVVLKTAQDPGISPSQSLCAESSRGLSAGSLSESAVGPVEACCLVILAAESKVAAEELCCLLGQVFQVVYTESTIDFLDRAIFDGASTPTHHLSLHSDDSSTKVDIKETYEVEASTFCFPESVDVGGASPHSKTISESELSASATELLQDYMLTLRTKLSSQEIQQFAALLHEYRNGASIHEFCINLRQLYGDSRKFLLLGLRPFIPEKDSQHFENFLETIGVKDGRGIITDSFGRHRRALSTTSSSTTNGNRATGSSDDRSAPSEGDEWDRMISDISSDIEALGCSMDQDSA

SEQ ID NO: 742993 - protein, 142 aa, Homo sapiens
MLTLRTKLSSQEIQQFAALLHEYRNGASIHEFCINLRQLYGDSRKFLLLGLRPFIPEKDSQHFENFLETIGVKDGRGIITDSFGRHRRALSTTSSSTTNGNRATGSSDDRSAPSEGDEWDRMISDISSDIEALGCSMDQDSA

SEQ ID NO: 742994 - protein, 142 aa, Homo sapiens; identical to SEQ ID NO: 742993

SEQ ID NO: 742995 - protein, 309 aa, Homo sapiens
MEEEGKKGKKPGIVSPFKRVFLKGEKSRDKKAHEKVTERRPLHTVVLSLPERVEPDRLLSDYIEKEVKVAAEELCCLLGQVFQVVYTESTIDFLDRAIFDGASTPTHHLSLHSDDSSTKVDIKETYEVEASTFCFPESVDVGGASPHSKTISESELSASATELLQDYMLTLRTKLSSQEIQQFAALLHEYRNGASIHEFCINLRQLYGDSRKFLLLGLRPFIPEKDSQHFENFLETIGVKDGRGIITDSFGRHRRALSTTSSSTTNGNRATGSSDDRSAPSEGDEWDRMISDISSDIEALGCSMDQDSA

SEQ ID NO: 742996 - protein, 353 aa, Homo sapiens
MEEEGKKGKKPGIVSPFKRVFLKGEKSRDKKAHEKVTERRPLHTVVLSLPERVEPDRLLSDYIEKEVKYLGQLTSIPGYLNPSSRTEILHFIDNAKRAHQLPGHLTQEHDAVLSLSAYNVKLAWRDGEDIILRVPIHDIAAVSYVRDDAAHLVVLKTDDSSTKVDIKETYEVEASTFCFPESVDVGGASPHSKTISESELSASATELLQDYMLTLRTKLSSQEIQQFAALLHEYRNGASIHEFCINLRQLYGDSRKFLLLGLRPFIPEKDSQHFENFLETIGVKDGRGIITDSFGRHRRALSTTSSSTTNGNRATGSSDDRSAPSEGDEWDRMISDISSDIEALGCSMDQDSA

SEQ ID NO: 742997 - protein, 711 aa, Homo sapiens
MEEEGKKGKKYLGQLTSIPGYLNPSSRTEILHFIDNAKRAHQLPGHLTQEHDAVLSLSAYNVKLAWRDGEDIILRVPIHDIAAVSYVRDDAAHLVVLKTAQDPGISPSQSLCAESSRGLSAGSLSESAVGPVEACCLVILAAESKVAAEELCCLLGQVFQVVYTESTIDFLDRAIFDGASTPTHHLSLHSASHVTSSTVTSSFDCQLPLHFRTLAITLSPPKFSRVISLFQGQLISILYSPLKLVTYSPIPGIRMWTSLGGHYSALHTYLVPSARNVPFISQPLPLLHLKSYPLCNTHLPRSQSFHSLSVLEVKCAFLRFEIANYSLCHTDLMSFVECSCSVPDPLLVWGSWESCGFTGFRWGVRLPGSDCGFCCVTWAKLCNISDLLPNLQVKTGVIYAWVKGDKAPVTLPGTGVILKDSFCWLWPWVNGTSDQRAAGFAFARIPRRGVCGLKSGKPCPEAHSTFQSAGSLMKDSRVPEDQGCRFSCKYSSGLDSKCLPTMSLKVILVFCIFLTDDSSTKVDIKETYEVEASTFCFPESVDVGGASPHSKTISESELSASATELLQDYMLTLRTKLSSQEIQQFAALLHEYRNGASIHEFCINLRQLYGDSRKFLLLGLRPFIPEKDSQHFENFLETIGVKDGRGIITDSFGRHRRALSTTSSSTTNGNRATGSSDDRSAPSEGDEWDRMISDISSDIEALGCSMDQDSA

SEQ ID NO: 742998 - protein, 210 aa, Homo sapiens [sequence omitted]

SEQ ID NO: 742999 - protein, 438 aa, Homo sapiens
MEEEGKKGKKPGIVSPFKRVFLKGEKSRDKKAHEKVTERRPLHTVVLSLPERVEPDRLLSDYIEKEVKYLGQLTSIPGYLNPSSRTEILHFIDNAKRAHQLPGHLTQEHDAVLSLSAYNVKLAWRDGEDIILRVPIHDIAAVSYVRDDAAHLVVLKTAQDPGISPSQSLCAESSRGLSAGSLSESAVGPVEACCLVILAAESKVAAEELCCLLGQVFQVVYTESTIDFLDRAIFDGASTPTHHLSLHSDDSSTKVDIKETYEVEASTFCFPESVDVGGASPHSKTISESELSASATELLQDYMLTLRTKLSSQEIQQFAALLHEYRNGASIHEFCINLRQLYGDSRKFLLLGLRPFIPEKDSQHFENFLETIGVKDGRGIITDSFGSQALQCVPARGGPGRAGRESQSCRLGPWTAVSFAHDVPIVTLRDLKKKFTAM

SEQ ID NO: 743000 - protein, 295 aa, Homo sapiens
MEEEGKKGKKPGIVSPFKRVFLKGEKSRDKKAHEKVTERRPLHTVVLSLPERVEPDRLLSDYIEKEVKYLGQLTSIPGYLNPSSRTEILHFIDNAKRAHQLPGHLTQEHDAVLSLSAYNVKLAWRDGEDIILRVPIHDIAAVSYVRDDAAHLVVLKTAQDPGISPSQSLCAESSRGLSAGSLSESAVGPVEACCLVILAAESKVAAEELCCLLGQVFQVVYTESTIDFLDRAIFDGASTPTHHLSLHSDDSSTKVDIKETYEVEASTFCFPESVDVGGASPHMDGGAPTPSAQSS

SEQ ID NO: 743001 - protein, 142 aa, Homo sapiens; identical to SEQ ID NO: 742993

SEQ ID NO: 743002 - protein, 142 aa, Homo sapiens; identical to SEQ ID NO: 742993

SEQ ID NO: 743003 - protein, 268 aa, Homo sapiens
MEEEGKKGKKPGIVSPFKRVFLKGEKSRDKKAHEKVTERRPLHTVVLSLPERVEPDRLLSDYIEKEVKYLGQLTSIPGYLNPSSRTEILHFIDNAKRAHQLPGHLTQEHDAVLSLSAYNVKLAWRDGEDIILRVPIHDIAAVSYVRDDAAHLVVLKTAQDPGISPSQSLCAESSRGLSAGSLSESAVGPVEACCLVILAAESKVAAEELCCLLGQVFQVVYTESTIDFLDRAIFDGASTPTHHLSLHSDDSSTKVDIKETYEVEASTL

SEQ ID NO: 743004 - protein, 370 aa, Homo sapiens
MEEEGKKGKKPGIVSPFKRVFLKGEKSRDKKAHEKVTERRPLHTVVLSLPERVEPDRLLSDYIEKEVKYLGQLTSIPGYLNPSSRTEILHFIDNAKRAHQLPGHLTQEHDAVLSLSAYNVKLAWRDGEDIILRVPIHDIAAVSYVRDDAAHLVVLKTAQDPGISPSQSLCAESSRGLSAGSLSESAVGPVEACCLVILAAESKVAAEELCCLLGQVFQVVYTESTIDFLDRAIFDGASTPTHHLSLHSASHVTSSTVTSSFDCQLPLHFRTLAITLSPPKFSRVISLFQGQLISILYSPLKLVTYSPIPGIRMWTSLGGHYSALHTYLVPSARNVPFISQPLPLLHLKSYPLCNTHLPRSQSFHSLSVLG

SEQ ID NO: 743005 - protein, 108 aa, Homo sapiens
VLLAPRLRTRWSWKLRRMGEKMAEEERFPNTTHEGFNVTLHTTLVVTTKLVLPTPGKPILPVQTGEQAQQEEQSSGMTIFFSLLVLGEYGHCHPHHLPSRVCVLGLCV

SEQ ID NO: 743006 - protein, 121 aa, Homo sapiens
VLLAPRLRTRWSWKLRRMGEKMAEEERFPNTTHEGFNVTLHTTLVVTTKLVLPTPGKPILPVQTGEQAQQEEQSSGMTIFFSLLVLAICIILVHLLIRYRLHFLPESVAVVSLGKCVLVIP

SEQ ID NO: 743007 - protein, 93 aa, Homo sapiens
KGGTHCFRKVRCAQAMGAAWAASDLQLHNVDFSWEIKIIIRKLPGTGVLSRQEPLPGLGRVWCSLESPGQKQRRRRLQASAFLIDVFLLEQRP

SEQ ID NO: 743008 - protein, 120 aa, Homo sapiens
AQVLKVACSNTLLNNIVLYVATALLGVFPVAGILFSYSQIVSSLMGMSSTKGKYKAFSTCGSHLCVVSLFYGTGLGVYLSSAVTHSSQSSSTASVMYAMVTPMLNPFIYSLRNKDVKGAL

SEQ ID NO: 743009 - protein, 53 aa, Homo sapiens
SLGITARLFLLQEFPNAGTHSPKEFASELPVASWGTDRRNRAISRPCAQRRTD

SEQ ID NO: 743010 - protein, 125 aa, Homo sapiens
MHNILRRLIHNKMSNNIQHILVNPTPSWIHSTQGSIYLTVGKFPTRTAVTVPGPLNNTLTLGIKVNTGPQNVSDPLVRIQLLTCCFSPPTTQILHNKIYIFSTMPGPLQLPQALSSPRALRWGGD

SEQ ID NO: 743011 - protein, 64 aa, Homo sapiens
TCHVTQNKKAEDRDSNSSFNQHDTRHVGIYHETYIYTQIYKISISTSPTASRVSVIFRYTWNIY

SEQ ID NO: 743012 - protein, 116 aa, Homo sapiens
MEFSGEGFDLRELLVSFSPVKFQGFGNVHERALLPSQPSPPLTLPSTGIRVLASDPACSMRPTKGRGLFLSSSSSSCRRCKPKCQQSLSLSCVSWPAGGRMTQSLPTSLVTWPSAG

SEQ ID NO: 743013 - protein, 72 aa, Homo sapiens
EKAETWTLPGGLGGGPVLGRCLSESQVRRIKRPDAVRLPVLGEDGPSLPRELCGIRKRWCSFAFTGLSEIRL

SEQ ID NO: 743014 - protein, 225 aa, Homo sapiens
MAAAGGGGGGAAAAGRAYSFKVVLLGEGCVGKTSLVLRYCENKFNDKHITTLQASFLTKKLNIGGKRVNLAIWDTAGQERFHALGPIYYRDSNGAILVYDITDEDSFQKVKNWVKELRKMLGNEICLCIVGNKIDLEKERHVSIQEAESYAESVGAKHYHTSAKQNKGIEELFLDLCKRMIETAQVDERAKGNGSSQPGTARRGVQIIDDEPQAQTSGGGCCSSG

SEQ ID NO: 743015 - protein, 225 aa, Homo sapiens; identical to SEQ ID NO: 743014

SEQ ID NO: 743016 - protein, 225 aa, Homo sapiens; identical to SEQ ID NO: 743014

SEQ ID NO: 743017 - protein, 225 aa, Homo sapiens; identical to SEQ ID NO: 743014

SEQ ID NO: 743018 - protein, 225 aa, Homo sapiens; identical to SEQ ID NO: 743014

SEQ ID NO: 743019 - protein, 225 aa, Homo sapiens; identical to SEQ ID NO: 743014

SEQ ID NO: 743020 - protein, 184 aa, Homo sapiens
MAAAGGGGGGAAAAGRAYSFKVVLLGEGCVGKTSLVLRYCENKFNDKHITTLQASFLTKKLNIGGKRVNLAIWDTAGQERFHALGPIYYRDSNGAILVYDITDEDSFQKVKNWVKELRKMLGNEICLCIVGNKIDLEKERHVSIQEAESYAESVGAKHYHTSAKQNKGIEELFLDLCKRMIETA

SEQ ID NO: 743021 - protein, 233 aa, Homo sapiens
MGGVLCPLCPPRRVWGEGGEEGERNRGGTAGGRGGVQGEPGVRAPMCGPPRRGRYTGERISHLLHKKTIAGVGTGGLQRPGVFPHDTVGRSARTGRGRNHISWGTREVPKTPRAGAHQSIGVKPPGLNYNKLHKNMYEAGGVGGGTPLIYIPQLSLGGKRKKAQREKNSLVNHPRGGESVLLGDPQENTRHLPPPVVATTERETVFSPQHITKTGAAQILGGGDTKVIERRKV

SEQ ID NO: 743022 - protein, 149 aa, Homo sapiens
MAAAGGGGGGAAAAGRAYSFKVVLLGEGCVGKTSLVLRYCENKFNDKHITTLQASFLTKKLNIGGKRVNLAIWDTAGQERFHALGPIYYRDSNGAILVYDITDEDSFQKVKNWVKELRKMLGNEICLCIVGKHHYFFLKKKSSVSLMFY

SEQ ID NO: 743023 - protein, 954 aa, Homo sapiens
MEEEEGAVAKEWGTTPAGPVWTAVFDYEAAGDEELTLRRGDRVQVLSQDCAVSGDEGWWTGQLPSGRVGVFPSNYVAPGAPAAPAGLQLPQEIPFHELQLEEIIGVGGFGKVYRALWRGEEVAVKAARLDPEKDPAVTAEQVCQEARLFGALQHPNIIALRGACLNPPHLCLVMEYARGGALSRVLAGRRVPPHVLVNWAVQVARGMNYLHNDAPVPIIHRDLKSINILILEAIENHNLADTVLKITDFGLAREWHKTTKMSAAGTYAWMAPEVIRLSLFSKSSDVWSFGVLLWELLTGEVPYREIDALAVAYGVAMNKLTLPIPSTCPEPFARLLEECWDPDPHGRPDFGSILKRLEVIEQSALFQMPLESFHSLQEDWKLEIQHMFDDLRTKEKELRSREEELLRAAQEQRFQEEQLRRREQELAEREMDIVERELHLLMCQLSQEKPRVRKRKGNFKRSRLLKLREGGSHISLPSGFEHKITVQASPTLDKRKGSDGASPPASPSIIPRLRAIRLTPVDCGGSSSGSSSGGSGTWSRGGPPKKEELVGGKKKGRTWGPSSTLQKERVGGEERLKGLGEGSKQWSSSAPNLGKSPKHTPIAPGFASLNEMEEFAEAEDGGSSVPPSPYSTPSYLSVPLPAEPSPGARAPWEPTPSAPPARWGHGARRRCDLALLGCATLLGAVGLGADVAEARAADGEEQRRWLDGLFFPRAGRFPRGLSPPARPHGRREDVGPGLGLAPSATLVSLSSVSDCNSTRSLLRSDSDEAAPAAPSPPPSPPAPTPTPSPSTNPLVDLELESFKKDPRQSLTPTHVTAACAVSRGHRRTPSDGALGQRGPPEPAGHGPGPRDLLDFPRLPDPQALFPARRRPPEFPGRPTTLTFAPRPRPAASRPRLDPWKLVSFGRTLTISPPSRPDTPESPGPPSVQPTLLDMDMEGQNQDSTVPLCGAHGSH

SEQ ID NO: 743024 - protein, 222 aa, Homo sapiens
MEEEEGAVAKEWGTTPAGPVWTAVFDYEAAGDEELTLRRGDRVQVLSQDCAVSGDEGWWTGQLPSGRVGVFPSNYVAPGAPAAPAGLQLPQEIPFHELQLEEIIGVGGFGKVYRALWRGEEVAVKAARLDPEKDPAVTAEQVCQEARLFGALQHPNIIALRGACLNPPHLCLVMEYARGGALSRVLAGRRVPPHVLVNWAVQVARGMNYLHNDGYRGVHCSL

SEQ ID NO: 743025 - protein, 954 aa, Homo sapiens; identical to SEQ ID NO: 743023

SEQ ID NO: 743026 - protein, 872 aa, Homo sapiens
MEEEEGAVAKEWGTTPAGPVWTAVFDYEAAGDEELTLRRGDRVQVLSQDCAVSGDEGWWTGQLPSGRVGVFPSNYVAPGAPAAPAGLQLPQEIPFHELQLEEIIGVGGFGKVYRALWRGEEVAVKAARLDPEKDPAVTAEQVCQEARLFGALQHPNIIALRGACLNPPHLCLVMEYARGGALSRVLAGRRVPPHVLVNWAVQVARGMNYLHNDAPVPIIHRDLKSINILILEAIENHNLADTVLKITDFGLAREWHKTTKMSAAGTYAWMAPEVIRLSLFSKSSDVWSFGVLLWELLTGEVPYREIDALAVAYGVAMNKLTLPIPSTCPEPFARLLEECWDPDPHGRPDFGSILKRLEVIEQSALFQMPLESFHSLQEDWKLEIQHMFDDLRTKEKGFEHKITVQASPTLDKRKGSDGASPPASPSIIPRLRAIRLTPVDCGGSSSGSSSGGSGTWSRGGPPKKEELVGGKKKGRTWGPSSTLQKERVGGEERLKGLGEGSKQWSSSAPNLGKSPKHTPIAPGFASLNEMEEFAEAEDGGSSVPPSPYSTPSYLSVPLPAEPSPGARAPWEPTPSAPPARWGHGARRRCDLALLGCATLLGAVGLGADVAEARAADGEEQRRWLDGLFFPRAGRFPRGLSPPARPHGRREDVGPGLGLAPSATLVSLSSVSDCNSTRSLLRSDSDEAAPAAPSPPPSPPAPTPTPSPSTNPLVDLELESFKKDPRQSLTPTHVTAACAVSRGHRRTPSDGALGQRGPPEPAGHGPGPRDLLDFPRLPDPQALFPARRRPPEFPGRPTTLTFAPRPRPAASRPRLDPWKLVSFGRTLTISPPSRPDTPESPGPPSVQPTLLDMDMEGQNQDSTVPLCGAHGSH

SEQ ID NO: 743027 - protein, 512 aa, Homo sapiens
MEEEEGAVAKEWGTTPAGPVWTAVFDYEAAGDEELTLRRGDRVQVLSQDCAVSGDEGWWTGQLPSGRVGVFPSNYVAPGAPAAPAGLQLPQEIPFHELQLEEIIGVGGFGKVYRALWRGEEVAVKAARLDPEKDPAVTAEQVCQEARLFGALQHPNIIALRGACLNPPHLCLVMEYARGGALSRVLAGRRVPPHVLVNWAVQVARGMNYLHNDAPVPIIHRDLKSINILILEAIENHNLADTVLKITDFGLAREWHKTTKMSAAGTYAWMAPEVIRLSLFSKSSDVWSFGVLLWELLTGEVPYREIDALAVAYGVAMNKLTLPIPSTCPEPFARLLEECWDPDPHGRPDFGSILKRLEVIEQSALFQMPLESFHSLQEDWKLEIQHMFDDLRTKEKELRSREEELLRAAQEQRFQEEQLRRREQELAEREMDIVERELHLLMCQLSQEKPRVRKRKGNFKRSRLLKLREGGSHISLPSGTHPCPQSAPQEAAGSSPDLGFISSFSFSTCFYC

SEQ ID NO: 743028 - protein, 878 aa, Homo sapiens
MEEEEGAVAKEWGTTPAGPVWTAVFDYEAAGDEELTLRRGDRVQVLSQDCAVSGDEGWWTGQLPSGRVGVFPSNYVAPGAPAAPAGLQLPQEIPFHELQLEEIIGVGGFGKVYRALWRGEEVAVKAARLDPEKDPAVTAEQVARGMNYLHNDAPVPIIHRDLKSINILILEAIENHNLADTVLKITDFGLAREWHKTTKMSAAGTYAWMAPELRGAAVGAADGGGPYREIDALAVAYGVAMNKLTLPIPSTCPEPFARLLEECWDPDPHGRPDFGSILKRLEVIEQSALFQMPLESFHSLQEDWKLEIQHMFDDLRTKEKELRSREEELLRAAQEQRFQEEQLRRREQELAEREMDIVERELHLLMCQLSQEKPRVRKRKGNFKRSRLLKLREGGSHISLPSGFEHKITVQASPTLDKRKGSDGASPPASPSIIPRLRAIRLTPVDCGGSSSGSSSGGSGTWSRGGPPKKEELVGGKKKGRTWGPSSTLQKERVGGEERLKGLGEGSKQWSSSAPNLGKSPKHTPIAPGFASLNEMEEFAEAEDGGSSVPPSPYSTPSYLSVPLPAEPSPGARAPWEPTPSAPPARWGHGARRRCDLALLGCATLLGAVGLGADVAEARAADGEEQRRWLDGLFFPRAGRFPRGLSPPARPHGRREDVGPGLGLAPSATLVSLSSVSDCNSTRSLLRSDSDEAAPAAPSPPPSPPAPTPTPSPSTNPLVDLELESFKKDPRQSLTPTHVTAACAVSRGHRRTPSDGALGQRGPPEPAGHGPGPRDLLDFPRLPDPQALFPARRRPPEFPGRPTTLTFAPRPRPAASRPRLDPWKLVSFGRTLTISPPSRPDTPESPGPPSVQPTLLDMDMEGQNQDSTVPLCGAHGSH

SEQ ID NO: 743029 - protein, 425 aa, Homo sapiens
  misc_feature (359)..(359): Xaa can be any naturally occurring amino acid
  misc_feature (405)..(405): Xaa can be any naturally occurring amino acid
MEEEEGAVAKEWGTTPAGPVWTAVFDYEAAGDEELTLRRGDRVQVLSQDCAVSGDEGWWTGQLPSGRVGVFPSNYVAPGAPAAPAGLQLPQEIPFHELQLEEIIGVGGFGKVYRALWRGEEVAVKAARLDPEKDPAVTAEQVCQEARLFGALQHPNIIALRGACLNPPHLCLVMEYARGGALSRVLAGRRVPPHVLVNWAVQVARGMNYLHNDAPVPIIHRDLKSINILILEAIENHNLADTVLKITDFGLAREWHKTTKMSAAGTYAWMAPEVIRLSLFSKSSDVWSFGVLLWELLTGEVPYREIDALAVAYGVAMNKLTLPIPSTCPEPFARLLEGEPGPRDEGRLSLEWQGPVGPXPFPFTPIHTSGPRSEEEGAGTHWTLNSLPMVGSIPHIPALVWARAXSSQDNLLGFLGPWGFPPVDP

SEQ ID NO: 743030 - protein, 166 aa, Homo sapiens
VGLGLAVGGVIGGCPLAQVPVGPWPALQRSDGPLLVAEEFAEAEDGGSSVPPSPYSTPSYLSVPLPAEPSPGARAPWEPTPSAPPARWGHGARRRCDLALLGCATLLGAVGLGADVAEARAADGEEQRRWLDGLFFPRAGRFPRGLSPPARPHGRREDVGPGLGLA

SEQ ID NO: 743031 - protein, 85 aa, Homo sapiens
PHLCLVMEYARGGALSRVLAGRRVPPHVLVNWAVQVARGMNYLHNDAPVPIIHRDLKSINSKWCPLPKIPSTEPLKARPRWWETG

SEQ ID NO: 743032 - protein, 423 aa, Homo sapiens
RSSGLEQRSRLAATFPRQSARPGRARPPTAGSPGAAVAAAPPAAPAGAWAPAPLCRMGTVLSLSPASSAKGRRPGGLPEEKKKAPPAGDEALGGYGAPPVGKGGKGESRLKRPSVLISALTWKRLVAASAKKKKGSKKVTPKPASTGPDPLVQQRNRENLLRKGRDPPDGGGTAKPLAVPVPTVPAAAATCEPPSGGSAAAQPPGSGGGKPPPPPPPAPQVAPPVPGGSPRRVIVQASTGELLRCLGDFVCRRCYRLKELSPGELVGWFRGVDRSLLLQGWQDQAFITPANLVFVYLLCRESLRGDELASAAELQAAFLTCLYLAYSYMGNEISYPLKPFLVEPDKERFWQRCLRLIQRLSPQMLRLNADPHFFTQVFQDLKNEGEAAASGGGPPSGGAPAASSAARDSCAAGTKHWTMNLDR

SEQ ID NO: 743033 - protein, 423 aa, Homo sapiens; identical to SEQ ID NO: 743032

SEQ ID NO: 743034 - protein, 170 aa, Homo sapiens
RSSGLEQRSRLAATFPRQSARPGRARPPTAGSPGAAVAAAPPAAPAGAWAPAPLCRMGTVLSLSPASSAKGRRPGGLPEEKKKAPPAGDEALGGYGAPPVGKGGKGESRLKRPSVLISALTWKRLVAASAKKKKGSKKVTPKPASTGPDPLVQQRNRGVWICWAWSGDGR

SEQ ID NO: 743035 - protein, 148 aa, Homo sapiens
PLARQPPTSPTAPDYARQPPTSPTAPALSHSLMPVLPGPLLPLIHSPLSLSPSLSCSSLSSSLSLPFHFPFLGFVCLHLHLTPCLTVPRRPLFLLLHLCPHLPFLLLLSCVTIFPPVCLLPPLVSACIFLFLTESPHPSPLIKGNISF

SEQ ID NO: 743036 - protein, 106 aa, Homo sapiens
KDWAPARAALAHELGSKYLQRPWGNEGFFLSPPGKFGGDFLVYPGDPLRFHAHYIAQCWAPEDTIPLQDLVAAGRLGTSVRKTLLLCSPQPDGKVVYTSLQWASLQ

SEQ ID NO: 743037 - protein, 304 aa, Homo sapiens
MGLPWGQPHLGLQMLLLALNCLRPSLSLGEWGSWMDASSQTQGAGGPAGVIGPWAPAPLRLGEAAPGTPTPVSVAHLLSPVATELVPYTPQITAWDLEGKVTATTFSLEQPRCVFDGLASASDTVWLVVAFSNASRGFQNPETLADIPASPQLLTDGHYMTLPLSPDQLPCGDPMAGSGGAPVLRVGHDHGCHQQPFCNAPLPGPGPYREDPGSIDTWPGRRSGSMIVITSILSSLAGLLLLAFLAASTMRFSSLWWPEEAPEQLRIGSFMGKRYMTHHIPPSEAATLPVGCKPGLDPLPSLSP

SEQ ID NO: 743038 - protein, 334 aa, Homo sapiens
MGLPWGQPHLGLQMLLLALNCLRPSLSLGEWGSWMDASSQTQGAGGPAGVIGPWAPAPLRLGEAAPGTPTPVSVAHLLSPVATELVPYTPQITAWDLEGKVTATTFSLEQPRCVFDGLASASDTVWLVVAFSNASRGFQNPETLADIPASPQLLTDGHYMTLPLSPDQLPCGDPMAGSGGAPVLRVGHDHGCHQQPFCNAPLPGPGPYREDPLKFLLMDTRGSPRAETKWSDPITLHQGKTPGSIDTWPGRRSGSMIVITSILSSLAGLLLLAFLAASTMRFSSLWWPEEAPEQLRIGSFMGKRYMTHHIPPSEAATLPVGCKPGLDPLPSLSP

SEQ ID NO: 743039 - protein, 334 aa, Homo sapiens; identical to SEQ ID NO: 743038

SEQ ID NO: 743040 - protein, 116 aa, Homo sapiens
TPSTCALLSLHYRLRSPALPRLEMDPNCSCATGKGRPGSVPWDAKFPDTIESVPGFEEVVFCYQRKRGLLYWSSAFLLAKLLRAFSSSLFLYVRVEGPEAQGCPAPRHLVGHRAAG

SEQ ID NO: 743041 - protein, 94 aa, Homo sapiens
YAVHVRLAVSPLSLEISSLTAACNGPQLLLRHWWLLHVRRLLQVQRVQMHLLQEELLLLLPSTNRVTRKIQDFLFFDYNLDPFATFLFFCEICE

SEQ ID NO: 743042 - protein, 104 aa, Homo sapiens
PSLKCLGKESFGESWESRILHPAEISHRNECHMKIILDFKSEKGPDAVAHTCNPSILGGHTAGGSLEARSFETNLPETLSLLKKLNLKEKEFVASYPPLVEMLK

SEQ ID NO: 743043 - protein, 277 aa, Homo sapiens
GGQCHLQDTDSPPSAQPSQVSYTATMPFGNTHNKFKLNYKPEEEYPDLSKHNNHMAKVLTLELYKKLRDKETPSGFTVDDVIQTGVDNPGHPFIMTVGCVAGDEESYEVFKELFDPIISDRHGGYKPTDKHKTDLNHENLKGGDDLDPNYVLSSRVRTGRSIKGYTLPPHCSRGERRAVEKLSVEALNSLTGEFKGKYYPLKSMTEKEQQQSSMTTSCSTSRCPVLVAQAWPEWPKPWVWTMTTRAPGGGPGGTPGTPGTGTQGPRWRQKSKKAPGN

SEQ ID NO: 743044 - protein, 276 aa, Homo sapiens
GGQCHLQDTDSPPSAQPSQVSYTATMPFGNTHNKFKLNYKPEEEYPDLSKHNNHMAKVLTLELYKKLRDKETPSGFTVDDVIQTGVDNPGHPFIMTVGCVAGDEESYEVFKELFDPIISDRHGGYKPTDKHKTDLNHENLKGGDDLDPNYVLTCPSNLGTGLRGGVHVKLAHLSKHPKFEEILTRLRLQKRGTGGVDTAAVGSVFDVSNADRWLVRSRTGAAGGGWCEAHGGNGEKLEKASIENGPRRIGLQLHVRDPRGGHQIVNAPHTGDLPYT

SEQ ID NO: 743045 - protein, 272 aa, Homo sapiens
GGQCHLQDTDSPPSAQPSQVSYTATMPFGNTHNKFKLNYKPEEEYPDLSKHNNHMAKVLTLELYKKLRDKETPSGFTVDDVIQTGVDNPGHPFIMTVGCVAGDEESYEVFKELFDPIISDRHGGYKPTDKHKTDLNQELKLMESSQHTRSFVLCPPRKATKIKASWPLTNQHTPQHPTAPHTHPHPPHTHCVRRRRPPQTTPPQHTLGRHPPSDSNNGPRSPRNPPNSRAPPQKSAAPQRRTPRRAPTAPRRHDHTRTAQQPHAHSTQAHTP

SEQ ID NO: 743046 - protein, 283 aa, Homo sapiens
GGQCHLQDTDSPPSAQPSQVSYTATMPFGNTHNKFKLNYKPEEEYPDLSKHNNHMAKVLTLELYKKLRDKETPSGFTVDDVIQTGVDNPGHPFIMTVGCVAGDEESYEVFKELFDPIISEGGNMKEVFRRFCVGLQKIEEIFKKAGHPFMWNQHLGYVLTCPSNLGTGLRGGVHVKLAHLSKHPKFEEILTRLRLQKRGTGGVDTAAVGSVFDVSNADRWLVRSRTGAAGGGWCEAHGGNGEKLEKASIENGPRRIGLQLHVRDPRGGHQIVNAPHTGDLPYT

SEQ ID NO: 743047 - protein, 224 aa, Homo sapiens
MTEKEQQQSSMTTSCSTSRCPVLLAQAWPEWPKPWVWTMTTRAPGGVNEEDHLRVISMEKGGNMKEVFRRFCVGLQKIEEIFKKAGHPFMWNQHLGYVLTCPSNLGTGLRGGVHVKLAHLSKHPKFEEILTRLRLQKRGTGGVDTAAVGSVFDVSNADRWLVRSRTGAAGGGWCEAHGGNGEKLEKASPSTNGPRRIGLQLHVRDPRGGHQIVNAPHTGDLPYT

SEQ ID NO: 743048 - protein, 267 aa, Homo sapiens
GGQCHLQDTDSPPSAQPSQVSYTATMPFGNTHNKFKGKYYPLKSMTEKEQQQSSMTTSCSTSRCPVLLAQAWPEWPKPWVWTMTTRAPGGVNEEDHLRVISMEKGGNMKEVFRRFCVGLQKIEEIFKKAGHPFMWNQHLGYVLTCPSNLGTGLRGGVHVKLAHLSKHPKFEEILTRLRLQKRGTGGVDTAAVGSVFDVSNADRWLVRSRTGAAGGGWCEAHGGNGEKLEKASIENGPRRIGLQLHVRDPRGGHQIVNAPHTGDLPYT

SEQ ID NO: 743049 - protein, 215 aa, Homo sapiens
GGQCHLQDTDSPPSAQPSQVSYTATMPFGNTHNKFKLNYKPEEEYPDLSKHNNHMAKVLTLELCVGLQKIEEIFKKAGHPFMWNQHLGYVLTCPSNLGTGLRGGVHVKLAHLSKHPKFEEILTRLRLQKRGTGGVDTAAVGSVFDVSNADRWLVRSRTGAAGGGWCEAHGGNGEKLEKASIENGPRRIGLQLHVRDPRGGHQIVNAPHTGDLPYT

SEQ ID NO: 743050 - protein, 392 aa, Homo sapiens
GGQCHLQDTDSPPSAQPSQVSYTATMPFGNTHNKFKLNYKPEEEYPDLSKHNNHMAKVLTLELYKKLRDKETPSGFTVDDVIQTGVDNPGHPFIMTVGCVAGDEESYEVFKELFDPIISDRHGGYKPTDKHKTDLNHENLKGGDDLDPNYVLNSLTGEFKGKYYPLKSMTEKEQQQSSMTTSCSTSRCPVLLAQAWPEWPKPWVWTMTTRAPGGVNEEDHLRVISMEKGGNMKEVFRRFCVGLQKIEEIFKKAGHPFMWNQHLGYVLTCPSNLGTGLRGGVHVKLAHLSKHPKFEEILTRLRLQKRGTGGVDTAAVGSVFDVSNADRWLVRSRTGAAGGGWCEAHGGNGEKLEKASPSTNGPRRIGLQLHVRDPRGGHQIVNAPHTGDLPYT

SEQ ID NO: 743051 - protein, 239 aa, Homo sapiens
GGQCHLQDTDSPPSAQPSQVSYTATMPFGNTHNKFKLNYKPEEEYPDLSKHNNHMAKVLTLELYKKLRDKETPSGFTVDDVIQTGVDNPGHPFIMTVGCVAGDEESYEVFKELLSSRVRTGRSIKGYTLPPHCSRGERRAVEKLSVEALNSLTGEFKGKYYPLKSMTEKEQQQSSMTTSCSTSRCPVLLAQAWPEWPKPWVWTMTTRAPGGGPGGTPGPRERGHRVRGGGKRAKKRRET

SEQ ID NO: 743052 - protein, 156 aa, Homo sapiens
MAGLPIPPEIVKEAEVPQAALGVPAQGTGDNGHTPVEEEVGGIPVPAPGLLQVTERRQPLSSVSSLEVHFDLLDLTELTDMSDQELAEVFADSDDENLNTESPAGLHPLPRAGYLRSPSWTRTRAEQSHEKQPLGDPERQATVLDTFLTVERPQED

SEQ ID NO: 743053 - protein, 229 aa, Homo sapiens
LGGRREGAGPGPGEQLRAPAAPRLLPAAAAPRLLPRCAAPGAGAESLPQLLGRPGQATPPSPVPLPDRTGRMEPPEGAGTGEIVKEAEVPQAALGVPAQGTGDNGHTPVEEEVGGIPVPAPGLLQVTERRQPLSSVSSLEVHFDLLDLTELTDMSDQELAEVFADSDDENLNTESPAGLHPLPRAGYLRSPSWTRTRAEQSHEKQPLGDPERQATVLDTFLTVERPQED

SEQ ID NO: 743054 - protein, 229 aa, Homo sapiens; identical to SEQ ID NO: 743053

SEQ ID NO: 743055 - protein, 195 aa, Homo sapiens
SGGLSLPSASQAPPVPLASPEGRPHTVGAPHASTWKRTRGRQRARPPKIVKEAEVPQAALGVPAQGTGDNGHTPVEEEVGGIPVPAPGLLQVTERRQPLSSVSSLEVHFDLLDLTELTDMSDQELAEVFADSDDENLNTESPAGLHPLPRAGYLRSPSWTRTRAEQSHEKQPLGDPERQATVLDTFLTVERPQED

SEQ ID NO: 743056 - protein, 231 aa, Homo sapiens [sequence omitted]

SEQ ID NO: 743057 - protein, 93 aa, Homo sapiens
  misc_feature (43)..(43): Xaa can be any naturally occurring amino acid
SAKQAGTERGDGAPTPAEPPARLSRASLPAKAVRSTAGLRRLXSSLTAALTRQPASSAARLLRAGEKRRRSAGDQEGDVKPEARGPPLRLCDL

SEQ ID NO: 743058 - protein, 93 aa, Homo sapiens; identical to SEQ ID NO: 743057
  misc_feature (43)..(43): Xaa can be any naturally occurring amino acid

SEQ ID NO: 743059 - protein, 93 aa, Homo sapiens; identical to SEQ ID NO: 743057
  misc_feature (43)..(43): Xaa can be any naturally occurring amino acid

SEQ ID NO: 743060 - protein, 983 aa, Homo sapiens
MNWLSRLASRGPGHRIPQGANLQTPVMADPETCLMVFKNHWSQVVRILERQGPRAAPGGADDLSAVRNHTYQMLTLLAEDRAVPSAPTGPGPLLEFALHEDLLTRVLTWQLQWDELGDGVEERRAEQLKLFEMLVSEARQPLLRHGPVREALLTLLDACGRPVPSSPALDEGLVLLLSQLCVCVAQEPSLLEFFLQPPPEPGAAPRLLLFSRLVPFVHREGTLGQQARDALLLLMALSAGSPTVGRYIADHSYFCPVLATGLSALYSSLPRKIEVPGDDWHCLRREDWLGVPALALFMSSLEFCNAVIQVAHPLVQKQLVDYIHNGFLVPVMGPALHKTSVEEMIASTAYLELFLRSISEPALLRTFLRFLLLHRHDTHTILDTLVARIGSNSRLCMVSLSLFRTLLNLSCEDVLLQLVLRYLVPCNHVMLSQKPAVRDVDLYGRAADKFLSLIPRCCRHHAPSPPRPEHASWARGGPSRETGRREDITGPGSPSVDSSSVTTVPRPSTPSRLALFLRQQSLGGSESPGPAPCSPGLSASPASSPGRRPTPAEEPGELEDNYLEYLREARRGVDRCVRACRTWSAPYDGERPSPEPSPFGSRTKKRSLLPEEDRNNVGEGEEEELGRRGRAGGAGEGPGHLPPPQLNGVPGSWPEGAKKVRLVPKEGAGELLEGISEGMAGLEGFGQELRELEVALSNGGTGSESPLEPPLPLEEEEAYESFTCPPEPPGPFLSSPLRTLNQLPSQPFTGPFMAVLFAKLENMLQNSVYVNFLLTGLVAQLACHPQPLLRSFLLNTNMVFQPSVKSLLQVLGSVKNKIENFAASQEDFPALLSKAKKYLIARGKLDWAEGPAAGPAPRRSDPLVKSRRPSLGELLLRHAHSPTRARQAAQLVLQPGRDGAGLGLSGGSPGASTPVLLTRGGAPERQGEALRVKNAVYCAVIFPEFLKELAAISQAHAVTSPFLLETSEEGSGPLISGCGPLNP

SEQ ID NO: 743061 - protein, 969 aa, Homo sapiens
MNWLSRLASRGPGHRIPQGANLQTPVMADPETCLMVFKNHWSQVVRILERQGPRAAPGGADDLSAVRNHTYQMLTLLAEDRAVPSAPTGPGPLLEFALHEDLLTRVLTWQLQWDELGDGVEERRAEQLKLFEMLVSEARQPLLRHGPVREALLTLLDACGRPVPSSPALDEGLVLLLSQLCVCVAQEPSLLEFFLQPPPEPGAAPRLLLFSRLVPFVHREGTLGQQARDALLLLMALSAGSPTVGRYIADHSYFCPVLATGLSALYSSLPRKIEVPGDDWHCLRREDWLGVPALALFMSSLEFCNAVIQVAHPLVQKQLVDYIHNGFLVPVMGPALHKTSVEEMIASTAYLELFLRSISEPALLRTFLRFLLLHRHDTHTILDTLVARIGSNSRLCMVSLSLFRTLLNLSCEDVLLQLVLRYLVPCNHVMLSQKPAVRDVDLYGRAADKFLSLIPRCCRHHAPSPPRPEHASWARGPGSPSVDSSSVTTVPRPSTPSRLALFLRQQSLGGSESPGPAPCSPGLSASPASSPGRRPTPAEEPGELEDNYLEYLREARRGVDRCVRACRTWSAPYDGERPSPEPSPFGSRTKKRSLLPEEDRNNVGEGEEEELGRRGRAGGAGEGPGHLPPPQLNGVPGSWPEGAKKVRLVPKEGAGELLEGISEGMAGLEGFGQELRELEVALSNGGTGSESPLEPPLPLEEEEAYESFTCPPEPPGPFLSSPLRTLNQLPSQPFTGPFMAVLFAKLENMLQNSVYVNFLLTGLVAQLACHPQPLLRSFLLNTNMVFQPSVKSLLQVLGSVKNKIENFAASQEDFPALLSKAKKYLIARGKLDWAEGPAAGPAPRRSDPLVKSRRPSLGELLLRHAHSPTRARQAAQLVLQPGRDGAGLGLSGGSPGASTPVLLTRGGAPERQGEALRVKNAVYCAVIFPEFLKELAAISQAHAVTSPFLLETSEEGSGPLISGCGPLNP

SEQ ID NO: 743062 - protein, 779 aa, Homo sapiens
MNWLSRLASRGPGHRIPQGANLQTPVMADPETCLMVFKNHWSQVVRILERQGPRAAPGGADDLSAVRNHTYQMLTLLAEDRAVPSAPTGPGPLLEFALHEDLLTRVLTWQLQWDELGDGVEERRAEQLKLFEMLVSEARQPLLRHGPVREALLTLLDACGRPVPSSPALDEGLVLLLSQLCVCVAQEPSLLEFFLQPPPEPGAAPRLLLFSRLVPFVHREGTLGQQARDALLLLMALSAGSPTVGRYIADHSYFCPVLATGLSALYSSLPRKIEVPGDDWHCLRREDWLGVPALALFMSSLEFCNAVIQVAHPLVQKQLVDYIHNGFLVPVMGPALHKTSVEEMIASTAYLELFLRSISEPALLRTFLRFLLLHRHDTHTILDTLVARIGSNSRLCMVSLSLFRTLLNLSCEDVLLQLVLRYLVPCNHVMLSQKPAVRDVDLYGRAADKFLSLIPRCCRHHAPSPPRPEHASWARGPGSPSVDSSSVTTVPRPSTPSRLALFLRQQSLGGSESPGPAPCSPGLSASPASSPGRRPTPAEEPGELEDNYLEYLREARRGVDRCVRACRTWSAPYDGERPSPEPSPFGSRTKKRSLLPEEDRNNVGEGEEEELGRRGRAGGAGEGPGHLPPPQLNGVPGSWPEGAKKVRLVPKEGAGELLEGISEGMAGLEGFGQELRELEVALSNGGTGSESPLEPPLPLEEEEAYESFTCPPEPPGPFLSSPLRTLNQLPSQPFTGPFMAVLFAKLENMLQNPLFPAQHQHGLPAQCQVPAAGAGLCEE

SEQ ID NO: 743063 - protein, 779 aa, Homo sapiens; identical to SEQ ID NO: 743062

SEQ ID NO: 743064 - protein, 882 aa, Homo sapiens
MNWLSRLASRGPGHRIPQGANLQTPVMADPETCLMVFKNHWSQVVRILERQGPRAAPGGADDLSAVRNHTYQMLTLLAEDRAVPSAPTGPGPLLEFALHEDLLTRVLTWQLQWDELGDGVEERRAEQLKLFEMLVSEARQPLLRHGPVREALLTLLDACGRPVPSSPALDEGLVLLLSQLCVCVAQEPSLLEFFLQPPPEPGAAPRLLLFSRLVPFVHREGTLGQQARDALLLLMALSAGSPTVGRYIADHSYFCPVLATGLSALYSSLPRKIEVPGDDWHCLRREDWLGVPALALFMSSLEFCNAVIQVAHPLVQKQLVDYIHNGFLVPVMGPALHKTSVEEMIASTAYLELFLRSISEPALLRTFLRFLLLHRHDTHTILDTLVARIGSNSRLCMVSLSLFRTLLNLSCEDVLLQLVLRYLVPCNHVMLSQKPAVRDVDLYGRAADKFLSLIPRCCRHHAPSPPRPEHASWARGPGSPSVDSSSVTTVPRPSTPSRLALFLRQQSLGGSESPGPAPCSPGLSASPASSPGRRPTPAEEPGELEDNYQDHGLRGPKKVRLVPKEGAGELLEGISEGMAGLEGFGQELRELEVALSNGGTGSESPLEPPLPLEEEEAYESFTCPPEPPGPFLSSPLRTLNQLPSQPFTGPFMAVLFAKLENMLQNSVYVNFLLTGLVAQLACHPQPLLRSFLLNTNMVFQPSVKSLLQVLGSVKNKIENFAASQEDFPALLSKAKKYLIARGKLDWAEGPAAGPAPRRSDPLVKSRRPSLGELLLRHAHSPTRARQAAQLVLQPGRDGAGLGLSGGSPGASTPVLLTRGGAPERQGEALRVKNAVYCAVIFPEFLKELAAISQAHAVTSPFLLETSEEGSGPLISGCGPLNP

SEQ ID NO: 743065 - protein, 977 aa, Homo sapiens
MNWLSRLASRGPGHRIPQGANLQTPVMADPETCLMVFKNHWSQVVRILERQGPRAAPGGADDLSAVRNHTYQMLTLLAEDRAVPSAPTGPGPLLEFALHEDLLTRVLTWQLQWDELGDGVEERRAEQLKLFEMLVSEARQPLLRHGPVREALLTLLDACGRPVPSSPALDEGLVLLLSQLCVCVAQEPSLLEFFLQPPPEPGAAPRLLLFSRLVPFVHREGTLGQQARDALLLLMALSAGSPTVGRYIADHSYFCPVLATGLSALYSSLPRKIEVPGDDWHCLRREDWLGVPALALFMSSLEFCNAVIQVAHPLVQKQLVDYIHNGFLVPVMGPALHKTSVEEMIASTAYLELFLRSISEPALLRTFLRFLLLHRHDTHTILDTLVARIGSNSRLCMVSLSLFRTLLNLSCEDVLLQLVLRYLVPCNHVMLSQKPAVRDVDLYGRAADKFLSLIPRCCRHHAPSPPRPEHASWARGPGSPSVDSSSVTTVPRPSTPSRLALFLRQQSLGGSESPGPAPCSPGLSASPASSPGRRPTPAEEPGELEDNYLEYLREARRGVDRCVRACRTWSAPYDGERPSPEPSPFGSRTKKRSLLPEEDRNNVGEGEEEELGRRGRAGGAGEGPGHLPPPQLNGVPGSWPEGAKKVRLVPKEGAGELLEGISEGMAGLEGFGQELRELEVALSNGGTGSESPLEPPLPLEEEEAYESFTCPPEPPGPFLSSPLRTLNQLPSQPFTGPFMAVLFAKLENMLQNSVYVNFLLTGLVAQLACHPQPLLRSFLLNTNMVFQPSVKSLLQVCDAMHAWVLGSVKNKIENFAASQEDFPALLSKAKKYLIARGKLDWAEGPAAGPAPRRSDPLVKSRRPSLGELLLRHAHSPTRARQAAQLVLQPGRDGAGLGLSGGSPGASTPVLLTRGGAPERQGEALRVKNAVYCAVIFPEFLKELAAISQAHAVTSPFLLETSEEGSGPLISGCGPLNP

SEQ ID NO: 743066 - protein, 231 aa, Homo sapiens [sequence omitted]

SEQ ID NO: 743067 - protein, 231 aa, Homo sapiens [sequence omitted]

SEQ ID NO: 743068 - protein, 969 aa, Homo sapiens; identical to SEQ ID NO: 743061

SEQ ID NO: 743069 - protein, 120 aa, Homo sapiens
GSLLLQCLSPVNLPRAVRYFLCFGQQCWEVLLGSRKVLNLILHRAQHLQQGLDTTPFCIPSEEPEAILGGVTPAACTQSNQGPAGGTIGPSAWARRSRTWPKWGLPWGFNSSSTHPGRGP

SEQ ID NO: 743070 - protein, 835 aa, Homo sapiens
MNWLSRLASRGPGHRIPQGANLQTPVMADPETCLMVFKNHWSQVVRILERQGPRAAPGGADDLSAVRNHTYQMLTLLAEDRAVPSAPTGPGPLLEFALHEDLLTRVLTWQLQWDELGDGVEERRAEQLKLFEMLVSEARQPLLRHGPVREALLTLLDACGRPVPSSPALDEGLVLLLSQLCVCVAQEPSLLEFFLQPPPEPGAAPRLLLFSRLVPFVHREGTLGQQARDALLLLMALSAGSPTVGRYIADHSYFCPVLATGLSALYSSLPRKIEVPGDDWHCLRREDWLGVPALALFMSSLEFCNAVIQVAHPLVQKQLVDYIHNGFLVPVMGPALHKTSVEEMIASTAYLELFLRSISEPALLRTFLRFLLLHRHDTHTILDTLVARIGSNSRLCMVSLSLFRTLLNLSCEDVLLQLVLRYLVPCNHVMLSQKPAVRDVDLYGRAADKFLSLIPRCCRHHAPSPPRPEHASWARGPGSPSVDSSSVTTVPRPSTPSRLALFLRQQSLGGSESPGPAPCSPGLSASPASSPGRRPTPAEEPGELEDNYLEYLREARRGVDRCVRACRTWSAPYDGERPSPEPSPFGSRTKKRSLLPEEDRNNVGEGEEEELGRRGRAGGAGEGPGHLPPPQLNGVPGSWPEGAKKVRLVPKEGAGELLEGISEGMAGLEGFGQELRELEVALSNGGTGSESPLEPPLPLEEEEAYESFTCPPEPPGPFLSSPLRTLNQLPSQPFTGKLLSLGLPFCVLFACSRHVCAGFLDLLAMSFLCTCLAPHPSCLHHFQIRVMSYLCPCVCLYVFHACAGLSIDLHLSLVCMSYVHVPPLSLVWPFPAICN

SEQ ID NO: 743071 - protein, 766 aa, Homo sapiens
MNWLSRLASRGPGHRIPQGANLQTPVMADPETCLMVFKNHWSQVVRILERQGPRAAPGGADDLSAVRNHTYQMLTLLAEDRAVPSAPTGPGPLLEFALHEDLLTRVLTWQLQWDELGDGVEERRAEQLKLFEMLVSEARQPLLRHGPVREALLTLLDACGRPVPSSPALDEGLVLLLSQLCVCVAQEPSLLEFFLQPPPEPGAAPRLLLFSRLVPFVHREGTLGQQARDALLLLMALSAGSPTVGRYIADHSYFCPVLATGLSALYSSLPRKIEVPGDDWHCLRREDWLGVPALALFMSSLEFCNAVIQVAHPLVQKQLVDYIHNGFLVPVMGPALHKTSVEEMIASTAYLELFLRSISEPALLRTFLRFLLLHRHDTHTILDTLVARIGSNSRLCMVSLSLFRTLLNLSCEDVLLQLVLRYLVPCNHVMLSQKPAVRDVDLYGRAADKFLSLIPRCCRHHAPSPPRPEHASWARGPGSPSVDSSSVTTVPRPSTPSRLALFLRQQSLGGSESPGPAPCSPGLSASPASSPGRRPTPAEEPGELEDNYLEYLREARRGVDRCVRACRTWSAPYDGERPSPEPSPFGSRTKKRSLLPEEDRNNVGEGEEEELGRRGRAGGAGEGPGHLPPPQLNGVPGSWPEGAKKVRLVPKEGAGELLEGISEGMAGLEGFGQELRELEVALSNGGTGSESPLEPPLPLEEEEAYESFTCPPEPPGPFLSSPLRTLNQLPSQPFTGPFMAALFANLRKVSQNRYVHLVFKASCPSK

SEQ ID NO: 743072 - protein, 98 aa, Homo sapiens
NACDVHCVQALYPCAHLPPNPGPFMAVLFAKLENMLQNSVYVNFLLTGLVAQLACHPQPLLRSFLLNTNMVFQPSVKSLLQVCDACMHGCVQAPWWAR

SEQ ID NO: 743073 - protein, 73 aa, Homo sapiens
  misc_feature (5)..(5): Xaa can be any naturally occurring amino acid
  misc_feature (7)..(7): Xaa can be any naturally occurring amino acid
  misc_feature (12)..(13): Xaa can be any naturally occurring amino acid
  misc_feature (15)..(15): Xaa can be any naturally occurring amino acid
  misc_feature (20)..(20): Xaa can be any naturally occurring amino acid
  misc_feature (22)..(22): Xaa can be any naturally occurring amino acid
  misc_feature (37)..(37): Xaa can be any naturally occurring amino acid
VTPPXFXRPDIXXPXSGLTXCXWIASSPDPPPYARPXLMPPPRGPAPQILKTLLTLKNILKLSTNLSLVMMYI

SEQ ID NO: 743074 - protein, 233 aa, Homo sapiens
MKPAGPLGATATRGMLPPGPPPPGPHQFGQNGAHATGHPPQRFPGPPPVNNVASSHAPYQPSAQSSYPGPISTSSVTQLGSQLSAMQINSYGSGMAPPSQGPPGPLSATSLQTPPRPPQPSILQPGSQVLPPPPTTLNGPGASPLPLPMYRPDGLSGPPPPNAQYQPPPLPGQTLGAGYPPEQANSGPQMAGAQLSYPGGFPGGPGQMAGAPQPQKKLDPGSIPNPIQVIENE

SEQ ID NO: 743075 - protein, 145 aa, Homo sapiens
MKPAGPLGATATRGMLPPGPPPPGPHQFGQNGAHATGHPPQRFPGPPPVNNVASSHAPYQPSAQSSYPGPISTSSVTQLGSQLSAMQINSYDHGKSGSSDVVRQKREDRRGKSHSTEIYINRNAVYPVSHGKLHCNDSTVGHLSR

SEQ ID NO: 743076 - protein, 274 aa, Homo sapiens
MSQQGYVATPPYSQPQPGIGLSPPHYGHYGDPSHTASPTGMMKPAGPLGATATRGMLPPGPPPPGPHQFGQNGAHATGHPPQRFPGPPPVNNVASSHAPYQPSAQSSYPGPISTSSVTQLGSQLSAMQINSYGSGMAPPSQGPPGPLSATSLQTPPRPPQPSILQPGSQVLPPPPTTLNGPGASPLPLPMYRPDGLSGPPPPNAQYQPPPLPGQTLGAGYPPEQANSGPQMAGAQLSYPGGFPGGPGQMAGAPQPQKKLDPGSIPNPIQVIENE

SEQ ID NO: 743077 - protein, 132 aa, Homo sapiens
MITEAVPEGQEHWSIRRLGTDNTQLGWDPSPPSPAVLTASRSRVENHFPPPILAQGCATSPKPRDHTGPRLFSGPPFWSRGPTELATSLPLLPRPQEPPTRGWMGGVTEHDSRCNDSYARGILSPPHPSLGP

SEQ ID NO: 743078 - protein, 119 aa, Homo sapiens
MCNPKLLLPSPSRGPFKRGWCFSLAPGTLPACRPRRKPRLRFVRGPGSIGGVVRASLGEDVVASVCWWRRWQASAGNPENTAEVECGDVCDTGDRATVDEEGYIWFLGRSHDTINASGW

SEQ ID NO: 743079 - protein, 106 aa, Homo sapiens
MDFNAYKWGDCASCEARAASAAWSERVSEKMWWLPFVGGGGGRPRRYVSQCPLGVSQSHQKRINLCHRSFSPFRGLAPPHLGHSLGFDPVRKRWEKSETTTINPQH

SEQ ID NO: 743080 - protein, 119 aa, Homo sapiens; identical to SEQ ID NO: 743078

SEQ ID NO: 743081 - protein, 119 aa, Homo sapiens; identical to SEQ ID NO: 743078

SEQ ID NO: 743082 - protein, 119 aa, Homo sapiens; identical to SEQ ID NO: 743078

SEQ ID NO: 743083 - protein, 119 aa, Homo sapiens; identical to SEQ ID NO: 743078

SEQ ID NO: 743084 - protein, 118 aa, Homo sapiens
MCNPKLLLPSPSRGPFKRGWCFSLAPGTLPACRPRRKPRLRFVRGPGSIGGVVRASLGEDVVASVCWWRRWQASAGNPENTAEVECGDVCDTGDRATVDEEGYIWFLGRSHDTINASG

SEQ ID NO: 743085 - protein, 119 aa, Homo sapiens; identical to SEQ ID NO: 743078

SEQ ID NO: 743086 - protein, 72 aa, Homo sapiens
MKSCGEDGFHIQVRLHPFHVMHINKTSCAGLTGSKQVYEVPLKSPRALWPGFTLVHDIVSIDTKLQHREHVI

SEQ ID NO: 743087 - protein, 590 aa, Homo sapiens [sequence omitted]

SEQ ID NO: 743088 - protein, 590 aa, Homo sapiens [sequence omitted]

SEQ ID NO: 743089 - protein, 590 aa, Homo sapiens [sequence omitted]

SEQ ID NO: 743090 - protein, 580 aa, Homo sapiens
MEVIHGRPYCCRELEGADILSNTFYSNELHNPLQTVTRPTASEDRYQELRESLQQCRLPWGAEREYGGIIPISLPEDHRPKYEPPRVMGKGHQHYGFGGETWPRKLPVEQFYYLTQNKKSDVYGNDSLEICLPYPIEHPYHTHICRGTMFPTFTSPEDLYTGIKARTQQPFPPTVPSKAYDSTVLKTRGNPYRYELIDIPMDSKKKALTWPGQGVYYDFPRGVEKNKPVFYPKPPKTFAPNTSLNSWDPICSAKEANIQRNLERSHWLTSYTHDFTGLGPMDPLELDDYHEKMVAELTRKIGFDPEPQEKFHPVFKPPRPLEGRIARLIQNRRSLEAIVQQRPRSCPDCTPRVLCNFHTFVPSSKEMVALSDNIPAGVTHKNQDIEEKIIEEQSLLSTYELPSCYPTKDLTSIYDIKPFPKITDTKKTEDLYWRQQSLKTQPTPYCKPDHWIHYENLKSPLRDQYNMCPDPVSLSKPSVLQNKQDTEAFTLEHFLSKPEEELFLNMENNEETRPVLGWIPRAGVTKPQTNLLELKNSFSKTGAQKRFHKSILEDHKDLRDNEHSGMKHQFYGHNSYYFYN

SEQ ID NO: 743091 - protein, 140 aa, Homo sapiens
MEVIHGRPYCCRELEGADILSNTFYSNELHNPLQTVTRPTASEDRYQELRESLQQCRLPWGAEREYGGIIPISLPEDHRPKYEPPRVMGKGHQHYGFGGETWPRKLPVEQFYYLTQNKKSDVYGNDSLIPKPPNSTVGLQ

SEQ ID NO: 743092 - protein, 232 aa, Homo sapiens
VNRIVYRTGGDIIWMSLGLNAAQSILDDGCEMSCASLHQKQMGYESGAGMIEIHSGWGDRSPDVLFEVPKLKSGKSALEAESESLDSFTADSDSTSRRDSLDKSGLFPEWKKMSAPKSQVEKETQPGGQNVVFVDEGEMIFKKNTRKILRPSEYTKSVIDLRPEDVVHESGSLGDRSKSVPGLNVDMEEEEEEEDIDHLVKLHRQKLARSSMQSGSSMVSSIRSVVTGMLGY

SEQ ID NO: 743093 - protein, 671 aa, Homo sapiens
MSELLDLSFLSEEEKDLILSVLQRDEEVRKADEKRIRRLKNELLEIKRKGAKRGSQHYSDRTCARCQESLGRLSPKTNTCRGCNHLVCRDCRIQESNGTWRCKVCAKEIELKKATGDWFYDQKVNRFAYRTGSEIIRMSLRHKPAVSKRETVGQSLLHQTQMGDIWPGRKIIQERQKEPSVLFEVPKLKSGKSALEAESESLDSFTADSDSTSRRDSLDKSGLFPEWKKMSAPKSQVEKETQPGGQNVVFVDEGEMIFKKNTRKILRPSEYTKSVIDLRPEDVVHESGSLGDRSKSVPGLNVDMEEEEEEEDIDHLVKLHRQKLARSSMQSGSSMSTIGSMMSIYSEAGDFGNIFVTGRIAFSLKYEQQTQSLVVHVKECHQLAYADEAKKRSNPYVKTYLLPDKSRQGKRKTSIKRDTVNPLYDETLRYEIPESLLAQRTLQFSVWHHGRFGRNTFLGEAEIQMDSWKLDKKLDHCLPLHGKISAESPTGLPSHKGELVVSLKYIPASKTPVGGDRKKSKGGEGGELQVWIKEAKNLTAAKAGGTSDSFVKGYLLPMRNKASKRKTPVMKKTLNPHYNHTFVYNGVRLEDLQHMCLELTVWDREPLASNDFLGGVRLGVGTGISNGEVVDWMDSTGEEVSLWQKMRQYPGSWAEGTLQLRSSMAKQKLGL

SEQ ID NO: 743094 - protein, 671 aa, Homo sapiens; identical to SEQ ID NO: 743093

SEQ ID NO: 743095 - protein, 645 aa, Homo sapiens
  misc_feature (644)..(644): Xaa can be any naturally occurring amino acid
MSELLDLSFLSEEEKDLILSVLQRDEEVRKADEKRIRRLKNELLEIKRKGAKRGSQHYSDRTCARCQESLGRLSPKTNTCRGCNHLVCRDCRIQESNGTWRCKVCAKEIELKKATGDWFYDQKVNRFAYRTGSEIIRMSLRHKPAVSKRETVGQSLLHQTQMGDIWPGRKIIQERQKEPSVLFEVPKLKSGKSALEAESESLDSFTADSDSTSRRDSLDKSGLFPEWKKMSAPKSQVEKETQPGGQNVVFVDEGEMIFKKNTRKILRPSEYTKSVIDLRPEDVVHESGSLGDRSKSVPGLNVDMEEEEEEEDIDHLVKLHRQKLARSSMQSGSSMSTIGSMMSIYSEAGDFGNIFVTGRIAFSLKYEQQTQSLVVHVKECHQLAYADEAKKRSNPYVKTYLLPDKSRQGKRKTSIKRDTVNPLYDETLRYEIPESLLAQRTLQFSVWHHGRFGRNTFLGEAEIQMDSWKLDKKLDHCLPLHGKISAESPTGLPSHKGELVVSLKYIPASKTPVGGDRKKSKGGEGGELQVWIKEAKNLTAAKAGGTSDSFVKGYLLPMRNKASKRKTPVMKKTLNPHYNHTFVYNGVRLEDLQHMCLELTVWDREPLASNDFLGGVRLGVGTGEIPSPTILQDTVWTVGSSRVXC

SEQ ID NO: 743096 - protein, 280 aa, Homo sapiens
MSELLDLSFLSEEEKDLILSVLQRDEEVRKADEKRIRRLKNELLEIKRKGAKRGSQHYSDRTCARCQESLGRLSPKTNTCRGCNHLVCRDCRIQESNGTWRCKVCAKEIELKKATGDWFYDQKVNRFAYRTGSEIIRMSLRHKPAVSKRETVGQSLLHQTQMGDIWPGRKIIQERQKEPSVLFEVPKLKSGKSALEAESESLDSFTADSDSTSRRDSLDKSGLFPEWKKMSAPKSQVEKETQPGGQNVVFVDEGEMIFKKNTRKILRPSGNWFPLLVFQD

SEQ ID NO: 743097 - protein, 671 aa, Homo sapiens; identical to SEQ ID NO: 743093

SEQ ID NO: 743098 - protein, 349 aa, Homo sapiens
MSELLDLSFLSEEEKDLILSVLQRDEEVRKADEKRIRRLKNELLEIKRKGAKRGSQHYSDRTCARCQESLGRLSPKTNTCRGCNHLVCRDCRIQESNGTWRCKVCAKEIELKKATGDWFYDQKVNRFAYRTGSEIIRMSLRHKPAVSKRETVGQSLLHQTQMGDIWPGRKIIQERQKEPSVLFEVPKLKSGKSALEAESESLDSFTADSDSTSRRDSLDKSGLFPEWKKMSAPKSQVEKETQPGGQNVVFVDEGEMIFKKNTRKILRPSEYTKSVIDLRPEDVVHESGSLGDRSKSVPGLNVDMEEEEEEEDIDHLVKLHRQKLARSSMQSGSSMVSSIRSVVTGMLGY

SEQ ID NO: 743099 - protein, 326 aa, Homo sapiens
ARSRKCCGRRRRASRRHVWSPGSRSVAGPWPLPDISTMSFVAYEELIKEGDTAILSLGHGAMVAVRVQRGAQTQTRHGVLRHSVDLIGRPFGSKVTCGRGGWVYVLHPTPELWTLNLPHRTQILYSTDIALITMMLELRPGSVVCESGTGSGSVSHAIIRTIAPTGHLHTVEFHQQRAEKAREEFQEHRVGRWVTVRTQDVCRSGFGVSHVADAVFLDIPSPWEAVGHAWDALKVEGGRFCSFSPCIEQVQRTCQALAARGFSELSTLEVLPQVYNVRTVSLPPPDLGTGTDGPAGSDTSPFRSGTPMKEAVGHTGYLTFATKTPG

SEQ ID NO: 743100 - protein, 326 aa, Homo sapiens; identical to SEQ ID NO: 743099

SEQ ID NO: 743101 - protein, 326 aa, Homo sapiens; identical to SEQ ID NO: 743099

SEQ ID NO: 743102 - protein, 326 aa, Homo sapiens; identical to SEQ ID NO: 743099

SEQ ID NO: 743103 - protein, 326 aa, Homo sapiens; identical to SEQ ID NO: 743099

SEQ ID NO: 743104 - protein, 206 aa, Homo sapiens
ARSRKCCGRRRRASRRHVWSPGSRSVAGTGSGSVSHAIIRTIAPTGHLHTVEFHQQRAEKAREEFQEHRVGRWVTVRTQDVCRSGFGVSHVADAVFLDIPSPWEAVGHAWDALKVEGGRFCSFSPCIEQVQRTCQALAARGFSELSTLEVLPQVYNVRTVSLPPPDLGTGTDGPAGSDTSPFRSGTPMKEAVGHTGYLTFATKTPG

SEQ ID NO: 743105 - protein, 111 aa, Homo sapiens
MIGAPVSRTKGQMCGHPHLAAEKATPSWGWGGPGVLGLLPQSWAGIQCGCLGYLYAPLKEGSTPGRLVPAKCHTVGHRGLWLMWSGRPVSLRVAQPCSEGLSSPSRTQLPF

SEQ ID NO: 743106 - protein, 80 aa, Homo sapiens
PASGQGWVSSPQLLAKAGASARGLEKHEMVSGPVGQPGRGGPGVRSWGELTQNPCPALPSARRPGQPRNQGGDPALWPPG

SEQ ID NO: 743107 - protein, 101 aa, Homo sapiens
MSFVAYEELIKEGDTAILSLGHGAMVAVRVQRGAQTQTRHGVLRHSVDLIGRPFGSKVTCGRGGWVYVLHPTPELWTLNLPHRTQILYSTDIALITMMLEL

SEQ ID NO: 743108 - protein, 1724 aa, Homo sapiens
MTANRDGRDYFINHMTQAIPFDDPRLESCQIIPPAPRKVEMRRDPVLGFGFVAGSEKPVVVRSVTPGGPSEGKLIPGDQIVMINDEPVSAAPRERVIDLVRSCKESILLTVIQPYPSPKSAFISAAKKARLKSNPVKVRFSEEVIINGQVSETVKDNSLLFMPNVLKVYLENGQTKSFRFDCSTSIKDVILTLQEKLSIKGIEHFSLMLEQRTEGAGTKLLLLHEQETLTQVTQRPSSHKMRCLFRISFVPKDPIDLLRRDPVAFEYLYVQSCNDVVQERFGPELKYDIALRLAALQMYIATVTTKQTQKISLKYIEKEWGLETFLPSAVLQSMKEKNIKKALSHLVKANQNLVPPGKKLSALQAKVHYLKFLSDLRLYGGRVFKATLVQAEKRSEVTLLVGPRYGISHVINTKTNLVALLADFSHVNRIEMFSEEESLVRVELHVLDVKPITLLMESSDAMNLACLTAGYYRLLVDSRRSIFNMANKKNTATQETGPENKGKHNLLGPDWNCIPQMTTFIGEGEQEAQITYIDSKQKTVEITDSTMCPKEHRHLYIDNAYSSDGLNQQLSQPGEAPCEADYRSLAQRSLLTLSGPETLKKAQESPRGAKVSFIFGDFALDDGISPPTLGYETLLDEGPEMLEKQRNLYIGSANDMKGLDLTPEAEGIQFVENSVYANIGDVKSFQAAEGIEEPLLHDICYAENTDDAEDEDEVSCEEDLVVGEMNQPAILNLSGSSDDIIDLTSLPPPEGDDNEDDFLLRSLNMAIAAPPPGFRDSSDEEDSQSQAASFPEDKEKGSSLQNDEIPVSLIDAVPTSAEGKCEKGLDNAVVSTLGALEALSVSEEQQTSDNSGVAILRAYSPESSSDSGNETNSSEMTESSELATAQKQSENLSRMFLATHEGYHPLAEEQTEFPASKTPAGGLPPKSSHALAARPATDLPPKVVPSKQLLHSDHMEMEPETMETKSVTDYFSKLHMGSVAYSCTSKRKSKLADGEGKAPPNGNTTGKKQQGTKTAEMEEEASGKFGTVSSRDSQHLSTFNLERTAFRKDSQRWYVATEGGMAEKSGLEAATGKTFPRASGLGAREAEGKEEGAPDGETSDGSGLGQGDRFLTDVTCASSAKDLDNPEDADSSTCDHPSKLPEADESVARLCDYHLAKRMSSLQSEGHFSLQSSQGSSVDAGCGTGSSGSACATPVESPLCPSLGKHLIPDASGKGVNYIPSEERAPGLPNHGATFKELHPQTEGMCPRMTVPALHTAINTEPLFGTLRDGCHRLPKIKETISVALTEPGKERRGGMPSAWSQHPEADPILLPSNIHSESKVPIPNQDPNDFSQANQAYGEAVSWRPPDLRGGSLRTPPSQKALRHSSSILSGSVDLETFRERTKGAVSLKCPGITEAQEASSERRAELPLGRKLTKSFSQSSMHLSSEGRFHKRSPVAHKDSKLYRTLPLRKLEGSNWRCRGPFSYCFLNRGQDEDGEEEEERGEATVQVSCLYRPQVTQAMPEPSSPCLAVAIQKQRGELSRGSVLKVWAEDLRDPDDLDFSNLAFDARIARINALKESTYAMPDGFLAAQNDANELLCLVRATKEKREESRPEAYDLTLSQYKQLLSIESRQLGSACRKMAMAEKSPEEMLLAMTSSFQVLCCLTEACMRLVKVVNSETQRQEIVGKIDEVVINYICLLKAAEAATGKNPGDPNVGLSARHSTTMAALVSTLTRSLKRLLNK

SEQ ID NO: 743109 - protein, 342 aa, Homo sapiens
PCSWTGVGCTLKMPRSFLVKSKKAHTYHQPRVQEDEPLWPPALTPVPRDQAPSNSPVLSTLFPNQCLDWTNLKREPELEQDQNLARMAPAPEGPIVLSRPQDGDSPLSDSPPFYKPSFSWDTLATTYGHSYRQAPSTMQSAFLEHSVSLYGSPLVPSTEPALDFSLRYSPGMDAYHCVKCNKVFSTPHGLEVHVRRSHSGTRPFACDICGKTFGHAVSLEQHTHVHCPGAHFECRMCGKAFKRSSTLSTHLLIHSDTRPYPCQFCGKRFHQKSDMKKHTYIHTGEKPHKCQVCGKAFSQSSNLITHSRKHTGFKPFSCELCTKGFQRKVDLRRHRESQHNLK

SEQ ID NO: 743110 - protein, 130 aa, Homo sapiens
LRKSRFCLESSFLCPVPDSETGYWQFGLPWTLPHPWAMLAWHGEMKALGLPESCPCLCQDRRSEITRSCFYASSEWAHSMPFQATTFLLAVVVGHWVEAPLDLYLVDENNNPCLAGWMCCFTGDYLIHVT

SEQ ID NO: 743111 - protein, 213 aa, Homo sapiens
ENAGTELLLQGFERRFLAVRTLRSFPWQSLEAKLRDSSDSELLRDILQKTVRHPVCVKHPPSVKYAWCFLSELIKKSSGGSVTLSKSTAIISHGTTGLVTWDAALYLAEWAIENPAAFINRTVLELGSGAGLTGLAICKMCRPRAYIFSDPHSRILEQLRGNVLLNGLSLEADITGNLDSPRVTVAQLDWDVAMVHQLSAFQPDVVIAAGNAQ

SEQ ID NO: 743112 - protein, 237 aa, Homo sapiens
ENAGTELLLQGFERRFLAVRTLRSFPWQSLEAKLRDSSDSELLRDILQKTVRHPVCVKHPPSVKYAWCFLSELIKKHEAVHTEPLDKLYEVLAETLMAKESTQATGAICCPQEARSHSPRAQPSSPTVPQAWSHGMPPSTLQNGPSRTRQPSLTDVLYCPEAIVSLVGVLQRLAACREHKRAPEVYVAFTVRNPETCQLFTTELGRDGIRWEAEAHHDQKLFPYGEHLEMAMLNLTL

SEQ ID NO: 743113 - protein, 237 aa, Homo sapiens; identical to SEQ ID NO: 743112

SEQ ID NO: 743114 - protein, 203 aa, Homo sapiens
ENAGTELLLQGFERRFLAVRTLRSFPWQSLEAKLRDSSDSELLRDILQKTVRHPVCVKHPPSVKYAWCFLSELIKKSSGGSSHSPRAQPSSPTVPQAWSHGMPPSTLQNGPSRTRQPSLTDVLYCPEAIVSLVGVLQRLAACREHKRAPEVYVAFTVRNPETCQLFTTELGRDGIRWEAEAHHDQKLFPYGEHLEMAMLNLTL

SEQ ID NO: 743115 - protein, 264 aa, Homo sapiens
ENAGTELLLQGFERRFLAVRTLRSFPWQSLEAKLRDSSDSELLRDILQKTVRHPVCVKHPPSVKYAWCFLSELIKKHEAVHTEPLDKLYEVLAETLMAKESTQATGAICCPQEARSHSPRAQPSSPTVPQAWSHGMPPSTLQNGPSRTRQPSLTDVLYCPEAIVSLVGVLQRLAACREHKRAPEVYVAFTVRNPETCQLFTTELGEPPRPPGPTWCPSCPCRTPVEVKELGAGEKLGCSTLPHYAGNSGRGRPGWDQMGSGSSS

SEQ ID NO: 743116 - protein, 87 aa, Homo sapiens
DLPDLIDAFAVPGDAYTDYVATRWYRAPELLVGDTQYGSSVDIWAIGCVFAELLTGQPLWPGKSDVDQLYLIIRTLGMNCILWQQSC

SEQ ID NO: 743117 - protein, 110 aa, Homo sapiens
LDFVARIEDFLYLQVLALVYQKNQSHMVLENECKVLLSAGSSLLLFHQYALHNQPLVCSSTDVSSQCPDASVSALLGSWAFIDLGWGGGEPGWSWEMQHLGVKSGVPVLT

SEQ ID NO: 743118 - protein, 108 aa, Homo sapiens
EEPTCPPGRDGPFHLRFQEIAQGEGVEGGVLRRNMKPPVVSSTSKTTKKRQLGWSVRRSCHPSWGWQSNRDRHHITMGREENKRKMKIIFHQKTGKRRLWWEGLCWWE

SEQ ID NO: 743119 - protein, 322 aa, Homo sapiens
MSSLGGGSQDAGGSSSSSTNGSGGSGSSGPKAGAADKSAVVAAAAPASVADDTPPPERRNKSGIISEPLNKSLRRSRPLSHYSSFGSSGGSGGGSMMGGESADKATAAAAAASLLANGHDLAAAMAVDKSNPTSKHKSGAVASLLSKAERATELAAEGQLTLQQFAQSTEMLKRVVQEHLPLMSEAGAGLPDMEAVAGAEALNGQSDFPYLGAFPINPGLFIMTPAGVFLAESALHMAGLAEYPMQGELASAISSGKKKRKRCGMCAPCRRRINCEQCSSCRNRKTGHQICKFRKCEELKKKPSAALEKVMLPTGAAFRWFQ

SEQ ID NO: 743120 - protein, 322 aa, Homo sapiens; identical to SEQ ID NO: 743119

SEQ ID NO: 743121 - protein, 322 aa, Homo sapiens; identical to SEQ ID NO: 743119

SEQ ID NO: 743122 - protein, 309 aa, Homo sapiens
SRAVLEDPLESATGSGPKAGAADKSAVVAAAAPASVADDTPPPERRNKSGIISEPLNKSLRRSRPLSHYSSFGSSGGSGGGSMMGGESADKATAAAAAASLLANGHDLAAAMAVDKSNPTSKHKSGAVASLLSKAERATELAAEGQLTLQQFAQSTEMLKRVVQEHLPLMSEAGAGLPDMEAVAGAEALNGQSDFPYLGAFPINPGLFIMTPAGVFLAESALHMAGLAEYPMQGELASAISSGKKKRKRCGMCAPCRRRINCEQCSSCRNRKTGHQICKFRKCEELKKKPSAALEKVMLPTGAAFRWFQ

SEQ ID NO: 743123 - protein, 253 aa, Homo sapiens
MSSLGGGSQDAGGSSSSSTNGSGGSGSSGPKAGAADKSAVVAAAAPASVADDTPPPERRNKSGIISEPLNKSLRRSRPLSHYSSFGSSGGSGGGSMMGGESADKATAAAAAASLLANGHDLAAAMAVDKSNPTSKHKSGAVASLLSKAERATELAAEGQLTLQQFAQSTEMLKREMLLSDDCYTSARGCTATLGNFAKATFDAISKTYSYLTPDLWKETVFTKSPYQEFTDHLVKTHTRVSVQRTQAPAVATT

SEQ ID NO: 743124 - protein, 116 aa, Homo sapiens
AAGSYSTSVGGPNRIVSSSRPLVSCSRGLHPSIGSLRLPMSQKRKLGWRKFRSPRTRGWKWQNPGFRGWASGVLQGPQHGSEGLGLNPPSPWTLVPSKPRARALSVASPRDALQGR

SEQ ID NO: 743125 - protein, 469 aa, Homo sapiens
AESDASEPRRIVGGGCLQFLLPLPAKMSDMEDDFMCDDEEDYDLEYSEDSNSEPNVDLENQYYNSKALKEDDPKAALSSFQKVLELEGEKGEWGFKALKQMIKINFKLTNFPEMMNRYKQLLTYIRSAVTRNYSEKSINSILDYISTSKQMDLLQEFYETTLEALKDAKNDRLWFKTNTKLGKLYLEREEYGKLQKILRQLHQSCQTDDGEDDLKKGTQLLEIYALEIQMYTAQKNNKKLKALYEQSLHIKSAIPHPLIMGVIRECGGKMHLREGEFEKAHTDFFEAFKNYDESGSPRRTTCLKYLVLANMLMKSGINPFDSQEAKPYKNDPEILAMTNLVSAYQNNDITEFEKILKTNHSNIMDDPFIREHIEELLRNIRTQVLIKLIKPYTRIHIPFISKELNIDVADVESLLVQCILDNTIHGRIDQVNQLLELDHQKRGGARYTALDKWTNQLNSLNQAVVSKLA

SEQ ID NO: 743126 - protein, 477 aa, Homo sapiens
AESDASEPRRIVGGGCLQFLLPLPAKMSDMEDDFMCDDEEDYDLEYSEDSNSEPNVDLENQYYNSKALKEDDPKAALSSFQKVLELEGEKGEWGFKALKQMIKINFKLTNFPEMMNRYKQLLTYIRSAVTRNYSEKSINSILDYISTSKQNSDFLCQMMDLLQEFYETTLEALKDAKNDRLWFKTNTKLGKLYLEREEYGKLQKILRQLHQSCQTDDGEDDLKKGTQLLEIYALEIQMYTAQKNNKKLKALYEQSLHIKSAIPHPLIMGVIRECGGKMHLREGEFEKAHTDFFEAFKNYDESGSPRRTTCLKYLVLANMLMKSGINPFDSQEAKPYKNDPEILAMTNLVSAYQNNDITEFEKILKTNHSNIMDDPFIREHIEELLRNIRTQVLIKLIKPYTRIHIPFISKELNIDVADVESLLVQCILDNTIHGRIDQVNQLLELDHQKRGGARYTALDKWTNQLNSLNQAVVSKLA

SEQ ID NO: 743127 - protein, 469 aa, Homo sapiens; identical to SEQ ID NO: 743125

SEQ ID NO: 743128 - protein, 469 aa, Homo sapiens; identical to SEQ ID NO: 743125

SEQ ID NO: 743129 - protein, 469 aa, Homo sapiens; identical to SEQ ID NO: 743125

SEQ ID NO: 743130 - protein, 319 aa, Homo sapiens
MDLLQEFYETTLEALKDAKNDRLWFKTNTKLGKLYLEREEYGKLQKILRQLHQSCQTDDGEDDLKKGTQLLEIYALEIQMYTAQKNNKKLKALYEQSLHIKSAIPHPLIMGVIRECGGKMHLREGEFEKAHTDFFEAFKNYDESGSPRRTTCLKYLVLANMLMKSGINPFDSQEAKPYKNDPEILAMTNLVSAYQNNDITEFEKILKTNHSNIMDDPFIREHIEELLRNIRTQVLIKLIKPYTRIHIPFISKELNIDVADVESLLVQCILDNTIHGRIDQVNQLLELDHQKRGGARYTALDKWTNQLNSLNQAVVSKLA

SEQ ID NO: 743131 - protein, 449 aa, Homo sapiens
SSDPHHLSDDEEDYDLEYSEDSNSEPNVDLENQYYNSKALKEDDPKAALSSFQKVLELEGEKGEWGFKALKQMIKINFKLTNFPEMMNRYKQLLTYIRSAVTRNYSEKSINSILDYISTSKQNSDFLCQMMDLLQEFYETTLEALKDAKNDRLWFKTNTKLGKLYLEREEYGKLQKILRQLHQSCQTDDGEDDLKKGTQLLEIYALEIQMYTAQKNNKKLKALYEQSLHIKSAIPHPLIMGVIRECGGKMHLREGEFEKAHTDFFEAFKNYDESGSPRRTTCLKYLVLANMLMKSGINPFDSQEAKPYKNDPEILAMTNLVSAYQNNDITEFEKILKTNHSNIMDDPFIREHIEELLRNIRTQVLIKLIKPYTRIHIPFISKELNIDVADVESLLVQCILDNTIHGRIDQVNQLLELDHQKRGGARYTALDKWTNQLNSLNQAVVSKLA

SEQ ID NO: 743132 - protein, 134 aa, Homo sapiens
MTNFRYCAYQNNDITEFEKILKTNHSNIMDDPFIREHIEELLRNIRTQVLIKLIKPYTRIHIPFISKELNIDVADVESLLVQCILDNTIHGRIDQVNQLLELDHQKRGGARYTALDKWTNQLNSLNQAVVSKLA

SEQ ID NO: 743133 - protein, 469 aa, Homo sapiens; identical to SEQ ID NO: 743125

SEQ ID NO: 743134 - protein, 469 aa, Homo sapiens; identical to SEQ ID NO: 743125

SEQ ID NO: 743135 - protein, 176 aa, Homo sapiens
MGKAAAAVAFGAEVGVRLALFAAFLVTELLPPFQRLIQPEEMWLYRNPYVEAEYFPTKPMFVIAFLSPLSLIFLAKFLKKADTRDSRQACLAASLALALNGVFTNTIKLIVGRPRPDFFYRCFPDGLAHSDLMCTGDKDVVNEGRKSFPSGHSSCMNIIWTLPYACFHIIEFNLES

SEQ ID NO: 743136 - protein, 739 aa, Homo sapiens
MFLLLALLTELGRLQAHEGSEGIFLHVTVPRKIKSNDSEVSERKMIYIITIDGQPYTLHLGKQSFLPQNFLVYTYNETGSLHSVSPYFMMHCHYQGYAAEFPNSFVTLSICSGLRGFLQFENISYGIEPVESSARFEHIIYQMKNNDPNVSILAVNYSHIWQKDQPYKVPLNSQIKNLSKLLPQYLEIYIIVEKALYDYMGSEMMAVTQKIVQVIGLVNTMFTQFKLTVILSSLELWSNENQISTSGDADDILQRFLAWKRDYLILRPHDIAYLLVYRKHPKYVGATFPGTVCNKSYDAGIAMYPDAIGLEGFSVIIAQLLGLNVGLTYDDITQCFCLRATCIMNHEAVSASGRKIFSNCSMHDYRYFVSKFETKCLQKLSNLQPLHQNQPVCGNGILESNEECDCGNKNECQFKKCCDYNTCKLKGSVKCGSGPCCTSKCELSIAGTPCRKSIDPECDFTEYCNGTSSNCVPDTYALNGRLCKLGTAYCYNGQCQTTDNQCAKIFGKGAQGAPFACFKEVNSLHERSENCGFKNSQPLPCERKDVLCGKLACVQPHKNANKSDAQSTVYSYIQDHVCVSIATGSSMRSDGTDNAYVADGTMCGPEMYCVNKTCRKVHLMGYNCNATTKCKGKGICNNFGNCQCFPGHRPPDCKFQFGSPGGSIDDGNFQKSGDFYTEKGYNTHWNNWFILSFCIFLPFFIVFTTVIFKRNEISKSCNRENAEYNRNSSVVSESDDVGH

SEQ ID NO: 743137 - protein, 216 aa, Homo sapiens
MGKAAAAVAFGAEVGVRLALFAAFLVTELLPPFQRLIQPEEMWLYRNPYVEAEYFPTKPMFVIAFLSPLSLIFLAKFLKKADTRDSRQACLAASLALALNGVFTNTIKLIVGRPRPDFFYRCFPDGLAHSDLMCTGDKDVVNEGRKSFPSGHSSFAFAGLAFASFYLAGKLHCFTPQGRGKSWRFCAFLSPLLFAAVIALSRTCDYKHHWQGPFKW

SEQ ID NO: 743138 - protein, 106 aa, Homo sapiens
MGKAAAAVAFGAEVGVRLALFAAFLVTELLPPFQRLIQPEEMWLYRNPYVEAEYFPTKPMFVRGERSSFLPPHDPASRGHLCVFHPETAFVGTHCPLRCCALGSAS

SEQ ID NO: 743139 - protein, 264 aa, Homo sapiens [sequence omitted]

SEQ ID NO: 743140 - protein, 132 aa, Homo sapiens
MCTGDKDVVNEGRKSFPSGHSSFAFAGLAFASFYLAGKLHCFTPQGRGKSWRFCAFLSPLLFAAVIALSRTCDYKHHWQDVLVGSMIGMTFAYVCYRQYYPPLTDAECHKPFQDKLVLSTAQKPGDSYCFDI

SEQ ID NO: 743141 - protein, 246 aa, Homo sapiens
MGKAAAAVAFGAEVGVRLALFAAFLVTELLPPFQRLIQPEEMWLYRNPYVEAEYFPTKPMFVIAFLSPLSLIFLAKFLKKADTRDSRQACLAASLALALNGVFTNTIGLAHSDLMCTGDKDVVNEGRKSFPSGHSSFAFAGLAFASFYLAGKLHCFTPQGRGKSWRFCAFLSPLLFAAVIALSRTCDYKHHWQDVLVGSMIGMTFAYVCYRQYYPPLTDAECHKPFQDKLVLSTAQKPGDSYCFDI

SEQ ID NO: 743142 - protein, 223 aa, Homo sapiens
MWLYRNPYVEAEYFPTKPMFVIAFLSPLSLIFLAKFLKKADTRDSRQACLAASLALALNGVFTNTIKLIVGRPRPDFFYRCFPDGLAHSDLMCTGDKDVVNEGRKSFPSGHSSFAFAGLAFASFYLAGKLHCFTPQGRGKSWRFCAFLSPLLFAAVIALSRTCDYKHHWQDVLVGSMIGMTFAYVCYRQYYPPLTDAECHKPFQDKLVLSTAQKPGDSYCFDI

SEQ ID NO: 743143 - protein, 121 aa, Homo sapiens
DGEGGGGGGLWGRSGRAARAVRGLPVRKIHGRARAAPLPRVTELLPPFQRLIQPEEMWLYRNPYVEAEYFPTKPMFVRGERSSFLPPHDPASRGHLCVFHPETAFVGTHCPLRCCALGSAS

SEQ ID NO: 743144 - protein, 90 aa, Homo sapiens
MGKAAAAVAFGAEVGVRLALFAAFLVTELLPPFQRLIQPEEMWLYRNPYVEAEYFPTKPMFVRGERSSFLPPHDPASRGHLLLHFSLHCL

SEQ ID NO: 743145 - protein, 181 aa, Homo sapiens
MTRLPAGTSASLALALNGVFTNTIKLIVGRPRPDFFYRCFPDGLAHSDLMCTGDKDVVNEGRKSFPSGHSSFAFAGLAFASFYLAGKLHCFTPQGRGKSWRFCAFLSPLLFAAVIALSRTCDYKHHWQDVLVGSMIGMTFAYVCYRQYYPPLTDAECHKPFQDKLVLSTAQKPGDSYCFDI

SEQ ID NO: 743146 - protein, 132 aa, Homo sapiens; identical to SEQ ID NO: 743140

SEQ ID NO: 743147 - protein, 163 aa, Homo sapiens [sequence omitted]

SEQ ID NO: 743148 - protein, 106 aa, Homo sapiens; identical to SEQ ID NO: 743138

SEQ ID NO: 743149 - protein, 106 aa, Homo sapiens; identical to SEQ ID NO: 743138

SEQ ID NO: 743150 - protein, 320 aa, Homo sapiens
MGKAAAAVAFGAEVGVRLALFAAFLVTELLPPFQRLIQPEEMWLYRNPYVEAEYFPTKPMFVIAFLSPLSLIFLAKFLKKADTRDSRQACLAASLALALNGVFTNTIKLIVGRPRPDFFYRCFPDGLAHSDLMCTGDKDVVNEGRKSFPSGHSSFAFAGLAFASFYLAGKLHCFTPQGRGKSWRFCAFLSPLLFAAVIALSRTCDYKHHWQDVLVGSMIGMTFAYVCYRQYYPPLTDAECHKPFQDKLVTFHCTEAWGFFMLIFNQLNLAGRGGLMPVITALGEGEQAGLNLLTSGSICLVLPKCWDYRRESPCPARSNS

SEQ ID NO: 743151 - protein, 282 aa, Homo sapiens
MGKAAAAVAFGAEVGVRLALFAAFLVTELLPPFQRLIQPEEMWLYRNPYVEAEYFPTKPMFVIAFLSPLSLIFLAKFLKKADTRDSRQACLAASLALALNGVFTNTIKLIVGRPRPDFFYRCFPDGLAHSDLMCTGDKDVVNEGRKSFPSGHSSFAFAGLAFASFYLAGKLHCFTPQGRGKSWRFCAFLSPLLFAAVIALSRTCDYKHHWQDVLVGSMIGMTFAYVCYRQYYPPLTDAECHKPFQDKLVLSTAQKPGDSYYSHAHKNAFTGQARWLTPVILA

SEQ ID NO: 743152 - protein, 106 aa, Homo sapiens; identical to SEQ ID NO: 743138

SEQ ID NO: 743153 - protein, 175 aa, Homo sapiens
MKIDSFLPILRMWYHRLSHLHSRLQDLLKGGVIYPALPQPNFKSLLPLAVHWHHTASKSLTCAWQQHEDHFELKYANTVMRFDYVWLRDHCRSASCYNSKTHQRSLDTASVDLCIKPKTIRLDETTLFFTCEWTGDLIFFGGTLLKDSYFVENGLFLSKIGYYLLFFFSCFGRIF

SEQ ID NO: 743154 - protein, 421 aa, Homo sapiens
MWYHRLSHLHSRLQDLLKGGVIYPALPQPNFKSLLPLAVHWHHTASKSLTCAWQQHEDHFELKYANTVMRFDYVWLRDHCRSASCYNSKTHQRSLDTASVDLCIKPKTIRLDETTLFFTWPDGHVTKYDLNWLVKNSYEGQKQKVIQPRILWNAEIYQQAQVPSVDCQSFLETNEGLKKFLQNFLLYGIAFVENVPPTQEHTEKLAERISLIRETIYGRMWYFTSDFSRGDTAYTKLALDRHTDTTYFQEPCGIQVFHCLKHEGTGGRTLLVDGFYAAEQVLQKAPEEFELLSKVPLKHEYIEDVGECHNHMIGIGPVLNIYPWNKELYLIRYNNYDRAVINTVPYDVVHRWYTAHRTLTIELRRPENEFWVKLKPGRVLFIDNWRVLHGRECFTGYRQLCGCYLTRDDVLNTARLLGLQA

SEQ ID NO: 743155 - protein, 376 aa, Homo sapiens
MWYHRLSHLHSRLQDLLKGGVIYPALPQPNFKSLLPLAVHWHHTASKSLTCAWQQHEDHFELKYANTVMRFDYVWLRDHCRSASCYNSKTHQRSLDTASVDLCIKPKTIRLDETTLFFTWPDGHVTKYDLNWLVKNSYEGQKQKVIQPRILWNAEIYQQAQVPSVDCQSFLETNEGLKKFLQNFLLYGIAFVENVPPTQEHTEKLAERISLIRETIYGRMWYFTSDFSRGDTAYTKLALDRHTDTTYFQEPCGIQVFHCLKHEGTGGRTLLVDGFYAAEQVLQKAPEEFELLSKVPLKHEYIEDVGECHNHMIGIGPVLNIYPWNKELYLIRLFKEKQNTVNRQWNSSLQCDIPERILTYRHFVSGTSIEHRGSLI

SEQ ID NO: 743156 - protein, 383 aa, Homo sapiens
MWYHRLSHLHSRLQDLLKGGVIYPALPQPNFKSLLPLAVHWHHTASKSLTCAWQQHEDHFELKYANTVMRFDYVWLRDHCRSASCYNSKTHQRSLDTASVDLCIKPKTIRLDETTLFFTWPDGHVTKYDLNWLVKNSYEGQKQKVIQPRILWNAEIYQQAQVPSVDCQSFLETNEGLKKFLQNFLLYGIAFVENVPPTQEHTEKLAERISLIRETIYGRMWYFTSDFSRGDTAYTKLALDRHTDTTYFQEPCGIQVFHCLKHEGTGGRTLLVDGFYAAEQVLQKAPEEFELLSKVPLKHEYIEDVGECHNHMIGIGPVLNIYPWNKELYLIRYNNYDRAVINTVPYDVVHRWYTAHRTLTIELRRPENEFWVKLKPGRVGPNL

SEQ ID NO: 743157 - protein, 419 aa, Homo sapiens
GAGPTGSPLGPSGLGEGSVGPTVLGVKRQKAGERLPPETLLAWNSAHSAELAVTTSSTELKYANTVMRFDYVWLRDHCRSASCYNSKTHQRSLDTASVDLCIKPKTIRLDETTLFFTWPDGHVTKYDLNWLVKNSYEGQKQKVIQPRILWNAEIYQQAQVPSVDCQSFLETNEGLKKFLQNFLLYGIAFVENVPPTQEHTEKLAERISLIRETIYGRMWYFTSDFSRGDTAYTKLALDRHTDTTYFQEPCGIQVFHCLKHEGTGGRTLLVDGFYAAEQVLQKAPEEFELLSKVPLKHEYIEDVGECHNHMIGIGPVLNIYPWNKELYLIRYNNYDRAVINTVPYDVVHRWYTAHRTLTIELRRPENEFWVKLKPGRVLFIDNWRVLHGRECFTGYRQLCGCYLTRDDVLNTARLLGLQA

SEQ ID NO: 743158 - protein, 432 aa, Homo sapiens
MKIDSFLPILRMWYHRLSHLHSRLQDLLKGGVIYPALPQPNFKSLLPLAVHWHHTASKSLTCAWQQHEDHFELKYANTVMRFDYVWLRDHCRSASCYNSKTHQRSLDTASVDLCIKPKTIRLDETTLFFTWPDGHVTKYDLNWLVKNSYEGQKQKVIQPRILWNAEIYQQAQVPSVDCQSFLETNEGLKKFLQNFLLYGIAFVENVPPTQEHTEKLAERISLIRETIYGRMWYFTSDFSRGDTAYTKLALDRHTDTTYFQEPCGIQVFHCLKHEGTGGRTLLVDGFYAAEQVLQKAPEEFELLSKVPLKHEYIEDVGECHNHMIGIGPVLNIYPWNKELYLIRYNNYDRAVINTVPYDVVHRWYTAHRTLTIELRRPENEFWVKLKPGRVLFIDNWRVLHGRECFTGYRQLCGCYLTRDDVLNTARLLGLQA

SEQ ID NO: 743159 - protein, 421 aa, Homo sapiens; identical to SEQ ID NO: 743154

SEQ ID NO: 743160 - protein, 372 aa, Homo sapiens
EVTLEDPEDHFELKYANTVMRFDYVWLRDHCRSASCYNSKTHQRSLDTASVDLCIKPKTIRLDETTLFFTWPDGHVTKYDLNWLVKNSYEGQKQKVIQPRILWNAEIYQQAQVPSVDCQSFLETNEGLKKFLQNFLLYGIAFVENVPPTQEHTEKLAERISLIRETIYGRMWYFTSDFSRGDTAYTKLALDRHTDTTYFQEPCGIQVFHCLKHEGTGGRTLLVDGFYAAEQVLQKAPEEFELLSKVPLKHEYIEDVGECHNHMIGIGPVLNIYPWNKELYLIRYNNYDRAVINTVPYDVVHRWYTAHRTLTIELRRPENEFWVKLKPGRVLFIDNWRVLHGRECFTGYRQLCGCYLTRDDVLNTARLLGLQA

SEQ ID NO: 743161 - protein, 383 aa, Homo sapiens; identical to SEQ ID NO: 743156

SEQ ID NO: 743162 - protein, 253 aa, Homo sapiens
MWYHRLSHLHSRLQDLLKGGVIYPALPQPNFKSLLPLAVHWHHTASKSLTCAWQQHEDHFELKYANTVMRFDYVWLRDHCRSASCYNSKTHQRSLDTASVDLCIKPKTIRLDETTLFFTWPDGHVTKYDLNWLVKNSYEGQKQKVIQPRILWNAEIYQQAQVPSVDCQSFLETNEGLKKFLQNFLLYGIAFVENVPPTQEHTEKLAERISLIRETIYGRMWYFTSDFSRGDTAYTKLALDRHTDTTYFQEPCG

SEQ ID NO: 743163 - protein, 113 aa, Homo sapiens
AERKATPALPQGCRHDLCQLRDRVCPEISVRPDGPSAQEELEELEQARVGTDAQCTLFQSRSDFTALDLSLTWCLAFSESLPSSCLTLFGSRVEGGTQLSARSCSTFFRSHIH

SEQ ID NO: 743164 - protein, 277 aa, Homo sapiens
MAEFTSYKETASSRHLRFKLQSLSRRLDELEEATKNLQKAEDELLDLQDKVIQAEGSNSSMLAEIEVLRQRVLRIEGKDEEIKRAEDLCRLMKEKLEEEENLTRELKSEIERLQKRMAELEKLEEAFSRSKNDCTQLCLSLNEERNLTKKISSELEMLRVKVKELESSEDRLDKTEQSLASELEKLKSLTLSFVSERKYLNEKEKENEKLIKELTQKLEQNKKMNRDYTRNASNLERNDLRIEDGISSTLPSKESRRKGGLDYLKQVVQAPSFLLFI

SEQ ID NO: 743165 - protein, 277 aa, Homo sapiens; identical to SEQ ID NO: 743164

SEQ ID NO: 743166 - protein, 277 aa, Homo sapiens
MAEFTSYKETASSRHLRFKLQSLSRRLDELEEATKNLQKAEDELLDLQDKVIQAEGSNSSMLAEIEVLRQRVLRIEGKDEEIKRAEDLCRLMKEKLEEEENLTRELKSEIERLQKRMAELEKLEEAFSRSKNDCTQLCLSLNEERNLTKKISSELEMLRVKVKELESSEDRLDKTEQSLASELEKLKSLTLSFVSERKYLNEKEKENEKLIKELTQKLEQNKKMNRDYTRNASNLERNDLRIEDGISSTLPSKESRRKGGLDYLKQVVQAPSFLFFI

SEQ ID NO: 743167 - protein, 277 aa, Homo sapiens; identical to SEQ ID NO: 743164

SEQ ID NO: 743168 - protein, 277 aa, Homo sapiens; identical to SEQ ID NO: 743164

SEQ ID NO: 743169 - protein, 277 aa, Homo sapiens; identical to SEQ ID NO: 743166

SEQ ID NO: 743170 - protein, 67 aa, Homo sapiens
TNHMTHHLPIFLTGHSRALCGQLIFHGAQNIIDSRENGRSLHIVVGKVGQWGLSRLISFLLYKVENF

SEQ ID NO: 743171 - protein, 279 aa, Homo sapiens
ARGQRVAFPVGARPGRRRWRSSRRSLVMSGRRTRSGGAAQRSGPRAPSPTKPLRRSQRKSGSELPSILPEIWPKTPSAAAVRKPIVLKRIVAHAVEVPAVQSPRRSPRISFFLEKENEPPGRELTKEDLFKTHSVPATPTSTPVPNPEAESSSKEGELDARDLEMSKKVRRSYSRLETLGSASTSTPGRRSCFGFEGLLGAEDLSGVSPVVCSKLTEVPRVCAKPWAPDMTLPGISPPPEKQKRKKKKMPEILKTELDEWAAAMNAEFEAAEQFDLLVE

SEQ ID NO: 743172 - protein, 262 aa, Homo sapiens
ARGQRVAFPVGARPGRRRWRSSRRSLVMSGRRTRSGGAAQRSGPRAPSPTKPLRRSQRKSGSELPSILPEIWPKTPSAAAVRKPIVLKRIVAHAVEVPAVQSPRRSPRISFFLEKENEPPGRELTKEDLFKTHSVPATPTSTPVPNPEAESSSKEGELDARDLEMSKKVRRSYSRLETLGSASTSTPGRRSCFGFEGLLGAEDLSGVSPVVCSKLTEVPRVCAKPWAPDMTLPPELPSVGGFLLEPTCVKRFSVPWVSPLIL

SEQ ID NO: 743173 - protein, 105 aa, Homo sapiens [sequence omitted]

SEQ ID NO: 743174 - protein, 201 aa, Homo sapiens
MHSGREKPSNWEPFRKVVSGRIIKGYCRGDWLLSFVYRTSSVQLRVAGLQPVLLQDRRVENVDLTSVVSGHLDYAKQMDAILKAVGIRTKPGWDEKGLLLAPGCLPSEEPRQAAAAASSGETPHQVGQTQGPISGDTSKLAMSTDPSQAQVPVGLDQSEGASLPAAASPERPPICSHGMDPNPLGCPDCACKTQGPSTGLD

SEQ ID NO: 743175 - protein, 50 aa, Homo sapiens
MLNCIQYGCELGLGTRMNFTWKEFPVAGTEGITTAINNNKKKLPLLEHVP

SEQ ID NO: 743176 - protein, 124 aa, Homo sapiens
GPRSVAQDGVQWCNHGSLQPQPPGLKQSSHLSLLSSWDYRHVLGKRLMGCLHRLAIKIWDNKLWKATKGLSEGKPPNCHHVALLRARHTLLFVNTVQGERHSFETLEGEQMCRLLVKPLPLATL

SEQ ID NO: 743177 - protein, 87 aa, Homo sapiens
YFLFQNEEVKFIENELEIQKQKYFKLQTFVRSLILAMKADDKEQQQALLSDLPPELEEMDFNHASLEPDDTSFSVSSLSEKNVSESL

SEQ ID NO: 743178 - protein, 84 aa, Homo sapiens
DSFFPTAIPAFPHLSSSWPVGPGFWGLLGVACDRNNAEASAESPSLVEAQQTSRKSGFIISVENGPSKLWSYEVLSSLPLQHFP

SEQ ID NO: 743179 - protein, 83 aa, Homo sapiens
APAASSAGPLGVNSVGALKRKNFRFVDSNHHLQRSSHCWRDRGLGDKSSRLPESFCCKAQGPPPTSRRDQEGTIAKPRGCRGL

SEQ ID NO: 743180 - protein, 314 aa, Homo sapiens
MGCRCCKIIQSYLFDPVQVPSPGYVNEVNSCKLDEDDTDKLKGKWSSEVLVQKNDPQRQGSKKTESSSRTADPWEPCWPHQGPLPQGDAGGEHHACGVNGIGPAATPQPTGNSSPTQDDRGSWASTANTVPPTQPFLEGGGTRKQDCVLLASEGTQVMRNGDSRAPSEAESFALEVQDHVFQIPAPDYLQHWGPAGDNVDHNEKDCVFKNHTEDESLEGIQPPVGEHGLNTPFSVRRSWDSLNEDVETEVLSICFNEKGPVHAMPVVDSGNRQEDTHGSDGDGDGEIVDEDAAVAEALAALEAATAGEDLDETD

SEQ ID NO: 743181 - protein, 314 aa, Homo sapiens; identical to SEQ ID NO: 743180

SEQ ID NO: 743182 - protein, 314 aa, Homo sapiens; identical to SEQ ID NO: 743180

SEQ ID NO: 743183 - protein, 312 aa, Homo sapiens
MGCRCCKIIQSYLFDPVQVPSPGYVNEVNSCKLDEDDTDKLKGKWSSEVLVQKNDPQRQGSKKTESSSRTADPWEPCWPHQGPLPQGDAGGEHHACGVNGIGPAATPQPTGNSSPTQDDRGSWASTANTVPPTQPFLEGGGTRKQDCVLLASEGTQVMRNGDSRAPSEAESFALEVQDHVFQIPAPDYLQHWGPAGDNVDHNEKDCVFKNHTEDESLEGIQPPVGEHGLNTPFSVRRSWDSLNEDVETEVLSICFNEKGPVHAMPVVDSGPRRRRRRRRLAPGREVKLLEKPNRQYPQQVVTENNPDGVQVL

SEQ ID NO: 743184 - protein, 212 aa, Homo sapiens
MAQTDKPTCIPPELPKMLKEFAKAAIRVQPQDLIQWAADYFEALSRGETPPVRERSERVALCNRAELTPELLKILHSQVAGRLIIRAEELAQMWKVVNLPTDLFNSVMNVGRFTEEIEWLKFLALACSALGVTITKTLKIVCEVLSCDHNGGSPRIPFSTFQFLYTYIAKVDGEISASHVSRMLNYMEQEVIGPDGIITVNDFTQNPRVQLE

SEQ ID NO: 743185 - protein, 120 aa, Homo sapiens
MWKVVNLPTDLFNSVMNVGRFTEEIEWLKFLALACSALGVTITKTLKIVCEVLSCDHNGGSPRIPFSTFQFLYTYIAKVDGEISASHVSRMLNYMEQEVIGPDGIITVNDFTQNPRVQLE

SEQ ID NO: 743186 - protein, 212 aa, Homo sapiens; identical to SEQ ID NO: 743184

SEQ ID NO: 743187 - protein, 212 aa, Homo sapiens; identical to SEQ ID NO: 743184

SEQ ID NO: 743188 - protein, 219 aa, Homo sapiens
MCPANQSMAQTDKPTCIPPELPKMLKEFAKAAIRVQPQDLIQWAADYFEALSRGETPPVRERSERVALCNRAELTPELLKILHSQVAGRLIIRAEELAQMWKVVNLPTDLFNSVMNVGRFTEEIEWLKFLALACSALGVTITKTLKIVCEVLSCDHNGGSPRIPFSTFQFLYTYIAKVDGEISASHVSRMLNYMEQEVIGPDGIITVNDFTQNPRVQLE

SEQ ID NO: 743189 - protein, 390 aa, Homo sapiens
CSGYLESSARRWESRAEPGLSSGSRRPGQRRPGGARAPHRTIRLGVERSRSPTRSPGPTRHRRFLSTHGDQETLKEFGVSGAGKSRIPAPGPRLATSLMGNQLDRITHLNYSELPTGDPSGIEKDELRVGVAYFFSDDEEDLDERGQPDKFGVKAPPGCTPCPESPSRHHHHLLHQLVLNETQFSAFRGQECIFSKVSGGPQGADLSVYAVTALPALCEPGDLLELLWLQPAPEPPAPAPHWAVYVGGGQIIHLHQGEIRQDSLYEAGAANVGRVVNSWYRYRPLVAELVVQNACGHLGLKSEEICWTNSESFAAWCRFGKREFKAGGEVPAGTQPPQQQYYLKVHLGENKVHTARFHSLEDLIREKRRIDASGRLRVLQELADLVDDKE

SEQ ID NO: 743190 - protein, 471 aa, Homo sapiens
CSGYLESSARRWESRAEPGLSSGSRRPGQRRPGGARAPHRTIRLGVERSRSPTRSPGPTRHRRFLSTHGDQETLKEFGVSGAGKSRPTPRSFLGVRLPHCHSQHSPPHRDPASSPASLGVFFWELDRVPGRGRRLCGGVCSRLTCGGFSAPRTPGEARRTRLERVTPIPAPGPRLATSLMGNQLDRITHLNYSELPTGDPSGIEKDELRVGVAYFFSDDEEDLDERGQPDKFGVKAPPGCTPCPESPSRHHHHLLHQLVLNETQFSAFRGQECIFSKVSGGPQGADLSVYAVTALPALCEPGDLLELLWLQPAPEPPAPAPHWAVYVGGGQIIHLHQGEIRQDSLYEAGAANVGRVVNSWYRYRPLVAELVVQNACGHLGLKSEEICWTNSESFAAWCRFGKREFKAGGEVPAGTQPPQQQYYLKVHLGENKVHTARFHSLEDLIREKRRIDASGRLRVLQELADLVDDKE

SEQ ID NO: 743191 - protein, 168 aa, Homo sapiens [sequence omitted]

SEQ ID NO: 743192 - protein, 390 aa, Homo sapiens; identical to SEQ ID NO: 743189

SEQ ID NO: 743193 - protein, 68 aa, Homo sapiens
MGNQLDRITHLNYSELPTGDPSGIEKDELRVGVAYFFSDDEEDLDERGQPDKFGVKAPPGCTPCPESP

SEQ ID NO: 743194 - protein, 390 aa, Homo sapiens
MAQRYDDLPHYGGMDGVGIPSTMYGDPHAARSMQPVHHLNHGPPLHSHQYPHTAHTNAMAPSMGSSVNDALKRDKDAIYGHPLFPLLALIFEKCELATCTPREPGVAGGDVCSSESFNEDIAVFAKQIRAEKPLFSSNPELDNLMIQAIQVLRFHLLELEKVHELCDNFCHRYISCLKGKMPIDLVIDDREGGSKSDSEDITRSANLTDQPSWNRDHDDTASTRSGGTPGPSSGGHTSHSGDNSSEQGDGLDNSVASPSTGDDDDPDKDKKRHKKRGIFPKVATNIMRAWLFQHLTHPYPSEEQKKQLAQDTGLTILQVNNWFINARRRIVQPMIDQSNRAVSQGTPYNPDGQPMGGFVMDGQQHMGIRAPGPMSGMGMNMGMEGQWHYM

SEQ ID NO: 743195 - protein, 388 aa, Homo sapiens
MQYDDLPHYGGMDGVGIPSTMYGDPHAARSMQPVHHLNHGPPLHSHQYPHTAHTNAMAPSMGSSVNDALKRDKDAIYGHPLFPLLALIFEKCELATCTPREPGVAGGDVCSSESFNEDIAVFAKQIRAEKPLFSSNPELDNLMIQAIQVLRFHLLELEKVHELCDNFCHRYISCLKGKMPIDLVIDDREGGSKSDSEDITRSANLTDQPSWNRDHDDTASTRSGGTPGPSSGGHTSHSGDNSSEQGDGLDNSVASPSTGDDDDPDKDKKRHKKRGIFPKVATNIMRAWLFQHLTHPYPSEEQKKQLAQDTGLTILQVNNWFINARRRIVQPMIDQSNRAVSQGTPYNPDGQPMGGFVMDGQQHMGIRAPGPMSGMGMNMGMEGQWHYM

SEQ ID NO: 743196 - protein, 246 aa, Homo sapiens
MIQAIQVLRFHLLELEKVHELCDNFCHRYISCLKGKMPIDLVIDDREGGSKSDSEDITRSANLTDQPSWNRDHDDTASTRSGGTPGPSSGGHTSHSGDNSSEQGDGLDNSVASPSTGDDDDPDKDKKRHKKRGIFPKVATNIMRAWLFQHLTHPYPSEEQKKQLAQDTGLTILQVNNWFINARRRIVQPMIDQSNRAVSQGTPYNPDGQPMGGFVMDGQQHMGIRAPGPMSGMGMNMGMEGQWHYM

SEQ ID NO: 743197 - protein, 141 aa, Homo sapiens [sequence omitted]

SEQ ID NO: 743198 - protein, 390 aa, Homo sapiens; identical to SEQ ID NO: 743194

SEQ ID NO: 743199 - protein, 390 aa, Homo sapiens; identical to SEQ ID NO: 743194

SEQ ID NO: 743200 - protein, 390 aa, Homo sapiens; identical to SEQ ID NO: 743194

SEQ ID NO: 743201 - protein, 455 aa, Homo sapiens
  misc_feature (391)..(391): Xaa can be any naturally occurring amino acid
  misc_feature (398)..(398): Xaa can be any naturally occurring amino acid
  misc_feature (401)..(401): Xaa can be any naturally occurring amino acid
  misc_feature (421)..(421): Xaa can be any naturally occurring amino acid
  misc_feature (423)..(423): Xaa can be any naturally occurring amino acid
  misc_feature (440)..(440): Xaa can be any naturally occurring amino acid
  misc_feature (443)..(443): Xaa can be any naturally occurring amino acid
MAQRYDDLPHYGGMDGVGIPSTMYGDPHAARSMQPVHHLNHGPPLHSHQYPHTAHTNAMAPSMGSSVNDALKRDKDAIYGHPLFPLLALIFEKCELATCTPREPGVAGGDVCSSESFNEDIAVFAKQIRAEKPLFSSNPELDNLMIQAIQVLRFHLLELEKVHELCDNFCHRYISCLKGKMPIDLVIDDREGGSKSDSEDITRSANLTDQPSWNRDHDDTASTRSGGTPGPSSGGHTSHSGDNSSEQGDGLDNSVASPSTGDDDDPDKDKKRHKKRGIFPKVATNIMRAWLFQHLTHPYPSEEQKKQLAQDTGLTILQVNNWFINARRRIVQPMIDQSNRAVSQGTPYNPDGQPMGGFVMDGQQHMGIRAPGPMSGMGMNMGMEGQWHYQXWVFKTLXNPXFNPIPPKARGEGCKVIARGXMXPGVGPIGVLKLLGNSPXFIXPNPPKLPPPSWL

SEQ ID NO: 743202 - protein, 390 aa, Homo sapiens; identical to SEQ ID NO: 743194

SEQ ID NO: 743203 - protein, 68 aa, Homo sapiens
GMDGDPSVQSTLAMLALRPGTGEHEQDDISSVCLGHLLADEKSSLTACSPPAFRLHPWNVTFCLLENV

SEQ ID NO: 743204 - protein, 636 aa, Homo sapiens [sequence omitted]

SEQ ID NO: 743205 - protein, 200 aa, Homo sapiens
MRGSPGDAERRQRWGRLFEELDSNKDGRVDVHELRQGLARLGGGNPDPGAQQGISSEGDADPDGGLDLEEFSRYLQEREQRLLLMFHSLDRNQDGHIDVSEIQQSFRALGISISLEQAEKILHSMDRDGTMTIDWQEWRDHFLLHSLENVEDVLYFWKHSTVRWGWLSPAEGCALFPRGALLRSPQGLDGLDQDFPEGEG

SEQ ID NO: 743206 - protein, 468 aa, Homo sapiens
MRGSPGDAERRQRWGRLFEELDSNKDGRVDVHELRQGLARLGGGNPDPGAQQGISSEGDADPDGGLDLEEFSRYLQEREQRLLLMFHSLDRNQDGHIDVSEIQQSFRALGISISLEQAEKILHSMDRDGTMTIDWQEWRDHFLLHSLENVEDVLYFWKHSTVLDIGECLTVPDEFSKQEKLTGMWWKQLVAGAVAGAVSRTGTAPLDRLKVFMQVHASKTNRLNILGGLRSMVLEGGIRSLWRGNGINVLKIAPESAIKFMAYEQIKRAILGQQETLHVQERFVAGSLAGATAQTIIYPMEVLKTRLTLRRTGQYKGLLDCARRILEREGPRAFYRGYLPNVLGIIPYAGIDLAVYETLKNWWLQQYSHDSADPGILVLLACGTISSTCGQIASYPLALVRTRMQAQASIEGGPQLSMLGLLRHILSQEGMRGLYRGIAPNFMKVIPAVSISYVVYENMKQALGVTSR

SEQ ID NO: 743207 - protein, 468 aa, Homo sapiens; identical to SEQ ID NO: 743206

SEQ ID NO: 743208 - protein, 468 aa, Homo sapiens; identical to SEQ ID NO: 743206

SEQ ID NO: 743209 - protein, 577 aa, Homo sapiens
MRGSPGDAERRQRWGRLFEELDSNKDGRVDVHELRQGLARLGGGNPDPGAQQGISSEGDADPDGGLDLEEFSRYLQEREQRLLLMFHSLDRNQDGHIDVSEIQQSFRALGISISLEQAEKILHSMDRDGTMTIDWQEWRDHFLLHSLENVEDVLYFWKHSTVLDIGECLTVPDEFSKQEKLTGMWWKQLVAGAVAGAVSRTGTAPLDRLKVFMQVHASKTNRLNILGGLRSMVLEGGIRSLWRGNGINVLKIAPESAIKFMAYEQIKRAILGQQETLHVQERFVAGSLAGATAQTIIYPMEVLKTRLTLRRTGQYKGLLDCARRILEREGPRAFYRGYLPNVLGIIPYAGIDLAVYETLKNWWLQQYSHDSADPGILVLLACGTISSTCGQIASYPLALVRTRMQAQASIEGGPQLSMLGLLRHILSQEGMRGLYRGIAPNFMKVIPAVSISYVVYENMKQALGVTSRLEYSGSISDHCNLCLPGSSDSPASASRVAGITGFHHVAQAHLELVGSRNSPAFSLPTCWDYSRWSCHEQPYGEDHVVRNSANSHVTELGRGSCCPGQHLTAILSVEFPG

SEQ ID NO: 743210 - protein, 523 aa, Homo sapiens
MRGSPGDAERRQRWGRLFEELDSNKDGRVDVHELRQGLARLGGGNPDPGAQQGISSEGDADPDGGLDLEEFSRYLQEREQRLLLMFHSLDRNQDGHIDVSEIQQSFRALGISISLEQAEKILHSMDRDGTMTIDWQEWRDHFLLHSLENVEDVLYFWKHSTVLDIGECLTVPDEFSKQEKLTGMWWKQLVAGAVAGAVSRTGTAPLDRLKVFMQVHASKTNRLNILGGLRSMVLEGGIRSLWRGNGINVLKIAPESAIKFMAYEQIKRAILGQQETLHVQERFVAGSLAGATAQTIIYPMEVLKTRLTLRRTGQYKGLLDCARRILEREGPRAFYRGYLPNVLGIIPYAGIDLAVYETLKNWWLQQYSHDSADPGILVLLACGTISSTCGQIASYPLALVRTRMQAQASIEGGPQLSMLGLLRHILSQEGMRGLYRGIAPNFMKVIPAVSISYVVYENMKQALGVTSRLEYSGSISDHCNLCLPGSSDSPASASRVAGITGFHHVAQAHLELVGSRNSPAFSQ

SEQ ID NO: 743211 - protein, 421 aa, Homo sapiens
MRGSPGDAERRQRWGRLFEELDSNKDGRVDVHELRQGLARLGGGNPDPGAQQGISSEGDADPDGGLDLEEFSRYLQEREQRLLLMFHSLDRNQDGHIDVSEIQQSFRALGISISLEQAEKILHSMDRDGTMTIDWQEWRDHFLLHSLENVEDVLYFWKHSTVLDIGECLTVPDEFSKQEKLTGMWWKQLVAGAVAGAVSRTGTAPLDRLKVFMQVHASKTNRLNILGGLRSMVLEGGIRSLWRGNGINVLKIAPESAIKFMAYEQIKRAILGQQETLHVQERFVAGSLAGATAQTIIYPMEVLKTRLTLRRTGQYKGLLDCARRILEREGPRAFYRGYLPNVLGIIPYAGIDLAVYETLKNWWLQQYSHDSADPGILVLLACGTISSTCGQIASYPLALVRTRMQAQDAVSLCFPGWSAMT

SEQ ID NO: 743212 - protein, 417 aa, Homo sapiens
MRGSPGDAERRQRWGRLFEELDSNKDGRVDVHELRQGLARLGGGNPDPGAQQGISSEGDADPDGGLDLEEFSRYLQEREQRLLLMFHSLDRNQDGHIDVSEIQQSFRALGISISLEQAEKILHSMDRDGTMTIDWQEWRDHFLLHSLENVEDVLYFWKHSTVLDIGECLTVPDEFSKQEKLTGMWWKQLVAGAVAGAVSRTGTAPLDRLKVFMQVHASKTNRLNILGGLRSMVLEGGIRSLWRGNGINVLKIAPESAIKFMAYEQIKRAILGQQETLHVQERFVAGSLAGATAQTIIYPMEVLKTRLTLRRTGQYKGLLDCARRILEREGPRAFYRGYLPNVLGIIPYAGIDLAVYETLKNWWLQQYSHDSADPGILVLLACGTISSTCGQIASYPLVLIRKCMHAGGGERERVRMD

SEQ ID NO: 743213 - protein, 183 aa, Homo sapiens
MRGSPGDAERRQRWGRLFEELDSNKDGRVDVHELRQGLARLGGGNPDPGAQQGISSEGDADPDGGLDLEEFSRYLQEREQRLLLMFHSLDRNQDGHIDVSEIQQSFRALGISISLEQAEKILHSMDRDGTMTIDWQEWRDHFLLHSLENVVRNSANSHVTELGRGSCCPGQHLTAILSVEFPG

SEQ ID NO: 743214 - protein, 482 aa, Homo sapiens
MRGSPGDAERRQRWGRLFEELDSNKDGRVDVHELRQGLARLGGGNPDPGAQQGISSEGDADPDGGLDLEEFSRYLQEREQRLLLMFHSLDRNQDGHIDVSEIQQSFRALGISISLEQAEKILHSMDRDGTMTIDWQEWRDHFLLHSLENVEDVLYFWKHSTLSSAGFSAWIKDSTAEQNRSKTTVLARRSGSHLKSQHFGRPKWADHEVLDIGECLTVPDEFSKQEKLTGMWWKQLVAGAVAGAVSRTGTAPLDRLKVFMQVHASKTNRLNILGGLRSMVLEGGIRSLWRGNGINVLKIAPESAIKFMAYEQIKRAILGQQETLHVQERFVAGSLAGATAQTIIYPMEVLKTRLTLRRTGQYKGLLDCARRILEREGPRAFYRGYLPNVLGIIPYAGIDLAVYETLKNWWLQQYSHDSADPGILVLLACGTISSTCGQIASYPLALVRTRMQAQGWSTVARFQITATSAFQVQAILLPQPPE

SEQ ID NO: 743215 - protein, 468 aa, Homo sapiens; identical to SEQ ID NO: 743206

SEQ ID NO: 743216 - protein, 468 aa, Homo sapiens; identical to SEQ ID NO: 743206

SEQ ID NO: 743217 - protein, 468 aa, Homo sapiens; identical to SEQ ID NO: 743206

SEQ ID NO: 743218 - protein, 432 aa, Homo sapiens
FLSSHLGGNPDPGAQQGISSEGDADPDGGLDLEEFSRYLQEREQRLLLMFHSLDRNQDGHIDVSEIQQSFRALGISISLEQAEKILHSMDRDGTMTIDWQEWRDHFLLHSLENVEDVLYFWKHSTVLDIGECLTVPDEFSKQEKLTGMWWKQLVAGAVAGAVSRTGTAPLDRLKVFMQVHASKTNRLNILGGLRSMVLEGGIRSLWRGNGINVLKIAPESAIKFMAYEQIKRAILGQQETLHVQERFVAGSLAGATAQTIIYPMEVLKTRLTLRRTGQYKGLLDCARRILEREGPRAFYRGYLPNVLGIIPYAGIDLAVYETLKNWWLQQYSHDSADPGILVLLACGTISSTCGQIASYPLALVRTRMQAQASIEGGPQLSMLGLLRHILSQEGMRGLYRGIAPNFMKVIPAVSISYVVYENMKQALGVTSR

SEQ ID NO: 743219 - protein, 515 aa, Homo sapiens
MRGSPGDAERRQRWGRLFEELDSNKDGRVDVHELRQGLARLGGGNPDPGAQQGISSEGDADPDGGLDLEEFSRYLQEREQRLLLMFHSLDRNQDGHIDVSEIQQSFRALGISISLEQAEKILHSMDRDGTMTIDWQEWRDHFLLHSLENVEDVLYFWKHSTLSSAGFSAWIKDSTAEQNRSKTTVLARRSGSHLKSQHFGRPKWADHEVLDIGECLTVPDEFSKQEKLTGMWWKQLVAGAVAGAVSRTGTAPLDRLKVFMQVHASKTNRLNILGGLRSMVLEGGIRSLWRGNGINVLKIAPESAIKFMAYEQIKRAILGQQETLHVQERFVAGSLAGATAQTIIYPMEVLKTRLTLRRTGQYKGLLDCARRILEREGPRAFYRGYLPNVLGIIPYAGIDLAVYETLKNWWLQQYSHDSADPGILVLLACGTISSTCGQIASYPLALVRTRMQAQASIEGGPQLSMLGLLRHILSQEGMRGLYRGIAPNFMKVIPAVSISYVVYENMKQALGVTSR

SEQ ID NO: 743220 - protein, 342 aa, Homo sapiens
RGDLEDPEAQQWRDHFLLHSLENVEDVLYFWKHSTVLDIGECLTVPDEFSKQEKLTGMWWKQLVAGAVAGAVSRTGTAPLDRLKVFMQVHASKTNRLNILGGLRSMVLEGGIRSLWRGNGINVLKIAPESAIKFMAYEQIKRAILGQQETLHVQERFVAGSLAGATAQTIIYPMEVLKTRLTLRRTGQYKGLLDCARRILEREGPRAFYRGYLPNVLGIIPYAGIDLAVYETLKNWWLQQYSHDSADPGILVLLACGTISSTCGQIASYPLALVRTRMQAQASIEGGPQLSMLGLLRHILSQEGMRGLYRGIAPNFMKVIPAVSISYVVYENMKQALGVTSR

SEQ ID NO: 743221 - protein, 468 aa, Homo sapiens; identical to SEQ ID NO: 743206

SEQ ID NO: 743222 - protein, 176 aa, Homo sapiens
MRGSPGDAERRQRWGRLFEELDSNKDGRVDVHELRQGLARLGGGNPDPGAQQGISSEGDADPDGGLDLEEFSRYLQEREQRLLLMFHSLDRNQDGHIDVSEIQQKPASHDMKLHGRGSLWGRKPRSWLQPARMLDSPSPHLCMATPSQPCGETVPWNHSTPCIPTLHSIFHPPPTF

SEQ ID NO: 743223 - protein, 422 aa, Homo sapiens
MRGSPGDAERRQRWGRLFEELDSNKDGRVDVHELRQGLARLGGGNPDPGAQQGISSEGDADPDGGLDLEEFSRYLQEREQRLLLMFHSLDRNQDGHIDVSEIQQSFRALGISISLEQAEKILHSMDRDGTMTIDWQEWRDHFLLHSLENVEDVLYFWKHSTVLDIGECLTVPDEFSKQEKLTGMWWKQLVAGAVAGAVSRTGTAPLDRLKVFMQVHASKTNRLNILGGLRSMVLEGGIRSLWRGNGINVLKIAPESAIKFMAYEQIKRAILGQQETLHVQERFVAGSLAGATAQTIIYPMEVLKTRLTLRRTGQYKGLLDCARRILEREGPRAFYRGYLPNVLGIIPYAGIDLAVYETLKNWWLQQYSHDSADPGILVLLACGTISSTCGQIASYPLALVRTRMQAQAGGHAMSSLMERTMW

SEQ ID NO: 743224 - protein, 438 aa, Homo sapiens
MRGSPGDAERRQRWGRLFEELDSNKDGRVDVHELRQGLARLGGGNPDPGAQQGISSEGDADPDGGLDLEEFSRYLQEREQRLLLMFHSLDRNQDGHIDVSEIQQSFRALGISISLEQAEKILHSMDRDGTMTIDWQEWRDHFLLHSLENVEDVLYFWKHSTVLDIGECLTVPDEFSKQEKLTGMWWKQLVAGAVAGAVSRTGTAPLDRLKVFMQVHASKTNRLNILGGLRSMVLEGGIRSLWRGNGINVLKIAPESAIKFMAYEQIKRAILGQQETLHVQERFVAGSLAGATAQTIIYPMEVLKTRLTLRRTGQYKGLLDCARRILEREGPRAFYRGYLPNVLGIIPYAGIDLAVYETLKNWWLQQYSHDSADPGILVLLACGTISSTCGQIASYPLALVRTRMQAQDVSVYKTDTVPTLIELTGRRGRKMLNKSFWN

SEQ ID NO: 743225 - protein, 467 aa, Homo sapiens
MSSILPFTPPVVKRLLGWKKSAGGSGGAGGGEQNGQEEKWCEKAVKSLVKKLKKTGRLDELEKAITTQNCNTKCVTIPSTCSEIWGLSTPNTIDQWDTTGLYSFSEQTRSLDGRLQVSHRKGLPHVIYCRLWRWPDLHSHHELKAIENCEYAFNLKKDEVCVNPYHYQRVETPVLPPVLVPRHTEILTELPPLDDYTHSIPENTNFPAGIEPQSNYIPETPPPGYISEDGETSDQQLNQSMDTGSPAELSPTTLSPVNHSLDLQPVTYSEPAFWCSIAYYELNQRVGETFHASQPSLTVDGFTDPSNSERFCLGLLSNVNRNATVEMTRRHIGRGVRLYYIGGEVFAECLSDSAIFVQSPNCNQRYGWHPATVCKIPPGCNLKIFNNQEFAALLAQSVNQGFEAVYQLTRMCTIRMSFVKGWGAEYRRQTVTSTPCWIELHLNGPLQWLDKVLTQMGSPSVRCSSMS

SEQ ID NO: 743226 - protein, 179 aa, Homo sapiens
HIIMILVKLASDALFSKKCYNYSFLLLSSSFSLKRTCSEIWGLSTPNTIDQWDTTGLYSFSEQTRSLDGRLQVSHRKGLPHVIYCRLWRWPDLHSHHELKAIENCEYAFNLKKDEVCVNPYHYQRVETPVLPPVLVPRHTEILTELPPLDDYTHSIPENTNFPAGIEPQSNYIPGIFAF

SEQ ID NO: 743227 - protein, 467 aa, Homo sapiens; identical to SEQ ID NO: 743225

SEQ ID NO: 743228 - protein, 512 aa, Homo sapiens
MAGTVGVVWIRGGGEAARQPAARQPPGGSIQEAVFLAWLAAFGKNMSSILPFTPPVVKRLLGWKKSAGGSGGAGGGEQNGQEEKWCEKAVKSLVKKLKKTGRLDELEKAITTQNCNTKCVTIPSTCSEIWGLSTPNTIDQWDTTGLYSFSEQTRSLDGRLQVSHRKGLPHVIYCRLWRWPDLHSHHELKAIENCEYAFNLKKDEVCVNPYHYQRVETPVLPPVLVPRHTEILTELPPLDDYTHSIPENTNFPAGIEPQSNYIPETPPPGYISEDGETSDQQLNQSMDTGSPAELSPTTLSPVNHSLDLQPVTYSEPAFWCSIAYYELNQRVGETFHASQPSLTVDGFTDPSNSERFCLGLLSNVNRNATVEMTRRHIGRGVRLYYIGGEVFAECLSDSAIFVQSPNCNQRYGWHPATVCKIPPGCNLKIFNNQEFAALLAQSVNQGFEAVYQLTRMCTIRMSFVKGWGAEYRRQTVTSTPCWIELHLNGPLQWLDKVLTQMGSPSVRCSSMS

SEQ ID NO: 743229 - protein, 467 aa, Homo sapiens; identical to SEQ ID NO: 743225

SEQ ID NO: 743230 - protein, 467 aa, Homo sapiens; identical to SEQ ID NO: 743225

SEQ ID NO: 743231 - protein, 504 aa, Homo sapiens
AAGGGAGRRQREVGRRWPATPRAPLAPRPFPRCSASFLSSSAPSVFHTRPARLSAGVPRALTGGWRRQSAGGRVPAPGLRRRIGGARSPGWQAGLPARPRRRRSSSPASSPPAAGSTCSEIWGLSTPNTIDQWDTTGLYSFSEQTRSLDGRLQVSHRKGLPHVIYCRLWRWPDLHSHHELKAIENCEYAFNLKKDEVCVNPYHYQRVETPVLPPVLVPRHTEILTELPPLDDYTHSIPENTNFPAGIEPQSNYIPETPPPGYISEDGETSDQQLNQSMDTGSPAELSPTTLSPVNHSLDLQPVTYSEPAFWCSIAYYELNQRVGETFHASQPSLTVDGFTDPSNSERFCLGLLSNVNRNATVEMTRRHIGRGVRLYYIGGEVFAECLSDSAIFVQSPNCNQRYGWHPATVCKIPPGCNLKIFNNQEFAALLAQSVNQGFEAVYQLTRMCTIRMSFVKGWGAEYRRQTVTSTPCWIELHLNGPLQWLDKVLTQMGSPSVRCSSMS

SEQ ID NO: 743232 - protein, 227 aa, Homo sapiens
MDTGSPAELSPTTLSPVNHSLDLQPVTYSEPAFWCSIAYYELNQRVGETFHASQPSLTVDGFTDPSNSERFCLGLLSNVNRNATVEMTRRHIGRGVRLYYIGGEVFAECLSDSAIFVQSPNCNQRYGWHPATVCKIPPGCNLKIFNNQEFAALLAQSVNQGFEAVYQLTRMCTIRMSFVKGWGAEYRRQTVTSTPCWIELHLNGPLQWLDKVLTQMGSPSVRCSSMS

SEQ ID NO: 743233 - protein, 461 aa, Homo sapiens
MSSILPFTPPVVKRLLGWKKSAGGSGGAGGGEQNGQEEKWCEKAVKSLVKKLKKTGRLDELEKAITTQNCNTKCVTIPSTCSEIWGLSTPNTIDQWDTTGLYSFSEQTRSLDGRLQVSHRKGLPHVIYCRLWRWPDLHSHHELKAIENCEYAFNLKKDEVCVNPYHYQRVETPVLPPVLVPRHTEILTELPPLDDYTHSIPENTNFPAGIEPQSNYIPETPPPGYISEDGETSDQQLNQSMDTGSPAELSPTTLSPVNHSLDLQPVTYSEPAFWCSIAYYELNQRVGETFHASQPSLTVDGFTDPSNSERFCLGLLSNVNRNATVEMTRRHIGRGVRLYYIGGEVFAECLSDSAIFVQSPNCNQRYGWHPATVCKIPPGCNLKIFNNQEFAALLAQSVNQGFEAVYQLTRMCTIRMSFVKGWGAEYRYEIHIWFLNFHSVIMFHCILAYSGVHLYLFSMRL

SEQ ID NO: 743234 - protein, 467 aa, Homo sapiens; identical to SEQ ID NO: 743225

SEQ ID NO: 743235 - protein, 437 aa, Homo sapiens
MSSILPFTPPVVKRLLGWKKSAGGSGGAGGGEQNGQEEKWCEKAVKSLVKKLKKTGRLDELEKAITTQNCNTKCVTIPRSLDGRLQVSHRKGLPHVIYCRLWRWPDLHSHHELKAIENCEYAFNLKKDEVCVNPYHYQRVETPVLPPVLVPRHTEILTELPPLDDYTHSIPENTNFPAGIEPQSNYIPETPPPGYISEDGETSDQQLNQSMDTGSPAELSPTTLSPVNHSLDLQPVTYSEPAFWCSIAYYELNQRVGETFHASQPSLTVDGFTDPSNSERFCLGLLSNVNRNATVEMTRRHIGRGVRLYYIGGEVFAECLSDSAIFVQSPNCNQRYGWHPATVCKIPPGCNLKIFNNQEFAALLAQSVNQGFEAVYQLTRMCTIRMSFVKGWGAEYRRQTVTSTPCWIELHLNGPLQWLDKVLTQMGSPSVRCSSMS

SEQ ID NO: 743236 - protein, 154 aa, Homo sapiens
MSSILPFTPPVVKRLLGWKKSAGGSGGAGGGEQNGQEEKWCEKAVKSLVKKLKKTGRLDELEKAITTQNCNSCNLKIFNNQEFAALLAQSVNQGFEAVYQLTRMCTIRMSFVKGWGAEYRYEIHIWFLNFHSVIMFHCILAYSGVHLYLFSMRL

SEQ ID NO: 743237 - protein, 132 aa, Homo sapiens
VRACAPRPQCPRFLCVPRSPLALVPRLWPPVGENRGACGAGRRRAGPAPKRARGCAGQAEAQAGIPEHDPRSRRRWGPRGRPGGDDGGGEGAAGPGPGPCASSTARPRLRRTVSPRETDLGSGRDAPPGFVP

SEQ ID NO: 743238 - protein, 501 aa, Homo sapiens
MNKSLGPVSFKDVAVDFTQEEWQQLDPEQKITYRDVMLENYSNLVSVGYHIIKPDVISKLEQGEEPWIVEGEFLLQSYPDEVWQTDDLIERIQEEENKPSRQTVFIETLIEERGNVPGKTFDVETNPVPSRKIAYKNSLCDSCEKCLTSVSEYISSDGSYARMKADECSGCGKSLLHIKLEKTHPGDQAYEFNQNGEPYTLNEESLYQKIRILEKPFEYIECQKAFQKDTVFVNHMEEKPYKWNGSEIAFLQMSDLTVHQTSHMEMKPYECSECGKSFCKKSKFIIHQRTHTGEKPYECNQCGKSFCQKGTLTVHQRTHTGEKPYECNECGKNFYQKLHLIQHQRTHSGEKPYECSYCGKSFCQKTHLTQHQRTHSGERPYVCHDCGKTFSQKSALNDHQKIHTGVKLYKCSECGKCFCRKSTLTTHLRTHTGEKPYECNECGKFFSRLSYLTVHYRTHSGEKPYECTECGKKFYHKSAFNSHQRIHRRGNMNVIDVGRLL

SEQ ID NO: 743239 - protein, 697 aa, Homo sapiens
MNKSLGPVSFKDVAVDFTQEEWQQLDPEQKITYRDVMLENYSNLVSVGYHIIKPDVISKLEQGEEPWIVEGEFLLQSYPDEVWQTDDLIERIQEEENKPSRQTVFIETLIEERGNVPGKTFDVETNPVPSRKIAYKNSLCDSCEKCLTSVSEYISSDGSYARMKADECSGCGKSLLHIKLEKTHPGDQAYEFNQNGEPYTLNEESLYQKIRILEKPFEYIECQKAFQKDTVFVNHMEEKPYKWNGSEIAFLQMSDLTVHQTSHMEMKPYECSECGKSFCKKSKFIIHQRTHTGEKPYECNQCGKSFCQKGTLTVHQRTHTGEKPYECNECGKNFYQKLHLIQHQRTHSGEKPYECSYCGKSFCQKTHLTQHQRTHSGERPYVCHDCGKTFSQKSALNDHQKIHTGVKLYKCSECGKCFCRKSTLTTHLRTHTGEKPYECNECGKFFSRLSYLTVHYRTHSGEKPYECNECGKTFYLNSALMRHQRVHTGEKPYECNECGKLFSQLSYLTIHHRTHSGVKPYECSECGKTFYQNSALCRHRRIHKGEKPYECYICGKFFSQMSYLTIHHRIHSGEKPYECSECGKTFCQNSALNRHQRTHTGEKAYECYECGKCFSQMSYLTIHHRIHSGEKPFECNECGKAFSRMSYLTVHYRTHSGEKPYECTECGKKFYHKSAFNSHQRIHRRGNMNVIDVGRLL

SEQ ID NO: 743240 - protein, 546 aa, Homo sapiens
RGSSHWVRVPRMKADECSGCGKSLLHIKLEKTHPGDQAYEFNQNGEPYTLNEESLYQKIRILEKPFEYIECQKAFQKDTVFVNHMEEKPYKWNGSEIAFLQMSDLTVHQTSHMEMKPYECSECGKSFCKKSKFIIHQRTHTGEKPYECNQCGKSFCQKGTLTVHQRTHTGEKPYECNECGKNFYQKLHLIQHQRTHSGEKPYECSYCGKSFCQKTHLTQHQRTHSGERPYVCHDCGKTFSQKSALNDHQKIHTGVKLYKCSECGKCFCRKSTLTTHLRTHTGEKPYECNECGKFFSRLSYLTVHYRTHSGEKPYECNECGKTFYLNSALMRHQRVHTGEKPYECNECGKLFSQLSYLTIHHRTHSGVKPYECSECGKTFYQNSALCRHRRIHKGEKPYECYICGKFFSQMSYLTIHHRIHSGEKPYECSECGKTFCQNSALNRHQRTHTGEKAYECYECGKCFSQMSYLTIHHRIHSGEKPFECNECGKAFSRMSYLTVHYRTHSGEKPYECTECGKKFYHKSAFNSHQRIHRRGNMNVIDVGRLL

SEQ ID NO: 743241 - protein, 117 aa, Homo sapiens
MNKSLGPVSFKDVAVDFTQEEWQQLDPEQKITYRDVMLENYSNLVSVGYHIIKPDVISKLEQGEEPWIVEGEFLLQSYPGVLVEAVRRSVTWECFSQGFFNGPEPLEVTRNSCLYAL

SEQ ID NO: 743242 - protein, 248 aa, Homo sapiens
VDPLNASPENRNNQGTVNWSVDDIVKGINSSNVENQLQATQAARKLLSREKQPPIDNIIRAGLIPKFVSFLGRTDCSPIQFESAWALTNIASGTSEQTKAVVDGGAIPAFISLLASPHAHISEQAVWALGNIAGDGSVFRDLVIKYGAVDPLLALLAVPDMSSLACGYLRNLTWTLSNLCRNKNPAPPIDAVEQILPTLVRLLHHDDPEVLADTCWAISYLTDGPNERIGMVGENRNCAPTCEASRSF

SEQ ID NO: 743243 - protein, 73 aa, Homo sapiens
AVIAPLCAPVVPPHIPRAGHKKFVLNGTAEGQHPWVHSTFNGEPQSLSSSVRRHPRHLNRGEAPSDVDLEKLW

SEQ ID NO: 743244 - protein, 71 aa, Homo sapiens
RHSPPLCPRRTATHPSSGTLEVRSEWNSRKDSTPGSTAPSTASPRACLHQSVLKAEHSQYDNRSRITARML

SEQ ID NO: 743245 - protein, 78 aa, Homo sapiens
NRQEMNVAMNGTAGRTAPLGPQHLQRRAPEPVFISQETSEASEQGRGTIRCGFRKALVIVCSNNDGWSVEVLKAEHSQ

SEQ ID NO: 743246 - protein, 90 aa, Homo sapiens
QVTSVLCILMPSAGKRCNSCPWGVVQVTELDCRVPGSLPCTERTLGVSTRMSRFCLIWGKGLSRTSLSLGLLCTIVWIPLSSSVRVVKTK

SEQ ID NO: 743247 - protein, 114 aa, Homo sapiens
ASEVEDPKTGGRCELQDFPSSAILRSAVPACCYGDGRQRPSLSMATGGKSFWRTGMGGHFKRAQGLSSADPPPCFGETAPEIMYLSAKHNKKDRKLNGRIEARLKVEIPSETVE

SEQ ID NO: 743248 - protein, 235 aa, Homo sapiens
MLSATRRACQLLLLHSLFPVPRMGNSASNIVSPQEALPGRKEQTPVAAKHHVNGNRTVEPFPEGTQMAVFGMGCFWGAERKFWVLKGVYSTQVGFAGGYTSNPTYKEVCSEKTGHAEVVRVVYQPEHMSFEELLKVFWENHDPTQGMRQGNDHGTQYRSAIYPTSAKQMEAALSSKENYQKVLSEHGFGPITTDIREGQTFYYAEDYHQQYLSKNPNGYCGLGGTGVSCPVGIKK

SEQ ID NO: 743249 - protein, 235 aa, Homo sapiens; identical to SEQ ID NO: 743248

SEQ ID NO: 743250 - protein, 77 aa, Homo sapiens
  misc_feature (3)..(3): Xaa can be any naturally occurring amino acid
  misc_feature (5)..(5): Xaa can be any naturally occurring amino acid
  misc_feature (22)..(22): Xaa can be any naturally occurring amino acid
RRXKXERKKKEERKRREKKEEXPVLSEHGFGPITTDIREGQTFYYAEDYHQQYLSKNPNGYCGLGGTGVSCPVGIKK

SEQ ID NO: 743251 - protein, 69 aa, Homo sapiens
KTINHNISKEKKKVEVLSEHGFGPITTDIREGQTFYYAEDYHQQYLSKNPNGYCGLGGTGVSCPVGIKK

SEQ ID NO: 743252 - protein, 70 aa, Homo sapiens
SIRRIENLLYLVDMRLVLSEHGFGPITTDIREGQTFYYAEDYHQQYLSKNPNGYCGLGGTGVSCPVGIKK

SEQ ID NO: 743253 - protein, 69 aa, Homo sapiens
YIIIQFNQTQINHSSVLSEHGFGPITTDIREGQTFYYAEDYHQQYLSKNPNGYCGLGGTGVSCPVGIKK

SEQ ID NO: 743254 - protein, 169 aa, Homo sapiens
MAVFGMGCFWGAERKFWVLKGVYSTQVGFAGGYTSNPTYKEVCSEKTGHAEVVRVVYQPEHMSFEELLKVFWENHDPTQGMRQGNDHGTQYRSAIYPTSAKQMEAALSSKENYQKVLSEHGFGPITTDIREGQTFYYAEDYHQQYLSKNPNGYCGLGGTGVSCPVGIKK

SEQ ID NO: 743255 - protein, 192 aa, Homo sapiens
MCSEPKHHVNGNRTVEPFPEGTQMAVFGMGCFWGAERKFWVLKGVYSTQVGFAGGYTSNPTYKEVCSEKTGHAEVVRVVYQPEHMSFEELLKVFWENHDPTQGMRQGNDHGTQYRSAIYPTSAKQMEAALSSKENYQKVLSEHGFGPITTDIREGQTFYYAEDYHQQYLSKNPNGYCGLGGTGVSCPVGIKK

SEQ ID NO: 743256 - protein, 192 aa, Homo sapiens
MSTVAKHHVNGNRTVEPFPEGTQMAVFGMGCFWGAERKFWVLKGVYSTQVGFAGGYTSNPTYKEVCSEKTGHAEVVRVVYQPEHMSFEELLKVFWENHDPTQGMRQGNDHGTQYRSAIYPTSAKQMEAALSSKENYQKVLSEHGFGPITTDIREGQTFYYAEDYHQQYLSKNPNGYCGLGGTGVSCPVGIKK

SEQ ID NO: 743257 - protein, 169 aa, Homo sapiens; identical to SEQ ID NO: 743254

SEQ ID NO: 743258 - protein, 169 aa, Homo sapiens; identical to SEQ ID NO: 743254

SEQ ID NO: 743259 - protein, 102 aa, Homo sapiens
MRRARPKGDPLHIPSHASAHCSPGPSVPPLAGAVSLAWELMAPFCVPTVLSEHGFGPITTDIREGQTFYYAEDYHQQYLSKNPNGYCGLGGTGVSCPVGIKK

SEQ ID NO: 743260 - protein, 144 aa, Homo sapiens
KWNCVEERICHLQRENAWLVQQLDDVHQKEDHKEIVTNIQRGFIESGKKDLVLEEKSKKLMNECDHLKESLFQYEREKTEGVVVVRQLQQEVADSVKKLTTLESPLEGISRCHINLDETQASNKKLFQVKSQICMEFNMSTVIL

SEQ ID NO: 743261 - protein, 106 aa, Homo sapiens
LGAGSQRGAAPECGENHQAPELGSTWRGQRLQPQTAALCHFALRKLPGNAHGLAAAFVQPALQVQEEKNNRTRFSGAYFTMSDPDMRLCLQSATWNIQTSDQHHRL

SEQ ID NO: 743262 - protein, 144 aa, Homo sapiens
SLPHRIGIFFCPLLPFIQMIMLFIMFYLNSQKKAIGPEAGRPAPVQGAPPAGCFGPGSTRGPAQAAATGAPGGHEALPAVSNLEYSDFRPASQIITLRKSSASQLPSKASLKDPWTRDSSVLNNILRSSWFAQHLHLLGTKQEQ

SEQ ID NO: 743263 - protein, 112 aa, Homo sapiens
MYGGSGSCRVIQHFGRPMTGGSLEVREFGTSLASMVKPHLYYKYKKISPVHARAPRQEGRLRCRERRLRAASGQGRPEGQRKQRQQERQEDMRLCLQSATWNIQTSDQHHRL

SEQ ID NO: 743264 - protein, 132 aa, Homo sapiens
QDQAGQHSETLSVVVRFHAADKDIPKTGQFIKKRGLMDLQFHVAADASQSWQKARRSKSRLTWMAVGKMRESLCRETPPYKAIRSHETYSHENSTGKTMIILPPTGSLPQYVGIQEETWVGTQPNHVTVSKK

SEQ ID NO: 743265 - protein, 57 aa, Homo sapiens
KQLEPTVQSLEMKSKTARNTPNWVNQSLDFHNHEEMKGLMDENCILKADIAILRQEI

SEQ ID NO: 743266 - protein, 324 aa, Homo sapiens
REGHYPEPAHLSANARRLIVHLLAPNPAERPSLDHLLQDDFFTQGFTPDRLPAHSCHSPPIFAIPPPLGRIFRKVGQRLLTQCRPPCPFTPKEASGPGEGGPDPDSMEWDGESSLSAKEVPCLEGPIHLVAQGTLQSDLAGPEGSRRPEVEAALRHLQLCLDVGPPATQDPLGEQQPILWAPKWVDYSSKYGFGYQLLDGGRTGRHPHGPATPRRVSFSGVPAQLVLSGEGEGLQLTLWEQGSPGTSYSLDVPRKPRLRPHHRTAPSPRPPHAAEYLVPLRVRVDPCMVVPGTQAPFPFLWLPQRGCPGGGLGGTREVGSCLVA

SEQ ID NO: 743267 - protein, 380 aa, Homo sapiens
REGHYPEPAHLSANARRLIVHLLAPNPAERPSLDHLLQDDFFTQVGGGPRRGVPGVGSLAGDEPEPALLSRGRPRPVPGNPGAQGLGDLKPGITPNPHPKGFTPDRLPAHSCHSPPIFAIPPPLGRIFRKVGQRLLTQCRPPCPFTPKEASGPGEGGPDPDSMEWDGESSLSAKEVPCLEGPIHLVAQGTLQSDLAGPEGSRRPEVEAALRHLQLCLDVGPPATQDPLGEQQPILWAPKWVDYSSKYGFGYQLLDGGRTGRHPHGPATPRRVSFSGVPAQLVLSGEGEGLQLTLWEQGSPGTSYSLDVPRKPRLRPHHRTAPSPRPPHAAEYLVPLRVRVDPCMVVPGTQAPFPFLWLPQRGCPGGGLGGTREVGSCLVA

SEQ ID NO: 743268 - protein, 192 aa, Homo sapiens
REGHYPEPAHLSANARRLIVHLLAPNPAERPSLDHLLQDDFFTQVGGGPRRGVPGVGSLAGDEPEPALLSRGRPRPVPGNPGAQGLGDLKPGITPNPHPKGFTPDRLPAHSCHSPPIFAIPPPLGRIFRKVGQRLLTQCRPPCPFTPKEASGPGEGGPDPDSMEWDGEVRHRGGGHGETQVEGMLAPAKTPS

SEQ ID NO: 743269 - protein, 61 aa, Homo sapiens
MVDVSQPEGTSRRVPGMNREIPKDPKGYAERRAARHTQDQHLSVFHANPRRDTSSLLCRTP

SEQ ID NO: 743270 - protein, 61 aa, Homo sapiens; identical to SEQ ID NO: 743269

SEQ ID NO: 743271 - protein, 524 aa, Homo sapiens
MPQLSLSWLGLGPVAASPWLLLLLVGGSWLLARVLAWTYTFYDNCRRLQCFPQPPKQNWFWGHQGLVTPTEEGMKTLTQLVTTYPQGFKLWLGPTFPLLILCHPDIIRPITSASAAVAPKDMIFYGFLKPWLGDGLLLSGGDKWSRHRRMLTPAFHFNILKPYMKIFNKSVNIMHDKWQRLASEGSARLDMFEHISLMTLDSLQKCVFSFESNCQEKPSEYIAAILELSAFVEKRNQQILLHTDFLYYLTPDGQRFRRACHLVHDFTDAVIQERRRTLPTQGIDDFLKNKAKSKTLDFIDVLLLSKDEDGKELSDEDIRAEADTFMFEGHDTTASGLSWVLYHLAKHPEYQEQCRQEVQELLKDREPIEIEWDDLAQLPFLTMCIKESLRLHPPVPVISRCCTQDFVLPDGRVIPKGIVCLINIIGIHYNPTVWPDPEVYDPFRFDQENIKERSPLAFIPFSAGPRNCIGQAFAMAEMKVVLALTLLHFRILPTHTEPRRKPELILRAEGGLWLRVEPLGANSQ

SEQ ID NO: 743272 - protein, 437 aa, Homo sapiens
MPQLSLSWLGLGPVAASPWLLLLLVGGSWLLARVLAWTYTFYDNCRRLQCFPQPPKQNWFWGHQGLVTPTEEGMKTLTQLVTTYPQGFKLWLGPTFPLLILCHPDIIRPITSASAAVAPKDMIFYGFLKPWLGDGLLLSGGDKWSRHRRMLTPAFHFNILKPYMKIFNKSVNIMHDKWQRLASEGSARLDMFEHISLMTLDSLQKCVFSFESNCQEKPSEYIAAILELSAFVEKRNQQILLHTDFLYYLTPDGQRFRRACHLVHDFTDAVIQERRRTLPTQGIDDFLKNKAKSKTLDFIDVLLLSKDEDGKELSDEDIRAEADTFMFEGHDTTASGLSWVLYHLAKHPEYQEQCRQEVQELLKDREPIEIEWDDLAQLPFLVHLCSSPSCPQGFVSNTLPDLPLSQSLPSVHSISTSGFASVGAQGSGITSDVLPTS

SEQ ID NO: 743273 - protein, 206 aa, Homo sapiens [sequence omitted]

SEQ ID NO: 743274 - protein, 517 aa, Homo sapiens
GDGAAAILWGVCRSGRGGKTAVWRHFSAEGPFAFAEMRHSKRTHCPDWDSRESWGHESYRGSHKRKRRSHSSTQENRHCKPHHQFKESDCHYLEARSLNERDYRDRRYVDEYRNDYCEGYVPRHYHRDIESGYRIHCSKSSVRSRRSSPKRKRNRHCSSHQSRSKSHRRKRSRSIEDDEEGHLICQSGDVLRARYEIVDTLGEGAFGKVVECIDHGMDGMHVAVKIVKNVGRYREAARSEIQVLEHLNSTDPNSVFRCVQMLEWFDHHGHVCIVFELLGLSTYDFIKENSFLPFQIDHIRQMAYQICQSINFLHHNKLTHTDLKPENILFVKSDYVVKYNSKMKRDERTLKNTDIKVVDFGSATYDDEHHSTLVSTRHYRAPEVILALGWSQPCDVWSIGCILIEYYLGFTVFQTHDSKEHLAMMERILGPIPQHMIQKTRKRKYFHHNQLDWDEHSSAGRYVRRRCKPLKEFMLCHDEEHEKLFDLVRRMLEYDPTQRITLDEALQHPFFDLLKKK

SEQ ID NO: 743275 - protein, 299 aa, Homo sapiens
FLDNSLKTTENVTDPTLQNNCYSVLKRSQLRDSRDCVTSFVSFDLESLSRTMRHSKRTYCPDWDDKDWDYGKWRSSSSHKRRKRSHSSAQENKRCKYNHSKMCDSHYLESRSINEKDYHSRRYIDEYRNDYTQGCEPGHRQRDHESRYQNHSSKSSGRSGRSSYKSKHRIHHSTSHRRSHGDEIVDTLGEGAFGKVVECIDHKAGGRHVAVKIVKNVDRYCEAARSEIQVLEHLNTTDPNSTFRCVQMLEWFDHHGHVCIVFELLGLSTYDFIKENSFLPFQIDHIRQMAYQICQSINL

SEQ ID NO: 743276 - protein, 517 aa, Homo sapiens; identical to SEQ ID NO: 743274

SEQ ID NO: 743277 - protein, 102 aa, Homo sapiens
RGCECACVCARTAVVIMMYLLAVYRWLSFHSTIFWLTSVSCESSVVTLCIEWISWYLKIAEALMQAAHEPVESVPLQPRQTHLPTLNMPSLVAMNPNVSKNR

SEQ ID NO: 743278 - protein, 78 aa, Homo sapiens
KLPGSPAPAPASLSVPSKTVISKPRHLWEQPLASCPALCNQPVLTPTREEESALVNPLVYQARFPGCSRETNCCSRKS

SEQ ID NO: 743279 - protein, 116 aa, Homo sapiens
MGLLPPPWTISFTVQTTLQPPGGLPAAPVSGRMAFEPVGRDLARRMVPRAGKRTQTLGARRVAAQGPGPLPEDRRPKSGERLHVTVAPCWEFVLPSVSLTAQAWGGVGQEASSGVP

SEQ ID NO: 743280 - protein, 116 aa, Homo sapiens; identical to SEQ ID NO: 743279

SEQ ID NO: 743281 - protein, 818 aa, Homo sapiens
MESEQLFHRGYYRNSYNSITSASSDEELLDGAGVIMDFQTSEDDNLLDGDTAVGTHYTMTNGGSINSSTHLLDLLDEPIPGVGTYDDFHTIDWVREKCKDRERHRRINSKKKESAWEMTKSLYDAWSGWLVVTLTGLASGALAGLIDIAADWMTDLKEGICLSALWYNHEQCCWGSNETTFEERDKCPQWKTWAELIIGQAEGPGSYIMNYIMYIFWALSFAFLAVSLVKVFAPYACGSGIPEIKTILSGFIIRGYLGKWTLMIKTITLVLAVASGLSLGKEGPLVHVACCCGNIFSYLFPKYSTNEAKKREVLSAASAAGVSVAFGAPIGGVLFSLEEVSYYFPLKTLWRSFFAALVAAFVLRSINPFGNSRLVLFYVEYHTPWYLFELFPFILLGVFGGLWGAFFIRANIAWCRRRKSTKFGKYPVLEVIIVAAITAVIAFPNPYTRLNTSELIKELFTDCGPLESSSLCDYRNDMNASKIVDDIPDRPAGIGVYSAIWQLCLALIFKIIMTVFTFGIKVPSGLFIPSMAIGAIAGRIVGIAVEQLAYYHHDWFIFKEWCEVGADCITPGLYAMVGAAACLGGVTRMTVSLVVIVFELTGGLEYIVPLMAAVMTSKWVGDAFGREGIYEAHIRLNGYPFLDAKEEFTHTTLAADVMRPRRNDPPLAVLTQDNMTVDDIENMINETSYNGFPVIMSKESQRLVGFALRRDLTIAIESARKKQEGIVGSSRVCFAQHTPSLPAESPRPLKLRSILDMSPFTVTDHTPMEIVVDIFRKLGLRQCLVTHNGRLLGIITKKDILRHMAQTANQDPASIMFN

SEQ ID NO: 743282 - protein, 818 aa, Homo sapiens; identical to SEQ ID NO: 743281

SEQ ID NO: 743283 - protein, 818 aa, Homo sapiens; identical to SEQ ID NO: 743281

SEQ ID NO: 743284 - protein, 818 aa, Homo sapiens; identical to SEQ ID NO: 743281

SEQ ID NO: 743285 - protein, 818 aa, Homo sapiens; identical to SEQ ID NO: 743281

SEQ ID NO: 743286 - protein, 818 aa, Homo sapiens; identical to SEQ ID NO: 743281

SEQ ID NO: 743287 - protein, 818 aa, Homo sapiens; identical to SEQ ID NO: 743281

SEQ ID NO: 743288 - protein, 701 aa, Homo sapiens
MTKSLYDAWSGWLVVTLTGLASGALAGLIDIAADWMTDLKEGICLSALWYNHEQCCWGSNETTFEERDKCPQWKTWAELIIGQAEGPGSYIMNYIMYIFWALSFAFLAVSLVKVFAPYACGSGIPEIKTILSGFIIRGYLGKWTLMIKTITLVLAVASGLSLGKEGPLVHVACCCGNIFSYLFPKYSTNEAKKREVLSAASAAGVSVAFGAPIGGVLFSLEEVSYYFPLKTLWRSFFAALVAAFVLRSINPFGNSRLVLFYVEYHTPWYLFELFPFILLGVFGGLWGAFFIRANIAWCRRRKSTKFGKYPVLEVIIVAAITAVIAFPNPYTRLNTSELIKELFTDCGPLESSSLCDYRNDMNASKIVDDIPDRPAGIGVYSAIWQLCLALIFKIIMTVFTFGIKVPSGLFIPSMAIGAIAGRIVGIAVEQLAYYHHDWFIFKEWCEVGADCITPGLYAMVGAAACLGGVTRMTVSLVVIVFELTGGLEYIVPLMAAVMTSKWVGDAFGREGIYEAHIRLNGYPFLDAKEEFTHTTLAADVMRPRRNDPPLAVLTQDNMTVDDIENMINETSYNGFPVIMSKESQRLVGFALRRDLTIAIESARKKQEGIVGSSRVCFAQHTPSLPAESPRPLKLRSILDMSPFTVTDHTPMEIVVDIFRKLGLRQCLVTHNGRLLGIITKKDILRHMAQTANQDPASIMFN

SEQ ID NO: 743289 - protein, 341 aa, Homo sapiens [sequence omitted]

SEQ ID NO: 743290 - protein, 405 aa, Homo sapiens
RTRGSRTRGFGKYPVLEVIIVAAITAVIAFPNPYTRLNTSELIKELFTDCGPLESSSLCDYRNDMNASKIVDDIPDRPAGIGVYSAIWQLCLALIFKIIMTVFTFGIKVPSGLFIPSMAIGAIAGRIVGIAVEQLAYYHHDWFIFKEWCEVGADCITPGLYAMVGAAACLGGVTRMTVSLVVIVFELTGGLEYIVPLMAAVMTSKWVGDAFGREGIYEAHIRLNGYPFLDAKEEFTHTTLAADVMRPRRNDPPLAVLTQDNMTVDDIENMINETSYNGFPVIMSKESQRLVGFALRRDLTIAIESARKKQEGIVGSSRVCFAQHTPSLPAESPRPLKLRSILDMSPFTVTDHTPMEIVVDIFRKLGLRQCLVTHNGRLLGIITKKDILRHMAQTANQDPASIMFN

SEQ ID NO: 743291 - protein, 864 aa, Homo sapiens
MESEQLFHRGYYRNSYNSITSASSDEELLDGAGVIMDFQTSEDDNLLDGDTAVGTHYTMTNGGSINSSTHLLDLLDEPIPGVGTYDDFHTIDWVREKCKDRERHRRINSKKKESAWEMTKSLYDAWSGWLVVTLTGLASGALAGLIDIAADWMTDLKEGICLSALWYNHEQCCWGSNETTFEERDKCPQWKTWAELIIGQAEGPGSYIMNYIMYIFWALSFAFLAVSLVKVFAPYACGSGIPEIKTILSGFIIRGYLGKWTLMIKTITLVLAVASGLSLGKEGPLVHVACCCGNIFSYLFPKYSTNEAKKREVLSAASAAGVSVAFGAPIGGVLFSLEEVSYYFPLKTLWRSFFAALVAAFVLRSINPFGNSRLVLFYVEYHTPWYLFELFPFILLGVFGGLWGAFFIRANIAWCRRRKSTKFGKYPVLEVIIVAAITAVIAFPNPYTRLNTSELIKELFTDCGPLESSSLCDYRNDMNASKIVDDIPDRPAGIGVYSAIWQLCLALIFKIIMTVFTFGIKVPSGLFIPSMAIGAIAGRIVGIAVEQLAYYHHDWFIFKEWCEVGADCITPGLYAMVGAAACLGGVTRMTVSLVVIVFELTGGLEYIVPLMAAVMTSKWVGDAFGREGIYEAHIRLNGYPFLDAKEEFTHTTLAADVMRPRRNDPPLAVLTQDNMTVDDIENMINETSYNGFPVIMSKESQRLVGFALRRDLTIAIESARKKQEGIVGSSRVCFAQHTPSLPAESPRPLKLRSILDMSPFTVTDHTPMEIVVDIFRKLGLRQCLVTHNGIVLGIITKKNILEHLEQLKQHVEAPPWHYNKKRYPPAYGPDGKPRPRFNNVQLNLTDEEREETEEEVYLLNSTTL

SEQ ID NO: 743292 - protein, 818 aa, Homo sapiens; identical to SEQ ID NO: 743281

SEQ ID NO: 743293 - protein, 86 aa, Homo sapiens
  misc_feature (42)..(42): Xaa can be any naturally occurring amino acid
VQASVGDDVLRPMIRGMMDEKGTQFVAYFLPVEETLKKRKRXPGNRPQTGSLPLSSLRFNNVQLNLTDEEREETEEEVYLLNSTTL

SEQ ID NO: 743294 - protein, 352 aa, Homo sapiens
MESEQLFHRGYYRNSYNSITSASSDEELLDGAGVIMDFQTSEDDNLLDGDTAVGTHYTMTNGGSINSSTHLLDLLDEPIPGVGTYDDFHTIDWVREKCKDRERHRRINSKKKESAWEMTKSLYDAWSGWLVVTLTGLASGALAGLIDIAADWMTDLKEGICLSALWYNHEQCCWGSNETTFEERDKCPQWKTWAELIIGQAEGPGSYIMNYIMYIFWALSFAFLAVSLVKVFAPYACGSGIPEIKTILSGFIIRGYLGKWTLMIKTITLVLAVASGLSLGKEGPLVHVACCCGNIFSYLFPKYSTNEAKKREVLSAASAAGVSVAFGAPIGGVLFSLEEQGLALFFNQNCSV

SEQ ID NO: 743295 - protein, 818 aa, Homo sapiens; identical to SEQ ID NO: 743281

SEQ ID NO: 743296 - protein, 821 aa, Homo sapiens
MESEQLFHRGYYRNSYNSITSASSDEELLDGAGVIMDFQTSEDDNLLDGDTAVGTHYTMTNGGSINSSTHLLDLLDEPIPGVGTYDDFHTIDWVREKCKDRERHRRINSKKKESAWEMTKSLYDAWSGWLVVTLTGLASGALAGLIDIAADWMTDLKEGICLSALWYNHEQCCWGSNETTFEERDKCPQWKTWAELIIGQAEGPGSYIMNYIMYIFWALSFAFLAVSLVKVFAPYACGSGIPEIKTILSGFIIRGYLGKWTLMIKTITLVLAVASGLSLGKEGPLVHVACCCGNIFSYLFPKYSTNEAKKREVLSAASAAGVSVAFGAPIGGVLFSLEEVSYYFPLKTLWRSFFAALVAAFVLRSINPFGNSRLVLFYVEYHTPWYLFELFPFILLGVFGGLWGAFFIRANIAWCRRRKSTKFGKYPVLEVIIVAAITAVIAFPNPYTRLNTSELIKELFTDCGPLESSSLCDYRNDMNASKIVDDIPDRPAGIGVYSAIWQLCLALIFKIIMTVFTFGIKVPSGLFIPSMAIGAIAGRIVGIAVEQLAYYHHDWFIFKEWCEVGADCITPGLYAMVGAAACLGGVTRMTVSLVVIVFELTGGLEYIVPLMAAVMTSKWVGDAFGREGIYEAHIRLNGYPFLDAKEEFTHTTLAADVMRPRRNDPPLAVLTQDNMTVDDIENMINETSYNGFPVIMSKESQRLVGFALRRDLTIAIESARKKQEGIVGSSRVCFAQHTPSLPAESPRPLKLRSILDMSPFTVTDHTPMEIVVDIFRKLGLRQCLVTHNGIVLGIITKKNILEHLEQLKQHVEHQDSCTTQD

SEQ ID NO: 743297 - protein, 737 aa, Homo sapiens
MESEQLFHRGYYRNSYNSITSASSDEELLDGAGVIMDFQTSEDDNLLDGDTAVGTHYTMTNGGSINSSTHLLDLLDEPIPGVGTYDDFHTIDWVREKCKDRERHRRINSKKKESAWEMTKSLYDAWSGWLVVTLTGLASGALAGLIDIAADWMTDLKEGICLSALWYNHEQCCWGSNETTFEERDKCPQWKTWAELIIGQAEGPGSYIMNYIMYIFWALSFAFLAVSLVKVFAPYACGSGIPEIKTILSGFIIRGYLGKWTLMIKTITLVLAVASGLSLGKEGPLVHVACCCGNIFSYLFPKYSTNEAKKREVLSAASAAGVSVAFGAPIGGVLFSLEEVSYYFPLKTLWRSFFAALVAAFVLRSINPFGNSRLVLFYVEYHTPWYLFELFPFILLGVFGGLWGAFFIRANIAWCRRRKSTKFGKYPVLEVIIVAAITAVIAFPNPYTRLNTSELIKELFTDCGPLESSSLCDYRNDMNASKIVDDIPDRPAGIGVYSAIWQLCLALIFKIIMTVFTFGIKVPSGLFIPSMAIGAIAGRIVGIAVEQLAYYHHDWFIFKEWCEVGADCITPGLYAMVGAAACLGGVTRMTVSLVVIVFELTGGLEYIVPLMAAVMTSKWVGDAFGREGIYEAHIRLNGYPFLDAKEEFTHTTLAADVMRPRRNDPPLAVLTQDNMTVDDIENMINETSYNGFPVIMSKESQRLVGFALRRDLTIAIGTLSKIYICIYEMDFWKKGKQ

SEQ ID NO: 743298 - protein, 732 aa, Homo sapiens
MESEQLFHRGYYRNSYNSITSASSDEELLDGAGVIMDFQTSEDDNLLDGDTAVGTHYTMTNGGSINSSTHLLDLLDEPIPGVGTYDDFHTIDWVREKCKDRERHRRINSKKKESAWEMTKSLYDAWSGWLVVTLTGLASGALAGLIDIAADWMTDLKEGICLSALWYNHEQCCWGSNETTFEERDKCPQWKTWAELIIGQAEGPGSYIMNYIMYIFWALSFAFLAVSLVKVFAPYACGSGIPEIKTILSGFIIRGYLGKWTLMIKTITLVLAVASGLSLGKEGPLVHVACCCGNIFSYLFPKYSTNEAKKREVLSAASAAGVSVAFGAPIGGVLFSLEEVSYYFPLKTLWRSFFAALVAAFVLRSINPFGNSRLVLFYVEYHTPWYLFELFPFILLGVFGGLWGAFFIRANIAWCRRRKSTKFGKYPVLEVIIVAAITAVIAFPNPYTRLNTSELIKELFTDCGPLESSSLCDYRNDMNASKIVDDIPDRPAGIGVYSAIWQLCLALIFKIIMTVFTFGIKVPSGLFIPSMAIGAIAGRIVGIAVEQLAYYHHDWFIFKEWCEVGADCITPGLYAMVGAAACLGGVTRMTVSLVVIVFELTGGLEYIVPLMAAVMTSKWVGDAFGREGIYEAHIRLNGYPFLDAKEEFTHTTLAADVMRPRRNDPPLAVLTQDNMTVDDIENMINETSYNGFPVIMSKESQRLVGEFLLVVSNLLIRVLVLGLSGRKLKRIQ

SEQ ID NO: 743299 - protein, 146 aa, Homo sapiens
MESEQLFHRGYYRNSYNSITSASSDEELLDGAGVIMDFQTSEDDNLLDGDTAVGTHYTMTNGGSINSSTHLLDLLDEPIPGVGTYDDFHTIDWVREKCKDRERHRRINSKKKESAWEMTKSLYDAWSGWLVVTLTGLASGALAGFA

SEQ ID NO: 743300 - protein, 111 aa, Homo sapiens
MESEQLFHRGYYRNSYNSITSASSDEELLDGAGVIMDFQTSEDDNLLDGDTAVGTHYTMTNGGSINSSTHLLDLLDEPIPGVGTYDDFHTIDWVREKCKDRERHRRFTYTL

SEQ ID NO: 743301 - protein, 117 aa, Homo sapiens
RGWAHPILERVARLSLPPRTPKCGRVGPLTLSWAPGAVSCLHLGCTCQAPWVPCAPHPFTRGHCLIPAPAPTLRPSGEAPAPTCLSEQERGPSRPACSGCGFLGTGGSWVGIWRMLL

SEQ ID NO: 743302 - protein, 94 aa, Homo sapiens
LLRDLSPPACRWELGHLLRLSALASSAVYVKGSHRASSGHHGEQEARKEGSNVGKRAQMTTKQNGFPPWASFPHTQHRGYFKINKINVQTCTEA

SEQ ID NO: 743303 - protein, 104 aa, Homo sapiens
HEIQHFWPRSLNHSRSTRGGWSTTPSSYPGTELNARTTPNEGATIFPLTSSLGQQDKLRTACPGPTREAGGRPLSTVSHLVHPAVTMVNKKPGRKEAMSAKGLR

SEQ ID NO: 743304 - protein, 76 aa, Homo sapiens
WFISFLISSQISSPALLPYLKLPLILSLSCYTALFIFFIELTYISMLLSISIYFPVYFLFQGFADYCGSNQACLVP

SEQ ID NO: 743305 - protein, 189 aa, Homo sapiens
LKGYCPLGAKCKKKHTLLCPDFARRGACPRGAQCQLLHRTQKRHSRRAATSPAPGPSDATARSRVSASHGPRKPSASQRPTRQTPSSAALTAAAVAAPPHCPGGSASPSSSKASSSSSSSSSPPASLDHEAPSLQEAALAAACSNRLCKLPSFISLQSSPSPGAQPRVRAPRAPLTKDSGKPLHIKPRL

SEQ ID NO: 743306 - protein, 189 aa, Homo sapiens; identical to SEQ ID NO: 743305

SEQ ID NO: 743307 - protein, 189 aa, Homo sapiens; identical to SEQ ID NO: 743305

SEQ ID NO: 743308 - protein, 271 aa, Homo sapiens
MDLKIGKATPKDSKYVEKLEALFPDLPKRNDIFDSLQKAKFDVSGLTTEQMLRKDQKTIYRQGVKVAISAIYMDLEAFLQRSNLLADLHAFCQAHSYDVLVAMTIFFNTHNEPVRQLAIFCPHVALQTTICEVLERSHSPPLKLTPASSTHPNLHAYLQGNTQVSRKKLLPLLQEALSAYFDSMKIPSGQPETADVSREQVDKELDRASNSLISGLSQDEEDPPLPPTPMNSLVDECPLDQGLPKLSAEAVFEKCSQISLSQSTTASLSKK

SEQ ID NO: 743309 - protein, 400 aa, Homo sapiens
MEDYLQGCRAALQESRPLHVVLGNEACDLDSTVSALALAFYLAKTTEAEEVFVPVLNIKRSELPLRGDIVFFLQKVHIPESILIFRDEIDLHALYQAGQLTLILVDHHILSKSDTALEEAVAEVLDHRPIEPKHCPPCHVSVELVGSCATLVTERILQGAPEILDRQTAALLHGTIILDCVNMDLKIGKATPKDSKYVEKLEALFPDLPKRNDIFDSLQKAKFDVSGLTTEQMLRKDQKTIYRQGVKVAISAIYMDLEICEVLERSHSPPLKLTPASSTHPNLHAYLQGNTQVSRKKLLPLLQEALSAYFDSMKIPSGQPETADVSREQVDKELDRASNSLISGLSQDEEDPPLPPTPMNSLVDECPLDQGLPKLSAEAVFEKCSQISLSQSTTASLSKK

SEQ ID NO: 743310 - protein, 453 aa, Homo sapiens
MEDYLQGCRAALQESRPLHVVLGNEACDLDSTVSALALAFYLAKTTEAEEVFVPVLNIKRSELPLRGDIVFFLQKVHIPESILIFRDEIDLHALYQAGQLTLILVDHHILSKSDTALEEAVAEVLDHRPIEPKHCPPCHVSVELVGSCATLVTERILQGAPEILDRQTAALLHGTIILDCVNMDLKIGKATPKDSKYVEKLEALFPDLPKRNDIFDSLQKAKFDVSGLTTEQMLRKDQKTIYRQGVKVAISAIYMDLEAFLQRSNLLADLHAFCQAHSYDVLVAMTIFFNTHNEPVRQLAIFCPHVALQTTICEVLERSHSPPLKLTPASSTHPNLHAYLQGNTQVSRKKLLPLLQEALSAYFDSMKIPSGQPETADVSREQVDKELDRASNSLISGLSQDEEDPPLPPTPMNSLVDECPLDQGLPKLSAEAVFEKCSQISLSQSTTASLSKK

SEQ ID NO: 743311 - protein, 370 aa, Homo sapiens
MEDYLQGCRAALQESRPLHVVLGNEACDLDSTVSALALAFYLAKKVHIPESILIFRDEIDLHALYQAGQLTLILVDHHILSKSDTALEEAVAEVLDHRPIEPKHCPPCHVSVELVGSCATLVTERILQGAPEILDRQTAALLHGTIILDCVNMDLKIGKATPKDSKYVEKLEALFPDLPKRNDIFDSLQKAKFDVSGLTTEQMLRKDQKTIYRQGVKVAISAIYMDLEICEVLERSHSPPLKLTPASSTHPNLHAYLQGNTQVSRKKLLPLLQEALSAYFDSMKIPSGQPETADVSREQVDKELDRASNSLISGLSQDEEDPPLPPTPMNSLVDECPLDQGLPKLSAEAVFEKCSQISLSQSTTASLSKK

SEQ ID NO: 743312 - protein, 397 aa, Homo sapiens
GKIGPLRKIDESRPLHVVLGNEACDLDSTVSALALAFYLAKTTEAEEVFVPVLNIKRSELPLRGDIVFFLQKVHIPESILIFRDEIDLHALYQAGQLTLILVDHHILSKSDTALEEAVAEVLDHRPIEPKHCPPCHVSVELVGSCATLVTERILQGAPEILDRQTAALLHGTIILDCVNMDLKIGKATPKDSKYVEKLEALFPDLPKRNDIFDSLQKAKFDVSGLTTEQMLRKDQKTIYRQGVKVAISAIYMDLEICEVLERSHSPPLKLTPASSTHPNLHAYLQGNTQVSRKKLLPLLQEALSAYFDSMKIPSGQPETADVSREQVDKELDRASNSLISGLSQDEEDPPLPPTPMNSLVDECPLDQGLPKLSAEAVFEKCSQISLSQSTTASLSKK

SEQ ID NO: 743313 - protein, 189 aa, Homo sapiens
MIYLIPYKRQSLMYQGLTTEQMLRKDQKTIYRQGVKVAISAIYMDLEICEVLERSHSPPLKLTPASSTHPNLHAYLQGNTQVSRKKLLPLLQEALSAYFDSMKIPSGQPETADVSREQVDKELDRASNSLISGLSQDEEDPPLPPTPMNSLVDECPLDQGLPKLSAEAVFEKCSQISLSQSTTASLSKK

SEQ ID NO: 743314 - protein, 484 aa, Homo sapiens
MEDYLQGCRAALQESRPLHVVLGNEACDLDSTVSALALAFYLAKTTEAEEVFVPVLNIKRSELPLRGDIVFFLQKVHIPESILIFRDEIDLHALYQAGQLTLILVDHHILSKSDTALEEAVAEVLDHRPIEPKHCPPCHVSVELVGSCATLVTERILQGAPEILDRQTAALLHGTIILDCVNMDLKIGKATPKDSKYVEKLEALFPDLPKRNDIFDSLQKAKFDVSGLTTEQMLRKDQKTIYRQGVKVAISAIYMDLEAFLQRSNLLADLHAFCQAHSYDVLVAMTIFFNTHNEPVRQLAIFCPHVALQTTGQSLAMLPRLVSNSWTQVIHQPQLPRVLELQICEVLERSHSPPLKLTPASSTHPNLHAYLQGNTQVSRKKLLPLLQEALSAYFDSMKIPSGQPETADVSREQVDKELDRASNSLISGLSQDEEDPPLPPTPMNSLVDECPLDQGLPKLSAEAVFEKCSQISLSQSTTASLSKK

SEQ ID NO: 743315 - protein, 423 aa, Homo sapiens
MEDYLQGCRAALQESRPLHVVLGNEACDLDSTVSALALAFYLAKKVHIPESILIFRDEIDLHALYQAGQLTLILVDHHILSKSDTALEEAVAEVLDHRPIEPKHCPPCHVSVELVGSCATLVTERILQGAPEILDRQTAALLHGTIILDCVNMDLKIGKATPKDSKYVEKLEALFPDLPKRNDIFDSLQKAKFDVSGLTTEQMLRKDQKTIYRQGVKVAISAIYMDLEAFLQRSNLLADLHAFCQAHSYDVLVAMTIFFNTHNEPVRQLAIFCPHVALQTTICEVLERSHSPPLKLTPASSTHPNLHAYLQGNTQVSRKKLLPLLQEALSAYFDSMKIPSGQPETADVSREQVDKELDRASNSLISGLSQDEEDPPLPPTPMNSLVDECPLDQGLPKLSAEAVFEKCSQISLSQSTTASLSKK

SEQ ID NO: 743316 - protein, 221 aa, Homo sapiens
MLRKDQKTIYRQGVKVAISAIYMDLEAFLQRSNLLADLHAFCQAHSYDVLVAMTIFFNTHNEPVRQLAIFCPHVALQTTICEVLERSHSPPLKLTPASSTHPNLHAYLQGNTQVSRKKLLPLLQEALSAYFDSMKIPSGQPETADVSREQVDKELDRASNSLISGLSQDEEDPPLPPTPMNSLVDECPLDQGLPKLSAEAVFEKCSQISLSQSTTASLSKK

SEQ ID NO: 743317 - protein, 308 aa, Homo sapiens
MEDYLQGCRAALQESRPLHVVLGNEACDLDSTVSALALAFYLAKKVHIPESILIFRDEIDLHALYQAGQLTLILVDHHILSKLTTEQMLRKDQKTIYRQGVKVAISAIYMDLEAFLQRSNLLADLHAFCQAHSYDVLVAMTIFFNTHNEPVRQLAIFCPHVALQTTICEVLERSHSPPLKLTPASSTHPNLHAYLQGNTQVSRKKLLPLLQEALSAYFDSMKIPSGQPETADVSREQVDKELDRASNSLISGLSQDEEDPPLPPTPMNSLVDECPLDQGLPKLSAEAVFEKCSQISLSQSTTASLSKK

SEQ ID NO: 743318 - protein, 221 aa, Homo sapiens; identical to SEQ ID NO: 743316

SEQ ID NO: 743319 - protein, 241 aa, Homo sapiens
QAEFYSQRPKFDVSGLTTEQMLRKDQKTIYRQGVKVAISAIYMDLEAFLQRSNLLADLHAFCQAHSYDVLVAMTIFFNTHNEPVRQLAIFCPHVALQTTICEVLERSHSPPLKLTPASSTHPNLHAYLQGNTQVSRKKLLPLLQEALSAYFDSMKIPSGQPETADVSREQVDKELDRASNSLISGLSQDEEDPPLPPTPMNSLVDECPLDQGLPKLSAEAVFEKCSQISLSQSTTASLSKK

SEQ ID NO: 743320 - protein, 199 aa, Homo sapiens
MRLTSMHYTRLANSPSSLSTIISYPRLTTEQMLRKDQKTIYRQGVKVAISAIYMDLEICEVLERSHSPPLKLTPASSTHPNLHAYLQGNTQVSRKKLLPLLQEALSAYFDSMKIPSGQPETADVSREQVDKELDRASNSLISGLSQDEEDPPLPPTPMNSLVDECPLDQGLPKLSAEAVFEKCSQISLSQSTTASLSKK

SEQ ID NO: 743321 - protein, 311 aa, Homo sapiens
MEDYLQGCRAALQESRPLHVVLGNEACDLDSTVSALALAFYLAKTTEAEEVFVPVLNIKRSELPLRGDIVFFLQKVHIPESILIFRDEIDLHALYQAGQLTLILVDHHILSKSDTALEEAVAEVLDHRPIEPKHCPPCHVSVELVGSCATLVTERILQGAPEILDRQTAALLHGTIILDCVNMDLKIGKATPKDSKYVEKLEALFPDLPKRNDIFDSLQKAKFDVSGLTTEQMLRKDQKTIYRQGVKVAISAIYMDLEAFLQRSNLLADLHAFCQAHSYDVLVAMTIFFNTHNEPVRQLAIFCPHVALQTT

SEQ ID NO: 743322 - protein, 189 aa, Homo sapiens; identical to SEQ ID NO: 743313

SEQ ID NO: 743323 - protein, 168 aa, Homo sapiens
MLRKDQKTIYRQGVKVAISAIYMDLEICEVLERSHSPPLKLTPASSTHPNLHAYLQGNTQVSRKKLLPLLQEALSAYFDSMKIPSGQPETADVSREQVDKELDRASNSLISGLSQDEEDPPLPPTPMNSLVDECPLDQGLPKLSAEAVFEKCSQISLSQSTTASLSKK

SEQ ID NO: 743324 - protein, 222 aa, Homo sapiens
  misc_feature (28)..(28): Xaa can be any naturally occurring amino acid
MLRKDQKTIYRQGVKVAISAIYMDLEAXFLQRSNLLADLHAFCQAHSYDVLVAMTIFFNTHNEPVRQLAIFCPHVALQTTICEVLERSHSPPLKLTPASSTHPNLHAYLQGNTQVSRKKLLPLLQEALSAYFDSMKIPSGQPETADVSREQVDKELDRASNSLISGLSQDEEDPPLPPTPMNSLVDECPLDQGLPKLSAEAVFEKCSQISLSQSTTASLSKK

SEQ ID NO: 743325 - protein, 453 aa, Homo sapiens; identical to SEQ ID NO: 743310

SEQ ID NO: 743326 - protein, 453 aa, Homo sapiens; identical to SEQ ID NO: 743310

SEQ ID NO: 743327 - protein, 453 aa, Homo sapiens; identical to SEQ ID NO: 743310

SEQ ID NO: 743328 - protein, 415 aa, Homo sapiens
  misc_feature (260)..(260): Xaa can be any naturally occurring amino acid
MEDYLQGCRAALQESRPLHVVLGNEACDLDSTVSALALAFYLAKTTEAEEVFVPVLNIKRSELPLRGDIVFFLQKVHIPESILIFRDEIDLHALYQAGQLTLILVDHHILSKSDTALEEAVAEVLDHRPIEPKHCPPCHVSVELVGSCATLVTERILQGAPEILDRQTAALLHGTIILDCVNMDLKIGKATPKDSKYVEKLEALFPDLPKRNDIFDSLQKAKFDVSGLTTEQMLRKDQKTIYRQGVKVAISAIYMDLEAXFLQRSNLLADLHAFCQAHSYDVLVAMTIFFNTHNEPVRQLAIFCPHVALQTTICEVLERSHSPPLKLTPASSTHPNLHAYLQGNTQVSRKKLLPLLQEALSAYFLENQENTQKGLNDLIGTLPKRQQNWNERPGSVSCLSRPINFLSISFFPCSH

SEQ ID NO: 743329 - protein, 369 aa, Homo sapiens
MEDYLQGCRAALQESRPLHVVLGNEACDLDSTVSALALAFYLAKTTEAEEVFVPVLNIKRSELPLRGDIVFFLQKVHIPESILIFRDEIDLHALYQAGQLTLILVDHHILSKSDTALEEAVAEVLDHRPIEPKHCPPCHVSVELVGSCATLVTERILQGAPEILDRQTAALLHGTIILDCVNMDLKIGKATPKDSKYVEKLEALFPDLPKRNDIFDSLQKAKFDVSGLTTEQMLRKDQKTIYRQGVKVAISAIYMDLEICEVLERSHSPPLKLTPASSTHPNLHAYLQGNTQVSRKKLLPLLQEALSAYFDSMKIPSGQPETADVSREQVDKELDRASNSLISGLSQDEEDPPPKGRIRHEDHSDVGAA

SEQ ID NO: 743330 - protein, 163 aa, Homo sapiens
  misc_feature (163)..(163): Xaa can be any naturally occurring amino acid
MAFMKKYLLPILGLFMAYYYYSANEEFRPEMLQGKKVIVTGASKGIGREMAYHLAKMGAHVVVTASSAHYIAGTMEDMTFAEQFVAQAGKLMGGLDMLILNHITNTSLNLFHDDIHHVRKSMEVNFLSYVVLTVAALPMLKQSNGSMCALLLECYHVVHLSSX

SEQ ID NO: 743331 - protein, 292 aa, Homo sapiens
MAFMKKYLLPILGLFMAYYYYSANEEFRPEMLQGKKVIVTGASKGIGREMAYHLAKMGAHVVVTARSKETLQKVVSHCLELGAASAHYIAGTMEDMTFAEQFVAQAGKLMGGLDMLILNHITNTSLNLFHDDIHHVRKSMEVNFLSYVVLTVAALPMLKQSNGSIVVVSSLAGKVAYPMVAAYSASKFALDGFFSSIRKEYSVSRVNVSITLCVLGLIDTETAMKAVSGIVHMQAAPKEECALEIIKGGALRQEEVYYDSSLWTTLLIRNPCRKILEFLYSTSYNMDRFINK

SEQ ID NO: 743332 - protein, 262 aa, Homo sapiens
MLQGKKVIVTGASKGIGREMAYHLAKMGAHVVVTARSKETLQKVVSHCLELGAASAHYIAGTMEDMTFAEQFVAQAGKLMGGLDMLILNHITNTSLNLFHDDIHHVRKSMEVNFLSYVVLTVAALPMLKQSNGSIVVVSSLAGKVAYPMVAAYSASKFALDGFFSSIRKEYSVSRVNVSITLCVLGLIDTETAMKAVSGIVHMQAAPKEECALEIIKGGALRQEEVYYDSSLWTTLLIRNPCRKILEFLYSTSYNMDRFINK

SEQ ID NO: 743333 - protein, 292 aa, Homo sapiens; identical to SEQ ID NO: 743331

SEQ ID NO: 743334 - protein, 292 aa, Homo sapiens; identical to SEQ ID NO: 743331

SEQ ID NO: 743335 - protein, 295 aa, Homo sapiens
MAFMKKYLLPILGLFMAYYYYSANEEFRPEMLQGKKVIVTGASKGIGREMAYHLAKMGAHVVVTARSKETLQKVVSHCLELGAASAHYIAGTMEDMTFAEQFVAQAGKLMGGLDMLILNHITNTSLNLFHDDIHHVRKSMEVNFLSYVVLTVAALPMLKQSNGSIVVVSSLAGKVAYPMVAAYSASKFALDGFFSSIRKEYSVSRVNVSITLCVLGLIDTETAMKAVSGIVHMQAAPKEECALEIIKGGALRQEEVYYDSSLWTTLLIRNPCRKILEFLYSTSYNMEGLFCLMFI

SEQ ID NO: 743336 - protein, 274 aa, Homo sapiens
MAFMKKYLLPILGLFMAYYYYSANEEFRPEMLQGKKVIVTGASKGIGREMAYHLAKMGAHVVVTARSKETLQKVVSHCLELGAASAHYIAGTMEDMTFAEQFVAQAGKLMGGLDMLILNHITNTSLNLFHDDIHHVRPMLKQSNGSIVVVSSLAGKVAYPMVAAYSASKFALDGFFSSIRKEYSVSRVNVSITLCVLGLIDTETAMKAVSGIVHMQAAPKEECALEIIKGGALRQEEVYYDSSLWTTLLIRNPCRKILEFLYSTSYNMDRFINK

SEQ ID NO: 743337 - protein, 274 aa, Homo sapiens
MAFMKKYLLPILGLFMAYYYYSANEEFRPEMLQGKKVIVTGASKGIGREMAYHLAKMGAHVVVTASSAHYIAGTMEDMTFAEQFVAQAGKLMGGLDMLILNHITNTSLNLFHDDIHHVRKSMEVNFLSYVVLTVAALPMLKQSNGSIVVVSSLAGKVAYPMVAAYSASKFALDGFFSSIRKEYSVSRVNVSITLCVLGLIDTETAMKAVSGIVHMQAAPKEECALEIIKGGALRQEEVYYDSSLWTTLLIRNPCRKILEFLYSTSYNMDRFINK

SEQ ID NO: 743338 - protein, 244 aa, Homo sapiens
MAFMKKYLLPILGLFMAYYYYSANEEFRPEMLQGKKVIVTGASKGIGREMAYHLAKMGAHVVVTARSKETLQKVVSHCLELGAASAHYIAGTMEDMTFAEQFVAQAGKLMGGLDMLILNHITNTSLNLFHDDIHHVRKSMEVNFLSYVVLTVAALPMLKQSNGSIVVVSSLAETAMKAVSGIVHMQAAPKEECALEIIKGGALRQEEVYYDSSLWTTLLIRNPCRKILEFLYSTSYNMDRFINK

SEQ ID NO: 743339 - protein, 260 aa, Homo sapiens
YHNEVDIVGNIQATSPCLHPTDLQKVAEMIREEGYDSVFSVVRRHQFRWSEIQKGVREVTEPLNLNPAKRPRRQDWDGELYENGSFYFAKRHLIEMGYLQGGKMAYYEMRAEHSVDIDVDIDWPIAEQRVLRYGYFGKEKLKEIKLLVCNIDGCLTNGHIYVSGDQKEIISYDVKDAIGISLLKKSGIEVRLISERACSKQTLSSLKLDCKMEVSVSDKLAVVDEWRKEMGLCWKEVAYLGNEVSDEECLKRGGPKWRSC

SEQ ID NO: 743340 - protein, 84 aa, Homo sapiens
DSPAHLSCHHGFLRGVASRGWRDVGMSHWLHVKGPSCPPHCHTDASRLGLGSRSIPAHHTATQVVLGRGWACAPCCCRHCAVSM

SEQ ID NO: 743341 - protein, 79 aa, Homo sapiens
MILAWRLPLIYPHVSLFIPQLSGQTNIHLSKNFFLTNRARERSDTFINLREVLNRFKLPPGEYILVPSTFEPNKDGDFC

SEQ ID NO: 743342 - protein, 192 aa, Homo sapiens
MKSFLPVHTIVLIRENVCKCGYAQSQHMEGTQINQSEKWNYKKHTKEFPTDAFGDIQFETLGKKGKYIRLSCDTDAEILYELLTQHWHLKTPNLVISVTGGAKNFALKPRMRKIFSRLIYIAQSKGAWILTGGTHYGLMKYIGEVVRDNTISRSSEENIVAIGIAAWGMVSNRDTLIRNCDAEVPVGQEEVC

SEQ ID NO: 743343 - protein, 85 aa, Homo sapiens
SKHYWGIGWTQTLNNSSFNPHNHPLRYVGTILIIPNLQMSKLRHREVQKLAQAQTDLEQGQLGFKVCGLSHLASSAASPFQNVRT

SEQ ID NO: 743344 - protein, 69 aa, Homo sapiens
DTLCLLQCQVNIAEICLVSPCTPGCRGAPAASSGAGGGLTAILGSLPAVSLLSSVHWEEGVRCGCVEPS

SEQ ID NO: 743345 - protein, 127 aa, Homo sapiens
MPEDRMSLRQELGPALMPASANAKSTNAPLARRVSVGAFPGESGCLGRVRGGNRELSRQEQDSDKLPHIPFLTAAPATLWAVPSVPKAAFAKGHQISAAAVPDAGTALLTDVERVTYINLEFFSMQP

SEQ ID NO: 743346 - protein, 70 aa, Homo sapiens
VKANKHQIRQAVKKLYDSDVAKVTTLICPDKEKAYVRLAPDYDAFDVVTKLGSPKLSQLANSKYMCIFSA

SEQ ID NO: 743347 - protein, 144 aa, Homo sapiens
RSPGNGCGLAHVMAPEENAGTELLLQGFERRFLAVRTLRSFPWQTVRHPVCVKHPPSVKYAWFFLSELIKKSSGGSVTLSKSTAIISHGTTGLVTWDAALYLAEWAIENPAALINRRAVLPRSHRVAGRGPAEAGCLPGAQAGS

SEQ ID NO: 743348 - protein, 138 aa, Homo sapiens
RSPGNGCGLAHVMAPEENAGTELLLQGFERRFLAVRTLRSFPWQSLEAKLRDSSYSELLRDILQKSSGGSVTLSKSTAIISHGTTGLVTWDAALYLAEWAIENPAALINRRAVLPRSHRVAGRGPAEAGCLPGAQAGS

SEQ ID NO: 743349 - protein, 102 aa, Homo sapiens
MPPSTLQNGPSRTRQPSLTDVLYCPEAIVSLVGVLQRLAACREHKRAPEVYVAFTVRNPETCQLFTTELGRDGIRWEAEAHHDQKLFPYGEHLEMAMLNLTL

SEQ ID NO: 743350 - protein, 107 aa, Homo sapiens
RSPGNGCGLAHVMAPEENAGTELLLQGFERRFLASSGGSVTLSKSTAIISHGTTGLVTWDAALYLAEWAIENPAALINRRAVLPRSHRVAGRGPAEAGCLPGAQAGS

SEQ ID NO: 743351 - protein, 128 aa, Homo sapiens [sequence omitted]

SEQ ID NO: 743352 - protein, 103 aa, Homo sapiens
PKQVSIKQSWGTVGGHRADFQEVTSGVLAASNPEMRKVSPKGHLEVIPRSRWRWPEILWSSVQMSLHFGLLTFHNTNNFVLVEIVFFCQNPTFILNSANLRET

SEQ ID NO: 743353 - protein, 115 aa, Homo sapiens
KRSCTVRNSRIAQKGKNYQNGDVFGDEYRIKPVEEVKYMKNGAEEEQKIAARNQENLEKSASSNVRLKTNKEVPGLVHQPRANMHISESQQEFFRMLDEKIEKGRDYCSEEEDIT

SEQ ID NO: 743354 - protein, 150 aa, Homo sapiens
ERGAPLPRSLLASSRSLPAHSRGDVPCRGRRGRCFFHTLVGSCAPRSVTGELAARRRLPHACTRARLRGFGFLLQAAGRRGSPGHTVGRRRKKRRREEEKRRGGQGRGAGASKDFEATEGNPTDQAGFSEDRDFGYSVGLNPAEEEAVTS

SEQ ID NO: 743355 - protein, 863 aa, Homo sapiens
  misc_feature (520)..(520): Xaa can be any naturally occurring amino acid
MKRILQCTCWCTLLVVISVGLRSWKEEGRVSGLVSGGRKMMRNELRALSREGDRLAVSGVKLEIQLPSGQWVGKTVNEIYSWLTHALCPLSCRVVKVQQCVHSFLLVGRDSGSWSTALIIEDVFVIGRDTLKKAFTSAMLPSPRLAENTEWCCGLFRDKEGIKSRDEKTGSALRNCSSHAHRSLLEDRSLSVHSAHHLSLGWDDSTCKDGPRRSAGSSVFVLAPSSPHCNVRKHLCVRAHLGIQSGHAHNPTAPRSRSRDDAAPFLVPCDVILLCYLLITLSCYNFILFPASSLFFCYGQDSSISLLKNRDDTSYKLYLIACEAGWHVDYKSCFDTGQEFKIVLSLLVIEKKALLNMLSFKGRNIFKFLSKKILSWNLRLRDSDTFFMKGKIIGIKVLSFLPPLKKKDIRLHTIILHKICLPHFPAGRHSQSFDVFVPLRDWTFSCLKPQPKKIIRHDWWGGNVYLGANKKVARSRNFGLMVSWVDDLDSSVPVRGWVRQSAVTLTCACNKPFGISGTRXYELPFANEWMYFSKGGIVSLTLAVTFLYVSRKGSKNYGKDEAYEVNTSGTNLRTHKLCHVFQETLYLIWNLILGEEEKGANICHLYSLCARYCARHFIIVCVILMISVKLIYYPRVLNNEILSVECIYPTEMPMLKEGKMSFKYFSNSFYYDYALRNTVKTTPGGICLPESLSGFSPAWFPHGECFIWPPLSELHTHQGRPLANSRTSVPRGKGFGNLGTRFSPWNPSSIWKRNLVFLQLDTRCNQNRLSSAVISFLGSQVLLFITNCIFLRLKVLTFMGVWDNPISKHGGKAMPGPLTCIEILSCGLGFDVIFFIFGLGICIFQVHLSTETRCKSLSRPYMF

SEQ ID NO: 743356 - protein, 824 aa, Homo sapiens
  misc_feature (481)..(481): Xaa can be any naturally occurring amino acid
MMRNELRALSREGDRLAVSGVKLEIQLPSGQWVGKTVNEIYSWLTHALCPLSCRVVKVQQCVHSFLLVGRDSGSWSTALIIEDVFVIGRDTLKKAFTSAMLPSPRLAENTEWCCGLFRDKEGIKSRDEKTGSALRNCSSHAHRSLLEDRSLSVHSAHHLSLGWDDQLSKDGPRRSAGSSVFVLAPSSPHCNVRKHLCVRAHLGIQSGHAHNPTAPRSRSRDDAAPFLVPCDVILLCYLLITLSCYNFILFPASSLFFCYGQDSSISLLKNRDDTSYKLYLIACEAGWHVDYKSCFDTGQEFKIVLSLLVIEKKALLNMLSFKGRNIFKFLSKKILSWNLRLRDSDTFFMKGKIIGIKVLSFLPPLKKKDIRLHTIILHKICLPHFPAGRHSQSFDVFVPLRDWTFSCLKPQPKKIIRHDWWGGNVYLGANKKVARSRNFGLMVSWVDDLDSSVPVRGWVRQSAVTLTCACNKPFGISGTRXYELPFANEWMYFSKGGIVSLTLAVTFLYVSRKGSKNYGKDEAYEMNTSGTNLRTHKLCHVFQETLYLIWNLILGEEEKGANICHLYSLCARYCARHFIIVCVILMISVKLIYYPRVLNNEILSVECIYPTYMPMLKEGKMSFKYFSNSFYYDYALRNTVKTTPGGICLPESLSGFSPAWFPHGECFIWPPLSELHTHQGRPLANSRTSVPWGKGFGNLGTRFSPWNPSSIWKRNLVFLQLDTRCNQNRLSSAVISSWVPKSCCFITNCIFLRLKVLTFMGVWDNPISKHGGKAMPGPLTCIEILSCGLGFDVIFFIFGLGICIFQVHLSTETRCKSLSRPYMF

SEQ ID NO: 743357 - protein, 813 aa, Homo sapiens
  misc_feature (470)..(470): Xaa can be any naturally occurring amino acid
MAGRVRGEIGNASCLVASGWGKTVNEIYSWLTHALCPLSCRVVKVQQCVHSFLLVGRDSGSWSTALIIEDVFVIGRDTLKKAFTSAMLPSPRLAENTEWCCGLFRDKEGIKSRDEKTGSALRNCSSHAHRSLLEDRSLSVHSAQSSEPGLEMTQLSKDGPRRSAGSSVFVLAPSSPHCNVRKHLCVRAHLGIQSGHAHNPTAPRSRSRDDAAPFLVPCDVILLCYLLITLSCYNFILFPASSLFFCYGQDSSISLLKNRDDTSYKLYLIACEAGWHVDYKSCFDTGQEFKIVLSLLVIEKKHCYNMLSFKGRNIFKFLIQENTEWNLRLRDSDTFFMKGKIIGIKVLSFLPPLKKKDIRLHTIILHKICLPHFPAGRHSQSFDVFVPLRDWTFSCLKPQPKKIIRHDVVGRECVFRGIIKRWLEAGTLASWCHGWMPGLQCACEGLGYGSRLSHSHVPAINLLEFHERGXDELPFANEWMYFSKGGIVSLTLAVTFLYVSRKGSKNYGKDEAYEMNTSGTNLRTHKLCHVFQETLYLIWNLILGEEEKGANICHLYSLCARYCARHFIIVLCHLMISVKLIYYPRVLNNEILSVECIYPTEMPMLKEGKMSFKYFSNSFYYDYALRNTVKTTPGGICLPESLSGFSPAWFPHGECFIWPPLSELHTHQGRPLANSRTSVPWGKGFGNLGTRFSPWNPSSIWKRNLVFLQLDTRCNQNRLSSAVISFLVPKSCCFITNCIFLRLKVLTFMGVWDNPISKHGGKAMPGPLTCIEILSCGLGFDVIFFIFGLGICIFQVHLSTETRCKSLSRPYMF

SEQ ID NO: 743358 - protein, 121 aa, Homo sapiens
MGCASAKHVATVQNEEEAQKGKNYQNGDVFGDEYRIKPVEEVKYMKNGAEEEQKIAARNQENLEKSASSNVRLKTNKEVPGLVHQPRANMHISESQQEFFRMLDEKIEKGRDYCSEEEDIT

SEQ ID NO: 743359 - protein, 121 aa, Homo sapiens; identical to SEQ ID NO: 743358

SEQ ID NO: 743360 - protein, 811 aa, Homo sapiens
  misc_feature (468)..(468): Xaa can be any naturally occurring amino acid
MAGRVRGEIGNASCLVASGWGKTVNEIYSWLTHALCPLSCRVVKVQQCVHSFLLVGRDSGSWSTALIIEDVFVIGRDTLKKAFTSAMLPSPRLAENTEWCCGLFRDKEGIKSRDEKTGSALRNCSSHAHRSLLEDRSLSVHSAHHLSLGWDDQLSKDGPRRSAGSSVFVLAPSSPHCNVRKHLCVRAHLGIQSGHAHNPTAPRSRSRDDAAPFLVPCDVILLCYLLITLSCYNFILFPASSLFFCYGQDSSISLLKNRDDTSYKLYLIACEAGWHVDYKSCFDTGQEFKIVLSLLVIEKKALLNMLSFKGRNIFKFLSKKILSWNLRLRDSDTFFMKGKIIGIKVLSFLPPLKKKDIRLHTIILHKICLPHFPAGRHSQSFDVFVPLRDWTFSCLKPQPKKIIRHDWWGGNVYLGANKKVARSRNFGLMVSWVDDLDSSVPVRGWVRQSAVTLTCACNKPFGISGTRXYELPFANEWMYFSKGGIVSLTLAVTFLYVSRKGSKNYGKDEAYEMNTSGTNLRTHKLCHVFQETLYLIWNLILGEEEKGANICHLYSLCARYCARHFIIVCVILMISVKLIYYPRVLNNEILSVECIYPTYMPMLKEGKMSFKYFSNSFYYDYALRNTVKTTPGGICLPESLSGFSPAWFPHGECFIWPPLSELHTHQGRPLANSRTSVPWGKGFGNLGTRFSPWNPSSIWKRNLVFLQLDTRCNQNRLSSAVISSWVPKSCCFITNCIFLRLKVLTFMGVWDNPISKHGGKAMPGPLTCIEILSCGLGFDVIFFIFGLGICIFQVHLSTETRCKSLSRPYMF

SEQ ID NO: 743361 - protein, 121 aa, Homo sapiens; identical to SEQ ID NO: 743358

SEQ ID NO: 743362 - protein, 95 aa, Homo sapiens
AHASGEFLRHLSNPSSMQVLSKDDCVCFQVASVKAALGTIIIEEGTNTSNKRTFVSFKTKEKETKTSPNFNDLVGFFRKRSFNATSSLRRLRLAR

SEQ ID NO: 743363 - protein, 295 aa, Homo sapiens
MGSPEQNHYLAQLFGLYGENGTLTAGGLARLLHSLGLGRVQGLRLGQHGPLTGRAASPAADNSTHRPQNPELSVDVWAGMPLGPSGWGDLEESKAPHLPRGPAPSGLDLLHRLLLLDHSLADHLNEDCLNGSQLLVNFGLSPAAPLTPRQFALLCPALLYQIDSRVCIGAPAPAPPGDLLSALLQSALAVLLLSLPSPLSLLLLRLLGPRLLRPLLGFLGGLAVGTLCGDALLHLLPHAQEGRHAGPGGLPEKDLGPGLSVLGGLFLLFVLENMLGLLRHRGLRPVSDTLFSSFC

SEQ ID NO: 743364 - protein, 324 aa, Homo sapiens
MGSPVSHLLAGFCVWVVLGWVGGSVPNLGPAEQEQNHYLAQLFGLYGENGTLTAGGLARLLHSLGLGRVQGLRLGQHGPLTGRAASPAADNSTHRPQNPELSVDVWAGMPLGPSGWGDLEESKAPHLPRGPAPSGLDLLHRLLLLDHSLADHLNEDCLNGSQLLVNFGLSPAAPLTPRQFALLCPALLYQIDSRVCIGAPAPAPPGDLLSALLQSALAVLLLSLPSPLSLLLLRLLGPRLLRPLLGFLGGLAVGTLCGDALLHLLPHAQEGRHAGPGGLPEKDLGPGLSVLGGLFLLFVLENMLGLLRHRGLRPVSDTLFSSFC

SEQ ID NO: 743365 - protein, 325 aa, Homo sapiens
MMGSPVSHLLAGFCVWVVLGWVGGSVPNLGPAEQEQNHYLAQLFGLYGENGTLTAGGLARLLHSLGLGRVQGLRLGQHGPLTGRAASPAADNSTHRPQNPELSVDVWAGMPLGPSGWGDLEESKAPHLPRGPAPSGLDLLHRLLLLDHSLADHLNEDCLNGSQLLVNFGLSPAAPLTPRQFALLCPALLYQIDSRVCIGAPAPAPPGDLLSALLQSALAVLLLSLPSPLSLLLLRLLGPRLLRPLLGFLGGLAVGTLCGDALLHLLPHAQEGRHAGPGGLPEKDLGPGLSVLGGLFLLFVLENMLGLLRHRGLRPVSDTLFSSFC

SEQ ID NO: 743366 - protein, 324 aa, Homo sapiens; identical to SEQ ID NO: 743364

SEQ ID NO: 743367 - protein, 361 aa, Homo sapiens
ISLLLLACICYGDQCSRWEERQYHPNMIRNHHHPSPMMGSPVSHLLAGFCVWVVLGWVGGSVPNLGPAEQEQNHYLAQLFGLYGENGTLTAGGLARLLHSLGLGRVQGLRLGQHGPLTGRAASPAADNSTHRPQNPELSVDVWAGMPLGPSGWGDLEESKAPHLPRGPAPSGLDLLHRLLLLDHSLADHLNEDCLNGSQLLVNFGLSPAAPLTPRQFALLCPALLYQIDSRVCIGAPAPAPPGDLLSALLQSALAVLLLSLPSPLSLLLLRLLGPRLLRPLLGFLGGLAVGTLCGDALLHLLPHAQEGRHAGPGGLPEKDLGPGLSVLGGLFLLFVLENMLGLLRHRGLRPVSDTLFSSFC

SEQ ID NO: 743368 - protein, 252 aa, Homo sapiens
MDIPLDLSSSAGSGKRRRRGNLPKESVQILRDWLYEHRYNAYPSEQEKALLSQQTHLSTLQVCNWFINARRRLLPDMLRKDGKDPNQFTISRRGAKISETSSVESVMGIKNFMPALEETPFHSCTAGPNPTLGRPLSPKPSSPGSVLARPSVICHTTVTALKDVPFSLCQSVGVGQNTDIQQIAAKNFTDTSLMYPEDTCKSGPSTNTQSGLFNTPPPTPPDLNQDFSGFQLLVDVALKRAAEMELQAKLTA

SEQ ID NO: 743369 - protein, 252 aa, Homo sapiens; identical to SEQ ID NO: 743368

SEQ ID NO: 743370 - protein, 252 aa, Homo sapiens; identical to SEQ ID NO: 743368

SEQ ID NO: 743371 - protein, 252 aa, Homo sapiens; identical to SEQ ID NO: 743368

SEQ ID NO: 743372 - protein, 167 aa, Homo sapiens
AARAARAARGSLSRAAPVTEMASSLKIWGTLLALLCILCTLLVQSKEVSWREFMKQHYLSPSREFREYKCDVLMRENEALKDKSSHMFIYISWYKIEHICTSDNWMDRFRNAYVWVQNPLKVLKCHQENSKNSYTESRSFNYIEFHCSMDGYVDSIEDLKMVEPIGN

SEQ ID NO: 743373 - protein, 81 aa, Homo sapiens
DCLVNEPAVFIEHLLCAECWGPWEAECWRNGKATTNDKQQQTLQAGWASPVWGLMNRFFSLTIGFAGFVGFVGKEPFVQNW

SEQ ID NO: 743374 - protein, 235 aa, Homo sapiens
MSCRSGRGMEALSRAGQEMSLAALKQHDPYITSIADLTGQVALYTFCPKANQWEKTDIEGTLFVYRRSASPYHGFTIVNRLNMHNLVEPVNKDLEFQLHEPFLLYRNASLSIYSIWFYDKNDCHRIAKLMADVVEEETRRSQQAARDKQSPSQANGCSDHRPIDILEMLSRAKDEYERNQMGDSNISSPGLQPSTQLSNLGSTETLEEMPSGSQDKSAPIWTQASGGKAWDPLES

SEQ ID NO: 743375 - protein, 244 aa, Homo sapiens
MEALSRAGQEMSLAALKQHDPYITSIADLTGQVALYTFCPKANQWEKTDIEGTLFVYRRSASPYHGFTIVNRLNMHNLVEPVNKDLEFQLHEPFLLYRNASFEKTRGSELFRNLLEIRKVSIYSIWFYDKNDCHRIAKLMADVVEEETRRSQQAARDKQSPSQANGCSDHRPIDILEMLSRAKDEYERNQMGDSNISSPGLQPSTQLSNLGSTETLEEMPSGSQDKSAPSEPACGERIGTLAGT

SEQ ID NO: 743376 - protein, 582 aa, Homo sapiens
MEALSRAGQEMSLAALKQHDPYITSIADLTGQVALYTFCPKANQWEKTDIEGTLFVYRRSASPYHGFTIVNRLNMHNLVEPVNKDLEFQLHEPFLLYRNASLSIYSIWFYDKNDCHRIAKLMADVVEEETRRSQQAARDKQSPSQANGCSDHRPIDILEMLSRAKDEYERNQMGDSNISSPGLQPSTQLSNLGSTETLEEMPSGSQDKSAPSGHKHLTVEELFGTSLPKEQPAVVGLDSEEMERLPGDASQKEPNSFLPFPFEQLGGAPQSETLGVPSAAHHSVQPEITTPVLITPASITQSNEKHAPTYTIPLSPVLSPTLPAEAPTAQVPPSLPRNSTMMQAVKTTPRQRSPLLNQPVPELSHASLIANQSPFRAPLNVTNTAGTSLPSVDLLQKLRLTPQHDQIQTQPLGKGAMVASFSPAAGQLATPESFIEPPSKTAAARVAASASLSNMVLAPLQSMQQNQDPEVFVQPKVLSSAIPVAGAPLVTATTTAVSSVLLAPSVFQQTVTRSSDLERKASSPSPLTIGTPESQRKPSIILSKSQLQDTLIHLIKNDSSFLSTLHEVYLQVLTKNKDNHNL

SEQ ID NO: 743377 - protein, 544 aa, Homo sapiens
MEALSRAGQEMSLAALKQHDPYITSIADLTGQVALYTFCPKANQWEKTDIEGTLFVYRRSASPYHGFTIVNRLNMHNLVEPVNKDLEFQLHEPFLLYRNASLSIYSIWFYDKNDCHRIAKLMADVVEEETRRSQQAARDKQSPSQANGCSDHRPIDILEMLSRAKDEYERSAPSGHKHLTVEELFGTSLPKEQPAVVGLDSEEMERLPGDASQKEPNSFLPFPFEQLGGAPQSETLGVPSAAHHSVQPEITTPVLITPASITQSNEKHAPTYTIPLSPVLSPTLPAEAPTAQVPPSLPRNSTMMQAVKTTPRQRSPLLNQPVPELSHASLIANQSPFRAPLNVTNTAGTSLPSVDLLQKLRLTPQHDQIQTQPLGKGAMVASFSPAAGQLATPESFIEPPSKTAAARVAASASLSNMVLAPLQSMQQNQDPEVFVQPKVLSSAIPVAGAPLVTATTTAVSSVLLAPSVFQQTVTRSSDLERKASSPSPLTIGTPESQRKPSIILSKSQLQDTLIHLIKNDSSFLSTLHEVYLQVLTKNKDNHNL

SEQ ID NO: 743378 - protein, 569 aa, Homo sapiens
MEALSRAGQEMSLAALKQHDPYITSIADLTGQEKTDIEGTLFVYRRSASPYHGFTIVNRLNMHNLVEPVNKDLEFQLHEPFLLYRNASLSIYSIWFYDKNDCHRIAKLMADVVEEETRRSQQAARDKQSPSQANGCSDHRPIDILEMLSRAKDEYERNQMGDSNISSPGLQPSTQLSNLGSTETLEEMPSGSQDKSAPSGHKHLTVEELFGTSLPKEQPAVVGLDSEEMERLPGDASQKEPNSFLPFPFEQLGGAPQSETLGVPSAAHHSVQPEITTPVLITPASITQSNEKHAPTYTIPLSPVLSPTLPAEAPTAQVPPSLPRNSTMMQAVKTTPRQRSPLLNQPVPELSHASLIANQSPFRAPLNVTNTAGTSLPSVDLLQKLRLTPQHDQIQTQPLGKGAMVASFSPAAGQLATPESFIEPPSKTAAARVAASASLSNMVLAPLQSMQQNQDPEVFVQPKVLSSAIPVAGAPLVTATTTAVSSVLLAPSVFQQTVTRSSDLERKASSPSPLTIGTPESQRKPSIILSKSQLQDTLIHLIKNDSSFLSTLHEVYLQVLTKNKDNHNL

SEQ ID NO: 743379 - protein, 461 aa, Homo sapiens
MADVVEEETRRSQQAARDKQSPSQANGCSDHRPIDILEMLSRAKDEYERNQMGDSNISSPGLQPSTQLSNLGSTETLEEMPSGSQDKSAPSGHKHLTVEELFGTSLPKEQPAVVGLDSEEMERLPGDASQKEPNSFLPFPFEQLGGAPQSETLGVPSAAHHSVQPEITTPVLITPASITQSNEKHAPTYTIPLSPVLSPTLPAEAPTAQVPPSLPRNSTMMQAVKTTPRQRSPLLNQPVPELSHASLIANQSPFRAPLNVTNTAGTSLPSVDLLQKLRLTPQHDQIQTQPLGKGAMVASFSPAAGQLATPESFIEPPSKTAAARVAASASLSNMVLAPLQSMQQNQDPEVFVQPKVLSSAIPVAGAPLVTATTTAVSSVLLAPSVFQQTVTRSSDLERKASSPSPLTIGTPESQRKPSIILSKSQLQDTLIHLIKNDSSFLSTLHEVYLQVLTKNKDNHNL

SEQ ID NO: 743380 - protein, 423 aa, Homo sapiens
MADVVEEETRRSQQAARDKQSPSQANGCSDHRPIDILEMLSRAKDEYERSAPSGHKHLTVEELFGTSLPKEQPAVVGLDSEEMERLPGDASQKEPNSFLPFPFEQLGGAPQSETLGVPSAAHHSVQPEITTPVLITPASITQSNEKHAPTYTIPLSPVLSPTLPAEAPTAQVPPSLPRNSTMMQAVKTTPRQRSPLLNQPVPELSHASLIANQSPFRAPLNVTNTAGTSLPSVDLLQKLRLTPQHDQIQTQPLGKGAMVASFSPAAGQLATPESFIEPPSKTAAARVAASASLSNMVLAPLQSMQQNQDPEVFVQPKVLSSAIPVAGAPLVTATTTAVSSVLLAPSVFQQTVTRSSDLERKASSPSPLTIGTPESQRKPSIILSKSQLQDTLIHLIKNDSSFLSTLHEVYLQVLTKNKDNHNL

SEQ ID NO: 743381 - protein, 227 aa, Homo sapiens
MEALSRAGQEMSLAALKQHDPYITSIADLTGQVALYTFCPKANQWEKTDIEGTLFVYRRSASPYHGFTIVNRLNMHNLVEPVNKDLEFQLHEPFLLYRNASLSIYSIWFYDKNDCHRIAKLMADVVEEETRRSQQAARDKQSPSQANGCSDHRPIDILEMLSRAKDEYERNQMGDSNISSPGLQPSTQLSNLGSTETLEEMPSGSQDKSAPIWTQASGGKAWDPLES

SEQ ID NO: 743382 - protein, 265 aa, Homo sapiens
MAAAVPKRMRGPAQAKLLPGSAIQALVGLARPLVLALLLVSAALSSVVSRTDSPSPTVLNSHISTPNVNALTHENQTKPSISQISTTLPPTTSTKKSGGASVVPHPSPTPLSQEEADNNEDPSIEEEDLLMLNSSPSTAKDTLDNGDYGEPDYDWTTGPRDDDESDDTLEENRGYMEIEQSVKSFKMPSSNIEEEDSHFFFHLIIFAFCIAVVYITYHNKRKIFLLVQSRKWRDGLCSKTVEYHRLDQNVNEAMPSLKITNDYIF

SEQ ID NO: 743383 - protein, 135 aa, Homo sapiens [sequence omitted]

SEQ ID NO: 743384 - protein, 247 aa, Homo sapiens
MAAAVPKRMRGPAQAKLLPGSAIQALVGLARPLVLALLLVSAALSSVVSRTDSPSPTVLNSHISTPNVNALTHENQTKPSISQISTTLPPTTSTKKSGGASVVPHPSPTPLSQEEADNNEDPSIEEEDLLMLNSSPSTAKDTLDNGDYGEPDYDWTTGPRDDDESDDTLEENRGYMEIEQSVKSFKMPSSNIEEEDSHFFFHLIIFAFCIAVVYITYHNKRKIFLLVQSRKWRDGLSSLKITNDYIF

SEQ ID NO: 743385 - protein, 135 aa, Homo sapiens [sequence omitted]

SEQ ID NO: 743386 - protein, 133 aa, Homo sapiens
PGDLEDPVVVSSNGDYGEPDYDWTTGPRDDDESDDTLEENRGYMEIEQSVKSFKMPSSNIEEEDSHFFFHLIIFAFCIAVVYITYHNKRKIFLLVQSRKWRDGLCSKTVEYHRLDQNVNEAMPSLKITNDYIF

SEQ ID NO: 743387 - protein, 265 aa, Homo sapiens; identical to SEQ ID NO: 743382

SEQ ID NO: 743388 - protein, 265 aa, Homo sapiens; identical to SEQ ID NO: 743382

SEQ ID NO: 743389 - protein, 265 aa, Homo sapiens; identical to SEQ ID NO: 743382

SEQ ID NO: 743390 - protein, 125 aa, Homo sapiens
PQFCSWMSPKLLFPLIHIKARASVPRACAMQCSAVGDTAGRETGKTGQQWALPSGGFLSRQQCRATLKSMQRGREPHSRKTQKGDRKLPPCTVAHCSSGGPMGSSYSHQGPIAQSAIFSQTIHVF

SEQ ID NO: 743391 - protein, 58 aa, Homo sapiens
MVNLLQIVRDHWVHVLVPMGFVIGCYLDRKSDERLTAFRNKSMLFKRELQPSEEVTWK

SEQ ID NO: 743392 - protein, 88 aa, Homo sapiens
VPRSQLPLARVEFPVALGLGVAVGAEAAAIMVNLLQIVRDHWVHVLVPMGFVIGCYLDRKSDERLTAFRNKSMLFKRELQPSEEVTWK

SEQ ID NO: 743393 - protein, 88 aa, Homo sapiens; identical to SEQ ID NO: 743392

SEQ ID NO: 743394 - protein, 69 aa, Homo sapiens
SASQSAGITAIMVNLLQIVRDHWVHVLVPMGFVIGCYLDRKSDERLTAFRNKSMLFKRELQPSEEVTWK

SEQ ID NO: 743395 - protein, 58 aa, Homo sapiens; identical to SEQ ID NO: 743391

SEQ ID NO: 743396 - protein, 58 aa, Homo sapiens; identical to SEQ ID NO: 743391

SEQ ID NO: 743397 - protein, 68 aa, Homo sapiens
ENMWPSTKQEAGEGWVEKKQECEKIDHRHRCPVEAPRDYPHHCPVEAPRLTQSISTTPLLCVSGGTRH

SEQ ID NO: 743398 - protein, 515 aa, Homo sapiens
MGHNGSWISPNASEPHNASGAEAAGVNRSALGEFGEAQLYRQFTTTVQVVIFIGSLLGNFMVLWSTCRTTVFKSVTNRFIKNLACSGICASLVCVPFDIILSTSPHCCWWIYTMLFCKVVKFLHKVFCSVTILSFPAIALDRYYSVLYPLERKISDAKSRELVMYIWAHAVVASVPVFAVTNVADIYATSTCTEVWSNSLGHLVYVLVYNITTVIVPVVVVFLFLILIRRALSASQKKKVIIAALRTPQNTISIPYASQREAELHATLLSMVMVFILCSVPYATLVVYQTVLNVPDTSVFLLLTAVWLPKVSLLANPVLFLTVNKSVRKCLIGTLVQLHHRYSRRNVVSTGSGMAEASLEPSIRSGSQLLEMFHIGQQQIFKPTEDEEESEAKYIGSADFQAKEIFSTCLEGEQGPQFAPSAPPLSTVDSVSQVAPAAPVEPETFPDKYSLQFGFGPFELPPQWLSETRNSKKRLLPPLGNTPEELIQTKVPKVGRVERKMSRNNKVSIFPKVDS

SEQ ID NO: 743399 - protein, 515 aa, Homo sapiens; identical to SEQ ID NO: 743398

SEQ ID NO: 743400 - protein, 577 aa, Homo sapiens
MGHNGSWISPNASEPHNASGAEAAGVNRSALGEFGEAQLYRQFTTTVQVVIFIGSLLDCTSKNLSLNNQTLRVEPGEVNSHSKGKGFPPGTTFPNGASEWAFQGAQHHIIENGTYVSFSGNFMVLWSTCRTTVFKSVTNRFIKNLACSGICASLVCVPFDIILSTSPHCCWWIYTMLFCKVVKFLHKVFCSVTILSFPAIALDRYYSVLYPLERKISDAKSRELVMYIWAHAVVASVPVFAVTNVADIYATSTCTEVWSNSLGHLVYVLVYNITTVIVPVVVVFLFLILIRRALSASQKKKVIIAALRTPQNTISIPYASQREAELHATLLSMVMVFILCSVPYATLVVYQTVLNVPDTSVFLLLTAVWLPKVSLLANPVLFLTVNKSVRKCLIGTLVQLHHRYSRRNVVSTGSGMAEASLEPSIRSGSQLLEMFHIGQQQIFKPTEDEEESEAKYIGSADFQAKEIFSTCLEGEQGPQFAPSAPPLSTVDSVSQVAPAAPVEPETFPDKYSLQFGFGPFELPPQWLSETRNSKKRLLPPLGNTPEELIQTKVPKVGRVERKMSRNNKVSIFPKVDS

SEQ ID NO: 743401 - protein, 389 aa, Homo sapiens
LEYKSEVRVLSQEYFRYYSVLYPLERKISDAKSRELVMYIWAHAVVASVPVFAVTNVADIYATSTCTEVWSNSLGHLVYVLVYNITTVIVPVVVVFLFLILIRRALSASQKKKVIIAALRTPQNTISIPYASQREAELHATLLSMVMVFILCSVPYATLVVYQTVLNVPDTSVFLLLTAVWLPKVSLLANPVLFLTVNKSVRKCLIGTLVQLHHRYSRRNVVSTGSGMAEASLEPSIRSGSQLLEMFHIGQQQIFKPTEDEEESEAKYIGSADFQAKEIFSTCLEGEQGPQFAPSAPPLSTVDSVSQVAPAAPVEPETFPDKYSLQFGFGPFELPPQWLSETRNSKKRLLPPLGNTPEELIQTKVPKVGRVERKMSRNNKVSIFPKVDS

SEQ ID NO: 743402 - protein, 583 aa, Homo sapiens
ARLRRGGPVEQRSMAGGAREVLTLQLGHFAGFVGAHWWNQQDAALGRATDSKEPPGELCPDVLYRTGRTLHGQETYTPRLILMDLKGSLSSLKEEGGLYRDKQLDAAIAWQGKLTTHKEELYPKNPYLQDFLSAEGVLSSDGVWRVKSIPNGKGSSPLPTATTPKPLIPTEASIRVWSDFLRVHLHPRSICMIQKYNHDGEAGRLEAFGQGESVLKEPKYQEELEDRLHFYVEECDYLQGFQILCDLHDGFSGVGAKAAELLQDEYSGRGIITWGLLPGPYHRGEAQRNIYRLLNTAFGLVHLTAHSSLVCPLSLGGSLGLRPEPPVSFPYLHYDATLPFHCSAILATALDTVTVPYRLCSSPVSMVHLADMLSFCGKKVVTAGAIIPFPLAPGQSLPDSLMQFGGATPWTPLSACGEPSGTRCFAQSVVLRGIDRACHTSQLTPGTPPPSALHACTTGEEILAQYLQQQQPGVMSSSHLLLTPCRVAPPYPHLFSSCSPPGMVLDGSPKGAAVESIPVFGALCSSSSLHQTLEALARDLTKLDLRRWASFMDAGVEHDDVAELLQELQSLAQCYQGGDSLVD

SEQ ID NO: 743403 - protein, 583 aa, Homo sapiens; identical to SEQ ID NO: 743402

SEQ ID NO: 743404 - protein, 80 aa, Homo sapiens
VEALARSGAGTKRNTVPQTLCSSSSLHQTLEALARDLTKLDLRRWASFMDAGVEHDDVAELLQELQSLAQCYQGGDSLVD

SEQ ID NO: 743405 - protein, 70 aa, Homo sapiens
RCRYLQDPPTLPSSRTGDEELSTTCQHSRGPRQLLKSHFGNRLLGPGDSEDLNCSTPVRPLDVVPPASHS

SEQ ID NO: 743406 - protein, 514 aa, Homo sapiens
ARLRRGGPVEQRSMAGGAREVLTLQLGHFAGFVGAHWWNQQDAALGRATDSKEPPGELCPDVLYRTGRTLHGQETYTPRLILMDLKGSLSSLKEEGGLYRDKQLDAAIAWQGKLTTHKEELYPKNPYLQDFLSAEGVLSSDGVWRVKSIPNGKGSSPLPTATTPKPLIPTEASIRVWSDFLRVHLHPRSICMIQKYNHDGEAGRLEAFGQGESVLKEPKYQEELEDRLHFYVEECDYLQGFQILCDLHDGFSGVGAKAAELLQDEYSGRGIITWGLLPGPYHRGEAQRNIYRLLNTAFGLVHLTAHSSLVCPLSLGGSLGLRPEPPVSFPYLHYDATLPFHCSAILATALDTVTVPYRLCSSPVSMVHLADMLSFCGKKVVTAGAIIPFPLAPGQSLPDSLMQFGGATPWTPLSACGEPSGTRCFAQSVVLRGIDRACHTSQLTPGTPPPSALHACTTGEEILAQYLQQQQPGVMSSSHLLLTPCRVAPPYPHLFSSCSPPGMVLDGSPKGAGM

SEQ ID NO: 743407 - protein, 532 aa, Homo sapiens
ARLRRGGPVEQRSMAGGAREVLTLQLGHFAGFVGAHWWNQQDAALGRATDSKEPPGELCPDVLYRTGRTLHGQETYTPRLILMDLKGSLSSLKEEGGLYRDKQLDAAIAWQGKLTTHKEELYPKNPYLQDFLSAEGVLSSDGVWRVKSIPNGKGSSPLPTATTPKPLIPTEASIRVWSDFLRVHLHPRSICMIQKYNHDGEAGRLEAFGQGESVLKEPKYQEELEDRLHFYVEECDYLQGFQILCDLHDGFSGVGAKAAELLQDEYSGRGIITWGLLPGPYHRGEAQRNIYRLLNTAFGLVHLTAHSSLVCPLSLGGSLGLRPEPPVSFPYLHYDATLPFHCSAILATALDTVTVPYRLCSSPVSMVHLADMLSFCGKKVVTAGAIIPFPLAPGQSLPDSLMQFGGATPWTPLSACGEPSGTRCFAQSVVLRGIDRACHTSHRLMVVLALFWQPAHPRDTSTLCPSCMYHWGRNLGSVFTTAAAWSHEFFPSAADSLQGGSSLPPPLLKLQSTGYGSGWFPQGSRYVGGEEN

SEQ ID NO: 743408 - protein, 555 aa, Homo sapiens
ARLRRGGPVEQRSMAGGAREVLTLQLGHFAGFVGAHWWNQQDAALGRATDSKEPPGELCPDVLYRTGRTLHGQETYTPRLILMDLKGSLSSLKEEGGLYRDKQLDAAIAWQGKLTTHKEELYPKNPYLQDFLSAEDCDSVKQKGGYAVWPANSRRTKQPLPLNCLEPNVDFSDPSQGVLSSDGVWRVKSIPNGKGSSPLPTATTPKPLIPTEASIRVWSDFLRVHLHPRSICMIQKYNHDGEAGRLEAFGQGESVLKEPKYQEELEDRLHFYVEECDYLQGFQILCDLHDGFSGVGAKAAELLQDEYSGRGIITWGLLPGPYHRGEAQRNIYRLLNTAFGLVHLTAHSSLVCPLSLGGSLGLRPEPPVSFPYLHYDATLPFHCSAILATALDTVTVPYRLCSSPVSMVHLADMLSFCGKKVVTAGAIIPFPLAPGQSLPDSLMQFGGATPWTPLSACGEPSGTRCFAQSVVLRGIDRACHTSQLTPGTPPPSALHACTTGEEILAQYLQQQQPGVMSSSHLLLTPCRVAPPYPHLFSSCSPPGMVLDGSPKGAGM

SEQ ID NO: 743409 - protein, 527 aa, Homo sapiens
ARLRRGGPVEQRSMAGGAREVLTLQLGHFAGFVGAHWWNQQDAALGRATDSKEPPGELCPDVLYRTGRTLHGQETYTPRLILMDLKGSLSSLKEEGGLYRDKQLDAAIAWQGKLTTHKEELYPKNPYLQDFLSAEGVLSSDGVWRVKSIPNGKGSSPLPTATTPKPLIPTEASIRVWSDFLRVHLHPRSICMIQKYNHDGEAGRLEAFGQGESVLKEPKYQEELEDRLHFYVEECDYLQGFQILCDLHDGFSGVGAKAAELLQDEYSGRGIITWGLLPGPYHRGEAQRNIYRLLNTAFGLVHLTAHSSLVCPLSLGGSLGLRPEPPVSFPYLHYDDLRPSAHLGVFLQATLPFHCSAILATALDTVTVPYRLCSSPVSMVHLADMLSFCGKKVVTAGAIIPFPLAPGQSLPDSLMQFGGATPWTPLSACGEPSGTRCFAQSVVLRGIDRACHTSQLTPGTPPPSALHACTTGEEILAQYLQQQQPGVMSSSHLLLTPCRVAPPYPHLFSSCSPPGMVLDGSPKGAGM

SEQ ID NO: 743410 - protein, 365 aa, Homo sapiens
ARLRRGGPVEQRSMAGGAREVLTLQLGHFAGFVGAHWWNQQDAALGRATDSKEPPGELCPDVLYRTGRTLHGQETYTPRLILMDLKGSLSSLKEEGGLYRDKQLDAAIAWQGKLTTHKEELYPKNPYLQDFLSAEGVLSSDGVWRVKSIPNGKGSSPLPTATTPKPLIPTEASIRVWSDFLRVHLHPRSICMIQKYNHDGEAGRLEAFGQGESVLKEPKYQEELEDRLHFYVEECDYLQGFQILCDLHDGFSGVGAKAAELLQDEYSGRGIITWGLLPGPYHRGEAQRNIYRLLNTAFGLVHLTAHSSLVCPLSLGGSLGLRPEPPVSFPYLHYDVSLGALVLTAAGYRASSCSQSAAVCYWLCS

SEQ ID NO: 743411 - protein, 571 aa, Homo sapiens
ARLRRGGPVEQRSMAGGAREVLTLQLGHFAGFVGAHWWNQQDAALGRATDSKEPPGELCPDVLYRTGRTLHGQETYTPRLILMDLKGSLSSLKEEGGLYRDKQLDAAIAWQGKLTTHKEELYPKNPYLQDFLSAEGVLSSDGVWRVKSIPNGKGSSPLPTATTPKPLIPTEASIRVWSDFLRVHLHPRSICMIQKYNHDGEAGRLEAFGQGESVLKEPKYQEELEDRLHFYVEECDYLQGFQILCDLHDGFSGVGAKAAELLQDEYSGRGIITWGLLPGPYHRGEAQRNIYRLLNTAFGLVHLTAHSSLVCPLSLGGSLGLRPEPPVSFPYLHYDATLPFHCSAILATALDTVTVPYRLCSSPVSMVHLADMLSFCGKKVVTAGAIIPFPLAPGQSLPDSLMQFGGATPWTPLSACGEPSGTRCFAQSVVLRGIDRACHTSHRLMVVLALFWQPAHPRDTSTLCPSCMYHWGRNLGSVFTTAAAWSHEFFPSAADSLQGGSSLPPPLLKLQSTGYGSGWFPQGSSSGEHPSVWGTVFLFVPAPDPGSLGQRPHQTRLAALGQLHGCWSGAR

SEQ ID NO: 743412 - protein, 409 aa, Homo sapiens
ARLRRGGPVEQRSMAGGAREVLTLQLGHFAGFVGAHWWNQQDAALGRATDSKEPPGELCPDVLYRTGRTLHGQETYTPRLILMDLKGSLSSLKEEGGLYRDKQLDAAIAWQGKLTTHKEELYPKNPYLQDFLSAEGVLSSDGVWRVKSIPNGKGSSPLPTATTPKPLIPTEASIRVWSDFLRVHLHPRSICMIQKYNHDGEAGRLEAFGQGESVLKEPKYQEELEDRLHFYVEECDYLQGFQILCDLHDGFSGVGAKAAELLQDEYSGRGIITWGLLPGPYHRGEAQRNIYRLLNTAFGLVHLTAHSSLVCPLSLGGSLGLRPEPPVSFPYLHYDATLPFHCSAILATALDTVTVPYRLCSSPVSMVHLADMLSFCGKKLPPPLLKLQSTGYGSGWFPQGSRYVGGEEN

SEQ ID NO: 743413 - protein, 323 aa, Homo sapiens [sequence omitted]

SEQ ID NO: 743414 - protein, 507 aa, Homo sapiens
TFSRPASSSLLPQDAALGRATDSKEPPGELCPDVLYRTGRTLHGQETYTPRLILMDLKGSLSSLKEEGGLYRDKQLDAAIAWQGKLTTHKEELYPKNPYLQDFLSAEVRASVLNFLTRCHNPRVSIGEGVLSSDGVWRVKSIPNGKGSSPLPTATTPKPLIPTEASIRVWSDFLRVHLHPRSICMIQKYNHDGEAGRLEAFGQGESVLKEPKYQEELEDRLHFYVEECDYLQGFQILCDLHDGFSGVGAKAAELLQDEYSGRGIITWGLLPGPYHRGEAQRNIYRLLNTAFGLVHLTAHSSLVCPLSLGGSLGLRPEPPVSFPYLHYDATLPFHCSAILATALDTVTVPYRLCSSPVSMVHLADMLSFCGKKVVTAGAIIPFPLAPGQSLPDSLMQFGGATPWTPLSACGEPSGTRCFAQSVVLRGIDRACHTSQLTPGTPPPSALHACTTGEEILAQYLQQQQPGVMSSSHLLLTPCRVAPPYPHLFSSCSPPGMVLDGSPKGAGM

SEQ ID NO: 743415 - protein, 675 aa, Homo sapiens
ARLRRGGPVEQRSMAGGAREVLTLQLGHFAGFVGAHWWNQQDAALGRATDSKEPPGELCPDVLYRTGRTLHGQETYTPRLILMDLKGSLSSLKEEGGLYRDKQLDAAIAWQGKLTTHKEELYPKNPYLQDFLSAEGVLSSDGVWRVKSIPNGKGSSPLPTATTPKPLIPTEASIRVWSDFLRVHLHPRSICMIQKYNHDGEAGRLEAFGQGESVLKEPKYQEELEDRLHFYVEECDYLQGFQILCDLHDGFSGVGAKAAELLQDEYSGRGIITWGLLPGPYHRGEAQRNIYRLLNTAFGLVHLTAHSSLVCPLSLGGSLGLRPEPPVSFPYLHYDVSLGALVADCGRLQGLLMLPVSRCLLLALFLRPELELSCDVASQITLSYAVSSLGSNIPLIRPLGLSGVNIAASTHSFPGLRPSAHLGVFLQATLPFHCSAILATALDTVTVPYRLCSSPVSMVHLADMLSFCGKKVVTAGAIIPFPLAPGQSLPDSLMQFGGATPWTPLSACGEPSGTRCFAQSVVLRGIDRACHTSQLTPGTPPPSALHACTTGEEILAQYLQQQQPGVMSSSHLLLTPCRVAPPYPHLFSSCSPPGMVLDGSPKGAAVESIPVFGALCSSSSLHQTLEALARDLTKLDLRRWASFMDAGVEHDDVAELLQELQSLAQCYQGGDSLVD

SEQ ID NO: 743416 - protein, 572 aa, Homo sapiens
ARLRRGGPVEQRSMAGGAREVLTLQLGHFAGFVGAHWWNQQDAALGRATDSKEPPGELCPDVLYRTGRTLHGQETYTPRLILMDLKGSLSSLKEEGGLYRDKQLDAAIAWQGKLTTHKEELYPKNPYLQDFLSAEGVLSSDGVWRVKSIPNGKGSSPLPTATTPKPLIPTEASIRVWSDFLRVHLHPRSICMIQKYNHDGEAGRLEAFGQGESVLKEPKYQEELEDRLHFYVEECDYLQGFQILCDLHDGFSGVGAKAAELLQDEYSGRGIITWGLLPGPYHRGEAQRNIYRLLNTAFGLVHLTAHSSLVCPLSLGGSLGLRPEPPVSFPYLHYDATLPFHCSAILATALDTVTVPYRLCSSPVSMVHLADMLSFCGKKVVTAGAIIPFPLAPGQSLPDSLMQFGGATPWTPLSACGEPSGTRCFAQSVVLRGIDRACHTSQLTPGTPPPSALHACTTGEEILAQYLQQQQPGVMSSSHLLLTPCRVAPPYPHLFSSCSPPAVESIPVFGALCSSSSLHQTLEALARDLTKLDLRRWASFMDAGVEHDDVAELLQELQSLAQCYQGGDSLVD

SEQ ID NO: 743417 - protein, 149 aa, Homo sapiens [sequence omitted]

SEQ ID NO: 743418 - protein, 111 aa, Homo sapiens
YTGSRWRHRLKMNTLLCPVSGAEGYRQSMPHKPAHPRDTSTLCPSCMYHWGRNLGSVFTTAAAWSHEFFPSAADSLQGGSSLPPPLLKLQSTGYGSGWFPQGSRYVGGEEN

SEQ ID NO: 743419 - protein, 156 aa, Homo sapiens
GGKWRGEGGGRGGRGMYPQLNIPLFTLWLPRKAFFLWSTGVLRGQYTKFVEFTIKSTKVGLPYQFGESQGRIIIHLQVSVSSPSTAVESIPVFGALCSSSSLHQTLEALARDLTKLDLRRWASFMDAGVEHDDVAELLQELQSLAQCYQGGDSLVD

SEQ ID NO: 743420 - protein, 514 aa, Homo sapiens; identical to SEQ ID NO: 743406

SEQ ID NO: 743421 - protein, 180 aa, Homo sapiens
GAAEARRPRGAAQYGGRGPGGAHTAVGTFCRFRGRALVEPAGCCAGPSDRFQGAPGRAVPRRPVSYGPDAARPGDLHAATHPHGSEGYPHLFSSCSPPGMVLDGSPKGAAVESIPVFGALCSSSSLHQTLEALARDLTKLDLRRWASFMDAGVEHDDVAELLQELQSLAQCYQGGDSLVD

SEQ ID NO: 743422 - protein, 567 aa, Homo sapiens
ARLRRGGPVEQRSMAGGAREVLTLQLGHFAGFVGAHWWNQQDAALGRATDSKEPPGELCPDVLYRTGRTLHGQETYTPRLILMDLKGSLSSLKEEGGLYRDKQLDAAIAWQGKLTTHKEELYPKNPYLQDFLSAEGVLSSDGVWRVKSIPNGKGSSPLPTATTPKPLIPTEASIRVWSDFLRVHLHPRSICMIQKYNHDGEAGRLEAFGQGESVLKEPKYQEELEDRLHFYVEECDYLQGFQILCDLHDGFSGVGAKAAELLQDEYSGRGIITWGLLPGPYHRGEAQRNIYRLLNTAFGLVHLTAHSSLVCPLSLGGSLGLRPEPPVSFPYLHYDATLPFHCSAILATALDTVTVPYRLCSSPVSMVHLADMLSFCGKKVVTAGAIIPFPLAPGQSLPDSLMQFGGATPWTPLSACGEPSGTRCFAQSVVLRGIDRACHTSQLTPGTPPPSALHACTTGEEILAQYLQQQQPGVMSSSHLLLTPCRVAPPYPHLFSSCSPPGMVLDGSPKGAGLCFLSLHSSGEHPSVWGTVFLFVPAPDPGSLGQRPHQTRLAALGQLHGCWSGAR

SEQ ID NO: 743423 - protein, 433 aa, Homo sapiens
ARLRRGGPVEQRSMAGGAREVLTLQLGHFAGFVGAHWWNQQDAALGRATDSKEPPGELCPDVLYRTGRTLHGQETYTPRLILMDLKGSLSSLKEEGGLYRDKQLDAAIAWQGKLTTHKEELYPKNPYLQDFLSAEGVLSSDGVWRVKSIPNGKGSSPLPTATTPKPLIPTEASIRVWSDFLRVHLHPRSICMIQKYNHDGEAGRLEAFGQGESVLKEPKYQEELEDRLHFYVEECDYLQGFQILCDLHDGFSGVGAKAAELLQDEYSGRGIITWGLLPGPYHRGEAQRNIYRLLNTAFGLVHLTAHSSLVCPLSLGGSLGLRPEPPVSFPYLHYDATLPFHCSAILATALDTVTVPYRLCSSPVSMVHLADMLSFCGKKVVTAGAIIPFPLAPGQSLPDSLMQFGGATPWTPLSACGEPSGFVLVLASCSPDL

SEQ ID NO: 743424 - protein, 365 aa, Homo sapiens; identical to SEQ ID NO: 743410

SEQ ID NO: 743425 - protein, 348 aa, Homo sapiens
ARLRRGGPVEQRSMAGGAREVLTLQLGHFAGFVGAHWWNQQDAALGRATDSKEPPGELCPDVLYRTGRTLHGQETYTPRLILMDLKGSLSSLKEEGGLYRDKQLDAAIAWQGKLTTHKEELYPKNPYLQDFLSAEDCDSVKQKGGYAVWPANSRRTKQPLPLNCLEPNVDFSDPSQGVLSSDGVWRVKSIPNGKGSSPLPTATTPKPLIPTEASIRVWSDFLRVHLHPRSICMIQKYNHDGEAGRLEAFGQGESVLKEPKYQEELEDRLHFYVEECDYLQGFQILCDLHDGFSGVGAKAAELLQDEYSGRGIITWGLLPGPYHRGGQRPHQTRLAALGQLHGCWSGAR

SEQ ID NO: 743426 - protein, 123 aa, Homo sapiens
RCKSWIMFTCGREAGRLEAFGQGESVLKEPKYQEELEDRLHFYVEECDYLQVVAWQCALQGGSSSHPANYLLSLTPVQGFQILCDLHDGFSGVGAKAAELLQDEYSGRGIITWGLLPGPYHRG

SEQ ID NO: 743427 - protein, 336 aa, Homo sapiens
SGRCHSTTKMAAPGSCALWSYCGRGWSRAMRGCQLLGLRSSWPGDLLSARLLSQEKRAAETHFGFETVSEEEKGGKVYQVFESVAKKYDVMNDMMSLGIHRVWKDLLLWKMHPLPGTQLLDVAGGTGDIAFRFLNYVQSQHQRKQKRQLRAQQNLSWEEIAKEYQNEEDSLGGSRVVVCDINKEMLKVGKQKALAQGYRAGLAWVLGDAEELPFDDDKFDIYTIAFGIRNVTHIDQALQEAHRVLKPGGRFLCLEFSQVNNPLISRLYDLYSFQVIPVLGEVIAGDWKSYQYLVESIRRFPSQEEFKDMIEDAGFHKVTYESLTSGIVAIHSGFKL

SEQ ID NO: 743428 - protein, 110 aa, Homo sapiens
MMSLGIHRVWKDLLLWKMHPLPGTQLLDVAGGTGDIAFRFLNYVQSQHQRKQKRQLRAQQNLSWEEIAKEYQNEEDSLGGSRVVVCDINKEMLKVGKQKALAQGYRAGLA

SEQ ID NO: 743429 - protein, 246 aa, Homo sapiens
MNDMMSLGIHRVWKDLLLWKMHPLPGTQLLDVAGGTGDIAFRFLNYVQSQHQRKQKRQLRAQQNLSWEEIAKEYQNEEDSLGGSRVVVCDINKEMLKVGKQKALAQGYRAGLAWVLGDAEELPFDDDKFDIYTIAFGIRNVTHIDQALQEAHRVLKPGGRFLCLEFSQVNNPLISRLYDLYSFQVIPVLGEVIAGDWKSYQYLVESIRRFPSQEEFKDMIEDAGFHKVTYESLTSGIVAIHSGFKL

SEQ ID NO: 743430 - protein, 219 aa, Homo sapiens
VPNSARGEARDIAFRFLNYVQSQHQRKQKRQLRAQQNLSWEEIAKEYQNEEDSLGGSRVVVCDINKEMLKVGKQKALAQGYRAGLAWVLGDAEELPFDDDKFDIYTIAFGIRNVTHIDQALQEAHRVLKPGGRFLCLEFSQVNNPLISRLYDLYSFQVIPVLGEVIAGDWKSYQYLVESIRRFPSQEEFKDMIEDAGFHKVTYESLTSGIVAIHSGFKL

SEQ ID NO: 743431 - protein, 318 aa, Homo sapiens
SGRCHSTTKMAAPGSCALWSYCGRGWSRAMRGCQLLGLRSSWPGDLLSARLLSQEKRAAETHFGFETVSEEEKGGKVYQVFESVAKKYDVMNDMMSLGIHRVWKDLLLWKMHPLPGTQLLDVAGGTGDIAFRFLNYVQSQHQRKQKRQLRAQLGGSRVVVCDINKEMLKVGKQKALAQGYRAGLAWVLGDAEELPFDDDKFDIYTIAFGIRNVTHIDQALQEAHRVLKPGGRFLCLEFSQVNNPLISRLYDLYSFQVIPVLGEVIAGDWKSYQYLVESIRRFPSQEEFKDMIEDAGFHKVTYESLTSGIVAIHSGFKL

SEQ ID NO: 743432 - protein, 228 aa, Homo sapiens
MNDMMSLGIHRVWKDLLLWKMHPLPGTQLLDVAGGTGDIAFRFLNYVQSQHQRKQKRQLRAQLGGSRVVVCDINKEMLKVGKQKALAQGYRAGLAWVLGDAEELPFDDDKFDIYTIAFGIRNVTHIDQALQEAHRVLKPGGRFLCLEFSQVNNPLISRLYDLYSFQVIPVLGEVIAGDWKSYQYLVESIRRFPSQEEFKDMIEDAGFHKVTYESLTSGIVAIHSGFKL

SEQ ID NO: 743433 - protein, 203 aa, Homo sapiens
SGRCHSTTKMAAPGSCALWSYCGRGWSRAMRGCQLLGLRSSWPGDLLSARLLSQEKRAAETHFGFETVSEEEKGGKVYQVFESVAKKYDVMNDMMSLGIHRVWKDLLLWKMHPLPGTQLLDVAGGTGDIAFRFLNYVQSQHQRKQKRQLRAQQNLSWEEIAKEYQNEEDSLGGSRVVVCDINKEMLKVGKQKALAQGYRAGLA

SEQ ID NO: 743434 - protein, 137 aa, Homo sapiens
SGRCHSTTKMAAPGSCALWSYCGRGWSRAMRGCQLLGLRSSWPGDLLSARLLSQEKRAAETHFGFETVSEEEKGGKVYQVFESVAKKYDVMNDMMSLGIHRVWKDLLLWKMHPLPGTQLLDVAGGTGNVEFGILHYH

SEQ ID NO: 743435 - protein, 106 aa, Homo sapiens
VTPLPTHRGGTGSQRGRCLIDTEHKWQELASDLSPSGVAVPLPRTRWSWREGGRGVCEVQMEMLGRPFPKVGGEVGLEPYWMLKCPAALLMKAGPHRSVYTLCVCI

SEQ ID NO: 743436 - protein, 101 aa, Homo sapiens
RKLPVMQNGKAVPGPSPQRVLASLNPTANRGSGLIPVTRVRAEVGLGPWPPGGASKLPLLQTLQARPLWVGLGKGPHLGLGTFYYNADRNRQLPHPALGLP

SEQ ID NO: 743437 - protein, 101 aa, Homo sapiens; identical to SEQ ID NO: 743436

SEQ ID NO: 743438 - protein, 122 aa, Homo sapiens
RSTKKRRRRGSKEGEEDQNPPCPRLSGVLMEVEEPEILQDSLDRCYSTPSMFFELPDSFQHYRSVFYSFEEQRVGWALDMDEMEKYQEVEEDQDPSCPRLSRELLDEKEPEVLRDSLDRCYS

SEQ ID NO: 743439 - protein, 104 aa, Homo sapiens
RSTKKRRRRGSKEGEEDQNPPCPRLSGVLMEVEEPEILQDSLDRCYSTPSMFFELPDSFQHYRSVFYSFEEQHISFALDVDNRFLTLMGTSLHLVFQMGVIFPQ

SEQ ID NO: 743440 - protein, 106 aa, Homo sapiens
LGVPLGLASLHHDDRKLARTDYGHGVLEVLFLCRRPVLCFFPSSPLSKPHSHKYTSLCAKTRICILYISVTLTHTCGVSIAFPPRVPVVLPSTQHPPKQAVAHYHS

SEQ ID NO: 743441 - protein, 89 aa, Homo sapiens
RFHPHETNPAVRSSQDRLEEQRKEVMLPVSKAWGHLEEAGITVQVEWKCNGRSGTTVKHVPEGQGGRFCCTNEVRAIKRAKEVLLIWIK

SEQ ID NO: 743442 - protein, 273 aa, Homo sapiens
VRSAPASNKHGSLKPLRLKSNMEVCTYIAPLRGRPYRGGVSSVQAGSPGDLRDSLQRQRKTDNGWIRVQILEEGVWDRDLEKSTRLEEDAMESEPLAGTKTRGRGRRRWEARHGWTLPAHASQPSPRTVVATATGAEVLARAGRSAGTRVAGPESQLSHLYGWDKYSNPRPSRRARAVARVHALEQVTYLVQGPEMGSDSVPAGNFTSDPVSALQLKTTRSTLAGVGLIGAIVQCREHTRTLRIVSCHKDPEQVDPAVMHKEDHARYDKDLHH

SEQ ID NO: 743443 - protein, 273 aa, Homo sapiens; identical to SEQ ID NO: 743442

SEQ ID NO: 743444 - protein, 506 aa, Homo sapiens
MAEADFKMVSEPVAHGVAEEEMASSTSDSGEESDSSSSSSSTSDSSSSSSTSGSSSGSGSSSSSSGSTSSRSRLYRKKRVPEPSRRARRAPLGTNFVDRLPQAVRNRVQALRNIQDECDKVDTLFLKAIHDLERKYAELNKPLYDRRFQIINAEYEPTEEECEWNSEDEEFSSDEEVQDNTPSEMPPLEGEEEENPKENPEVKAEEKEVPKEIPEVKDEEKEVPKEIPEVKAEEKADSKDCMEATPEVKEDPKEVPQVKADDKEQPKATEAKARAAVRETHKRVPEERLQDSVDLKRARKGKPKREDPKGIPDYWLIVLKNVDKLGPMIQKYDEPILKFLSDVSLKFSKPGQPVSYTFEFHFLPNPYFRNEVLVKTYIIKAKPDHNDPFFSWGWEIEDCKGCKIDWRRGKDVTVTTTQSRTTATGEIEIQPRVVPNASFFNFFSPPEIPMIGKLEPREDAILDEDFEIGQILHDNVILKSIYYYTGEVNGTYYQFGKHYGNKKYRK

SEQ ID NO: 743445 - protein, 506 aa, Homo sapiens; identical to SEQ ID NO: 743444

SEQ ID NO: 743446 - protein, 322 aa, Homo sapiens
MPPLEGEEEENPKENPEVKAEEKEVPKEIPEVKDEEKEVPKEIPEVKAEEKADSKDCMEATPEVKEDPKEVPQVKADDKEQPKATEAKARAAVRETHKRVPEERLQDSVDLKRARKGKPKREDPKGIPDYWLIVLKNVDKLGPMIQKYDEPILKFLSDVSLKFSKPGQPVSYTFEFHFLPNPYFRNEVLVKTYIIKAKPDHNDPFFSWGWEIEDCKGCKIDWRRGKDVTVTTTQSRTTATGEIEIQPRVVPNASFFNFFSPPEIPMIGKLEPREDAILDEDFEIGQILHDNVILKSIYYYTGEVNGTYYQFGKHYGNKKYRK

SEQ ID NO: 743447 - protein, 359 aa, Homo sapiens
MITGTSQADCAVLIVAAGVGEFEAGISKNGQTQEHALLAYTLGVKQLIVGVNKMDSTEPPYSQKRYEEIVKEVNTYIKKIGYNPDTEAFVPISGWNGDNMLEPSFNMPWFKGRKSSCKDGNTSGTMLLEALDYILPPTHPTTSPFACLSRMSTKIGGIGTVPVGRVETGVLKPGMVVTFAPVNIKTEVKSVEMHHEALSETLSGDNVGFNVKNVSVKDVRHGNDAGDSKDDPPMEAAGFTAQVIILNHPGQISAGYAPVLDCHTAHTACKFAELKERLIAFGKSWKMALNSESGDAAIVDMVPGKPMCVESFSDYPPLGRFAVRDMRQTVAVGVIKAVDKKAAGAGKVTKSAQKAQKAK

SEQ ID NO: 743448 - protein, 65 aa, Homo sapiens
MCPKVPLLQSSGSIFAFQIQNKNTKKRGIPIRTRNRMRILLRMGSRVFKYFNICHNKVLLLIERH

SEQ ID NO: 743449 - protein, 244 aa, Homo sapiens
MTVRPPQPCGTGAAEDPQTALALNFGSTLMKKKSDPEGPALLFPESELSIRIDKSENGEAYQRKKAAATGLPEGPAVPVPSRGNLAQPGGSSWRRIALLILAITIHNVPEGLAVGVGFGAIEKTASATFESARNLAIGIGIQNFPEGLAVSLPLRGAGFSTWRAFWYGQLSGMVEPLAGVFGAFAVVLAEPILPYALAFAAGAMVYVVMDDIIPEAQISGNGKLASWASILGFVVMMSLDVGLG

SEQ ID NO: 743450 - protein, 227 aa, Homo sapiens
MLQGHSSVFQALLGTFFTWGMTAAGAALVFVFSSGQRRILDGSLGFAAGVMLAASYWSLLAPAVEMATSSGGFGAFAFFPVAVGFTLGAAFVYLADLLMPHLGAAEDPQTALALNFGSTLMKKKSDPEGPALLFPESELSIRIDKSENGEAYQRKKAAATGLPEGPAVPVPSRGNLAQPGGSSWRRIALLILAITIHNVPVETRVLLCWPGWPRTAGLRRTSCFSLP

SEQ ID NO: 743451 - protein, 103 aa, Homo sapiens
MVISRPVGFRHGGCKMCLSLSAMTVRPPQPCGTGAAEDPQTALALNFGSTLMKKKSDPEGPALLFPESELSIRIGRAGLLSGKLFAADTELSQAIWTWGLVVG

SEQ ID NO: 743452 - protein, 230 aa, Homo sapiens
MWPLGSTHSQPCGTGAAEDPQTALALNFGSTLMKKKSDPEGPALLFPESELSIRIDKSENGEAYQRKKAAATGLPEGPAVPVPSRGNLAQPGGSSWRRIALLILAITIHNVPEGLAVGVGFGAIEKTASATFESARNLAIGIGIQNFPEGLAVSLPLRGAGFSTWRAFWYGQLSGMVEPLAGVFGAFAVVLAEPILPYALAFAAGAMVYVVMDDIIPEAQIRLENLPSLS

SEQ ID NO: 743453 - protein, 342 aa, Homo sapiens
MLQGHSSVFQALLGTFFTWGMTAAGAALVFVFSSGQRRILDGSLGFAAGVMLAASYWSLLAPAVEMATSSGGFGAFAFFPVAVGFTLGAAFVYLADLLMPHLGAAEDPQTALALNFGSTLMKKKSDPEGPALLFPESELSIRIGRAGLLSDKSENGEAYQRKKAAATGLPEGPAVPVPSRGNLAQPGGSSWRRIALLILAITIHNVPEGLAVGVGFGAIEKTASATFESARNLAIGIGIQNFPEGLAVSLPLRGAGFSTWRAFWYGQLSGMVEPLAGVFGAFAVVLAEPILPYALAFAAGAMVYVVMDDIIPEAQISGNGKLASWASILGFVVMMSLDVGLG

SEQ ID NO: 743454 - protein, 249 aa, Homo sapiens
MYFWRDVVRPPQPCGTGAAEDPQTALALNFGSTLMKKKSDPEGPALLFPESELSIRIDKSENGEAYQRKKAAATGLPEGPAVPVPSRGNLAQPGGSSWRRIALLILAITIHNVPEGLAVGVGFGAIEKTASATFESARNLAIGIGIQNFPEGLAVSLPLRGAGFSTWRAFWYGQLSGMVEPLAGVFGAFAVVLAEPILPYALAFAAGAMVYVVMDDIIPEAQISGNGKLASWASILGFVVMMSLDVGLG

SEQ ID NO: 743455 - protein, 335 aa, Homo sapiens
MLQGHSSVFQALLGTFFTWGMTAAGAALVFVFSSGQRRILDGSLGFAAGVMLAASYWSLLAPAVEMATSSGGFGAFAFFPVAVGFTLGAAFVYLADLLMPHLGAAEDPQTALALNFGSTLMKKKSDPEGPALLFPESELSIRIDKSENGEAYQRKKAAATGLPEGPAVPVPSRGNLAQPGGSSWRRIALLILAITIHNVPEGLAVGVGFGAIEKTASATFESARNLAIGIGIQNFPEGLAVSLPLRGAGFSTWRAFWYGQLSGMVEPLAGVFGAFAVVLAEPILPYALAFAAGAMVYVVMDDIIPEAQISGNGKLASWASILGFVVMMSLDVGLG

SEQ ID NO: 743456 - protein, 103 aa, Homo sapiens; identical to SEQ ID NO: 743451

SEQ ID NO: 743457 - protein, 238 aa, Homo sapiens
VPFFPIRFILYANEFSIVERKQASGYRPAASQGLLEKDYRCFPVGFYKSENGEAYQRKKAAATGLPEGPAVPVPSRGNLAQPGGSSWRRIALLILAITIHNVPEGLAVGVGFGAIEKTASATFESARNLAIGIGIQNFPEGLAVSLPLRGAGFSTWRAFWYGQLSGMVEPLAGVFGAFAVVLAEPILPYALAFAAGAMVYVVMDDIIPEAQISGNGKLASWASILGFVVMMSLDVGLG

SEQ ID NO: 743458 - protein, 224 aa, Homo sapiens
MLQGHSSVFQALLGTFFTWGMTAAGAALVFVFSSGQRRILDGSLGFAAGVMLAASYWSLLAPAVEMATSSGGFGAFAFFPVAVGFTLGAAFVYLADLLMPHLGAAEDPQTALALNFGSTLMKKKSDPEGPALLFPESELSIRIDKSENGEAYQRKKAAATGLPEGPAVPVPSRGNLAQPGGSSWRRIALLILAITIHNVPEGLAVGVGFGAIEKTASATFESAR

SEQ ID NO: 743459 - protein, 233 aa, Homo sapiens
MLQGHSSVFQALLGTFFTWGMTAAGAALVFVFSSGQRRILDGSLGFAAGVMLAASYWSLLAPAVEMATSSGGFGAFAFFPVAVGFTLGAAFVYLADLLMPHLGAAEDPQTALALNFGSTLMKKKSDPEGPALLFPESELSIRIDKSENGEAYQRKKAAATGLPEGPAVPVPSRGNLAQPGGSSWRRIALLILAITIHNVPDVFASPSAMIVSFLRPPQLCETRVSLLELDLGL

SEQ ID NO: 743460 - protein, 238 aa, Homo sapiens
MLQGHSSVFQALLGTFFTWGMTAAGAALVFVFSSGQRRILDGSLGFAAGVMLAASYWSLLAPAVEMATSSGGFGAFAFFPVAVGFTLGAAFVYLADLLMPHLGAAEDPQTALALNFGSTLMKKKSDPEGPALLFPESELSIRIDKSENGEAYQRKKAAATGLPEGPAVPVPSRGNLAQPGGSSWRRIALLILAITIHNVPEGLAVGVGFGAIEKTASATFESARVLNLVSCPGLNLPS

SEQ ID NO: 743461 - protein, 128 aa, Homo sapiens
MTVRPPQPCGTGAAEDPQTALALNFGSTLMKKKSDPEGPALLFPESELSIRIGRAGLLSDKSENGEAYQRKKAAATGLPEGPAVPVPSRGNLAQPGGSSWRRIALLILAITIHNVPGEVLPVSVTATA

SEQ ID NO: 743462 - protein, 108 aa, Homo sapiens
FLAPTEVLASARDSHCVSTYSRQQPSCAFLVFQEFGHWNRDPEFPRGPGCQPSLARGRLLHLESFLVSAAQGQGHVTASSMWASFNKTVMCFCTAMLRYDVEWHASMC

SEQ ID NO: 743463 - protein, 186 aa, Homo sapiens
RRRARAGSATQITMYSFMGGGLFCAWVGTILLVVAMATDHWMQYRLSGSFAHQGLWRYCLGNKCYLQTDSIAYWNATRAFMILSALCAISGIIMGIMAFAHQPTFSRISRPFSAGIMFFSSTLFVVLALAIYTGVTVSFLGRRFGDWRFSWSYILGWVAVLMTFFAGIFYMCAYRVHECRRLSTPR

SEQ ID NO: 743464 - protein, 228 aa, Homo sapiens
RRRARAGSATQITMYSFMGGGLFCAWVGTILLVVAMATDHWMQYRLSGSFAHQGLWRYCLGNKCYLQTDSIGEPPGQGPGRAWGKSRADLGAQGHLYSRWRTLRLKEGKGATQAYWNATRAFMILSALCAISGIIMGIMAFAHQPTFSRISRPFSAGIMFFSSTLFVVLALAIYTGVTVSFLGRRFGDWRFSWSYILGWVAVLMTFFAGIFYMCAYRVHECRRLSTPR

SEQ ID NO: 743465 - protein, 120 aa, Homo sapiens
RRRARAGSATQITMYSFMGGGLFCAWVGTILLVVAMATDHWMQYRLSGSFAHQGLWRYCLGNKCYLQTDSIAYWNATRAFMILSALCAISGIIMGIMAFVGGSAHDVLRRDFLHVRLPGA

SEQ ID NO: 743466 - protein, 105 aa, Homo sapiens
AQIGSRCCGEKQYRAGRARWSCLQLGFGGFEAHIRGKWLCSCRFAQSGFLRFRGLGGFLWGCGGKRISSDNGPEQESLSRSRPDAGLPADTTDDFIGSESVSQRS

SEQ ID NO: 743467 - protein, 249 aa, Homo sapiens
MADPEVCCFITKILCAHGGRMALDALLQEIALSEPQLCEVLQVAGPDRFVVLETGGEAGITRSVVATTRARVCRRKYCQRPCDNLHLCKLNLLGRCNYSQSERNLCKYSHEVLSEENFKVLKNHELSGLNKEELAVLLLQSDPFFMPEICTSYKGEGRQQICTRSHESDPLRDPLTEGTRSNCLRPYWWRTLATQDQGTHVQPYSAAFKTRQTSRDGWCQRAPRTSERTTKHRAGTQRAPQGPGHRHIT

SEQ ID NO: 743468 - protein, 199 aa, Homo sapiens
IYGAQQACQAMGSLYHTDCFTCDSCGRRLRGKAFYNVGEKVYCQEDFLYSGFQQTADKCSVCGHLIMEMILQALGKSYHPGCFRCSVCNECLDGVPFTVDVENNIYCVRDYHTVFAPKCASCARPILPAQGCETTIRVVSMDRDYHVACYHCEDCGLQLSGEEGRRCYPLAGHLLCRRCHLRRLQPGPLPSPTVHVTEL

SEQ ID NO: 743469 - protein, 268 aa, Homo sapiens
MSQRVEERLLVFQLLQSSDGGLYRDSGSGIVRPGTASHCLHAGTTVPDPHSSSLHLGFATERASVLGVLADFNFLHHFPEGGPIAGPVFTDDPDFLGRWAMSPPTRPEKVYCQEDFLYSGFQQTADKCSVCGHLIMEMILQALGKSYHPGCFRCSVCNECLDGVPFTVDVENNIYCVRDYHTVFAPKCASCARPILPAQGCETTIRVVSMDRDYHVACYHCEDCGLQLSGEEGRRCYPLAGHLLCRRCHLRRLQPGPLPSPTVHVTEL

SEQ ID NO: 743470 - protein, 103 aa, Homo sapiens
WDYRHEPLHPVQEFNSLKIFTLFCSKFSYGKNTEFCPEGLCTSGSFSLAWTFFFFQRQTLILSPRLECSGVVTAHCSLELLDSSDPPSSPSQIAGITHMNHHS

SEQ ID NO: 743471 - protein, 67 aa, Homo sapiens
MAFEKLQSAADVKSMFQVPICALVFTEQSACPHIGTCGGVEIRTARTTVHNLQKYECPSFLLEPGKQ

SEQ ID NO: 743472 - protein, 422 aa, Homo sapiens
MSSHYTEDLLPEQCMQDSFQKVILRRYGSCGLEDLHLRKDGENVGECKDQKEIYNGLNQCLSTLPSKIFPYNKCVKVFSKSSNLNRENIRHTTEKLFKCMQCGKVFKSHSGLSYHKIIHTEEKLCICEECGKTFKWFSYLTKHKRIHTGEKPYKCEECGKAFNWCSSLTKHKRIHTGEKPYKCEECGKAFHWCSPFVRHKKIHTGEKPYTCEDCGRAFNRHSHLTKHKTIHTGKKPYKCKECGKAFNHCSLLTIHERTHTGEKPYKCEECGKAFNSSSILTEHKVIHSGEKPYKCEKCDKVFKRFSYLTKHKRIHTGEKPYKCEECGKAFNWSSILTEHKRIHTGEKPYNCEECGKAFNRCSHLTRHKKIHTAVKRYKCEECGKAFKRCSHLNEHKRVQRGEKSCKYKKCGEAFNHCSNLTT

SEQ ID NO: 743473 - protein, 498 aa, Homo sapiens
MELLTFRDVTIEFSLEEWEFLNPAQQSLYRKVMLENYRNLVSLGLTVSKPELISRLEQRQEPWNVKRHETIAKPPAMSSHYTEDLLPEQCMQDSFQKVILRRYGSCGLEDLHLRKDGENVGECKDQKEIYNGLNQCLSTLPSKIFPYNKCVKVFSKSSNLNRENIRHTTEKLFKCMQCGKVFKSHSGLSYHKIIHTEEKLCICEECGKTFKWFSYLTKHKRIHTGEKPYKCEECGKAFNWCSSLTKHKRIHTGEKPYKCEECGKAFHWCSPFVRHKKIHTGEKPYTCEDCGRAFNRHSHLTKHKTIHTGKKPYKCKECGKAFNHCSLLTIHERTHTGEKPYKCEECGKAFNSSSILTEHKVIHSGEKPYKCEKCDKVFKRFSYLTKHKRIHTGEKPYKCEECGKAFNWSSILTEHKRIHTGEKPYNCEECGKAFNRCSHLTRHKKIHTAVKRYKCEECGKAFKRCSHLNEHKRVQRGEKSCKYKKCGEAFNHCSNLTT

SEQ ID NO: 743474 - protein, 422 aa, Homo sapiens; identical to SEQ ID NO: 743472

SEQ ID NO: 743475 - protein, 70 aa, Homo sapiens
LNRALRSELTSVLAGEQAPGEPTCGEGGGRWPAQGSACFPDRRSQDHHFEPVEGPALELLVGAGRFHFVT

SEQ ID NO: 743476 - protein, 471 aa, Homo sapiens
HGRRPRAAPRPPPGADAASEEGARRMERVVVSMQDPDQGVKMRSQRLLVTVIPHAVTGSDVVQWLAQKFCVSEEEALHLGAVLVQHGYIYPLRDPRSLMLRPDETPYRFQTPYFWTSTLRPAAELDYAIYLAKKNIRKRGTLVDYEKDCYDRLHKKINHAWDLVLMQAREQLRAAKQRSKGDRLVIACQEQTYWLVNRPPPGAPDVLEQGPGRGSCAASRVLMTKSADFHKREIEYFRKALGRTRVKSSVCLEAYLSFCGQRGPHDPLVSGCLPSNPWISDNDAYWVMNAPTVAAPTKLRVERWGFSFRELLEDPVGRAHFMDFLGKEFSGENLSFWEACEELRYGAQAQVPTLVDAVYEQFLAPGAAHWVNIDSRTMEQTLEGLRQPHRYVLDDAQLHIYMLMKKDSYPRFLKSDMYKALLAEAGIPLEMKRRVFPFTWRPRHSSPSPALLPTPVEPTAACGPGGGDGVA

SEQ ID NO: 743477 - protein, 460 aa, Homo sapiens
HGRRPRAAPRPPPGADAASEEGARRMERVVVSMQDPDQGVKMRSQRLLVTVIPHAVTGSDVVQWLAQKFCVSEEEALHLGAVLVQHGYIYPLRDPRSLMLRPDETPYRFQVRLGGAAIYLAKKNIRKRGTLVDYEKDCYDRLHKKINHAWDLVLMQAREQLRAAKQRSKGDRLVIACQEQTYWLVNRPPPGAPDVLEQGPGRGSCAASRVLMTKSADFHKREIEYFRKALGRTRVKSSVCLEAYLSFCGQRGPHDPLVSGCLPSNPWISDNDAYWVMNAPTVAAPTKLRVERWGFSFRELLEDPVGRAHFMDFLGKEFSGENLSFWEACEELRYGAQAQVPTLVDAVYEQFLAPGAAHWVNIDSRTMEQTLEGLRQPHRYVLDDAQLHIYMLMKKDSYPRFLKSDMYKALLAEAGIPLEMKRRVFPFTWRPRHSSPSPALLPTPVEPTAACGPGGGDGVA

SEQ ID NO: 743478 - protein, 140 aa, Homo sapiens
SVSQHPLIGSTAVGSQCPFLPSEQGNNEETISSVDELKIPKDCDRYDDLCSYMSWKTRKDTQWPENNLADKDQVSVATSFDITDENIATKRSDHFDAARSYGQYWTQEDSSKQAETYLTSKYPDSFSDSSDTIDKNKIPK

SEQ ID NO: 743479 - protein, 108 aa, Homo sapiens
NSFIMVLKAAKSKITAPADSLPRESSLPGLQVALFLLCPHVALLWCAHTHRERSSSFSYKNTPPIMKAQPSWPHLTLITSQRPSLQIPAHWWGEELELQHVNFGGRQT

SEQ ID NO: 743480 - protein, 255 aa, Homo sapiens
SGGHLCAGPRFRQRRSGESAVGLPAMEWWASSPLRLWLLLFLLPSAQGRQKESGSKWKVFIDQINRSLENYEPCSSQNCSCYHGVIEEDLTPFRGGISRKMMAEVVRRKLGTHYQITKNRLYRENDCMFPSRCSGVEHFILEVIGRLPDMEMVINVRDYPQVPKWMEPAIPVFSFSKTSEYHDIMYPAWTFWEGGPAVWPIYPTGLGRWDLFREDLVRSAAQWPWKKKNSTAYFRGSRTSPERDPLILLSRKTLP

SEQ ID NO: 743481 - protein, 417 aa, Homo sapiens
SGGHLCAGPRFRQRRSGESAVGLPAMEWWASSPLRLWLLLFLLPSAQGRQKESGSKWKVFIDQINRSLENYEPCSSQNCSCYHGVIEEDLTPFRGGISRKMMAEVVRRKLGTHYQITKNRLYRENDCMFPSRCSGVEHFILEVIGRLPDMEMVINVRDYPQVPKWMEPAIPVFSFSKTSEYHDIMYPAWTFWEGGPAVWPIYPTGLGRWDLFREDLVRSAAQWPWKKKNSTAYFRGSRTSPERDPLILLSRKNPKLVDAEYTKNQAWKSMKDTLGKPAAKDVHLVDHCKYKYLFNFRGVAASFRFKHLFLCGSLVFHVGDEWLEFFYPQLKPWVHYIPVKTDLSNVQELLQFVKANDDVAQEIAERGSQFIRNHLQMDDITCYWENLLSEYSKFLSYNVTRRKGYDQIIPKMLKTEL

SEQ ID NO: 743482 - protein, 417 aa, Homo sapiens; identical to SEQ ID NO: 743481

SEQ ID NO: 743483 - protein, 417 aa, Homo sapiens; identical to SEQ ID NO: 743481

SEQ ID NO: 743484 - protein, 140 aa, Homo sapiens
RHIVSNVFCSFFPRYLFNFRGVAASFRFKHLFLCGSLVFHVGDEWLEFFYPQLKPWVHYIPVKTDLSNVQELLQFVKANDDVAQEIAERGSQFIRNHLQMDDITCYWENLLSEYSKFLSYNVTRRKGYDQIIPKMLKTEL

SEQ ID NO: 743485 - protein, 417 aa, Homo sapiens; identical to SEQ ID NO: 743481

SEQ ID NO: 743486 - protein, 294 aa, Homo sapiens
SGGHLCAGPRFRQRRSGESAVGLPAMEWWASSPLRLWLLLFLLPSAQGRQKESGSKWKVFIDQINRSLENYEPCSSQNCSCYHGVIEEDLTPFRGGISRKMMAEVVRRKLGTHYQITKNRLYRENDCMFPSRCSGVEHFILEVIGRLPDMEMVINVRDYPQVPKWMEPAIPVFSFSKTSEYHDIMYPAWTFWEGGPAVWPIYPTGLGRWDLFREDLVRSAAQWPWKKKNSTAYFRGSRTSPERDPLILLSRKNPKLVDAEYTKNQAWKSMKVITSHLTRTTAVNILTQRTLPPG

SEQ ID NO: 743487 - protein, 166 aa, Homo sapiens
KGRRFVFYPCLREGTARGCAFQSRLPPPPPAGPPGQTGDPAATPVAVSMPQPSCPPVPHEGDHRDKGAPGPLPPARATVKSRARSQAEEAASRTCGVRRRALGGLPAGGGGGQEKEATSLLEDKKTPIPERQAWGKQPQGTGGGQRPRERQGLVTQGTNEHLLNIY

SEQ ID NO: 743488 - protein, 120 aa, Homo sapiens
LTELVKPRKSPGLAAVFFQWHSEGFVFSVSVLFFGLCSISFLAFCNKLVVSQYFYVSGFTMSQLCDLGKFTSVFLCFLCCECGDGGLSSGVTILIFAKILEWCLARSEWAANIRCSDLRF

SEQ ID NO: 743489 - protein, 116 aa, Homo sapiens
MILSRNLPSNVVARLLAHQGSAACLPALPQVVAKALKIMSPPHRLGSFQVSWETVSSVPWQANFRAISSTGLWQVWCARKTPSLRHGQRVTGVYGGLHMKSSQFLPYSFSVSLKLL

SEQ ID NO: 743490 - protein, 171 aa, Homo sapiens
SGVPGSPASPRTLREVRASACAPGPGERMRKVESRGEGGREELGSNSPPQRNWKGIAIALLVILVVCSLITMSVILLTPDELTNSSETRLSLEDLFRKDFVLHDPEARWINDTDVVYKSENGHVIKLNIETNATTLLLENTTFVTFKASRHSVSPDLKYVLLAYDVKQVKE

SEQ ID NO: 743491 - protein, 796 aa, Homo sapiens
MNQTASVSHHIKCQPSKTIKELGSNSPPQRNWKGIAIALLVILVVCSLITMSVILLTPDELTNSSETRLSLEDLFRKDFVLHDPEARWINDTDVVYKSENGHVIKLNIETNATTLLLENTTFVTFKASRHSVSPDLKYVLLAYDVKQIFHYSYTASYVIYNIHTREVWELNPPEVEDSVLQYAAWGVQGQQLIYIFENNIYYQPDIKSSSLRLTSSGKEEIIFNGIADWLYEEELLHSHIAHWWSPDGERLAFLMINDSLVPTMVIPRFTGALYPKGKQYPYPKAGQVNPTIKLYVVNLYGPTHTLELMPPDSFKSREYYITMVKWVSNTKTVVRWLNRPQNISILTVCETTTGACSKKYEMTSDTWLSQQNEEPVFSRDGSKFFMTVPVKQGGRGEFHHIAMFLIQSKSEQITVRHLTSGNWEVIKILAYDETTQKIYFLSTESSPRGRQLYSASTEGLLNRQCISCNFMKEQCTYFDASFSPMNQHFLLFCEGPRVPVVSLHSTDNPAKYFILESNSMLKEAILKKKIGKPEIKILHIDDYELPLQLSLPKDFMDRNQYALLLIMDEEPGGQLVTDKFHIDWDSVLIDMDNVIVARFDGRGSGFQGLKILQEIHRRLGSVEVKDQITAVKFLLKLPYIDSKRLSIFGKGYGGYIASMILKSDEKLFKCGSVVAPITDLKLYASAFSERYLGMPSKEESTYQAASVLHNVHGLKEENILIIHGTADTKVHFQHSAELIKHLIKAGVNYTMQVYPDEGHNVSEKSKYHLYSTILKFFSDCLKEEISVLPQEPEEDE

SEQ ID NO: 743492 - protein, 817 aa, Homo sapiens
SGVPGSPASPRTLREVRASACAPGPGERMRKVESRGEGGREELGSNSPPQRNWKGIAIALLVILVVCSLITMSVILLTPDELTNSSETRLSLEDLFRKDFVLHDPEARWINDTDVVYKSENGHVIKLNIETNATTLLLENTTFVTFKASRHSVSPDLKYVLLAYDVKQIFHYSYTASYVIYNIHTREVWELNPPEVEDSVLQYAAWGVQGQQLIYIFENNIYYQPDIKSSSLRLTSSGKEEIIFNGIADWLYEEELLHSHIAHWWSPDGERLAFLMINDSLVPTMVIPRFTGALYPKGKQYPYPKAGQVNPTIKLYVVNLYGPTHTLELMPPDSFKSREYYITMVKWVSNTKTVVRWLNRPQNISILTVCETTTGACSKKYEMTSDTWLSQQNEEPVFSRDGSKFFMTVPVKQGGRGEFHHIAMFLIQSKSEQITVRHLTSGNWEVIKILAYDETTQKIYFLSTESSPRGRQLYSASTEGLLNRQCISCNFMKEQCTYFDASFSPMNQHFLLFCEGPRVPVVSLHSTDNPAKYFILESNSMLKEAILKKKIGKPEIKILHIDDYELPLQLSLPKDFMDRNQYALLLIMDEEPGGQLVTDKFHIDWDSVLIDMDNVIVARFDGRGSGFQGLKILQEIHRRLGSVEVKDQITAVKFLLKLPYIDSKRLSIFGKGYGGYIASMILKSDEKLFKCGSVVAPITDLKLYASAFSERYLGMPSKEESTYQAASVLHNVHGLKEENILIIHGTADTKVHFQHSAELIKHLIKAGVNYTMQVYPDEGHNVSEKSKYHLYSTILKFFSDCLKEEISVLPQEPEEDE

SEQ ID NO: 743493 - protein, 796 aa, Homo sapiens; identical to SEQ ID NO: 743491

SEQ ID NO: 743494 - protein, 780 aa, Homo sapiens
MNQTASVSHHIKCQPSKTIKELGSNSPPQRNWKGIAIALLVILVVCSLITMSVILLTPDELTNSSETRLSLEDLFRKDFVLHDPEARWINDTDVVYKSENGHVIKLNIETNATTLLLENTTFVTFKASRHSVSPDLKYVLLAYDVKQIFHYSYTASYVIYNIHTREVWELNPPEVEDSVLQYAAWGVQGQQLIYIFENNIYYQPDIKSSSLRLTSSGKEEIIFNGIADWLYEEELLHSHIAHWWSPDGERLAFLMINDSLVPTMVIPRFTGALYPKGKQYPYPKAGQVNPTIKLYVVNLYGPTHTLELMPPDSFKSREYYITMVKWVSNTKTVVRWLNRPQNISILTVCETTTGACSKKYEMTSDTWLSQQNEEPVFSRDGSKFFMTVPVKQGGRGEFHHIAMFLIQSKSEQITVRHLTSGNWEVIKILAYDETTQKIASTEGLLNRQCISCNFMKEQCTYFDASFSPMNQHFLLFCEGPRVPVVSLHSTDNPAKYFILESNSMLKEAILKKKIGKPEIKILHIDDYELPLQLSLPKDFMDRNQYALLLIMDEEPGGQLVTDKFHIDWDSVLIDMDNVIVARFDGRGSGFQGLKILQEIHRRLGSVEVKDQITAVKFLLKLPYIDSKRLSIFGKGYGGYIASMILKSDEKLFKCGSVVAPITDLKLYASAFSERYLGMPSKEESTYQAASVLHNVHGLKEENILIIHGTADTKVHFQHSAELIKHLIKAGVNYTMQVYPDEGHNVSEKSKYHLYSTILKFFSDCLKEEISVLPQEPEEDE

SEQ ID NO: 743495 - protein, 492 aa, Homo sapiens
VLGRSGAWREGAGLRGREGARAGGNRTPPAPMAPVAVWAALAVGLELWAAAHALPAQVAFTPYAPEPGSTCRLREYYDQTAQMCCSKCSPGQHAKVFCTKTSDTVCDSCEDSTYTQLWNWVPECLSCGSRCSSDQVETQACTREQNRICTCRPGWYCALSKQEGCRLCAPLRKCRPGFGVARPGTETSDVVCKPCAPGTFSNTTSSTDICRPHQICNVVAIPGNASMDAVCTSTSPTRSMAPGAVHLPQPVSTRSQHTQPTPEPSTAPSTSFLLPMGPSPPAEGSTGDFALPVGLIVGVTALGLLIIGVVNCVIMTQVKKKPLCLQREAKVPHLPADKARGTQGPEQQHLLITAPSSSSSSLESSASALDRRAPTRNQPQAPGVEASGAGEARASTGSSDSSPGGHGTQVNVTCIVNVCSSSDHSSQCSSQASSTMGDTDSSPSESPKDEQVPFSKEECAFRSQLETPETLLGSTEEKPLPLGVPDAGMKPS

SEQ ID NO: 743496 - protein, 460 aa, Homo sapiens
ARGRAQRSLERRRWAARARGREGRGQPDPARTHGARRRLGRAGRRTGALGCGARLARPGQHAKVFCTKTSDTVCDSCEDSTYTQLWNWVPECLSCGSRCSSDQVETQACTREQNRICTCRPGWYCALSKQEGCRLCAPLRKCRPGFGVARPGTETSDVVCKPCAPGTFSNTTSSTDICRPHQICNVVAIPGNASMDAVCTSTSPTRSMAPGAVHLPQPVSTRSQHTQPTPEPSTAPSTSFLLPMGPSPPAEGSTGDFALPVGLIVGVTALGLLIIGVVNCVIMTQVKKKPLCLQREAKVPHLPADKARGTQGPEQQHLLITAPSSSSSSLESSASALDRRAPTRNQPQAPGVEASGAGEARASTGSSDSSPGGHGTQVNVTCIVNVCSSSDHSSQCSSQASSTMGDTDSSPSESPKDEQVPFSKEECAFRSQLETPETLLGSTEEKPLPLGVPDAGMKPS

SEQ ID NO: 743497 - protein, 520 aa, Homo sapiens
VLGRSGAWREGAGLRGREGARAGGNRTPPAPMAPVAVWAALAVGLELWAAAHALPAQVAFTPYAPEPGSTCRLREYYDQTAQMCCSKCSPGQHAKVFCTKTSDTVCDSCEDSTYTQLWNWVPECLSCGSRCSSDQVETQACTREQNRICTCRPGWYCALSKQEGCRLCAPLRKCRPGFGVARPDLSYGSSAKAQLSRRVSEWIDKFGLFPEGTETSDVVCKPCAPGTFSNTTSSTDICRPHQICNVVAIPGNASMDAVCTSTSPTRSMAPGAVHLPQPVSTRSQHTQPTPEPSTAPSTSFLLPMGPSPPAEGSTGDFALPVGLIVGVTALGLLIIGVVNCVIMTQVKKKPLCLQREAKVPHLPADKARGTQGPEQQHLLITAPSSSSSSLESSASALDRRAPTRNQPQAPGVEASGAGEARASTGSSDSSPGGHGTQVNVTCIVNVCSSSDHSSQCSSQASSTMGDTDSSPSESPKDEQVPFSKEECAFRSQLETPETLLGSTEEKPLPLGVPDAGMKPS

SEQ ID NO: 743498 - protein, 460 aa, Homo sapiens; identical to SEQ ID NO: 743496

SEQ ID NO: 743499 - protein, 170 aa, Homo sapiens
MQLGHIDIDKDLEAPLYLTPEGWSLFLQRYYQVVHEGAELRHLDTQVQRCEDILQQLQAVVPQIDMEGDRNIWIVKPGAKSRGRGIMCMDHLEEMLKLVNGNPVVMKDGKWVVQKYIERPLLIFGTKFDLRQWFLVTDWNPLTVWFYRDSYIRFSTQPFSLKNLDNFQVV

SEQ ID NO: 743500 - protein, 166 aa, Homo sapiens
MQLGHIDIDKDLEAPLYLTPEGWSLFLQRYYQVVHEGAELRHLDTQVQRCEDILQQLQAVVPQIDMEGDRNIWIVKPGAKSRGRGIMCMDHLEEMLKLVNGNPVVMKDGKWVVQKYIERPLLIFGTKFDLRQWFLVTDWNPLTVWFYRDSYIRFSTQPFSLKNLDK

SEQ ID NO: 743501 - protein, 172 aa, Homo sapiens
GGRDQGCLDDGGGWWNISPPALSTCMSQVQPCPSSIISPQRRGRTLRHLDTQVQRCEDILQQLQAVVPQIDMEGDRNIWIVKPGAKSRGRGIMCMDHLEEMLKLVNGNPVVMKDGKWVVQKYIERPLLIFGTKFDLRQWFLVTDWNPLTVWFYRDSYIRFSTQPFSLKNLDK

SEQ ID NO: 743502 - protein, 302 aa, Homo sapiens
MILLNNSHKLLALYKSLARSIPESLKVYGSVYHINHGNPFNMEVLVDSWPEYQMVIIRPQKQEMTDDMDSYTNVYRMFSKEPQKSEEVLKNCEIVNWKQRLQIQGLQESLGEGIRVATFSKSVKVEHSRALLLVTEDILKLNASSKSKLGSWAETGHPDDEFESETPNFKYAQLDVSYSGLVNDNWKRGKNERSLHYIKRCIEDLPAACMLGPEGVPVSWVTMDPSCEVGMAYSMEKYRRTGNMARVMVRYMKYLRQKNIPFYISVLEENEDSRRFVGQFGFFEASCEWHQWTCYPQNLVPF

SEQ ID NO: 743503 - protein, 152 aa, Homo sapiens
MILLNNSHKLLALYKSLARSIPESLKVYGSVYHINHGNPFNMEVLVDSWPEYQMVIIRPQKQQIDLIDLGFIAKRYYPYWFLPKGGFQKSGRKVLGATFVRIRKRGNTRRLPNPRSFRETVKRWKGHTDGGYNFSTVQVERLSHFEKHSLLW

SEQ ID NO: 743504 - protein, 302 aa, Homo sapiens; identical to SEQ ID NO: 743502

SEQ ID NO: 743505 - protein, 302 aa, Homo sapiens; identical to SEQ ID NO: 743502

SEQ ID NO: 743506 - protein, 302 aa, Homo sapiens; identical to SEQ ID NO: 743502

SEQ ID NO: 743507 - protein, 302 aa, Homo sapiens; identical to SEQ ID NO: 743502

SEQ ID NO: 743508 - protein, 302 aa, Homo sapiens; identical to SEQ ID NO: 743502

SEQ ID NO: 743509 - protein, 302 aa, Homo sapiens; identical to SEQ ID NO: 743502

SEQ ID NO: 743510 - protein, 261 aa, Homo sapiens
MEVLVDSWPEYQMVIIRPQKQEMTDDMDSYTNVYRMFSKEPQKSEEVLKNCEIVNWKQRLQIQGLQESLGEGIRVATFSKSVKVEHSRALLLVTEDILKLNASSKSKLGSWAETGHPDDEFESETPNFKYAQLDVSYSGLVNDNWKRGKNERSLHYIKRCIEDLPAACMLGPEGVPVSWVTMDPSCEVGMAYSMEKYRRTGNMARVMVRYMKYLRQKNIPFYISVLEENEDSRRFVGQFGFFEASCEWHQWTCYPQNLVPF

SEQ ID NO: 743511 - protein, 325 aa, Homo sapiens
MVSQEGSEVELLVSPGARSEHGRYLQDPIVSIDLSEWLRIIEFLLQGLKVYGSVYHINHGNPFNMEVLVDSWPEYQMVIIRPQKQEMTDDMDSYTNVYRMFSKEPQKSEEVLKNCEIVNWKQRLQIQGLQESLGEGIRVATFSKSVKVEHSRALLLVTEDILKLNASSKSKLGSWAETGHPDDEFESETPNFKYAQLDVSYSGLVNDNWKRGKNERSLHYIKRCIEDLPAACMLGPEGVPVSWVTMDPSCEVGMAYSMEKYRRTGNMARVMVRYMKYLRQKNIPFYISVLEENEDSRRFVGQFGFFEASCEWHQWTCYPQNLVPF

SEQ ID NO: 743512 - protein, 270 aa, Homo sapiens
MWLLVSVILISRISSVGGEAMFCDFPKINHGILYDEEKYKPFSQVPTGEVFYYSCEYNFVSPSKSFWTRITCAEEGWSPTPKCLRLCFFPFVENGHSESSGQTHLEGDTVQIICNTGYRLQNNENNISCVERGWSTPPKCRSTISAEKCGPPPPIDNGDITSFLLSVYAPGSSVEYQCQNLYQLEGNNQITCRNGQWSEPPKCLDPCVISQEIMEKYNIKLKWTNQQKLYSRTGDIVEFVCKSGYHPTKSHSFRAMCQNGKLVYPSCEEK

SEQ ID NO: 743513 - protein, 208 aa, Homo sapiens
MWLLVSVILISRISSVGGEAMFCDFPKINHGILYDEEKYKPFSQVPTGEVFYYSCEYNFVSPSKSFWTRITCAEEGWSPTPKCLRLCFFPFVENGHSESSGQTHLEGDTVQIICNTGYRLQNNENNISCVERGWSTPPKCRSTISAEKCGPPPPIDNGDITSFLLSVYAPGSSVEYQCQNLYQLEGNNQITCRNGQWSEPPKCLDPML

SEQ ID NO: 743514 - protein, 223 aa, Homo sapiens
MWLLVSVILISRISSVGGEAMFCDFPKINHGILYDEEKYKPFSQVPTGEVFYYSCEYNFVSPSKSFWTRITCAEEGWSPTPKCLRLCFFPFVENGHSESSGQTHLEGDTVQIICNTGYRLQNNENNISCVERGWSTPPKCRSTISAEKCGPPPPIDNGDITSFLLSVYAPGSSVEYQCQNLYQLEGNNQITCRNGQWSEPPKCLDPSCISHEIMERDMLFGCS

SEQ ID NO: 743515 - protein, 146 aa, Homo sapiens
MWLLVSVILISRISSVGGEVSAEKCGPPPPIDNGDITSFLLSVYAPGSSVEYQCQNLYQLEGNNQITCRNGQWSEPPKCLDPCVISQEIMEKYNIKLKWTNQQKLYSRTGDIVEFVCKSGYHPTKSHSFRAMCQNGKLVYPSCEEK

SEQ ID NO: 743516 - protein, 155 aa, Homo sapiens
MWLLVSVILISRISSVGGEAMFCDFPKINHGILYDEEKYKPFSQVPTGEVFYYSCEYNFVSPSKSFWTRITCAEEGWSPTPKCLRLCFFPFVENGHSESSGQTHLEGDTVQIICNTGYRLQNNENNISCVERGWSTPPKCRSTIPVVSICSRFIS

SEQ ID NO: 743517 - protein, 205 aa, Homo sapiens
MWLLVSVILISRISSVGGEGLCFFPFVENGHSESSGQTHLEGDTVQIICNTGYRLQNNENNISCVERGWSTPPKCRSTISAEKCGPPPPIDNGDITSFLLSVYAPGSSVEYQCQNLYQLEGNNQITCRNGQWSEPPKCLDPCVISQEIMEKYNIKLKWTNQQKLYSRTGDIVEFVCKSGYHPTKSHSFRAMCQNGKLVYPSCEEK

SEQ ID NO: 743518 - protein, 250 aa, Homo sapiens
MFCDFPKINHGILYDEEKYKPFSQVPTGEVFYYSCEYNFVSPSKSFWTRITCAEEGWSPTPKCLRLCFFPFVENGHSESSGQTHLEGDTVQIICNTGYRLQNNENNISCVERGWSTPPKCRSTISAEKCGPPPPIDNGDITSFLLSVYAPGSSVEYQCQNLYQLEGNNQITCRNGQWSEPPKCLDPCVISQEIMEKYNIKLKWTNQQKLYSRTGDIVEFVCKSGYHPTKSHSFRAMCQNGKLVYPSCEEK

SEQ ID NO: 743519 - protein, 155 aa, Homo sapiens; identical to SEQ ID NO: 743516

SEQ ID NO: 743520 - protein, 254 aa, Homo sapiens
MWLLVSVILISRISSVGGEAMFCDFPKINHGILYDEEKYKPFSQVPTGEVFYYSCEYNFVSPSKSFWTRITCAEEGWSPTPKCLRQTHLEGDTVQIICNTGYRLQNNENNISCVERGWSTPPKCRSTISAEKCGPPPPIDNGDITSFLLSVYAPGSSVEYQCQNLYQLEGNNQITCRNGQWSEPPKCLDPCVISQEIMEKYNIKLKWTNQQKLYSRTGDIVEFVCKSGYHPTKSHSFRAMCQNGKLVYPSCEEK

SEQ ID NO: 743521 - protein, 211 aa, Homo sapiens
MWLLVSVILISRISSVGGEAMFCDFPKINHGILYDEEKYKPFSQVPTGEVFYYSCEYNFVSPSKSFWTRITCAEEGWSPTPKCLISAEKCGPPPPIDNGDITSFLLSVYAPGSSVEYQCQNLYQLEGNNQITCRNGQWSEPPKCLDPCVISQEIMEKYNIKLKWTNQQKLYSRTGDIVEFVCKSGYHPTKSHSFRAMCQNGKLVYPSCEEK

SEQ ID NO: 743522 - protein, 91 aa, Homo sapiens
VLPCLVHEERKAQLREDICPRLHNWWVRGPGLTSGPPRCQPSLLLLSSASASSQPGTQKGPEPALMPAHDIFGTNPRISLISITGPKRRGR

SEQ ID NO: 743523 - protein, 1662 aa, Homo sapiens
ATDGASCEPDLSRAPEDAAGAAAEAAKKEFDVDTLSKSELRMLLSVMEGELEARDLVIEALRARRKEVFIQERYGRFNLNDPFLALQRDYEAGAGDKEKKPVCTNPLSILEAVMAHCKKMQERMSAQLAAAESRQKKLEMEKLQLQALEQEHKKLAARLEEERGKNKQVVLMLVKECKQLSGKVIEEAQKLEDVMAKLEEEKKKTNELEEELSAEKRRSTEMEAQMEKQLSEFDTEREQLRAKLNREEAHTTDLKEEIDKMRKMIEQLKRGSDSKPSLSLPRKTKDRRLVSISVGTEGTVTRSVACQTDLVTENADHMKKLPLTMPVKPSTGSPLVSANAKGSVCTSATMARPGIDRQASYGDLIGASVPAFPPPSANKIEENGPSTGSTPDPTSSTPPLPSNAAPPTAQTPGIAPQNSQAPPMHSLHSPCANTSLHPGLNPRIQAARFRFQGNANDPDQNGNTTQSPPSRDVSPTSRDNLVAKQLARNTVTQALSRFTSPQAGAPSRPGVPPTGDVGTHPPVGRTSLKTHGVARVDRGNPPPIPPKKPGLSQTPSPPHPQLKVIIDSSRASNTGAKVDNKTVASTPSSLPQGNRVINEENLPKSSSPQLPPKPSIDLTVAPAGCAVSALATSQVGAWPAATPGLNQPACSDSSLVIPTTIAFCSSINPVSASSCRPGASDSLLVTASGWSPSLTPLLMSGGPAPLAGRPTLLQQAAAQGNVTLLSMLLNEEGLDINYSCEDGHSALYSAAKNGHTDCVRLLLSAEAQVNAADKNGFTPLCAAAAQGHFECVELLISYDANINHAADGGQTPLYLACKNGNKECIKLLLEAGTNRSVKTTDGWTPVHAAVDTGNVDSLKLLMYHRIPAHGNSFNEEESESSVFDLDGGEESPEGISKPVVPADLINHANREGWTAAHIAASKGFKNCLEILCRHGGLEPERRDKCNRTVHDVATDDCKHLLENLNALKIPLRISVGEIEPSNYGSDDLECENTICALNIRKQTSWDDFSKAVSQALTNHFQAISSDGWWSLEDVTCNNTTDSNIGLSARSIRSITLGNVPWSVGQSFAQSPWDFMRKNKAEHITVLLSGPQEGCLSSVTYASMIPLQMMQNYLRLVEQYHNVIFHGPEGSLQDYIVHQLALCLKHRQMAAGFSCEIVRAEVDAGFSKEQLLDLFISSACLIPVKQSPSKKKIIIILENLEKSSLSELLRDFLAPLENRSTESPCTFQKGNGLSECYYFHENCFLMGTIAKACLQGSDLLVQQHFRWVQLRWDGEPMQGLLQRFLRRKVVNKFKGQAPSPCDPVCKIVDWALSVWRQLNSCLARLGTPEALLGPKYFLSCPVVPGHAQVTVKWMSKLWNGVIAPRVQEAILSRASVKRQPGFGQTTAKRHPSQGQQAVVKAALSILLNKAVLHGCPLPRAELDQHTADFKGGSFPLSIVSSYNTCNKKKGESGAWRKVNTSPRRKSGRFSLPTWNKPDLSTEGMKNKTISQLNCNRNASLSKQKSLENDLSLTLNLDQRLSLGSDDEADLVKELQSMCSSKSESDISKIADSRDDLRMFDSSGNNPVLSATINNLRMPVSQKEVSPLSSHQTTECSNSKSKTELGVSRVKSFLPVPRSKVTQCSQNTKRSSSSSNTRQIEINNNSKEVNWNLHKNEHLEKPNK

SEQ ID NO: 743524 - protein, 1591 aa, Homo sapiens
LLLTLPQVTLVPCAHGLLQERYGKVCGGNPMQREQQGQRPRGRTMFRKLRASSEAKGVSRIKVGDKLEMEKLQLQALEQEHKKLAARLEEERGKNKQVVLMLVKECKQLSGKVIEEAQKLEDVMAKLEEEKKKTNELEEELSAEKRRSTEMEAQMEKQLSEFDTEREQLRAKLNREEAHTTDLKEEIDKMRKMIEQLKRGSDSKPSLSLPRKTKDRRLVSISVGTEGTVTRSVACQTDLVTENADHMKKLPLTMPVKPSTGSPLVSANAKGSVCTSATMARPGIDRQASYGDLIGASVPAFPPPSANKIEENGPSTGSTPDPTSSTPPLPSNAAPPTAQTPGIAPQNSQAPPMHSLHSPCANTSLHPGLNPRIQAARFRFQGNANDPDQNGNTTQSPPSRDVSPTSRDNLVAKQLARNTVTQALSRFTSPQAGAPSRPGVPPTGDVGTHPPVGRTSLKTHGVARVDRGNPPPIPPKKPGLSQTPSPPHPQLKVIIDSSRASNTGAKVDNKTVASTPSSLPQGNRVINEENLPKSSSPQLPPKPSIDLTVAPAGCAVSALATSQVGAWPAATPGLNQPACSDSSLVIPTTIAFCSSINPVSASSCRPGASDSLLVTASGWSPSLTPLLMSGGPAPLAGRPTLLQQAAAQGNVTLLSMLLNEEGLDINYSCEDGHSALYSAAKNGHTDCVRLLLSAEAQVNAADKNGFTPLCAAAAQGHFECVELLISYDANINHAADGGQTPLYLACKNGNKECIKLLLEAGTNRSVKTTDGWTPVHAAVDTGNVDSLKLLMYHRIPAHGNSFNEEESESSVFDLDGGEESPEGISKPVVPADLINHANREGWTAAHIAASKGFKNCLEILCRHGGLEPERRDKCNRTVHDVATDDCKHLLENLNALKIPLRISVGEIEPSNYGSDDLECENTICALNIRKQTSWDDFSKAVSQALTNHFQAISSDGWWSLEDVTCNNTTDSNIGLSARSIRSITLGNVPWSVGQSFAQSPWDFMRKNKAEHITVLLSGPQEGCLSSVTYASMIPLQMMQNYLRLVEQYHNVIFHGPEGSLQDYIVHQLALCLKHRQMAAGFSCEIVRAEVDAGFSKEQLLDLFISSACLIPVKQSPSKKKIIIILENLEKSSLSELLRDFLAPLENRSTESPCTFQKGNGLSECYYFHENCFLMGTIAKACLQGSDLLVQQHFRWVQLRWDGEPMQGLLQRFLRRKVVNKFKGQAPSPCDPVCKIVDWALSVWRQLNSCLARLGTPEALLGPKYFLSCPVVPGHAQVTVKWMSKLWNGVIAPRVQEAILSRASVKRQPGFGQTTAKRHPSQGQQAVVKAALSILLNKAVLHGCPLPRAELDQHTADFKGGSFPLSIVSSYNTCNKKKGESGAWRKVNTSPRRKSGRFSLPTWNKPDLSTEGMKNKTISQLNCNRNASLSKQKSLENDLSLTLNLDQRLSLGSDDEADLVKELQSMCSSKSESDISKIADSRDDLRMFDSSGNNPVLSATINNLRMPVSQKEVSPLSSHQTTECSNSKSKTELGVSRVKSFLPVPRSKVTQCSQNTKRSSSSSNTRQIEINNNSKEVNWNLHKNEHLEKPNK

SEQ ID NO: 743525 - protein, 1286 aa, Homo sapiens
LLLTLPQVTLVPCAHGLLQERYGKVCGGNPMQREQQGQRPRGRTMFRKLRASSEAKGVSRIKVGDKLEMEKLQLQALEQEHKKLAARLEEERGKNKQVVLMLVKECKQLSGKVIEEAQKLEDVMAKLEEEKKKTNELEEELSAEKRRSTEMEAQMEKQLSEFDTEREQLRAKLNREEAHTTDLKEEIDKMRKMIEQLKRGSDSKPSLSLPRKTKDRRLVSISVGTEGTVTRSVACQTDLVTENADHMKKLPLTMPVKPSTGSPLVSANAKGSVCTSATMARPGIDRQASYGDLIGASVPAFPPPSANKIEENGPSTGSTPDPTSSTPPLPSNAAPPTAQTPGIAPQNSQAPPMHSLHSPCANTSLHPGLNPRIQAARFRFQGNANDPDQNGNTTQSPPSRDVSPTSRDNLVAKQLARNTVTQALSRFTSPQAGAPSRPGVPPTGDVGTHPPVGRTSLKTHGVARVDRGNPPPIPPKKPGLSQTPSPPHPQLKVIIDSSRASNTGAKVDNKTVASTPSSLPQGNRVINEENLPKSSSPQLPPKPSIDLTVAPAGCAVSALATSQVGAWPAATPGLNQPACSDSSLVIPTTIAFCSSINPVSASSCRPGASDSLLVTASGWSPSLTPLLMSGGPAPLAGRPTLLQQAAAQGNVTLLSMLLNEEGLDINYSCEDGHSALYSAAKNGHTDCVRLLLSAEAQVNAADKNGFTPLCAAAAQGHFECVELLISYDANINHAADGGQTPLYLACKNGNKECIKLLLEAGTNRSVKTTDGWTPVHAAVDTGNVDSLKLLMYHRIPAHGNSFNEEESESSVFDLDGGEESPEGISKPVVPADLINHANREGWTAAHIAASKGFKNCLEILCRHGGLEPERRDKCNRTVHDVATDDCKHLLENLNALKIPLRISVGEIEPSNYGSDDLECENTICALNIRKQTSWDDFSKAVSQALTNHFQAISSDGWWSLEDVTCNNTTDSNIGLSARSIRSITLGNVPWSVGQSFAQSPWDFMRKNKAEHITVLLSGPQEGCLSSVTYASMIPLQMMQNYLRLVEQYHNVIFHGPEGSLQDYIVHQLALCLKHRQMAAGFSCEIVRAEVDAGFSKEQLLDLFISSACLIPVKQSPSKKKIIIILENLEKSSLSELLRDFLAPLENRSTESPCTFQKGNGLSECYYFHENCFLMGTIAKACLQGSDLLVQQHFRWVQLRWDGEPMQGLLQRFLRRKVVNKFKGQAPSPCDPVCKIVDWALSVWRQLNSCLARLGTPEALLGPKYFLSCPVVPGHAQVTVKARPAYS

SEQ ID NO: 743526 - protein, 1052 aa, Homo sapiens
LLLTLPQVTLVPCAHGLLQERYGKVCGGNPMQREQQGQRPRGRTMFRKLRASSEAKGVSRIKVGDKLEMEKLQLQALEQEHKKLAARLEEERGKNKQVVLMLVKECKQLSGKVIEEAQKLEDVMAKLEEEKKKTNELEEELSAEKRRSTEMEAQMEKQLSEFDTEREQLRAKLNREEAHTTDLKEEIDKMRKMIEQLKRGSDSKPSLSLPRKTKDRRLVSISVGTEGTVTRSVACQTDLVTENADHMKKLPLTMPVKPSTGSPLVSANAKGSVCTSATMARPGIDRQASYGDLIGASVPAFPPPSANKIEENGPSTGSTPDPTSSTPPLPSNAAPPTAQTPGIAPQNSQAPPMHSLHSPCANTSLHPGLNPRIQAARFRFQGNANDPDQNGNTTQSPPSRDVSPTSRDNLVAKQLARNTVTQALSRFTSPQAGAPSRPGVPPTGDVGTHPPVGRTSLKTHGVARVDRGNPPPIPPKKPGLSQTPSPPHPQLKVIIDSSRASNTGAKVDNKTVASTPSSLPQGNRVINEENLPKSSSPQLPPKPSIDLTVAPAGCAVSALATSQVGAWPAATPGLNQPACSDSSLVIPTTIAFCSSINPVSASSCRPGASDSLLVTASGWSPSLTPLLMSGGPAPLAGRPTLLQQAAAQGNVTLLSMLLNEEGLDINYSCEDGHSALYSAAKNGHTDCVRLLLSAEAQVNAADKNGFTPLCAAAAQGHFECVELLISYDANINHAADGGQTPLYLACKNGNKECIKLLLEAGTNRSVKTTDGWTPVHAAVDTGNVDSLKLLMYHRIPAHGNSFNEEESESSVFDLDGGEESPEGISKPVVPADLINHANREGWTAAHIAASKGFKNCLEILCRHGGLEPERRDKCNRTVHDVATDDCKHLLENLNALKIPLRISVGEIEPSNYGSDDLECENTICALNIRKQTSWDDFSKAVSQALTNHFQAISSDGWWSLEDVTCNNTTDSNIGLSARSIRSITLGNVPWSVGQSFAQSPWDFMRKNKAEHITVLLSGPQEGCLSSVTYASMIPLQMMQNYLRLMGKLNRER

SEQ ID NO: 743527 - protein, 143 aa, Homo sapiens
NLLATRKPLFKKTLGDSFKCRMLLESTLHPSCLYVKLHKRKTKLCGVKQPRHLFFRGRIIFQDTKAQITRYGTKMNTVKESNTHFQGPNPYPLKRNPLNWVGLLYGCLICCKFCSRTIIQACWVDKIKRHLTAAVLGSFENMC

SEQ ID NO: 743528 - protein, 119 aa, Homo sapiens
MRLLPRSRDNRGPLSRRPPFSPPPAARSCRPTPRRLRTSPPHFPLHLWRVRAVDAPALREEGLARILGTSWDAEIGSEPSPFCCPELGKLAVERLARGRQAENLLHLLGNCNRFVMHFR

SEQ ID NO: 743529 - protein, 150 aa, Homo sapiens
QSTSTSPLEPGTIQLSAHRGLYHDFWEEQVETGQTHHPDLVAAFHPGFHSSPDLMEAWLPTLLLLRDYKIPTLITVYSHQELVSSLQILVELDTHITAFGSNPFMSLKPEQVYSSPNKQPVYCSAYYIMFLGSSCQLDNRQLEEKVDGGI

SEQ ID NO: 743530 - protein, 42 aa, Homo sapiens
MPLIKAAGVNVEPFWPGLFAKALANVNIGSLICNVGAGGPAP

SEQ ID NO: 743531 - protein, 111 aa, Homo sapiens
  misc_feature (47)..(47): Xaa can be any naturally occurring amino acid
SAAFVEWFFIDRLPRRGRVLLDPRWFGWWLLLPHSMCVSAPPWRAVXLGVPSLLPTMCCPPALCAPLCFSPRLLWAGWCVLYVAAALCVPSVIISWPLSSLGGPSSVLQRT

SEQ ID NO: 743532 - protein, 573 aa, Homo sapiens
MEEEQDLPEQPVKKAKMQESGEQTISQVSNPDVSDQKPETSSLASNLPMSEEIMTCTDYIPRSSNDYTSQMYSAKPYAHILSVPVSETAYPGQTQYQTLQQTQPYAVYPQATQTYGLPPFGALWPGMKPESGLIQTPSPSQHSVLTCTTGLTTSQPSPAHYSYPIQASSTNASLISTSSTIANIPAAAVASISNQDYPTYTILGQNQYQACYPSSSFGVTGQTNSDAESTTLAATTYQSEKPSVMAPAPAAQRLSSGDPSTSPSLSQTTPSKDTDDQSRKNMTSKNRGKRKADATSSQDSELERVFLWDLDETIIIFHSLLTGSYAQKYGKDPTVVIGSGLTMEEMIFEVADTHLFFNDLEECDQVHVEDVASDDNGQDLSNYSFSTDGFSGSGGSGSHGSSVGVQGGVDWMRKLAFRYRKVREIYDKHKSNVGGLLSPQRKEALQRLRAEIEVLTDSWLGTALKSLLLIQSRKNCVNVLITTTQLVPALAKVLLYGLGEIFPIENIYSATKIGKESCFERIVSRFGKKVTYVVIGDGRDEEIAAKQHNMPFWRITNHGDLVSLHQALELDFL

SEQ ID NO: 743533 - protein, 534 aa, Homo sapiens
MEEEQDLPEQPVKKAKMQESGEQTISQVSNPDVSDQKPETSSLASNLPMSEEIMTCTDYIPRSSNDYTSQMYSAKPYAHILSVPVSETAYPGQTQYQTLQQTQPYAVYPQATQTYGLPPFGALWPGMKPESGLIQTPSPSQHSVLTCTTGLTTSQPSPAHYSYPIQASSTNASLISTSSTIANIPAAAVASISNQDYPTYTILGQNQYQACYPSSSFGVTGQTNSDAESTTLAATTYQSEKPSVMAPAPAAQRLSSGDPSTSPSLSQTTPSKDTDDQSRKNMTSKNRGKRKADATSSQDSELERVFLWDLDETIIIFHSLLTGSYAQKYGKDPTVVIGSGLTMEEMIFEVADTHLFFNDLEECDQVHVEDVASDDNGQDLSNYSFSTDGFSGSGGSGSHGSSVGVQGGVDWMRKLAFRYRKVREIYDKHKSNVGGLLSPQRKEALQRLRAEIEVLTDSWLGTALKSLLLIQSRKNCVNVLITTTQLVPALAKVLLYGLGEIFPIENIYSATKIGMVSMLFLVTGLAIKLSTHEE

SEQ ID NO: 743534 - protein, 362 aa, Homo sapiens
MEEEQDLPEQPVKKAKMQESGEQTISQVSNPDVSDQKPETSSLASNLPMSEEIMTCTDYIPRSSNDYTSQMYSAKPYAHILSVPVSETAYPGQTQYQTLQQTQPYAVYPQATQTYGLPPFGALWPGMKPESGLIQTPSPSQHSVLTCTTGLTTSQPSPAHYSYPIQASSTNASLISTSSTIANIPAAAVASISNQDYPTYTILGQNQYQACYPSSSFGVTGQTNSDAESTTLAATTYQSEKPSVMAPAPAAQRLSSGDPSTSPSLSQTTPSKDTDDQSRKNMTSKNRGKRKADATSSQDSELERVFLWDLDETIIIFHSLLTGSYAQKYGKDPTVVIGSGLTMEEMIFEVADTHLFFNDLET

SEQ ID NO: 743535 - protein, 316 aa, Homo sapiens
MEEEQDLPEQPVKKAKMQESGEQTISQVSNPDVSDQKPETSSLASNLPMSEEIMTCTDYIPRSSNDYTSQMYSAKPYAHILSVPVSETAYPGQTQYQTLQQTQPYAVYPQATQTYGLPPFASSTNASLISTSSTIANIPAAAVASISNQDYPTYTILGQNQYQACYPSSSFGVTGQTNSDAESTTLAATTYQSEKPSVMAPAPAAQRLSSGDPSTSPSLSQTTPSKDTDDQSRKNMTSKNRGKRKADATSSQDSELERVFLWDLDETIIIFHSLLTGSYAQKYGKDPTVVIGSGLTMEEMIFEVADTHLFFNDLET

SEQ ID NO: 743536 - protein, 304 aa, Homo sapiens
MEEEQDLPEQPVKKAKMQESGEQTISQVSNPDVSDQKPETSSLASNLPMSEEIMTCTDYIPRSSNDYTSQMYSAKPYAHILSVPVSETAYPGQTQYQTLQQTQPYAVYPQATQTYGLPPFGALWPGMKPESGLIQTPSPSQHSVLTCTTGLTTSQPSPAHYSYPIQASSTNASLISTSSTIANIPAAAVASISNQDYPTYTILGQNQYQACYPSSSFGVTGQTNSDAESTTLAATTYQSEKPSVMAPAPAAQRLSSGDPSTSPSLSQTTPSKDTDDQSRKNMTSKNRGKRKADATSSQDSELEV

SEQ ID NO: 743537 - protein, 304 aa, Homo sapiens; identical to SEQ ID NO: 743536

SEQ ID NO: 743538 - protein, 258 aa, Homo sapiens [sequence omitted]

SEQ ID NO: 743539 - protein, 1084 aa, Homo sapiens
ASFTGGRTNNAETVGKSPAYRRCSMNRSRAIVQRGRVLPPPAPLDTTNLAGRRTLQGRAKMASVPVYCLCRLPYDVTRFMIECDMCQDWFHGSCVGVEEEKAADIDLYHCPNCEVLHGPSIMKKRRGSSKGHDTHKGKPVKTGSPTFVRELRSRTFDSSDEVILKPTGNQLTVEFLEENSFSVPILVLKKDGLGMTLPSPSFTVRDVEHYVGSDKEIDVIDVTRQADCKMKLGDFVKYYYSGKREKVLNVISLEFPDTRLSNLVETPKIVRKLSWVENLWPEECVFERPNVQKYCLMSVRDSYTDFHIDFGGTSVWYHVLKGEKIFYLIRPTNANLTLFECWSSSSNQNEMFFGDQVDKCYKCSVKQGQTLFIPTGWIHAVLTPVDCLAFGGNFLHSLNIEMQLKAYEIEKRLSTADLFRFPNFETICWYVGKHILDIFRGLRENRRHPASYLVHGGKALNLAFRAWTRKEALPDHEDEIPETVRTVQLIKDLAREIRLVEDIFQQNVGKTSNIFGLQRIFPAGSIPLTRPAHSTSVSMSRLSLPSKNGSKKKGLKPKELFKKAERKGKESSALGPAGQLSYNLMDTYSHQALKTGSFQKAKFNITGACLNDSDDDSPDLDLDGNESPLALLMSNGSTKRVKSLSKSRRTKIAKKVDKARLMAEQVMEDEFDLDSDDELQIDERLGKEKATLIIRPKFPRKLPRAKPCSDPNRVREPGEVEFDIEEDYTTDEDMVEGVEGKLGNGSGAGGILDLLKASRQVGGPDYAALTEAPASPSTQEAIQGMLCMANLQSSSSSPATSSLQAWWTGGQDRSSGSSSSGLGTVSNSPASQRTPGKRPIKRPAYWRTESEEEEENASLDEQDSLGACFKDAEYIYPSLESDDDDPALKSRPKKKKNSDDAPWSPKARVTPTLPKQDRPVREGTRVASIETGLAAAAAKLAQQELQKAQKKKYIKKKPLLKEVEQPRPQDSNLSLTVPAPTVAATPQLVTSSSPLPPPEPKQEALSGSLADHEYTARPNAFGMAQANRSTTPMAPGVFLTQRRPSVGSQSNQAGQGKRPKKGLATAKQRLGRILKIHRNGKLLL

SEQ ID NO: 743540 - protein, 923 aa, Homo sapiens
MASVPVYCLCRLPYDVTRFMIECDMCQDWFHGSCVGVEEEKAADIDLYHCPNCEVLHGPSIMKKRRGSSKGHDTHKGKPVKTGSPTFVRELRSRTFDSSDEVILKPTGNQLTVEFLEENSFSVPILVLKKDGLGMTLPSPSFTVRDVEHYVGSDKEIDVIDVTRQADCKMKLGDFVKYYYSGKREKVLNVISLEFPDTRLSNLVETPKIVRKLSWVENLWPEECVFERPNVQKYCLMSVRDSYTDFHIDFGGTSVWYHVLKGEKIFYLIRPTNANLTLFECWSSSSNQNEMFFGDQVDKCYKCSVKQGQTLFIPTGWIHAVLTPVDCLAFGGNFLHSLNIEMQLKAYEIEKRLSTADLFRFPNFETICWYVGKHILDIFRGLRENRRHPASYLVHGGKALNLAFRAWTRKEALPDHEDEIPETVRTVQLIKDLAREIRLVEFNITGACLNDSDDDSPDLDLDGNESPLALLMSNGSTKRVKSLSKSRRTKIAKKVDKARLMAEQVMEDEFDLDSDDELQIDERLGKEKATLIIRPKFPRKLPRAKPCSDPNRVREPGEVEFDIEEDYTTDEDMVEGVEGKLGNGSGAGGILDLLKASRQVGGPDYAALTEAPASPSTQEAIQGMLCMANLQSSSSSPATSSLQAWWTGGQDRSSGSSSSGLGTVSNSPASQRTPGKRPIKRPAYWRTESEEEEENASLDEQDSLGACFKDAEYIYPSLESDDDDPALKSRPKKKKNSDDAPWSPKARVTPTLPKQDRPVREGTRVASIETGLAAAAAKLAQQELQKAQKKKYIKKKPLLKEVEQPRPQDSNLSLTVPAPTVAATPQLVTSSSPLPPPEPKQEALSGSLADHEYTARPNAFGMAQANRSTTPMAPGVFLTQRRPSVGSQSNQAGQGKRPKKGLATAKQRLGRILKIHRNGKLLL

SEQ ID NO: 743541 - protein, 923 aa, Homo sapiens; identical to SEQ ID NO: 743540

SEQ ID NO: 743542 - protein, 520 aa, Homo sapiens
MSSSSYAKNGTADGPHSPTSQVARGTTTRRSRLKRSDGSTTSTSFILRQGSADSYTSRPSDSDVSLEEDREAIRQEREQQAAIQLERAKSKPVAFAVKTNVSYCGALDEDVPVPSTAISFDAKDFLHIKEKYNNDWWIGRLVKEGCEIGFIPSPLRLENIRIQQEQKRGRFHGGKSSGNSSSSLGEMVSGTFRATPTSTAKQKQKVTEHIPPYDVVPSMRPVVLVGPSLKGYEVTDMMQKALFDFLKHRFDGRISITRVTADISLAKRSVLNNPSKRAIIERSNTRSSLAEVQSEIERIFELARSLQLVVLDADTINHPAQLIKTSLAPIIVHVKVSSPKVLQRLIKSRGKSQSKHLNVQLVAADKLAQCPPEMFDVILDENQLEDACEHLGEYLEAYWRATHTTSSTPMTPLLGRNLGSTALSPYPTAISGLQSQRMRHSNHSTENSPIERRSLMTSDENYHNERARKSRNRLSSSSQHSRDHYPLVEEDYPDSYQDTYKPHRNRGSPGGYSHDSRHRL

SEQ ID NO: 743543 - protein, 246 aa, Homo sapiens
MSSSSYAKNGTADGPHSPTSQVARGTTTRRSRLKRSDGSTTSTSFILRQGSADSYTSRPSDSDVSLEEDREAIRQEREQQAAIQLERAKSKPVAFAVKTNVSYCGALDEDVPVPSTAISFDAKDFLHIKEKYNNDWWIGRLVKEGCEIGFIPSPLRLENIRIQQEQKRGRFHGGKSSGNSSSSLGEMVSGTFRATPTSTDGAHSSLRCCTVNASGGVSGAVTERLRGTNIICYSSVLDRAPRRQSC

SEQ ID NO: 743544 - protein, 941 aa, Homo sapiens
TPGMDPAVNPAFPPAAPAGYGGYQPHSGQDFAYGSRPQEPVPTATTMATYQDSYSYGQSAAARSYEDRPYFQSAALQSGRMTAADSGQPGTQEACGQPSPHGSHSHAQPPQQAPIVESGQPASTLSSGYTYPTATGVQPESSASIVTSYPPPSYNPTCTAYTAPSYPNYDASVYSAASPFYPPAQPPPPPGPPQQLPPPPAPAGSGSSPRADSKPPLPSKLPRPKAGPRQLQLHYCDICKISCAGPQTYREHLGGQKHRKKEAAQKTGVQPNGSPRGVQAQLHCDLCAVSCTGADAYAAHIRGSKHQKVFKLHAKLGKPIPTLEPALATESPPGAEAKPTSPTGPSVCASSRPALAKRPVASKALCEGPPEPQAAGCRPQWGKPAQPKLEGPGAPTQGGSKEAPAGCSDAQPVGPEYVEEVFSDEGRVLRFHCKLCECSFNDLNAKDLHVRGRRHRLQYRKKVNPDLPIATEPSSRARKVLEERMRKQRHLAEERLEQLRRWHAERRRLEEEPPQDVPPHAPPDWAQPLLMGRPESPASAPLQPGRRPASSDDRHVMCKHATIYPTEQELLAVQRAVSHAERALKLVSDTLAEEDRGRREEEGDKRSSVAPQTRVLKGVMRVGILAKGLLLRGDRNVRLALLCSEKPTHSLLRRIAQQLPRQLQMVTEDEYEVSSDPEANIVISSCEEPRMQVTISVTSPLMREDPSTDPGVEEPQADAGDVLSPKKCLESLAALRHARWFQARASGLQPCVIVIRVLRDLCRRVPTWGALPAWAMELLVEKAVSSAAGPLGPGDAVRRVLECVATGTLLTDGPGLQDPCERDQTDALEPMTLQEREDVTASAQHALRMLAFRQTHKVLGMDLLPPRHRLGARFRKRQRGPGEGEEGAGEKKRGRRRRRGARVSRLPPPPAGLCIPALLDVCAPTNGCFIPDVGQWSFPFE

SEQ ID NO: 743545 - protein, 314 aa, Homo sapiens
GRLSPVGSQRRPGRLPSASWPSADLTTNAGSWLMGSGSVEGVGAALGVGTLPSRGHSTAWWHRAHVGVDSVSTRHLRGPPGSLLSSLGFTLTTEPGAMPCGHVSPRKLTVCFSPEGSSQRPAAMRDRHQGPEGPLPACAHLGGPASLAMELLVEKAVSSAAGPLGPGDAVRRVLECVATGTLLTDGPGLQDPCERDQTDALEPMTLQEREDVTASAQHALRMLAFRQTHKVLGMDLLPPRHRLGARFRKRQRGPGEGEEGAGEKKRGRRRRRGARVSRLPPPPAGLCIPALLDVCAPTNGCFIPDVGQWSFPFE

SEQ ID NO: 743546 - protein, 634 aa, Homo sapiens
MESGRGSSTPPGPIAALGMPDTGPGSSSLGKLQALPVGPRAHCGDPVSLAAAGDGSPDIGPTGELSGSLKIPNRDSGIDSPSSSVAGENFPCEEGLEAGPSPTVLGAHAEMALDSQVPKVTPQEEADSDVGEEPDSENTPQKADKDAGLAQHSGPQKLLHIAQELLHTEETYVKRLHLLDQVFCTRLTDAGIPPEVIMGIFSNISSIHRFHGQFLLPELKTRITEEWDTNPRLGDILQKLAPFLKMYGEYVKNFDRAVGLVSTWTQRSPLFKDVVHSIQKQEVCGNLTLQHHMLEPVQRVPRYELLLKDYLKRLPQDAPDRKDAERSLELISTAANHSNAAIRKVEKMHKLLEVYEQLGGEEDIVNPANELIKEGQIQKLSAKNGTPQDRHLFLFNSMILYCVPKLRLMGQKFSVREKMDISGLQVQDIVKPNTAHTFIITGRKRSLELQTRTEEEKKEWIQIIQATIEKHKQNSETFKAFGGAFSQDEDPSLSPDMPITSTSPVEPVVTTEGSSGAAGLEPRKLSSKTRRDKEKQSCKSCGETFNSITKRRHHCKLCGAVICGKCSEFKAENSRQSRVCRDCFLTQPVAPESTEVGAPSSCSPPGGAAEPPDTCSCAPAAPAASAFGVSLGPG

SEQ ID NO: 743547 - protein, 634 aa, Homo sapiens; identical to SEQ ID NO: 743546

SEQ ID NO: 743548 - protein, 725 aa, Homo sapiens
MESGRGSSTPPGPIAALGMPDTGPGSSSLGKLQALPVGPRAHCGDPVSLAAAGDGSPDIGPTGELSGSLKIPNRDSGIDSPSSSVAGENFPCEEGLEAGPSPTVLGAHAEMALDSQVPKVTPQEEADSDVGEEPDSENTPQKADKDAGLAQHSGPQKLLHIAQELLHTEETYVKRLHLLDQVFCTRLTDAGIPPEVIMGIFSNISSIHRFHGQFLLPELKTRITEEWDTNPRLGDILQKLAPFLKMYGEYVKNFDRAVGLVSTWTQRSPLFKDVVHSIQKQEVCGNLTLQHHMLEPVQRVPRYELLLKDYLKRLPQDAPDRKDAERSLELISTAANHSNAAIRKVEKMHKLLEVYEQLGGEEDIVNPANELIKEGQIQKLSAKNGTPQDRHLFLFNSMILYCVPKLRLMGQKFSVREKMDISGLQVQDIVKPNTAHTFIITGRKRSLELQTRTEEEKKEWIQIIQATIEKHKQNSETFKAFGGAFSQDEDPSLSPDMPITSTSPVEPVVTTEGSSGAAGLEPRKLSSKTRRDKEKQSCKSCGETFNSITKRRHHCKLCGAVICGKCSEFKAENSRQSRVCRDCFLTQPVAPESTEKTPTADPQPSLLCGPLRLSESGETWSEVWAAIPMSDPQVLHLQGGSQDGRLPRTIPLPSCKLSVPDPEERLDSGHVWKLQWAKQSWYLSASSAELQQQWLETLSTAAHGDTAQDSPGALQLQVPMGAAAP

SEQ ID NO: 743549 - protein, 676 aa, Homo sapiens
MESGRGSSTPPGPIAALGMPDTGPGSSSLGKLQALPVGPRAHCGDPVSLAAAGDGSPDIGPTGELSGSLKIPNRDSGIDSPSSSVAGENFPCEEGLEAGPSPTVLGAHAEMALDSQVPKVTPQEEADSDVGEEPDSENTPQKADKDAGLAQHSGPQKLLHIAQELLHTEETYVKRLHLLDQVFCTRLTDAGIPPEVIMGIFSNISSIHRFHGQFLLPELKTRITEEWDTNPRLGDILQKLAPFLKMYGEYVKNFDRAVGLVSTWTQRSPLFKDVVHSIQKQEVCGNLTLQHHMLEPVQRVPRYELLLKDYLKRLPQDAPDRKDAERSLELISTAANHSNAAIRKVFNSMILYCVPKLRLMGQKFSVREKMDISGLQVQDIVKPNTAHTFIITGRKRSLELQTRTEEEKKEWIQIIQATIEKHKQNSETFKAFGGAFSQDEDPSLSPDMPITSTSPVEPVVTTEGSSGAAGLEPRKLSSKTRRDKEKQSCKSCGETFNSITKRRHHCKLCGAVICGKCSEFKAENSRQSRVCRDCFLTQPVAPESTEKTPTADPQPSLLCGPLRLSESGETWSEVWAAIPMSDPQVLHLQGGSQDGRLPRTIPLPSCKLSVPDPEERLDSGHVWKLQWAKQSWYLSASSAELQQQWLETLSTAAHGDTAQDSPGALQLQVPMGAAAP

SEQ ID NO: 743550 - protein, 715 aa, Homo sapiens
MESGRGSSTPPGPIAALGMPDTGPGSSSLGKLQALPVGPRAHCGDPVSLAAAGDGSPDIGPTGELSGSLKIPNRDSGIDSPSSSVAGENFPCEEGLEAGPSPTVLGAHAEMALDSQVPKVTPQEEADSDVGEEPDSENTPQKADKDAGLAQHSGPQKLLHIAQELLHTEETYVKRLHLLDQVFCTRLTDAGIPPEVIMGIFSNISSIHRFHGQFLLPELKTRITEEWDTNPRLGDILQKLAPFLKMYGEYVKNFDRAVGLVSTWTQRSPLFKDVVHSIQKQEVCGNLTLQHHMLEPVQRVPRYELLLKDYLKRLPQDAPDRKDAERSLELISTAANHSNAAIRKVEKMHKLLEVYEQLGGEEDIVNPANELIKEGQIQKLSAKNGTPQDRHLFLFNSMILYCVPKLRLMGQKFSVREKMDISGLQVQDIVKPNTAHTFIITGRKRSLELQTRIIQATIEKHKQNSETFKAFGGAFSQDEDPSLSPDMPITSTSPVEPVVTTEGSSGAAGLEPRKLSSKTRRDKEKQSCKSCGETFNSITKRRHHCKLCGAVICGKCSEFKAENSRQSRVCRDCFLTQPVAPESTEKTPTADPQPSLLCGPLRLSESGETWSEVWAAIPMSDPQVLHLQGGSQDGRLPRTIPLPSCKLSVPDPEERLDSGHVWKLQWAKQSWYLSASSAELQQQWLETLSTAAHGDTAQDSPGALQLQVPMGAAAP

SEQ ID NO: 743551 - protein, 359 aa, Homo sapiens
GSHVRSSLGPLGGPAGSSRSSPVPSLLQFNSMILYCVPKLRLMGQKFSVREKMDISGLQVQDIVKPNTAHTFIITGRKRSLELQTRTEEEKKEWIQIIQATIEKHKQNSETFKAFGGAFSQDEDPSLSPDMPITSTSPVEPVVTTEGSSGAAGLEPRKLSSKTRRDKEKQSCKSCGETFNSITKRRHHCKLCGAVICGKCSEFKAENSRQSRVCRDCFLTQPVAPESTEKTPTADPQPSLLCGPLRLSESGETWSEVWAAIPMSDPQVLHLQGGSQDGRLPRTIPLPSCKLSVPDPEERLDSGHVWKLQWAKQSWYLSASSAELQQQWLETLSTAAHGDTAQDSPGALQLQVPMGAAAP

SEQ ID NO: 743552 - protein, 725 aa, Homo sapiens; identical to SEQ ID NO: 743548

SEQ ID NO: 743553 - protein, 410 aa, Homo sapiens
SSVPGSTDVERSLELISTAANHSNAAIRKVEKMHKLLEVYEQLGGEEDIVNPANELIKEGQIQKLSAKNGTPQDRHLFLFNSMILYCVPKLRLMGQKFSVREKMDISGLQVQDIVKPNTAHTFIITGRKRSLELQTRTEEEKKEWIQIIQATIEKHKQNSETFKAFGGAFSQDEDPSLSPDMPITSTSPVEPVVTTEGSSGAAGLEPRKLSSKTRRDKEKQSCKSCGETFNSITKRRHHCKLCGAVICGKCSEFKAENSRQSRVCRDCFLTQPVAPESTEKTPTADPQPSLLCGPLRLSESGETWSEVWAAIPMSDPQVLHLQGGSQDGRLPRTIPLPSCKLSVPDPEERLDSGHVWKLQWAKQSWYLSASSAELQQQWLETLSTAAHGDTAQDSPGALQLQVPMGAAAP

SEQ ID NO: 743554 - protein, 315 aa, Homo sapiens
MTSLGLLCSLFLPLQVQDIVKPNTAHTFIITGRKRSLELQTRTEEEKKEWIQIIQATIEKHKQNSETFKAFGGAFSQDEDPSLSPDMPITSTSPVEPVVTTEGSSGAAGLEPRKLSSKTRRDKEKQSCKSCGETFNSITKRRHHCKLCGAVICGKCSEFKAENSRQSRVCRDCFLTQPVAPESTEKTPTADPQPSLLCGPLRLSESGETWSEVWAAIPMSDPQVLHLQGGSQDGRLPRTIPLPSCKLSVPDPEERLDSGHVWKLQWAKQSWYLSASSAELQQQWLETLSTAAHGDTAQDSPGALQLQVPMGAAAP

SEQ ID NO: 743555 - protein, 725 aa, Homo sapiens; identical to SEQ ID NO: 743548

SEQ ID NO: 743556 - protein, 229 aa, Homo sapiens [sequence omitted]

SEQ ID NO: 743557 - protein, 230 aa, Homo sapiens
EAYDPGTSHPSHFTGEETEAQKGELEPRKLSSKTRRDKEKQSCKSCGETFNSITKRRHHCKLCGAVICGKCSEFKAENSRQSRVCRDCFLTQPVAPESTEKTPTADPQPSLLCGPLRLSESGETWSEVWAAIPMSDPQVLHLQGGSQDGRLPRTIPLPSCKLSVPDPEERLDSGHVWKLQWAKQSWYLSASSAELQQQWLETLSTAAHGDTAQDSPGALQLQVPMGAAAP

SEQ ID NO: 743558 - protein, 217 aa, Homo sapiens
MLRGERWFLVMNLICVSLMASDGASSPVLGGSSHSSSHAHKTPGLWTLQDRRVICGKCSEFKAENSRQSRVCRDCFLTQPVAPESTEKTPTADPQPSLLCGPLRLSESGETWSEVWAAIPMSDPQVLHLQGGSQDGRLPRTIPLPSCKLSVPDPEERLDSGHVWKLQWAKQSWYLSASSAELQQQWLETLSTAAHGDTAQDSPGALQLQVPMGAAAP

SEQ ID NO: 743559 - protein, 396 aa, Homo sapiens
MESGRGSSTPPGPIAALGMPDTGPGSSSLGKLQALPVGPRAHCGDPVSLAAAGDGSPDIGPTGELSGSLKIPNRDSGIDSPSSSVAGENFPCEEGLEAGPSPTVLGAHAEMALDSQVPKVTPQEEADSDVGEEPDSENTPQKADKDAGLAQHSGPQKLLHIAQELLHTEETYVKRLHLLDQVFCTRLTDAGIPPEVIMGIFSNISSIHRFHGQFLLPELKTRITEEWDTNPRLGDILQKLAPFLKMYGEYVKNFDRAVGLVSTWTQRSPLFKDVVHSIQKQEVCGNLTLQHHMLEPVQRVPRYELLLKDYLKRLPQDAPDRKDAERSLELISTAANHSNAAIRKVEKMHKLLEVYEQLGGEEDIVNPANELIKEGQIQKLSAKNGTPQDRHSSCCS

SEQ ID NO: 743560 - protein, 227 aa, Homo sapiens
MESGRGSSTPPGPIAALGMPDTGPGSSSLGKLQALPVGPRAHCGDPVSLAAAGDGSPDIGPTGELSGSLKIPNRDSGIDSPSSSVAGENFPCEEGLEAGPSPTVLGAHAEMALDSQVPKVTPQEEADSDVGEEPDSENTPQKADKDAGLAQHSGPQKLLHIAQELLHTEETYVKRLHLLDQVFCTRLTDAGIPPEVIMGIFSNISSIHRFHGQFLLPELKTRITEEW

SEQ ID NO: 743561 - protein, 112 aa, Homo sapiens
AEQTILKQNIFHFLFFKSLSVQDPAEADQGIHTSHTTPSPPAPGFRWGAEGTAWELHLGVAPEGAGPCLASTDSGLFLPYRKPLASLHLSPVSSALRMESGRGSSTPPGPIA

SEQ ID NO: 743562 - protein, 201 aa, Homo sapiens
MGSRKCGGCLSCLLIPLALWSIIVNILLYFPNGQTSYASSNKLTNYVWYFEGICFSGIMMLIVTTVLLVLENNNNYKCCQSENCSKKYVTLLSIIFSSLGIAFSGYCLVISALGLVQGPYCRTLDGWEYAFEGTAGRFLTDSSIWIQCLEPAHVVEWNIILFSILITLSGLQVIICLIRVVMQLSKILCGSYSVIFQPGII

SEQ ID NO: 743563 - protein, 201 aa, Homo sapiens; identical to SEQ ID NO: 743562

SEQ ID NO: 743564 - protein, 201 aa, Homo sapiens; identical to SEQ ID NO: 743562

SEQ ID NO: 743565 - protein, 125 aa, Homo sapiens
MGSSLRVPRVFRLGLALACLGRASGLRASFLQGPAVGSTLVWQETHAGCTARGLDGVLTEWLPIVESQLSHEDTGPWWGQWNIILFSILITLSGLQVIICLIRVVMQLSKILCGSYSVIFQPGII

SEQ ID NO: 743566 - protein, 797 aa, Homo sapiens
MDCSAPKEMNKLPANSPEAAAAQGHPDGPCAPRTSPEQELPAAAAPPPPRVPRSASTGAQTFQSADARACEAERPGVGSCKLSSPRAQAASAALRDLREAQGAQASPPPGSSGPGNALHCKIPSLRGPEGDANVSVGKGTLERNNTPVVGWVNMSQSTVVLGTDGITSVLPGSVATVATQEDEQGDENKARGNWSSKLDFILSMVGYAVGLGNVWRFPYLAFQNGGGAFLIPYLMMLALAGLPIFFLEVSLGQFASQGPVSVWKAIPALQGCGIAMLIISVLIAIYYNVIICYTLFYLFASFVSVLPWGSCNNPWNTPECKDKTKLLLDSCVISDHPKIQIKNSTFCMTAYPNVTMVNFTSQANKTFVSGSEEYFKYFVLKISAGIEYPGEIRWPLALCLFLAWVIVYASLAKGIKTSGKVVYFTATFPYVVLVILLIRGVTLPGAGAGIWYFITPKWEKLTDATVWKDAATQIFFSLSAAWGGLITLSSYNKFHNNCYRDTLIVTCTNSATSIFAGFVIFSVIGFMANERKVNIENVADQGPGIAFVVYPEALTRLPLSPFWAIIFFLMLLTLGLDTMFATIETIVTSISDEFPKYLRTHKPVFTLGCCICFFIMGFPMITQGGIYMFQLVDTYAASYALVIIAIFELVGISYVYGLQRFCEDIEMMIGFQPNIFWKVCWAFVTPTILTFILCFSFYQWEPMTYGSYRYPNWSMVLGWLMLACSVIWIPIMFVIKMHLAPGRFIERLKLVCSPQPDWGPFLAQHRGERYKNMIDPLGTSSLGLKLPVKDLELGTQC

SEQ ID NO: 743567 - protein, 366 aa, Homo sapiens
MAELQQLQEFEIPTGREALRGNHSALLRVADYCEDNYVQATDKRKALEETMAFTTQALASVAYQVGNLAGHTLRMLDLQGAALRQVEARVSTLGQMVNMHMEKVARREIGTLATVQRLPPGQKVIAPENLPPLTPYCRRPLNFGCLDDIGHGIKDLSTQLSRTGTLSRKSIKAPATPASATLGRPPRIPEPVHLPVVPDGRLSAASSASSLASAGSAEGVGGAPTPKGQAAPPAPPLPSSLDPPPPPAAVEVFQRPPTLEELSPPPPDEELPLPLDLPPPPPLDGDELGLPPPPPGFGPDEPSWVPASYLEKVVTLYPYTSQKDNELSFSEGTVICVTRRYSDGWCEGVSSEGTGFFPGNYVEPSC

SEQ ID NO: 743568 - protein, 366 aa, Homo sapiens; identical to SEQ ID NO: 743567

SEQ ID NO: 743569 - protein, 376 aa, Homo sapiens
CRLYWSEGLMMAELQQLQEFEIPTGREALRGNHSALLRVADYCEDNYVQATDKRKALEETMAFTTQALASVAYQVGNLAGHTLRMLDLQGAALRQVEARVSTLGQMVNMHMEKVARREIGTLATVQRLPPGQKVIAPENLPPLTPYCRRPLNFGCLDDIGHGIKDLSTQLSRTGTLSRKSIKAPATPASATLGRPPRIPEPVHLPVVPDGRLSAASSASSLASAGSAEGVGGAPTPKGQAAPPAPPLPSSLDPPPPPAAVEVFQRPPTLEELSPPPPDEELPLPLDLPPPPPLDGDELGLPPPPPGFGPDEPSWVPASYLEKVVTLYPYTSQKDNELSFSEGTVICVTRRYSDGWCEGVSSEGTGFFPGNYVEPSC

SEQ ID NO: 743570 - protein, 373 aa, Homo sapiens
MAELQQLQEFEIPTGREALRGNHSALLRVADYCEDNYVQATDKRKALEETMAFTTQALASVAYQVGNLAGHTLRMLDLQGAALRQVEARVSTLGQMVNMHMEKVARREIGTLATVQRLPPGQKVIAPENLPPLTPYCRRPLNFGCLDDIGHGIKDLSTQLSRTGTLSRKSIKAPATPASATLGRPPRIPEPVHLPVVPDGRLSAASSASSLASAGSAEGVGGAPTPKGQAAPPAPPLPSSLDPPPPPAAVEVFQRPPTLEELSPPPPAFLLFPQDEELPLPLDLPPPPPLDGDELGLPPPPPGFGPDEPSWVPASYLEKVVTLYPYTSQKDNELSFSEGTVICVTRRYSDGWCEGVSSEGTGFFPGNYVEPSC

SEQ ID NO: 743571 - protein, 370 aa, Homo sapiens
CRLYWSEGLMMAELQQLQEFEIPTGREALRGNHSALLRVADYCEDNYVQATDKRKALEETMAFTTQALASVAYQVGNLAGHTLRMLDLQGAALRQVEARMVNMHMEKVARREIGTLATVQRLPPGQKVIAPENLPPLTPYCRRPLNFGCLDDIGHGIKDLSTQLSRTGTLSRKSIKAPATPASATLGRPPRIPEPVHLPVVPDGRLSAASSASSLASAGSAEGVGGAPTPKGQAAPPAPPLPSSLDPPPPPAAVEVFQRPPTLEELSPPPPDEELPLPLDLPPPPPLDGDELGLPPPPPGFGPDEPSWVPASYLEKVVTLYPYTSQKDNELSFSEGTVICVTRRYSDGWCEGVSSEGTGFFPGNYVEPSC

SEQ ID NO: 743572 - protein, 89 aa, Homo sapiens
RHGRFCWAVPGWAHETHGKVGGGFSGKMSPFTKGAPQRQGTLFCQTRATAFQPGEELTQQRPREGGRSPVAALTDPHKRGLRQQKWAGR

SEQ ID NO: 743573 - protein, 169 aa, Homo sapiens
MERFEVLGIPFSLQLWDTAGQERFKCIASTYYRGAQAIIIVFNLNDVASLEHTKQWLADALKENDPSSVLLFLVGSKKDLSTPAQYALMEKDALQVAQEMKAEYWAVSSLTGENVREFFFRVAALTFEANVLAELEKSGARRIGDVVRINSDDSNLYLTASKKKPTCCP

SEQ ID NO: 743574 - protein, 120 aa, Homo sapiens
MERFEVLGIPFSLQLWDTAGQERFKCIASTYYRGAQAIIIVFNLNDVASLEHTKQWLADALKENDPSSVLLFLVGSKKDLSTPAQYALMEKDALQVAQEMKTVQRLPSPRALCHPHSSRA

SEQ ID NO: 743575 - protein, 198 aa, Homo sapiens [sequence omitted]

SEQ ID NO: 743576 - protein, 141 aa, Homo sapiens
MERFEVLGIPFSLQLWDTAGQERFKCIASTYYRGAQAIIIVFNLNDVASLEHTKQWLADALKENDPSSVLLFLVGSKKDLSTPAQYALMEKDALQVAQEMKAEYWAVSSLTGENVEILSWGGCLEAGWGGTGRHGGEKGGF

SEQ ID NO: 743577 - protein, 104 aa, Homo sapiens
LGHCATLIPPELVEDHAPAPFGGGKTQIFCGHLTLSRPKSCLLVAVFPQRGSWDHASHFLPPGTVPKTGCPLLLRGLSRAPSGSEGECLCSFAQPAGPFVFEDA

SEQ ID NO: 743578 - protein, 308 aa, Homo sapiens
KRRQTSDVSLLGGHLILTLAPPSHASPPPSSPPTSQGRRARGGRLYESPPRPGVEEGSAASPWAPSLPLSPPCVVPGIARCCAAVSDSPSPIRLGFKISKVIVVGDLSVGKTCLINRFCKDTFDKNYKATIGVDFEMERFEVLGIPFSLQLWDTAGQERFKCIASTYYRGAQAIIIVFNLNDVASLEHTKQWLADALKENDPSSVLLFLVGSKKDLSTPAQYALMEKDALQVAQEMKAEYWAVSSLTGENVREFFFRVAALTFEANVLAELEKSGARRIGDVVRIRETNLLMRKSHVPTGDRQPLPPQ

SEQ ID NO: 743579 - protein, 169 aa, Homo sapiens; identical to SEQ ID NO: 743573

SEQ ID NO: 743580 - protein, 169 aa, Homo sapiens; identical to SEQ ID NO: 743573

SEQ ID NO: 743581 - protein, 169 aa, Homo sapiens; identical to SEQ ID NO: 743573

SEQ ID NO: 743582 - protein, 169 aa, Homo sapiens; identical to SEQ ID NO: 743573

SEQ ID NO: 743583 - protein, 169 aa, Homo sapiens; identical to SEQ ID NO: 743573

SEQ ID NO: 743584 - protein, 169 aa, Homo sapiens; identical to SEQ ID NO: 743573

SEQ ID NO: 743585 - protein, 193 aa, Homo sapiens
MERFEVLGIPFSLQLWDTAGQERFKCIASTYYRGAQAIIIVFNLNDVASLEHTKQWLADALKENDPSSVLLFLVGSKKDLSVSVPVGGLPSLVRECPPLTLAFPQTPAQYALMEKDALQVAQEMKAEYWAVSSLTGENVREFFFRVAALTFEANVLAELEKSGARRIGDVVRINSDDSNLYLTASKKKPTCCP

SEQ ID NO: 743586 - protein, 169 aa, Homo sapiens; identical to SEQ ID NO: 743573

SEQ ID NO: 743587 - protein, 169 aa, Homo sapiens; identical to SEQ ID NO: 743573

SEQ ID NO: 743588 - protein, 161 aa, Homo sapiens
MERFEVLGIPFSLQLWDTAGQERFKCIASTYYRGAQAIIIVFNLNDVASLEHTKQWLADALKENDPSSVLLFLTPAQYALMEKDALQVAQEMKAEYWAVSSLTGENVREFFFRVAALTFEANVLAELEKSGARRIGDVVRINSDDSNLYLTASKKKPTCCP

SEQ ID NO: 743589 - protein, 169 aa, Homo sapiens; identical to SEQ ID NO: 743573

SEQ ID NO: 743590 - protein, 169 aa, Homo sapiens; identical to SEQ ID NO: 743573

SEQ ID NO: 743591 - protein, 237 aa, Homo sapiens
MERFEVLGIPFSLQLWDTAGQERFKCIASTYYRGAQAIIIVFNLNDVASLEHTKQWLADALKENDPSSVLLFLVGSKKDLSVSVPVGGLPSLVRECPPLTLAFPQTPAQYALMEKDALQVAQEMKAEYWAVSSLTGELEALGLCCDTLAWLSSHCYTSSCALCPQTQQLPLSTYLLSVSGENVREFFFRVAALTFEANVLAELEKSGARRIGDVVRINSDDSNLYLTASKKKPTCCP

SEQ ID NO: 743592 - protein, 281 aa, Homo sapiens
MVGQPQPRDDVGSPRPRVIVGTIRPRVIVGTIRPRVIVGSARARPPPDGTPRPQLAAEESPRPRVIFGTPRARVILGSPRPRVIVSSPWPAVVVASPRPRTPVGSPWPRVVVGTPRPRVIVGSPRARVADADPASAPSQGALQGRRQDEHSGTRAEGSRPGGAAPVPEEGGRFARAQRLPPPRHLRLPGAPDRHRGDLRSPRSLWWGTCRWGRLASLIGSAKTPLIRITRPPLEWTSRWNDLRCWAFPSVCSFGIPLGRRGSNALHQPTIEELKPSSLSST

SEQ ID NO: 743593 - protein, 153 aa, Homo sapiens
MERFEVLGIPFSLQLWDTAGQERFKCIASTYYRGAQAIIIVFNLNDVASLEHTKQWLADALKENDPSSVLLFLVGSKKDLSTPAQYALMEKDALQVAQEMKAEYWAVSSLTGENVREFFFRVAALTFEANVLAELEKSGARRIGDVVRECLPG

SEQ ID NO: 743594 - protein, 376 aa, Homo sapiens
MVGQPQPRDDVGSPRPRVIVGTIRPRVIVGTIRPRVIVGSARARPPPDGTPRPQLAAEESPRPRVIFGTPRARVILGSPRPRVIVSSPWPAVVVASPRPRTPVGSPWPRVVVGTPRPRVIVGSPRARVADADPASAPSQGALQGRRQDEHSGTRAEGSRPGGAAPGFKISKVIVVGDLSVGKTCLINRFCKDTFDKNYKATIGVDFEMERFEVLGIPFSLQLWDTAGQERFKCIASTYYRGAQAIIIVFNLNDVASLEHTKQWLADALKENDPSSVLLFLVGSKKDLSTPAQYALMEKDALQVAQEMKAEYWAVSSLTGENVREFFFRVAALTFEANVLAELEKSGARRIGDVVRINSDDSNLYLTASKKKPTCCP

SEQ ID NO: 743595 - protein, 169 aa, Homo sapiens; identical to SEQ ID NO: 743573

SEQ ID NO: 743596 - protein, 237 aa, Homo sapiens
MNILAPVRRDRVLAELPQCLRKEAALHGHKDFHPRVTCACQEHRTGTVGFCKDTFDKNYKATIGVDFEMERFEVLGIPFSLQLWDTAGQERFKCIASTYYRGAQAIIIVFNLNDVASLEHTKQWLADALKENDPSSVLLFLVGSKKDLSTPAQYALMEKDALQVAQEMKAEYWAVSSLTGENVREFFFRVAALTFEANVLAELEKSGARRIGDVVRINSDDSNLYLTASKKKPTCCP

SEQ ID NO: 743597 - protein, 170 aa, Homo sapiens
MERFEVLGIPFSLQLWDTAGQERFKCIASTYYRGAQAIIIVFNLNDVASLEHTKQWLADALKENDPSSVLLFLVGSKKDLSVSVPVGGLPSLVRECPPLTLAFPQTPAQYALMEKDALQVAQEMKAEYWAVSSLTGELEALGLCCDTLAWLSSHCYTSSCALCPQTQHCP

SEQ ID NO: 743598 - protein, 273 aa, Homo sapiens
MVGQPQPRDDVGSPRPRVIVGTIRPRVIVGTIRPRVIVGSARARPPPDGTPRPQLAAEESPRPRVIFGTPRARVILGSPRPRVIVSSPWPAVVVASPRPRTPVGSPWPRVVVGTPRPRVIVGSPRARVADADPASAPSQGALQGRRQDEHSGTRAEGSRPGGAAPVPEEGGRFARAQRLPPPRHLRLPGAPDRHRGDLRSPRSLWWGTCRWGRLASLIGSAKTPLIRITRPPLEWTSRWNDLRCWAFPSVCSYPCSVCADGERRPPGGPGDEG

SEQ ID NO: 743599 - protein, 368 aa, Homo sapiens
MVGQPQPRDDVGSPRPRVIVGTIRPRVIVGTIRPRVIVGSARARPPPDGTPRPQLAAEESPRPRVIFGTPRARVILGSPRPRVIVSSPWPAVVVASPRPRTPVGSPWPRVVVGTPRPRVIVGSPRARVADADPASAPSQGALQGRRQDEHSGTRAEGSRPGGAAPGFKISKVIVVGDLSVGKTCLINRFCKDTFDKNYKATIGVDFEMERFEVLGIPFSLQLWDTAGQERFKCIASTYYRGAQAIIIVFNLNDVASLEHTKQWLADALKENDPSSVLLFLTPAQYALMEKDALQVAQEMKAEYWAVSSLTGENVREFFFRVAALTFEANVLAELEKSGARRIGDVVRINSDDSNLYLTASKKKPTCCP

SEQ ID NO: 743600 - protein, 179 aa, Homo sapiens
MERFEVLGIPFSLQLWDTAGQERFKCIASTYYRGAQAIIIVFNLNDVASLEHTKQWLADALKENDPSSVLLFLVGSKKDLSTPAQYALMEKDALQVAQEMKAEYWAVSSLTGEMVPESLRVELDLRAGWLLGNGPPGIGPSRVRPFLGNLVRGGNTAGGPPQRVFTPGRGFPRHPGVVY

SEQ ID NO: 743601 - protein, 123 aa, Homo sapiens
  misc_feature (4)..(4): Xaa can be any naturally occurring amino acid
MHLXLSSQQWLADALKENDPSSVLLFLVGSKKDLSTPAQYALMEKDALQVAQEMKAEYWAVSSLTGENVREFFFRVAALTFEANVLAELEKSGARRIGDVVRINSDDSNLYLTASKKKPTCCP

SEQ ID NO: 743602 - protein, 130 aa, Homo sapiens
MGAQRPIIIVFNLNDVASLEHTKQWLADALKENDPSSVLLFLTPAQYALMEKDALQVAQEMKAEYWAVSSLTGENVREFFFRVAALTFEANVLAELEKSGARRIGDVVRINSDDSNLYLTASKKKPTCCP

SEQ ID NO: 743603 - protein, 226 aa, Homo sapiens [sequence omitted]

SEQ ID NO: 743604 - protein, 487 aa, Homo sapiens
MAGTNALLMLENFIDGKFLPCSSYIDSYDPSTGEVYCRVPNSGKDEIEAAVKAAREAFPSWSSRSPQERSRVLNQVADLLEQSLEEFAQAESKDQGKTLALARTMDIPRSVQNFRFFASSSLHHTSECTQMDHLGCMHYTVRAPVGVAGLISPWNLPLYLLTWKIAPAMAAGNTVIAKPSELTSVTAWMLCKLLDKAGVPPGVVNIVFGTGPRVGEALVSHPEVPLISFTGSQPTAERITQLSAPHCKKLSLELGGKNPAIIFEDANLDECIPATVRSSFANQGEICLCTSRIFVQKSIYSEFLKRFVEATRKWKVGIPSDPLVSIGALISKAHLEKVRSYVKRALAEGAQIWCGEGVDKLSLPARNQAGYFMLPTVITDIKDESCCMTEEIFGPVTCVVPFDSEEEVIERANNVKYGLAATVWSSNVGRVHRVAKKLQSGLVWTNCWLIRELNLPFGGMKSSGIGREGAKDSYDFFTEIKTITVKH

SEQ ID NO: 743605 - protein, 394 aa, Homo sapiens
SPICSSKIEAAVKAAREAFPSWSSRSPQERSRVLNQVADLLEQSLEEFAQAESKDQGKTLALARTMDIPRSVQNFRFFASSSLHHTSECTQMDHLGCMHYTVRAPVGVAGLISPWNLPLYLLTWKIAPAMAAGNTVIAKPSELTSVTAWMLCKLLDKAGVPPGVVNIVFGTGPRVGEALVSHPEVPLISFTGSQPTAERITQLSAPHCKKLSLELGGKNPAIIFEDANLDECIPATVRSSFANQVRSYVKRALAEGAQIWCGEGVDKLSLPARNQAGYFMLPTVITDIKDESCCMTEEIFGPVTCVVPFDSEEEVIERANNVKYGLAATVWSSNVGRVHRVAKKLQSGLVWTNCWLIRELNLPFGGMKSSGIGREGAKDSYDFFTEIKTITVKH

SEQ ID NO: 743606 - protein, 419 aa, Homo sapiens
MAGTNALLMLENFIDGKFLPCSSYIDSYDPSTGEVYCRVPNSGKDEIEAAVKAAREAFPSWSSRSPQERSRVLNQVADLLEQSLEEFAQAESKDQGKTLALARTMDIPRSVQNFRFFASSSLHHTSECTQMDHLGCMHYTVRAPVGVAGLISPWNLPLYLLTWKIAPAMAAGNTVIAKPSELTSVTAWMLCKLLDKAGVPPGVVNIVFGTGPRVGEALVSHPEVPLISFTGSQPTAERITQLSAPHCKKLSLELGGKNPAIIFEDANLDECIPATVRSSFANQGEICLCTSRIFVQKSIYSEFLKRFVEATRKWKVGIPSDPLVSIGALISKAHLEKVSKFLPCKLQNKFLFEEKLSTGIAQSDSEILLVTTPFLKNYNLGEIVDTESKHCGYEYANAVPVKVHPHEINELEKSAWRYH

SEQ ID NO: 743607 - protein, 473 aa, Homo sapiens
MAGTNALLMLENFIDGKFLPCSSYIDSYDPSTGEVYCRVPNSGKDEIEAAVKAAREAFPSWSSRSPQERSRVLNQVADLLEQSLEEFAQAESKDQGKTLALARTMDIPRSVQNFRFFASSSLHHTSECTQMDHLGCMHYTVRAPVGVAGLISPWNLPLYLLTWKIAPAMAAGNTVIAKPSELTSVTAWMLCKLLDKAGVPPGVVNIVFGTGPRVGEALVSHPEVPLISFTGSQPTAERITQLSAPHCKKLSLELGGKNPAIIFEDANLDECIPATVRSSFANQGEICLCTSRIFVQKSIYSEFLKRFVEATRKWKVGIPSDPLVRSYVKRALAEGAQIWCGEGVDKLSLPARNQAGYFMLPTVITDIKDESCCMTEEIFGPVTCVVPFDSEEEVIERANNVKYGLAATVWSSNVGRVHRVAKKLQSGLVWTNCWLIRELNLPFGGMKSSGIGREGAKDSYDFFTEIKTITVKH

SEQ ID NO: 743608 - protein, 167 aa, Homo sapiens
MRETCPHQPANERQSIYVRSYVKRALAEGAQIWCGEGVDKLSLPARNQAGYFMLPTVITDIKDESCCMTEEIFGPVTCVVPFDSEEEVIERANNVKYGLAATVWSSNVGRVHRVAKKLQSGLVWTNCWLIRELNLPFGGMKSSGIGREGAKDSYDFFTEIKTITVKH

SEQ ID NO: 743609 - protein, 166 aa, Homo sapiens
LYYLSSLFTCVLICLSHKTMCSTWWELCLIYHCTPLPRPVPDTWQVLKSAGCSIHEGECPQPYPCSHSWQGEICLCTSRIFVQKSIYSEFLKRFVEATRKWKVGIPSDPLVSIGALISKAHLEKVSKFLPCKLQNKFLFEEKLSTGIAQSDSEILLVTTPFLKNYN

SEQ ID NO: 743610 - protein, 64 aa, Homo sapiens
MEKNKQGLLVNFGGGRGGGFGGNDNFGRGGNFSGRGGFGGSRGGGGYGGSGDGYNGFGNDGTGI

SEQ ID NO: 743611 - protein, 92 aa, Homo sapiens
AGFAPVHRAVFLSWGIWVCGVWGGEKEQGGREGMRTTLSMGQALGPAHTPSPASRVLTVLGHPPPHPTATAQSGARKPPRRSRILRLQPHPQ

SEQ ID NO: 743612 - protein, 108 aa, Homo sapiens
MLEGMDTPFSVMCLFHIACLYSNISCTPCIYTPTTYPQKLKQSTAVCAALHFHVLGLLSCLKSLSSAQEWHGPHRTSSLPPLPRANLDRNTATQLLSHAPMPEAADDG

SEQ ID NO: 743613 - protein, 130 aa, Homo sapiens
PRQEYSDTIIAQCSLGLLGSSGLLASAPRVARPEATVCYARLIVIIISSNSSRDWILPCCPGWFLAILPRLVSNSWPKAILLSLPKCRDYRCEPPCLASVIVYNWSPTGERRDDNGFFSPKTNERYQATV

SEQ ID NO: 743614 - protein, 71 aa, Homo sapiens
EHQGCGRHQKLEEARTASPLTPSEKAQPGHHLHLRFLASRTERMNVYCLSCQYVALCYSSPSKLTFSMSEG

SEQ ID NO: 743615 - protein, 37 aa, Homo sapiens
ARSTACRKTLGKQTLRRKYSFCGPLGKPSDFFREGNP

SEQ ID NO: 743616 - protein, 138 aa, Homo sapiens
LDFGHYVSHKNRIQIAKPTVDTKPPVAHTNHILKLSKLQGEQKKINKIEYENKQLCQKIANAHRGPAKVDCWNEYFSKSLNRETRNRELVRITMENQGILKRLVDRKPHYDRRASEIDWQNSRRYIRNTTRYLLSQNE

SEQ ID NO: 743617 - protein, 101 aa, Homo sapiens
FLDEGHIPVKLRHFASQCSSLSPRIQLLRSYWEAADHQFQGSQHGSALRSWPPGPILLPHRDRPGSLSLQHVGMYMLLSPHRLREQAGVRGSTRTANRTGA

SEQ ID NO: 743618 - protein, 114 aa, Homo sapiens
FLDEGHIPVKLRHFASQCSSLSPRIQLLRSYWEAADHQFQEDGLKIREAESLPQSNTADFKCLHSASLQQAPGGILMGPASSPWTLAVEGEKRTSAPPLRESLMPTKGLGWWTQ

SEQ ID NO: 743619 - protein, 266 aa, Homo sapiens [sequence omitted]

SEQ ID NO: 743620 - protein, 266 aa, Homo sapiens [sequence omitted]

SEQ ID NO: 743621 - protein, 266 aa, Homo sapiens [sequence omitted]

SEQ ID NO: 743622 - protein, 178 aa, Homo sapiens
MHVNGKVALVTGAAQGIGRAFAEALLLKGAKVALVDWNLEAGVQCKAALDEQFEPQKTLFIQCDVADQQQLRDTFRKVVDHFGRLDILVNNAGVNNEKNWEKTLQINLVSVISGTYLGLDYMSKQNGGEGGIIINMSSLAGLMPVAQQPVYCASKHGIVGFTRSAAPTIDCQWIDNTH

SEQ ID NO: 743623 - protein, 145 aa, Homo sapiens
MSKQNGGEGGIIINMSSLAGLMPVAQQPVYCASKHGIVGFTRSAALAANLMNSGVRLNAICPGFVNTAILESIEKEENMGQYIEYKDHIKDMIKYYGILDPPLIANGLITLIEDDALNGAIMKITTSKGIHFQDYDTTPFQAKTQ

SEQ ID NO: 743624 - protein, 198 aa, Homo sapiens
MHVNGKVALVTGAAQGIGRAFAEALLLKGAKVALVDWNLEAGVQCKAALDEQFEPQKTLFIQCDVADQQQLRGLMPVAQQPVYCASKHGIVGFTRSAALAANLMNSGVRLNAICPGFVNTAILESIEKEENMGQYIEYKDHIKDMIKYYGILDPPLIANGLITLIEDDALNGAIMKITTSKGIHFQDYDTTPFQAKTQ

SEQ ID NO: 743625 - protein, 266 aa, Homo sapiens [sequence omitted]

SEQ ID NO: 743626 - protein, 266 aa, Homo sapiens [sequence omitted]

SEQ ID NO: 743627 - protein, 158 aa, Homo sapiens
MHVNGKVALVTGAAQGIGRAFAEALLLKGAKVALVDWNLEAGVQCKAALDEQFEPQKTLFIQCDVADQQQLRDTFRKVVDHFGRLDILVNNAGVNNEKNWEKTLQINLVSVISGTYLGLDYMSKQNGGEGGIIINMSSLAGLMPVAQQPVYCASKHAT

SEQ ID NO: 743628 - protein, 192 aa, Homo sapiens
MHVNGKVALVTGAAQGIGRAFAEALLLKGAKVALVDWNLEAGVQCKAALDEQFEPQKTLFIQCDVADQQQLRDTFRKVVDHFGRLDILVNNAGVNNEKNWEKTLQINLVSVISGTYLGLDYMSKQNGGEGGIIINMSSLAGLMPVAQQPVYCASKHGIVGFTRSAALAANLMNSGVRLNAICPGFVNPSATR

SEQ ID NO: 743629 - protein, 266 aa, Homo sapiens [sequence omitted]

SEQ ID NO: 743630 - protein, 288 aa, Homo sapiens
WRFSGRFRACSSPTARPSSGCTMHVNGKVALVTGAAQGIGRAFAEALLLKGAKVALVDWNLEAGVQCKAALDEQFEPQKTLFIQCDVADQQQLRDTFRKVVDHFGRLDILVNNAGVNNEKNWEKTLQINLVSVISGTYLGLDYMSKQNGGEGGIIINMSSLAGLMPVAQQPVYCASKHGIVGFTRSAALAANLMNSGVRLNAICPGFVNTAILESIEKEENMGQYIEYKDHIKDMIKYYGILDPPLIANGLITLIEDDALNGAIMKITTSKGIHFQDYDTTPFQAKTQ

SEQ ID NO: 743631 - protein, 280 aa, Homo sapiens
MASRGPGYRPSGCTMHVNGKVALVTGAAQGIGRAFAEALLLKGAKVALVDWNLEAGVQCKAALDEQFEPQKTLFIQCDVADQQQLRDTFRKVVDHFGRLDILVNNAGVNNEKNWEKTLQINLVSVISGTYLGLDYMSKQNGGEGGIIINMSSLAGLMPVAQQPVYCASKHGIVGFTRSAALAANLMNSGVRLNAICPGFVNTAILESIEKEENMGQYIEYKDHIKDMIKYYGILDPPLIANGLITLIEDDALNGAIMKITTSKGIHFQDYDTTPFQAKTQ

SEQ ID NO: 743632 - protein, 124 aa, Homo sapiens
MHVNGKVALVTGAAQGIGRAFAEALLLKGAKVALVDWNLEAGVQCKAALDEQFEPQKTLFIQCDVADQQQLRDTFRKVVDHFGRLDILVNNAGVNNEKNWEKTLQINLVSVISGTYLGLDYRFL

SEQ ID NO: 743633 - protein, 143 aa, Homo sapiens
MHVNGKVALVTGAAQGIGRAFAEALLLKGAKVALVDWNLEAGVQCKAALDEQFEPQKTLFIQCDVADQQQLRDTFRKVVDHFGRLDILVNNAGVNNEKNWEKTLQINLVSVISGTYLGLDYMSKQNGGEGGIIINMSSLAAHH

SEQ ID NO: 743634 - protein, 266 aa, Homo sapiens [sequence omitted]

SEQ ID NO: 743635 - protein, 213 aa, Homo sapiens
MHVNGKVALVTGAAQGIGRAFAEALLLKGAKVALVDWNLEAGVQCKAALDEQFEPQKTLFIQCDVADQQQLRDTFRKVVDHFGRLDILVNNAGVNNEKNWEKTLQINLVSVISGTYLGLDYMSKQNGGEGGIIINMSSLAGLMPVAQQPVYCASKHGIVGFTRSAALAANLMNSGVRLNAICPGFVNTAILESIEKEENMGPTIDCQWIDNTH

SEQ ID NO: 743636 - protein, 975 aa, Homo sapiens
MVISLNSCLSFICLLLCHWIGTASPLNLEDPNVCSHWESYSVTVQESYPHPFDQIYYTSCTDILNWFKCTRHRVSYRTAYRHGEKTMYRRKSQCCPGFYESGEMCVPHCADKCVHGRCIAPNTCQCEPGWGGTNCSSACDGDHWGPHCTSRCQCKNGALCNPITGACHCAAGFRGWRCEDRCEQGTYGNDCHQRCQCQNGATCDHVTGECRCPPGYTGAFCEDLCPPGKHGPQCEQRCPCQNGGVCHHVTGECSCPSGWMGTVCGQPCPEGRFGKNCSQECQCHNGGTCDAATGQCHCSPGYTGERCQDECPVGTYGVLCAETCQCVNGGKCYHVSGACLCEAGFAGERCEARLCPEGLYGIKCDKRCPCHLENTHSCHPMSGECACKPGWSGLYCNETCSPGFYGEACQQICSCQNGADCDSVTGKCTCAPGFKGIDCSTPCPLGTYGINCSSRCGCKNDAVCSPVDGSCTCKAGWHGVDCSIRCPSGTWGFGCNLTCQCLNGGACNTLDGTCTCAPGWRGEKCELPCQDGTYGLNCAERCDCSHADGCHPTTGHCRCLPGWSGVHCDSVCAEGRWGPNCSLPCYCKNGASCSPDDGICECAPGFRGTTCQRICSPGFYGHRCSQTCPQCVHSSGPCHHITGLCDCLPGFTGALCNEVCPSGRFGKNCAGICTCTNNGTCNPIDRSCQCYPGWIGSDCSQPCPPAHWGPNCIHTCNCHNGAFCSAYDGECKCTPGWTGLYCTQRCPLGFYGKDCALICQCQNGADCDHISGQCTCRTGFMGRHCEQKCPSGTYGYGCRQICDCLNNSTCDHITGTCYCSPGWKGARCDQAGVIIVGNLNSLSRTSTALPADSYQIGAIAGIIILVLVVLFLLALFIIYRHKQKGKESSMPAVTYTPAMRVVNADYTISGTLPHSNGGNANSHYFTNPSYHTLTQCATSPHVNNRDRMTVTKSTNFHEEIQSLMQQTLMSSTVKR

SEQ ID NO: 743637 - protein, 1140 aa, Homo sapiens
MVISLNSCLSFICLLLCHWIGTASPLNLEDPNVCSHWESYSVTVQESYPHPFDQIYYTSCTDILNWFKCTRHRVSYRTAYRHGEKTMYRRKSQCCPGFYESGEMCVPHCADKCVHGRCIAPNTCQCEPGWGGTNCSSACDGDHWGPHCTSRCQCKNGALCNPITGACHCAAGFRGWRCEDRCEQGTYGNDCHQRCQCQNGATCDHVTGECRCPPGYTGAFCEDLCPPGKHGPQCEQRCPCQNGGVCHHVTGECSCPSGWMGTVCGQPCPEGRFGKNCSQECQCHNGGTCDAATGQCHCSPGYTGERCQDECPVGTYGVLCAETCQCVNGGKCYHVSGACLCEAGFAGERCEARLCPEGLYGIKCDKRCPCHLENTHSCHPMSGECACKPGWSGLYCNETCSPGFYGEACQQICSCQNGADCDSVTGKCTCAPGFKGIDCSTPCPLGTYGINCSSRCGCKNDAVCSPVDGSCTCKAGWHGVDCSIRCPSGTWGFGCNLTCQCLNGGACNTLDGTCTCAPGWRGEKCELPCQDGTYGLNCAERCDCSHADGCHPTTGHCRCLPGWSGVHCDSVCAEGRWGPNCSLPCYCKNGASCSPDDGICECAPGFRGTTCQRICSPGFYGHRCSQTCPQCVHSSGPCHHITGLCDCLPGFTGALCNEVCPSGRFGKNCAGICTCTNNGTCNPIDRSCQCYPGWIGSDCSQPCPPAHWGPNCIHTCNCHNGAFCSAYDGECKCTPGWTGLYCTQRCPLGFYGKDCALICQCQNGADCDHISGQCTCRTGFMGRHCEQKCPSGTYGYGCRQICDCLNNSTCDHITGTCYCSPGWKGARCDQAGVIIVGNLNSLSRTSTALPADSYQIGAIAGIIILVLVVLFLLALFIIYRHKQKGKESSMPAVTYTPAMRVVNADYTISGTLPHSNGGNANSHYFTNPSYHTLTQCATSPHVNNRDRMTVTKSKNNQLFVNLKNVNPGKRGPVGDCTGTLPADWKHGGYLNELGAFGLDRSYMGKSLKDLGKNSEYNSSNCSLSSSENPYATIKDPPVLIPKSSECGYVEMKSPARRDSPYAEINNSTSANRNVYEVEPTVSVVQGVFSNNGRLSQDPYDLPKNSHIPCHYDLLPVRDSSSSPKQEDSGGSSSNSSSSSE

SEQ ID NO: 743638 - protein, 313 aa, Homo sapiens
AVTSGICGPGEEIGGGERLSRLSFARFCGLFERPGVGQTRFLGNQESREGRMASFGWKRKIGEKVSKVTSQQFEAEAADEKDVVDNDEGNWLHAIKRRKEILLEGCAEKSKQLKDEGASLAENKRYREAIQKWDEALQLTPNDATLYEMKSQVLMSLHEMFPAVHAAEMAVQQNPHSWESWQTLGRAQLGLGEIILAIRSFQVALHIYPMNPEIWKEDLSWARTLQEQQKVAQRIKKSEAPAEVTHFSPKSIPDYDFESDEIVAVCAAIAEKEKTVSANKTMVIVSASGAIETVTEKEDGATPPDGSVFIKAR

SEQ ID NO: 743639 - protein, 269 aa, Homo sapiens
AVTSGICGPGEEIGGGERLSRLSFARFCGLFERPGVGQTRFLGNQESREGRMASFGWKRKIGEKVSKVTSQQFEAEAADEKDVVDNDEGNWLHAIKRRKEILLEGCAEKSKQLKDEGASLAENKRYREAIQKWDEALQLTPNDATLYEMKSQAIRSFQVALHIYPMNPEIWKEDLSWARTLQEQQKVAQRIKKSEAPAEVTHFSPKSIPDYDFESDEIVAVCAAIAEKEKTVSANKTMVIVSASGAIETVTEKEDGATPPDGSVFIKAR

SEQ ID NO: 743640 - protein, 131 aa, Homo sapiens
AVTSGICGPGEEIGGGERLSRLSFARFCGLFERPGVGQTRFLGNQESREGRMASFGWKRKIGEKVSKVTSQQFEAEAADEKDVVDNDEGNWLHAIKRRKEILLEGCAEKSKQLKDEGASLAENKRQFEVFK

SEQ ID NO: 743641 - protein, 140 aa, Homo sapiens
AVTSGICGPGEEIGGGERLSRLSFARFCGLFERPGVGQTRFLGNQESREGRMASFGWKRKIGEKVSKVTSQQFEAEAADEKDVVDNDEGNWLHAIKRRKEILLEGCAEKSKQLKDEGASLAENKRYVFKDFFLWRRAYIF

SEQ ID NO: 743642 - protein, 145 aa, Homo sapiens
MAAVFLVTLYEYSPLFYIAVVFTCFIVTTGLVLGWFGWDVPVILRNSEETQFSTRVFKKQMRQVKNPFGLEITNPSSASITTGITLTTDCLEDSLLTCYWGCSVQKLYEALQKHVYCFRISTPQALEDALYSEYLYQEQYLYPFV

SEQ ID NO: 743643 - protein, 332 aa, Homo sapiens
MAAVFLVTLYEYSPLFYIAVVFTCFIVTTGLVLGWFGWDVPVILRNSEETQFSTRVFKKQMRQVKNPFGLEITNPSSASITTGITLTTDCLEDSLLTCYWGCSVQKLYEALQKHVYCFRISTPQALEDALYSEYLYQEQYFIKKDSKEEIYCQLPRDTKIEDFGTVPRSRYPLVALLTLADEDDREIYDIISMVSVIHIPDRTYKLSCRILYQYLLLAQGQFHDLKQLFMSANNNFTPSNNSSSEEKNTDRSLLEKVGLSESEVEPSEENSKDCVVCQNGTVNWVLLPCRHTCLCDGCVKYFQQCPMCRQFVQESFALCSQKEQDKDKPKTL

SEQ ID NO: 743644 - protein, 332 aa, Homo sapiens; identical to SEQ ID NO: 743643

SEQ ID NO: 743645 - protein, 363 aa, Homo sapiens
MAAVFLVTLYEYSPLFYIAVVFTCFIVTTGLVLGCRDGVSSCWPGWSRSLDLMIARDDLPKCWDYRFGWDVPVILRNSEETQFSTRVFKKQMRQVKNPFGLEITNPSSASITTGITLTTDCLEDSLLTCYWGCSVQKLYEALQKHVYCFRISTPQALEDALYSEYLYQEQYFIKKDSKEEIYCQLPRDTKIEDFGTVPRSRYPLVALLTLADEDDREIYDIISMVSVIHIPDRTYKLSCRILYQYLLLAQGQFHDLKQLFMSANNNFTPSNNSSSEEKNTDRSLLEKVGLSESEVEPSEENSKDCVVCQNGTVNWVLLPCRHTCLCDGCVKYFQQCPMCRQFVQESFALCSQKEQDKDKPKTL

SEQ ID NO: 743646 - protein, 204 aa, Homo sapiens
MVIVAIYLYIFKNIKKDSKEEIYCQLPRDTKIEDFGTVPRSRYPLVALLTLADEDDREIYDIISMVSVIHIPDRTYKLSCRILYQYLLLAQGQFHDLKQLFMSANNNFTPSNNSSSEEKNTDRSLLEKVGLSESEVEPSEENSKDCVVCQNGTVNWVLLPCRHTCLCDGCVKYFQQCPMCRQFVQESFALCSQKEQDKDKPKTL

SEQ ID NO: 743647 - protein, 263 aa, Homo sapiens
MAAVFLVTLYEYSPLFYIAVVFTCFIVTTGLVLGWFGWDVPVILRNSEETQFSTRVFKKQMRQVKNPFGLEITNPSSASITTGITLTTDCLEDSLLTCYWGCSVQKLYEALQKHVYCFRISTPQALEDALYSEYLYQEQYFIKKDSKEEIYCQLPRDTKIEDFGTVPRSRYPLVALLTLADEDDREIYDIISMVSVIHIPDRTYKLSCRILYQYLLLAQGQFHDLKKKKTQTEVCWKRWDSLKVKLSHRKRTARTVLFARMGL

SEQ ID NO: 743648 - protein, 332 aa, Homo sapiens; identical to SEQ ID NO: 743643

SEQ ID NO: 743649 - protein, 332 aa, Homo sapiens; identical to SEQ ID NO: 743643

SEQ ID NO: 743650 - protein, 272 aa, Homo sapiens
MRQVKNPFGLEITNPSSASITTGITLTTDCLEDSLLTCYWGCSVQKLYEALQKHVYCFRISTPQALEDALYSEYLYQEQYFIKKDSKEEIYCQLPRDTKIEDFGTVPRSRYPLVALLTLADEDDREIYDIISMVSVIHIPDRTYKLSCRILYQYLLLAQGQFHDLKQLFMSANNNFTPSNNSSSEEKNTDRSLLEKVGLSESEVEPSEENSKDCVVCQNGTVNWVLLPCRHTCLCDGCVKYFQQCPMCRQFVQESFALCSQKEQDKDKPKTL

SEQ ID NO: 743651 - protein, 365 aa, Homo sapiens
MAAVFLVTLYEYSPLFYIAVVFTCFIVTTGLVLGWFGWDVPVILRNSEETQFSTRVFKKQMRQVKNPFGLEITNPSSASITRSHSVIQVEMSGVIMADCSRDPPTSAFQEVRTTAGITLTTDCLEDSLLTCYWGCSVQKLYEALQKHVYCFRISTPQALEDALYSEYLYQEQYFIKKDSKEEIYCQLPRDTKIEDFGTVPRSRYPLVALLTLADEDDREIYDIISMVSVIHIPDRTYKLSCRILYQYLLLAQGQFHDLKQLFMSANNNFTPSNNSSSEEKNTDRSLLEKVGLSESEVEPSEENSKDCVVCQNGTVNWVLLPCRHTCLCDGCVKYFQQCPMCRQFVQESFALCSQKEQDKDKPKTL

SEQ ID NO: 743652 - protein, 140 aa, Homo sapiens
MVSVIHIPDRTYKLSCRILYQYLLLAQGQFHDLKQLFMSANNNFTPSNNSSSEEKNTDRSLLEKVGLSESEVEPSEENSKDCVVCQNGTVNWVLLPCRHTCLCDGCVKYFQQCPMCRQFVQESFALCSQKEQDKDKPKTL

SEQ ID NO: 743653 - protein, 928 aa, Homo sapiens
MLKSKTFLKKTRAGGVMKIVREHYLRDDIGCGAPGCAACGGAHEGPALEPQPQDPASSVCPQPHYLLPDTNVLLHQIVSAWRPGTWASVASSLRLPGSLETYVEQEQGENANDRNDRAIRVAAKWYNEHLKKMSADNQLQVIFITNDRRNKEKAIEEGIPAFTCEEYVKSLTANPELIDRLACLSEEGNEIESGKIIFSEHLPLSKLQQGIKSGTYLQGTFRASRENYLEATVWIHGDNEENKEIILQGLKHLNRAVHEDIVAVELLPKSQWVAPSSVVLHDEGQNEEDVEKEEERERMLKTAVSEKMLKPTGRVVGIIKRNWRPYCGMLSKSDIKESRRHLFTPADKRIPRIRIETRQASTLEGRRIIVAIDGWPRNSRYPNGHFVRNLGDVGEKETETEVLLLEHDVPHQPFSQAVLSFLPKMPWSITEKDMKNREDLRHLCICSVDPPGCTDIDDALHCRELENGNLEVGVHIADVSHFIRPGNALDQESARRGTTVYLCEKRIDMVPELLSSNLCSLKCDVDRLAFSCIWEMNHNAEILKTKFTKSVINSKASLTYAEAQLRIDSANMNDDITTSLRGLNKLAKILKKRRIEKGALTLSSPEVRFHMDSETHDPIDLQTKELRETNSMVEEFMLLANISVAKKIHEEFSEHALLRKHPAPPPSNYEILVKAARSRNLEIKTDTAKSLAESLDQAESPTFPYLNTLLRILATRCMMQAVYFCSGMDNDFHHYGLASPIYTHFTSPIRRYADVIVHRLLAVAIGADCTYPELTDKHKLADICKNLNFRHKMAQYAQRASVAFHTQLFFKSKGIVSEEAYILFVRKNAIVVLIPKYGLEGTVFFEEKDKPNPQLIYDDEIPSLKIEDTVFHVFDKVKVKIMLDSSNLQHQKIRMSLVEPQIPGISIPTDTSNMDLNGPKKKKMKLGK

SEQ ID NO: 743654 - protein, 236 aa, Homo sapiens
MVEEFMLLANISVAKKIHEEFSEHALLRKHPAPPPSNYEILVKAARSRNLEIKTDTAKSLAESLDQAESPTFPYLNTLLRILATRCMMQAVYFCSGMDNDFHHYGLASPIYTHFTSPIRRYADVIVHRLLAVAIGADCTYPELTDKHKLADICKNLNFRHKMAQYAQRASVAFHTQLFFKSKGIVSEEAYILFVRKNAIVVLIPKYGLEGTVFLGKGNQPRFLMGKPIKKKVRLED

SEQ ID NO: 743655 - protein, 958 aa, Homo sapiens [sequence omitted]

SEQ ID NO: 743656 - protein, 958 aa, Homo sapiens [sequence omitted]

SEQ ID NO: 743657 - protein, 981 aa, Homo sapiens
MLKSKTFLKKTRAGGVMKIVREHYLRDDIGCGAPGCAACGGAHEGPALEPQPQDPASSVCPQPHYLLPDTNVLLHQIVSAWRPGTWASVASSLRLPGSIIDVLEDPAIRNVIVLQTVLQEVRNRSAPVYKRIRDVTNNQEKHFYTFTNEHHRETYVEQEQGENANDRNDRAIRVAAKWYNEHLKKMSADNQLQVIFITNDRRNKEKAIEEGIPAFTCEEYVKSLTANPELIDRLACLSEEGNEIESGKIIFSEHLPLSKLQQGIKSGTYLQGTFRASRENYLEATVWIHGDNEENKEIILQGLKHLNRAVHEDIVAVELLPKSQWVAPSSVVLHDEGQNEEDVEKEEERERMLKTAVSEKMLKPTGRVVGIIKRNWRPYCGMLSKSDIKESRRHLFTPADKRIPRIRIETRQASTLEGRRIIVAIDGWPRNSRYPNGHFVRNLGDVGEKETETEVLLLEHDVPHQPFSQAVLSFLPKMPWSITEKDMKNREDLRHLCICSVDPPGCTDIDDALHCRELENGNLEVGVHIADVSHFIRPGNALDQESARRGTTVYLCEKRIDMVPELLSSNLCSLKCDVDRLAFSCIWEMNHNAEILKTKFTKSVINSKASLTYAEAQLRIDSANMNDDITTSLRGLNKLAKILKKRRIEKGALTLSSPEVRFHMDSETHDPIDLQTKELRETNSMVEEFMLLANISVAKKIHEEFSEHALLRKHPAPPPSNYEILVKAARSRNLEIKTDTAKSLAESLDQAESPTFPYLNTLLRILATRCMMQAVYFCSGMDNDFHHYGLASPIYTHFTSPIRRYADVIVHRLLAVAIGADCTYPELTDKHKLADICKNLNFRHKMAQYAQRASVAFHTQLFFKSKGIVSEEAYILFVRKNAIVVLIPKYGLEGTVFFEEKDKPNPQLIYDDEIPSLKIEDTVFHVFDKVKVKIMLDSSNLQHQKIRMSLVEPQIPGISIPTDTSNMDLNGPKKKKMKLGK

SEQ ID NO: 743658 - protein, 1009 aa, Homo sapiens
RNLRELHKTDRLGGACRIDENRPVRRARTENMGQGREKTRQDREEDSWRGKMLKSKTFLKKTRAGGVMKIVREHYLRDDIGCGAPGCAACGGAHEGPALEPQPQDPASSVCPQPHYLLPDTNVLLHQIDVLEDPAIRNVIVLQTVLQEVRNRSAPVYKRIRDVTNNQEKHFYTFTNEHHRETYVEQEQGENANDRNDRAIRVAAKWYNEHLKKMSADNQLQVIFITNDRRNKEKAIEEGIPAFTCEEYVKSLTANPELIDRLACLSEEGNEIESGKIIFSEHLPLSKLQQGIKSGTYLQGTFRASRENYLEATVWIHGDNEENKEIILQGLKHLNRAVHEDIVAVELLPKSQWVAPSSVVLHDEGQNEEDVEKEEERERMLKTAVSEKMLKPTGRVVGIIKRNWRPYCGMLSKSDIKESRRHLFTPADKRIPRIRIETRQASTLEGRRIIVAIDGWPRNSRYPNGHFVRNLGDVGEKETETEVLLLEHDVPHQPFSQAVLSFLPKMPWSITEKDMKNREDLRHLCICSVDPPGCTDIDDALHCRELENGNLEVGVHIADVSHFIRPGNALDQESARRGTTVYLCEKRIDMVPELLSSNLCSLKCDVDRLAFSCIWEMNHNAEILKTKFTKSVINSKASLTYAEAQLRIDSANMNDDITTSLRGLNKLAKILKKRRIEKGALTLSSPEVRFHMDSETHDPIDLQTKELRETNSMVEEFMLLANISVAKKIHEEFSEHALLRKHPAPPPSNYEILVKAARSRNLEIKTDTAKSLAESLDQAESPTFPYLNTLLRILATRCMMQAVYFCSGMDNDFHHYGLASPIYTHFTSPIRRYADVIVHRLLAVAIGADCTYPELTDKHKLADICKNLNFRHKMAQYAQRASVAFHTQLFFKSKGIVSEEAYILFVRKNAIVVLIPKYGLEGTVFFEEKDKPNPQLIYDDEIPSLKIEDTVFHVFDKVKVKIMLDSSNLQHQKIRMSLVEPQIPGISIPTDTSNMDLNGPKKKKMKLGK

SEQ ID NO: 743659 - protein, 504 aa, Homo sapiens
MPWSITEKDMKNREDLRHLCICSVDPPGCTDIDDALHCRELENGNLEVGVHIADVSHFIRPGNALDQESARRGTTVYLCEKRIDMVPELLSSNLCSLKCDVDRLAFSCIWEMNHNAEILKTKFTKSVINSKASLTYAEAQLRIDSANMNDDITTSLRGLNKLAKILKKRRIEKGALTLSSPEVRFHMDSETHDPIDLQTKELRETNSMVEEFMLLANISVAKKIHEEFSEHALLRKHPAPPPSNYEILVKAARSRNLEIKTDTAKSLAESLDQAESPTFPYLNTLLRILATRCMMQAVYFCSGMDNDFHHYGLASPIYTHFTSPIRRYADVIVHRLLAVAIGADCTYPELTDKHKLADICKNLNFRHKMAQYAQRASVAFHTQLFFKSKGIVSEEAYILFVRKNAIVVLIPKYGLEGTVFFEEKDKPNPQLIYDDEIPSLKIEDTVFHVFDKVKVKIMLDSSNLQHQKIRMSLVEPQIPGISIPTDTSNMDLNGPKKKKMKLGK

SEQ ID NO: 743660 - protein, 958 aa, Homo sapiens [sequence omitted]

SEQ ID NO: 743661 - protein, 958 aa, Homo sapiens [sequence omitted]

SEQ ID NO: 743662 - protein, 844 aa, Homo sapiens
MLKSKTFLKKTRAGGVMKIVREHYLRDDIGCGAPGCAACGGAHEGPALEPQPQDPASSVCPQPHYLLPDTNVLLHQIDVLEDPAIRNVIVLQTVLQEVRNRSAPVYKRIRDVTNNQEKHFYTFTNEHHRETYVEQEQGENANDRNDRAIRVAAKWYNEHLKKMSADNQLQVIFITNDRRNKEKAIEEGIPAFTCEEYVKSLTANPELIDRLACLSEEGNEIESGKIIFSEHLPLSKLQQGIKSGTYLQGTFRASRENYLEATVWIHGDNEENKEIILQGLKHLNRAVHEDIVAVELLPKSQWVAPSSVVLHDEGQNEEDVEKEEERERMLKTAVSEKMLKPTGRVVGIIKRNWRPYCGMLSKSDIKESRRHLFTPADKRIPRIRIETRQASTLEGRRIIVAIDGWPRNSRYPNGHFVRNLGDVGEKETETEVLLLEHDVPHQPFSQAVLSFLPKMPWSITEKDMKNREDLRHLCICSVDPPGCTDIDDALHCRELENGNLEVGVHIADVSHFIRPGNALDQESARRGTTVYLCEKRIDMVPELLSSNLCSLKCDVDRLAFSCIWEMNHNAEILKTKFTKSVINSKASLTYAEAQLRIDSANMNDDITTSLRGLNKLAKILKKRRIEKGALTLSSPEVRFHMDSETHDPIDLQTKELRETNSMVEEFMLLANISVAKKIHEEFSEHALLRKHPAPPPSNYEILVKAARSRNLEIKTDTAKSLAESLDQAESPTFPYLNTLLRILATRCMMQAVYFCSGMDNDFHHYGLASPIYTHFTSPIRRYADVIVHRLLAVAIGADCTYPELTDKHKLADICKNLNFRHKMAQYAQRASVAFHTQLFFKSKE

SEQ ID NO: 743663 - protein, 897 aa, Homo sapiens
MLKSKTFLKKTRAGGVMKIVREHYLRDDIGCGAPGCAACGGAHEGPALEPQPQDPASSVCPQPHYLLPDTNVLLHQIDVLEDPAIRNVIVLQTVLQEVRNRSAPVYKRIRDVTNNQEKHFYTFTNEHHRETYVEQEQGENANDRNDRAIRVAAKWYNEHLKKMSADNQLQVIFITNDRRNKEKAIEEGIPAFTCEEYVKSLTANPELIDRLACLSEEGNEIESGKIIFSEHLPLSKLQQGIKSGTYLQGTFRASRENYLEATVWIHGDNEENKEIILQGLKHLNRAVHEDIVAVELLPKSQWVAPSSVVLHDEGQNEEDVEKEEERERMLKTAVSEKMLKPTGRVVGIIKRNWRPYCGMLSKSDIKESRRHLFTPADKRIPRIRIETRQASTLEGRRIIVAIDGWPRNSRYPNGHFVRNLGDVGEKETETEVLLLEHDVPHQPFSQAVLSFLPKMPWSITEKDMKNREDLRHLCICSVDPPGCTDIDDALHCRELENGNLEVGVHIADVSHFIRPGNALDQESARRGTTVYLCEKRIDMVPELLSSNLCSLKCDVDRLAFSCIWEMNHNAEILKTKFTKSVINSKASLTYAEAQLRIDSANMNDDITTSLRGLNKLAKILKKRRIEKGALTLSSPEVRFHMDSETHDPIDLQTKELRETNSMVEEFMLLANISVAKKIHEEFSEHALLRKHPAPPPSNYEILVKAARSRNLEIKTDTAKSLAESLDQAESPTFPYLNTLLRILATRCMMQAVYFCSGMDNDFHHYGLASPIYTHFTSPIRRYADVIVHRLLAVAIGADCTYPELTDKHKLADICKNLNFRHKMAQYAQRASVAFHTQLFFKSKGIVSEEAYILFVRKNAIVVLIPKYGLEGTVFLGKGNQPRFLMGKPIKKKVRLED

SEQ ID NO: 743664 - protein, 513 aa, Homo sapiens
MLKSKTFLKKTRAGGVMKIVREHYLRDDIGCGAPGCAACGGAHEGPALEPQPQDPASSVCPQPHYLLPDTNVLLHQIDVLEDPAIRNVIVLQTVLQEVRNRSAPVYKRIRDVTNNQEKHFYTFTNEHHRETYVEQEQGENANDRNDRAIRVAAKWYNEHLKKMSADNQLQVIFITNDRRNKEKAIEEGIPAFTCEEYVKSLTANPELIDRLACLSEEGNEIESGKIIFSEHLPLSKLQQGIKSGTYLQGTFRASRENYLEATVWIHGDNEENKEIILQGLKHLNRAVHEDIVAVELLPKSQWVAPSSVVLHDEGQNEEDVEKEEERERMLKTAVSEKMLKPTGRVVGIIKRNWRPYCGMLSKSDIKESRRHLFTPADKRIPRIRIETRQASTLEGRRIIVAIDGWPRNSRYPNGHFVRNLGDVGEKETETEVLLLEHDVPHQPFSQAVLSFLPKMPWSITEKDMKNREDLRHLCICSVDPPGCTDIDDALHCRELENGNLEVGVHIADVSHFY

SEQ ID NO: 743665 - protein, 246 aa, Homo sapiens
MPVQPPSKDTEEMEAEGDSAAEMNGEEEESEEERSGSQTESEEESSEMDDEDYERRRSECVSEMLDLEKQFSELKEKLFRERLSQLRLRLEEVGAERAPEYTEPLGGLQRSLKIRIQVAGIYKGFCLDVIRNKYECELQGAKQHLESEKLLLYDTLQGELQERIQRLEEDRQSLDLSSEWWDDKLHARGSSRSWDSLPPSKRKKAPLVSGPYIVYMLQEIDILEDWTAIKKARAAVSPQKRKSDGP

SEQ ID NO: 743666 - protein, 174 aa, Homo sapiens
TARYEAGFGKQHLESEKLLLYDTLQGELQERIQRLEEDRQSLDLSSEWWDDKLHARGSSRSWDSLPPSKRKKAPLVSGPYIVYMLQEIDILEDWTAIKKVGAAAAHVTCPTSGPPTLAAALPSAGLGVLCSPRLPHLQPRVPGSQLAHKSSCSRRPWEKGFLVCVSPFPFWGRF

SEQ ID NO: 743667 - protein, 246 aa, Homo sapiens; identical to SEQ ID NO: 743665

SEQ ID NO: 743668 - protein, 246 aa, Homo sapiens; identical to SEQ ID NO: 743665

SEQ ID NO: 743669 - protein, 246 aa, Homo sapiens; identical to SEQ ID NO: 743665

SEQ ID NO: 743670 - protein, 246 aa, Homo sapiens; identical to SEQ ID NO: 743665

SEQ ID NO: 743671 - protein, 290 aa, Homo sapiens
MPVQPPSKDTEEMEAEGDSAAEMNGEEEESEEERSGSQTESEEESSEMDDEDYERRRSECVSEMLDLEKQFSELKEKLFRERLSQLRLRLEEVGAERAPEYTEPLGGLQRSLKIRIQVAGIYKGFCLDVIRNKYECELQGAKQHLESEKLLLYDTLQGELQERIQRLEEDRQSLDLSSEWWDDKLHARGSSRSWDSLPPSKRKKAPLVSGPYIVYMLQEIDILEDWTAIKKARAAVSPQKRKSDDRRTHRPLRVCPARLLWCCWALPLHLALAWTPPLPSSRPAQLWPWS

SEQ ID NO: 743672 - protein, 237 aa, Homo sapiens
VIYRILMDPPAAEMNGEEEESEEERSGSQTESEEESSEMDDEDYERRRSECVSEMLDLEKQFSELKEKLFRERLSQLRLRLEEVGAERAPEYTEPLGGLQRSLKIRIQVAGIYKGFCLDVIRNKYECELQGAKQHLESEKLLLYDTLQGELQERIQRLEEDRQSLDLSSEWWDDKLHARGSSRSWDSLPPSKRKKAPLVSGPYIVYMLQEIDILEDWTAIKKARAAVSPQKRKSDGP

SEQ ID NO: 743673 - protein, 304 aa, Homo sapiens
MPVQPPSKDTEEMEAEGDSAAEMNGEEEESEEERSGSQTESEEESSEMDDEDYERRRSECVSEMLDLEKQFSELKEKLFRERLSQLRLRLEEVGAERAPEYTEPLGGLQRSLKIRIQVAGIYKGFCLDVIRNKYECELQGAKQHLESEKLLLYDTLQGELQERIQRLEEDRQSLDLSSEWWDDKLHARGSSRSWDSLPPSKRKKAPLVSGPYIVYMLQEIDILEDWTAIKKDLDPAVHSQGDPQSSWHCTQDSRLPPADRRTHRPLRVCPARLLWCCWALPLHLALAWTPPLPSSRPAQLWPWS

SEQ ID NO: 743674 - protein, 306 aa, Homo sapiens
MPVQPPSKDTEEMEAEGDSAAEMNGEEEESEEERSGSQTESEEESSEMDDEDYERRRSECVSEMLDLEKQFSELKEKLFRERLSQLRLRLEEVGAERAPEYTEPLGGLQRSLKIRIQVAGIYKGFCLDVIRNKYECELQGAKQHLESEKLLLYDTLQGELQERIQRLEEDRQSLDLSSEWWDDKLHARGSSRSWDSLPPSKRKKAPLVSGPYIVYMLQEIDILEDWTAIKKVGAAAAHVTCPTSGPPTLAAALPSAGLGVLCSPRLPHLQPRVPGSQLAHKSSCSRRPWEKGFLVCVSPFPFWGRF

SEQ ID NO: 743675 - protein, 133 aa, Homo sapiens
MRIQVAGIYKGFCLDVIRNKYECELQGAKQHLESEKLLLYDTLQGELQERIQRLEEDRQSLDLSSEWWDDKLHARGSSRSWDSLPPSKRKKAPLVSGPYIVYMLQEIDILEDWTAIKKARAAVSPQKRKSDGP

SEQ ID NO: 743676 - protein, 70 aa, Homo sapiens
TDRLCLPKKREPRSAYGSPAAAAGTGNHGQLSGNLRREARGSSPRESRCLSSLQAKTQKRWKQRVILLLR

SEQ ID NO: 743677 - protein, 180 aa, Homo sapiens
MPVQPPSKDTEEMEAEGDSAAEMNGEEEESEEERSGSQTESEEESSEMDDEDYERRRSECVSEMLDLEKQFSELKEKLFRERLSQLRLRLEEVGAERAPEYTEPLGGLQRSLKIRIQVAGIYKGFCLDVIRNKYECELQGAKQHLESEKLLLYDTLQGELQERIQRLEEDRQSLDLSSGP

SEQ ID NO: 743678 - protein, 156 aa, Homo sapiens
MPVQPPSKDTEEMEAEGDSAAEMNGEEEESEEERSGSQTESEEESSEMDDEDYERRRSECVSEMLDLEKQFSELKEKLFRERLSQLRLRLEEVGAERAPEYTEPLGGLQRSLKIRIQVAGPYIVYMLQEIDILEDWTAIKKARAAVSPQKRKSDGP

SEQ ID NO: 743679 - protein, 154 aa, Homo sapiens
MPVQPPSKDTEEMEAEGDSAAEMNGEEEESEEERSGSQTESEEESSEMDDEDYERRRSECVSEMLDLEKQFSELKEKLFRERLSQLRLRLEEVGAERAPEYTEPLGGLQRSLKIRIQVAGIYKGFCLDVIRNKYECELQGAKQHLECAGTLSQT

SEQ ID NO: 743680 - protein, 70 aa, Homo sapiens; identical to SEQ ID NO: 743676

SEQ ID NO: 743681 - protein, 124 aa, Homo sapiens
APTHKHVCTHTAPSHKYTCTQPLHTSTHAYAHTAPTHKHTRTHTAPSHKHVRAHTHRPYTQACMHTHTCRTHMHTCGYPPLLPRASPYWPLVPEMDDEDYERRRSECVSEMLDLEKQFSELKEK

SEQ ID NO: 743682 - protein, 120 aa, Homo sapiens
DTALHTPERRSPGQMTLQAPADTALHTPGRRSPAQMTLQAPADTALHTPGRRSPGKMTPDTSRYSIAHTRTRKPRADDSPGTSRYSTAHTRTQKPRADDSPGTSRYSTAHTRMRKPRADD

SEQ ID NO: 743683 - protein, 347 aa, Homo sapiens [sequence omitted]

SEQ ID NO: 743684 - protein, 237 aa, Homo sapiens [sequence omitted]

SEQ ID NO: 743685 - protein, 431 aa, Homo sapiens
VPTSLHFQSMLKSQWQNKPFDKIKPPKKLSLKHRAPMPGSLPDSARKDRHKLVSSFLTTAKLSHHQTRPDRTHRQHLDDVGAVPMVERVTAPKAERLLNPPPPVHDPNHSKMRLRDHSSERSEVLKHHTDMSSSSYLAATHHPPHSPLVRQLSTSSDSPAPASSSSQVTASTSQQPVRRRRGESSFDINNIVIPMSVAATTRVEKLQYKEILTPSWREVDLQSLKGSPDEENEEIEDLSDAAFAALHAKCEEMERARWLWTTSVPPQRRGSRSYRSSDGRTTPQLGSANPSTPQPASPDVSSSHSLSEYSHGQSPRSPISPELHSAPLTPVARDTPRHLASEDTRCSTPELGLDEQSVQPWERRTFPLAHSPQAECEDQLDAQERAARCTRRTSGSKTGRETEAAPTSPPIVPLKSRHLVAAATAQRPTHR

SEQ ID NO: 743686 - protein, 104 aa, Homo sapiens
SSDGRTTPQLGSANPSTPQPASPDVSSSHSLSEYSHGQSPRSPISPELHSAPLTPVARDTPRHLASEDTRCSTPELGLDEQVRDAAFGWGWHGWGMEPGRGSIC

SEQ ID NO: 743687 - protein, 431 aa, Homo sapiens; identical to SEQ ID NO: 743685

SEQ ID NO: 743688 - protein, 431 aa, Homo sapiens; identical to SEQ ID NO: 743685

SEQ ID NO: 743689 - protein, 272 aa, Homo sapiens
VPTSLHFQSMLKSQWQNKPFDKIKPPKKLSLKHRAPMPGSLPDSARKDRHKLVSSFLTTAKLSHHQTRPDRTHRQHLDDVGAVPMVERVTAPKAERLLNPPPPVHDPNHSKMRLRDHSSERSEVLKHHTDMSSSSYLAATHHPPHSPLVRQLSTSSDSPAPASSSSQVTASTSQQPVRRRRGESSFDINNIVIPMSVAATTRVEKLQYKEILTPSWREVDLQSLKGSPDEENEEIEDLSDAAFAALHAKCEEMERARWLWTTSVPPQRRGSR

SEQ ID NO: 743690 - protein, 67 aa, Homo sapiens
RGSRQSQPDPAAGTPAARAFRALGASDAGALPATPGRFLNLTTSREAKGRVDLERSKFRIFKITFFS

SEQ ID NO: 743691 - protein, 460 aa, Homo sapiens
MASREEVLALQAEVAQREEELNSLKQKLASALLAEQEPQPERLVPVSPLPPKAALSRDEILRYSRQLVLPELGVHGQLRLGTACVLIVGCGGLGCPLAQYLAAAGVGRLGLVDYDVVEMSNLARQVLHGEALAGQAKAFSAAASLRRLNSAVECVPYTQALTPATALDLVRRYDVVADCSDNVPTRYLVNDACVLAGRPLVSASALRFEGQITVYHYDGGPCYRCIFPQPPPAETVTNCADGGVLGVVTGVLGCLQALEVLKIAAGLGPSYSGSLLLFDALRGHFRSIRLRSRRLDCAACGERPTVTDLLDYEAFCGSSATDKCRSLQLLSPEERVSVTDYKRLLDSGAFHLLLDVRPQVEVDICRLPHALHIPLKHLERRDAESLKLLKEAIWEEKQGTQEGAAVPIYVICKLGNDSQKAVKILQSLSAAQELDPLTVRDVVGGLMAWAAKIDGTFPQY

SEQ ID NO: 743692 - protein, 460 aa, Homo sapiens; identical to SEQ ID NO: 743691

SEQ ID NO: 743693 - protein, 601 aa, Homo sapiens
EAGERDAAGAGSGARGLLPAPLPGRRLLEPQERAARTPRRRPLFRQRYDLSLDEMRALTVQRVKFAMDLPLLKRAGQDLAEKTKNFVSRSLVIGEVLSMADMATGVKCGIIYWLFGGAIRNLGSPEHVTKWFQPLQEQKYTGMFAMTERGHGSNARGIQTEATFDLSAQEFVIDTPCENAEKMYIGNAMYGNYAAVFAQLIIDGRSQGPHCFIVPVRDENGSLYPGVTAIDMMYKEGLHGVDNGILIFDKVRIPRENLLDKFGSVAPDGQYHSPIRNKSARFNAMLAALTPSRLAVAFQAMGAMKLGLTIAIRYSHSRRQFGPKTKEEVKIIEHQTQTLRLMPHLATALALTFVSRYAGALLDEDVFQGKELVNSRSLQALVAGLKAYSTWENIRCLQDCRECTGGMGYMMENRISGLKCDTDVFATFEGDDVVMLQVVGRELLAQYTKQYEEKPLFGLLQNWAESVGDKLRTSFLAFNMDTVDDLAFLLKAVKFRERVLQRGLVARIYYKVKTKKEDFFHAWNSCLHHVASLSLAHTHRVTLEQFSLAVKSCPDQEDQTLLMKFCLLYGTKLVFQERAWYLEHKYLTPMASTRIRNQERC

SEQ ID NO: 743694 - protein, 471 aa, Homo sapiens
  misc_feature (450)..(450): Xaa can be any naturally occurring amino acid
  misc_feature (455)..(455): Xaa can be any naturally occurring amino acid
  misc_feature (457)..(457): Xaa can be any naturally occurring amino acid
EAGERDAAGAGSGARGLLPAPLPGRRLLEPQERAARTPRRRPLFRQRYDLSLDEMRALTVQRVKFAMDLPLLKRAGQDLAEKTKNFVSRSLVIGEVLSMADMATGVKCGIIYWLFGGAIRNLGSPEHVTKWFQPLQEQKYTGMFAMTERGHGSNARGIQTEATFDLSAQEFVIDTPCENAEKMYIGNAMYGNYAAVFAQLIIDGRSQGPHCFIVPVRDENGSLYPGVTAIDMMYKEGLHGVDNGILIFDKVRIPRENLLDKFGSVAPDGQYHSPIRNKSARFNAMLAALTPSRLAVAFQAMGAMKLGLTIAIRYSHSRRQFGPKTKEEVKIIEHQTQTLRLMPHLATALALTFVSRYAGALLDEDVFQGKELVNSRSLQALVAGLKAYSTWENIRCLQDCRECTGGMGYMMENRISGLKCDTDVFATFEGDDVVMLQGCGGRGNWLGPNXPKTSXEXKKPLLWAWLQKTGA

SEQ ID NO: 743695 - protein, 513 aa, Homo sapiens
EAGERDAAGAGSGARGLLPAPLPGRRLLEPQERAARTPRRRPLFRQRYDLSLDEMRALTVQRVKFAMDLPLLKRAGQDLAEKTKNFVSRSLVIGEVLSMADMATGVKCGIIYWLFGGAIRNLGSPEHVTKWFQPLQEQKYTGMFAMTERGHGSNARGIQTEATFDLSAQEFVIDTPCENAEKMYIGNAMYGNYAAVFAQLIIDGRSQGPHCFIVPVRDENGSLYPGVTAIDMMYKEGLHGVDNGILIFDKVRIPRENLLDKFGSVAPDGQYHSPIRNKSARFNAMLAALTPSRLAVAFQAMGAMKLGLTIAIRYSHSRRQFGPKTKEEVKIIEHQTQTLRLMPHLATALALTFVSRYAGALLDEDVFQGKELVNSRSLQALVAGLKAYSTWENIRCLQDCRECTGGMGYMMENRISGLKCDTDVFATFEGDDVVMLQVVGRELLAQYTKQYEEKPLFGLLQNWAESVGDKLRTSFLAFNMDTVDDLAFLLKAVKFRERVLQRGLVARIYYKLP

SEQ ID NO: 743696 - protein, 560 aa, Homo sapiens
EAGERDAAGAGSGARGLLPAPLPGRRLLEPQERAARTPRRRPLFRQRYDLSLDEMRALTVQRVKFAMDLPLLKRAGQDLAEKTKNFVSRSLVIGEVLSMADMATGVKCGIIYWLFGGAIRNLGSPEHVTKWFQPLQEQKYTGMFAMTERGHGSNARGIQTEATFDLSAQEFVIDTPCENAEKMYIGNAMYGNYAAVFAQLIIDGRSQGPHCFIVPVRDENGSLYPGVTAIDMMYKEGLHGVDNGILIFDKVRIPRENLLDKFGSVAPDGQYHSPIRNKSARFNAMLAALTPSRLAVAFQAMGAMKLGLTIAIRYSHSRRQFGPKTKEEVKIIEHQTQTLRLMPHLATALALTFVSRYAGALLDEDVFQGKELVNSRSLQALVAGLKAYSTWENIRCLQDCRECTGGMGYMMENRISGLKCDTDVFATFEGDDVVMLQVVGRELLAQYTKQYEEKPLFGLLQNWAESVGDKLRTSFLAFNMDTVDDLAFLLKAVKFRERVLQRGLVARIYYKVKTKKEDFFHAWNSCLHHVASLSLAHTHRVLSVVWNQAGVSGAGLVFRT

SEQ ID NO: 743697 - protein, 189 aa, Homo sapiens
EAGERDAAGAGSGARGLLPAPLPGRRLLEPQERAARTPRRRPLFRQRYDLSLDEMRALTVQRVKFAMDLPLLKRAGQDLAEKTKNFVSRSLVIGEVLSMADMATGVKCGIIYWLFGGAIRNLGSPEHVTKWFQPLQEQKYTGMFAMTERGHGSNARGIQTEATFDLSAQMGKQRLTEVKQLTLAMQLMT

SEQ ID NO: 743698 - protein, 147 aa, Homo sapiens
QARKWKFEMSYTSSYCRGVQCACFSKDDKYVYVGLKDRSILVWSVLDGTLLTVQFVHAVVNRIIPTTSGFIAPTRHGYLIRENFQCLSAKASPQDPLKNFKKAMWMVKSRQREELVAAAGAPQVLESESAQGNETKSNKCSQVCLIV

SEQ ID NO: 743699 - protein, 253 aa, Homo sapiens
SFLFPEQDYEPTPYRGICKKEGGCRNPFFKQKLTSKCRLIPQAVKRRTEKASCPSPAPELNVILENEKFHLHPVGSQNSREIGTTAKVWTGVTGTQKKEQLLFRKVGEDFVKVGMFDLNLEEQAETQEVQKRGGGNSMNEVGHANSLSIDTIFHVRAASCNTEVFRFYEKVLNELKALLRGQLSPLPILLSAHKTGTDNLLEELGRNFSIFSVQSSLVPLCERRRDLLDWCRWEKGIKCAWLSLFLALSLGLT

SEQ ID NO: 743700 - protein, 520 aa, Homo sapiens
ESREDLVTYRGIAQRLPGNGVASGGGRPGPGVAAGPVRWRHGTEKEREERQSQRHPDCRWARSRGHEQGAGQVEEHVSRIREELDREREERNYFQLERDKIHTFWEITRRQLEEKKAELRNKDREMEEAEERHQVEIKVYKQKVKHLLYEHQNNLTEMKAEGTVVMKLAQKEHRIQESVLRKDMRALKVELKEQELASEVVVKNLRLKHTEEITRMRNDFERQVREIEAKYDKKMKMLRDELDLRRKTELHEVEERKNGQIHTLMQRHEEAFTDIKNYYNDITLNNLALINSLKEQMEDMRKKEDHLEREMAEVSGQNKRLADPLQKAREEMSEMQKQLANYERDKQILLCTKARLKVREKELKDLQWEHEVLEQRFTKVQQERDELYRKFTAAIQEVQQKTGFKNLVLERKLQALSAAVEKKEVQFNEVLAASNLDPAALTLVSRKLEDVLESKNSTIKDLQYELAQVCKAHNDLLRTYEAKLLAFGIPLDNVGFKPLETAVIGQTLGQGPAGLVGTPT

SEQ ID NO: 743701 - protein, 72 aa, Homo sapiens
GSSYGMIEDLMRLAIGNLARKAKNSSQVTIWVCVAGERMRLQRWGPEAPHPSFPGSASQWASDTALPPVRLG

SEQ ID NO: 743702 - protein, 115 aa, Homo sapiens [sequence omitted]

SEQ ID NO: 743703 - protein, 87 aa, Homo sapiens
MGPCSVPHLTHCTWQVEEHVSRIREELDREREERNYFQLERDKIHTFWEITRRQLRQENGLNPGGGGCSELRSHHCTPAWATEQDSV

SEQ ID NO: 743704 - protein, 454 aa, Homo sapiens
MSKEQEVEEHVSRIREELDREREERNYFQLERDKIHTFWEITRRQLEEKKAELRNKDREMEEAEERHQVEIKVYKQKVKHLLYEHQNNLTEMKAEGTVVMKLAQKEHRIQESVLRKDMRALKVELKEQELASEVVVKNLRLKHTEEITRMRNDFERQVREIEAKYDKKMKMLRDELDLRRKTELHEVEERKNGQIHTLMQRHEEAFTDIKNYYNDITLNNLALINSLKEQMEDMRKKEDHLEREMAEVSGQNKRLADPLQKAREEMSEMQKQLANYERDKQILLCTKARLKVREKELKDLQWEHEVLEQRFTKVQQERDELYRKFTAAIQEVQQKTGFKNLVLERKLQALSAAVEKKEVQFNEVLAASNLDPAALTLVSRKLEDVLESKNSTIKDLQYELAQVCKAHNDLLRTYEAKLLAFGIPLDNVGFKPLETAVIGQTLGQGPAGLVGTPT

SEQ ID NO: 743705 - protein, 497 aa, Homo sapiens
SGRARWRPLVLFQVKLSPPSFFLAFRRPHAPLPCMGPCSVPHLTHCTWQVEEHVSRIREELDREREERNYFQLERDKIHTFWEITRRQLEEKKAELRNKDREMEEAEERHQVEIKVYKQKVKHLLYEHQNNLTEMKAEGTVVMKLAQKEHRIQESVLRKDMRALKVELKEQELASEVVVKNLRLKHTEEITRMRNDFERQVREIEAKYDKKMKMLRDELDLRRKTELHEVEERKNGQIHTLMQRHEEAFTDIKNYYNDITLNNLALINSLKEQMEDMRKKEDHLEREMAEVSGQNKRLADPLQKAREEMSEMQKQLANYERDKQILLCTKARLKVREKELKDLQWEHEVLEQRFTKVQQERDELYRKFTAAIQEVQQKTGFKNLVLERKLQALSAAVEKKEVQFNEVLAASNLDPAALTLVSRKLEDVLESKNSTIKDLQYELAQVCKAHNDLLRTYEAKLLAFGIPLDNVGFKPLETAVIGQTLGQGPAGLVGTPT

SEQ ID NO: 743706 - protein, 248 aa, Homo sapiens [sequence omitted]

SEQ ID NO: 743707 - protein, 195 aa, Homo sapiens
RRQCGQHTDPGAVGVGTVGRQRVPGRCRGGRQHLPSEMSPGEGPHRPPPALSLQVQQERDELYRKFTAAIQEVQQKTGFKNLVLERKLQALSAAVEKKEVQFNEVLAASNLDPAALTLVSRKLEDVLESKNSTIKDLQYELAQVCKAHNDLLRTYEAKLLAFGIPLDNVGFKPLETAVIGQTLGQGPAGLVGTPT

SEQ ID NO: 743708 - protein, 520 aa, Homo sapiens; identical to SEQ ID NO: 743700

SEQ ID NO: 743709 - protein, 269 aa, Homo sapiens
SGRARWRPLVLFQAPKKKGKKGKAKGTPIVDGLAPEDMSKEQVKLSPPSFFLAFRRPHAPLPCMGPCSVPHLTHCTWQVEEHVSRIREELDREREERNYFQLERDKIHTFWEITRRQLEEKKAELRNKDREMEEAEERHQVEIKVYKQKVKHLLYEHQNNLTEMKAEGTVVMKLAQKEHRIQESVLRKDMRALKVELKEQELASEVVVKNLRLKHTEEITRMRNDFERQVREIEAKYDKRRQLSHIWLPAFYLSLDHLNFRLLSCWYHG

SEQ ID NO: 743710 - protein, 102 aa, Homo sapiens
DLSERPLESPGRSRCLGQKMSLKLPSPLSPQDVLESKNSTIKDLQYELAQVCKAHNDLLRTYEAKLLAFGIPLDNVGFKPLETAVIGQTLGQGPAGLVGTPT

SEQ ID NO: 743711 - protein, 207 aa, Homo sapiens
MKMLRDELDLRRKTELHEVEERKNGQIHTLMQRHEEAFTDIKNYYNDITLNNLALINSLKEQMEDMRKKEDHLEREMAEVSGQNKRLADPLQKAREEMSEMQKQLANYERDKQILLCTKARLKVREKELKDLQWEHEVLEQRFTKVSGTTLALQLAVGVRATVHQVHQGERALGWPCSGDGTPASQGRGSPCGPWTSFRCLGQVSGF

SEQ ID NO: 743712 - protein, 491 aa, Homo sapiens
SGRARWRPLVLFQAPKKKGKKGKAKGTPIVDGLAPEDMSKEQEVEEHVSRIREELDREREERNYFQLERDKIHTFWEITRRQLEEKKAELRNKDREMEEAEERHQVEIKVYKQKVKHLLYEHQNNLTEMKAEGTVVMKLAQKEHRIQESVLRKDMRALKVELKEQELASEVVVKNLRLKHTEEITRMRNDFERQVREIEAKYDKKMKMLRDELDLRRKTELHEVEERKNGQIHTLMQRHEEAFTDIKNYYNDITLNNLALINSLKEQMEDMRKKEDHLEREMAEVSGQNKRLADPLQKAREEMSEMQKQLANYERDKQILLCTKARLKVREKELKDLQWEHEVLEQRFTKVQQERDELYRKFTAAIQEVQQKTGFKNLVLERKLQALSAAVEKKEVQFNEVLAASNLDPAALTLVSRKLEDVLESKNSTIKDLQYELAQVCKAHNDLLRTYEAKLLAFGIPLDNVGFKPLETAVIGQTLGQGPAGLVGTPT

SEQ ID NO: 743713 - protein, 526 aa, Homo sapiens
SGRARWRPLVLFQAPKKKGKKGKAKGTPIVDGLAPEDMSKEQVKLSPPSFFLAFRRPHAPLPCMGPCSVPHLTHCTWQVEEHVSRIREELDREREERNYFQLERDKIHTFWEITRRQLEEKKAELRNKDREMEEAEERHQVEIKVYKQKVKHLLYEHQNNLTEMKAEGTVVMKLAQKEHRIQESVLRKDMRALKVELKEQELASEVVVKNLRLKHTEEITRMRNDFERQVREIEAKYDKKMKMLRDELDLRRKTELHEVEERKNGQIHTLMQRHEEAFTDIKNYYNDITLNNLALINSLKEQMEDMRKKEDHLEREMAEVSGQNKRLADPLQKAREEMSEMQKQLANYERDKQILLCTKARLKVREKELKDLQWEHEVLEQRFTKVQQERDELYRKFTAAIQEVQQKTGFKNLVLERKLQALSAAVEKKEVQFNEVLAASNLDPAALTLVSRKLEDVLESKNSTIKDLQYELAQVCKAHNDLLRTYEAKLLAFGIPLDNVGFKPLETAVIGQTLGQGPAGLVGTPT

SEQ ID NO: 743714 - protein, 286 aa, Homo sapiens
MKMLRDELDLRRKTELHEVEERKNGQIHTLMQRHEEAFTDIKNYYNDITLNNLALINSLKEQMEDMRKKEDHLEREMAEVSGQNKRLADPLQKAREEMSEMQKQLANYERDKQILLCTKARLKVREKELKDLQWEHEVLEQRFTKVQQERDELYRKFTAAIQEVQQKTGFKNLVLERKLQALSAAVEKKEVQFNEVLAASNLDPAALTLVSRKLEDVLESKNSTIKDLQYELAQVCKAHNDLLRTYEAKLLAFGIPLDNVGFKPLETAVIGQTLGQGPAGLVGTPT

SEQ ID NO: 743715 - protein, 72 aa, Homo sapiens
AALSSGGPERGDPQLPDTALSPQAHNDLLRTYEAKLLAFGIPLDNVGFKPLETAVIGQTLGQGPAGLVGTPT

SEQ ID NO: 743716 - protein, 441 aa, Homo sapiens
ESREDLVTYRGIAQRLPGNGVASGGGRPGPGVAAGPVRWRHGTEKEREERQSQRHPDCRWARSRGHEQGAGQVEEHVSRIREELDREREERNYFQLERDKIHTFWEITRRQLEEKKAELRNKDREMEEAEERHQVEIKVYKQKVKHLLYEHQNNLTEMKAEGTVVMKLAQKEHRIQESVLRKDMRALKVELKEQELASEVVVKNLRLKHTEEITRMRNDFERQVREIEAKYDKKMKMLRDELDLRRKTELHEVEERKNGQIHTLMQRHEEAFTDIKNYYNDITLNNLALINSLKEQMEDMRKKEDHLEREMAEVSGQNKRLADPLQKAREEMSEMQKQLANYERDKQILLCTKARLKVREKELKDLQWEHEVLEQRFTKVSGTTLALQLAVGVRATVHQVHQGERALGWPCSGDGTPASQGRGSPCGPWTSFRCLGQVSGF

SEQ ID NO: 743717 - protein, 157 aa, Homo sapiens
GQHLPPLLCAGIMELALLCGLVVMAGVIPIQGGILNLNKMVKQVTGKMPILSYWPYGCHCGLGGRGQPKDATDWCCQTHDCCYDHLKTQGCSIYKDYYRYNFSQGNIHCSDKGSWCEQQLCACDKEVAFCLKRNLDTYQKRLRFYWRPHCRGQTPGC

SEQ ID NO: 743718 - protein, 157 aa, Homo sapiens; identical to SEQ ID NO: 743717

SEQ ID NO: 743719 - protein, 144 aa, Homo sapiens
GQHLPPLLCAGIMELALLCGLVVMAGVIPIQGGILNLNKMVKQVTGKMPILSYWPYGCHCGLGGRGQPKDATDWCCQTHDCCYDHLKTQGCSIYKDYYRYNFSQGNIHCSLPPRGHLSLMARRVTPWRVQLPAPPCLCRIVWVE

SEQ ID NO: 743720 - protein, 159 aa, Homo sapiens
AIIIIGDDSSVPVILEQAIVIIGDDNSVPVILEQAIVIIGDDSSVPVILEQAIVVVGDDSSVPVILEQAVVVVGDDSSVPVILEQAVVVVGDDSSVPVILEQAVVVVGDDSYVPVILEQAVVVVGDDSSVPVIPPEDLAVGQDADVEDSDTDGPDPVRV

SEQ ID NO: 743721 - protein, 297 aa, Homo sapiens
GTVLGGGLGSAAAMASRLLLNNGAKMPILGLGTWKSPPGQVTEAVKVAIDVGYRHIDCAHVYQNENEVGVAIQEKLREQVVKREELFIVSKLWCTYHEKGLVKGACQKTLSDLKLDYLDLYLIHWPTGFKPGKEFFPLDESGNVVPSDTNILDTWAAMEELVDEGLVKAIGISNFNHLQVEMILNKPGLKYKPAVNQIECHPYLTQEKLIQYCQSKGIVVTAYSPLGSPDRPWASRGPSLLGIQDQGAGTGNKKSQVCSGPAENGGPSGPQWDQVVRRNLHKGGGDKPKRARTSNRK

SEQ ID NO: 743722 - protein, 200 aa, Homo sapiens
GTVLGGGLGSAAAMASRLLLNNGAKMPILGLGTWKSPPGQVTEAVKVAIDVGYRHIDCAHVYQNENEVGVAIQEKLREQVVKREELFIVSKLWCTYHEKGLVKGACQKTLSDLKLDYLDLYLIHWPTGFKPGKEFFPLDESGNVVPSDTNILDTWAVRQPLVGPCFRDWFPLLLRSNLPAISHIAFCYSVPVVCSLFFFF

SEQ ID NO: 743723 - protein, 295 aa, Homo sapiens
HRTGRGSGERSSHGKPSPAQQRRHIDCAHVYQNENEVGVAIQEKLREQVVKREELFIVSKLWCTYHEKGLVKGACQKTLSDLKLDYLDLYLIHWPTGFKPGKEFFPLDESGNVVPSDTNILDTWAAMEELVDEGLVKAIGISNFNHLQVEMILNKPGLKYKPAVNQIECHPYLTQEKLIQYCQSKGIVVTAYSPLGSPDRPWAKPEDPSLLEDPRIKAIAAKHKTQVLIRFPMQRNLVVIPKSVTPERIAENFKVFDFELSSQDMTTLLSYNRNWRVCALLSCTSHKDYPFHEEF

SEQ ID NO: 743724 - protein, 211 aa, Homo sapiens
GTVLGGGLGSAAAMASRLLLNNGAKMPILGLGTWKSPPGQVTEAVKVAIDVGYRHIDCAHVYQNENEVGVAIQEKLREQVVKREELFIVSKLWCTYHEKGLVKGACQKTLSDLKLDYLDLYLIHWPTGFKPGKEFFPLDESGNVVPSDTNILDTWAAMEELVVCLGSSELDLGHLGTRSCSDTKVIEFLQRRLGTSVLASTSVLPSTSVLP

SEQ ID NO: 743725 - protein, 324 aa, Homo sapiens
GTVLGGGLGSAAAMASRLLLNNGAKMPILGLGTWKSPPGQVTEAVKVAIDVGYRHIDCAHVYQNENEVGVAIQEKLREQVVKREELFIVSKLWCTYHEKGLVKGACQKTLSDLKLDYLDLYLIHWPTGFKPGKEFFPLDESGNVVPSDTNILDTWAAMEELVDEGLVKAIGISNFNHLQVEMILNKPGLKYKPAVNQIECHPYLTQEKLIQYCQSKGIVVTAYSPLGSPDRPWASPRTLSPWRIPGQRDRSSEHKITASPDRSPAKNWGCSQVGHRRLVNSVLVDWRRLTLIVKNEVACGDPQYSELTVRPKQGCLPRRFQGHW

SEQ ID NO: 743726 - protein, 313 aa, Homo sapiens
GTVLGGGLGSAAAMASRLLLNNGAKMPILGLGTWKSPPGQVTEAVKVAIDVGYRHIDCAHVYQNENEVGVAIQEKLREQVVKREELFIVSKLWCTYHEKGLVKGACQKTLSDLKLDYLDLYLIHWPTGFKPGKEFFPLDESGNVVPSDTNILDTWAAMEELVDEGLVKAIGISNFNHLQVEMILNKPGLKYKPAVNQIECHPYLTQEKLIQYCQSKGIVVTAYSPLGSPDRPWAKPEDPSLLEDPRIKAIAAKHKTQIPKSVTPERIAENFKVFDFELSSQDMTTLLSYNRNWRVCALLSCTSHKDYPFHEEF

SEQ ID NO: 743727 - protein, 315 aa, Homo sapiens
GTVLGGGLGSAAAMASRLLLNNGAKMPILGLGTWKSPPGQVTEAVKVAIDVGYRHIDCAHVYQNENEVGVAIQEKLREQVVKREELFIVSKLWCTYHEKGLVKGACQKTLSDLKLDYLDLYLIHWPTGFKPGKEFFPLDESGNVVPSDTNILDTWAAMEELVDEGLVKAIGISNFNHLQVEMILNKPGLKYKPAVNQIECHPYLTQEKLIQYCQSKGIVVTAYSPLGSPDRPWASPRTLSPWRIPGQRDRGLPIKLQARPVPVPMQRTCGGPQTLDPNPLWKFKGLPLPSPPFTPLFFQKTWGGGLFSSPQGAPP

SEQ ID NO: 743728 - protein, 44 aa, Homo sapiens
LPGQEPSCRLSVTPESRTTTTGKETVGGLAQSRRATESTVYPAV

SEQ ID NO: 743729 - protein, 118 aa, Homo sapiens
TKKERLRGTEKESHRDREMERQTDRGEPRHRGRGRQRQALPGELGPLCDWLLLENSFPGLQLLCNCFLQLTDFIDFVCFSPSFNLLFAKPSKEPHLRLEGVVSISTLYILSTHLHLKL

SEQ ID NO: 743730 - protein, 367 aa, Homo sapiens
MRWFLPWTLAAVTAAAASTVLATALSPAPTTMDFTPAPLEDTSSRPQFCKWPCECPPSPPRCPLGVSLITDGCECCKMCAQQLGDNCTEAAICDPHRGLYCDYSGDRPRYAIGVCAQVVGVGCVLDGVRYNNGQSFQPNCKYNCTCIDGAVGCTPLCLRVRPPRLWCPHPRRVSIPGHCCEQWVCEDDAKRPRKTAPRDTGAFDAVGEVEAWHRNCIAYTSPWSPCSTSCGLGVSTRISNVNAQCWPEQESRLCNLRPCDVDIHTLIKAGKKCLAVYQPEASMNFTLAGCISTRSYQPKYCGVCMDNRCCIPYKSKTIDVSFQCPDGLGFSRQVLWINACFCNLSCRNPNDIFADLESYPDFSEIAN

SEQ ID NO: 743731 - protein, 122 aa, Homo sapiens
MRWFLPWTLAAVTAAAASTVLATAGKKCLAVYQPEASMNFTLAGCISTRSYQPKYCGVCMDNRCCIPYKSKTIDVSFQCPDGLGFSRQVLWINACFCNLSCRNPNDIFADLESYPDFSEIAN

SEQ ID NO: 743732 - protein, 280 aa, Homo sapiens
MRWFLPWTLAAVTAAAASTVLATALSPAPTTMDFTPAPLEDTSSRPQFCKWPCECPPSPPRCPLGVSLITDGCECCKMCAQQLGDNCTEAAICDPHRGLYCDYSGDRPRYAIGVCAHAVGEVEAWHRNCIAYTSPWSPCSTSCGLGVSTRISNVNAQCWPEQESRLCNLRPCDVDIHTLIKAGKKCLAVYQPEASMNFTLAGCISTRSYQPKYCGVCMDNRCCIPYKSKTIDVSFQCPDGLGFSRQVLWINACFCNLSCRNPNDIFADLESYPDFSEIAN

SEQ ID NO: 743733 - protein, 280 aa, Homo sapiens; identical to SEQ ID NO: 743732

SEQ ID NO: 743734 - protein, 319 aa, Homo sapiens
PRAGPGPGACGFRKRRARCLAARLAAMSSASGLRRGHPAGGEENMTETDAFYKREMFDPAEKYKMDHRRRGIALIFNHERFFWHLTLPERRGTCADRDNLTRRFSDLGFEVKCFNDLKAEELLLKIHEVSTVSHADADCFVCVFLSHGEGNHIYAYDAKIEIQTLTGLFKGDKCHSLVGKPKIFIIQACRGNQHDVPVIPLDVVDNQTEKLDTNITEVDAASVYTLPAGADFLMCYSVAEGYYSHRETVNGSWYIQDLCEMLGKYGSSLEFTELLTLVNRKVSQRRVDFCKDPSAIGKKQVPCFASMLTKKLHFFPKSN

SEQ ID NO: 743735 - protein, 195 aa, Homo sapiens
PRAGPGPGACGFRKRRARCLAARLAAMSSASGLRRGHPAGGEENMTETDAFYKREMFDPAEKYKMDHRRRGIALIFNHERFFWHLTLPERRGTCADRDNLTRRFSDLGFEVKCFNDLKAEELLLKIHEVSTVSHADADCFVCVFLSHGEGNHIYAYDAKIEIQTLTGLFKGDKCHSLVGKPKIFIIQVRLSTLSS

SEQ ID NO: 743736 - protein, 135 aa, Homo sapiens
QQPIDSIRLAAWCFSEQINTLQTRKNITYILGTSQWFNLCAWLGSQVWNTPDIYHSGYYSHRETVNGSWYIQDLCEMLGKYGSSLEFTELLTLVNRKVSQRRVDFCKDPSAIGKKQVPCFASMLTKKLHFFPKSN

SEQ ID NO: 743737 - protein, 230 aa, Homo sapiens
PRAGPGPGACGFRKRRARCLAARLAAMSSASGLRRGHPAVSTVSHADADCFVCVFLSHGEGNHIYAYDAKIEIQTLTGLFKGDKCHSLVGKPKIFIIQACRGNQHDVPVIPLDVVDNQTEKLDTNITEVDAASVYTLPAGADFLMCYSVAEGYYSHRETVNGSWYIQDLCEMLGKYGSSLEFTELLTLVNRKVSQRRVDFCKDPSAIGKKQVPCFASMLTKKLHFFPKSN

SEQ ID NO: 743738 - protein, 319 aa, Homo sapiens; identical to SEQ ID NO: 743734

SEQ ID NO: 743739 - protein, 460 aa, Homo sapiens
MNKPITPSTYVRCLNVGLIRKLSDFIDPQEGWKKLAVAIKKPSGDDRYNQFHIRRFEALLQTGKSPTSELLFDWGTTNCTVGDLVDLLIQNEFFAPASLLLPDAVPKTANTLPSKEAITVQQKQMPFCDKDRTLMTPVQNLEQSYMPPDSSSPENKSLEVSDTRFHSFSFYELKNVTNNFDERPISVGGNKMGEGGFGVVYKGYVNNTTVAVKKLAAMVDITTEELKQQFDQEIKVMAKCQHENLVELLGFSSDGDDLCLVYVYMPNGSLLDRLSCLDGTPPLSWHMRCKIAQGAANGINFLHENHHIHRDIKSANILLDEAFTAKISDFGLARASEKFAQTVMTSRIVGTTAYMAPEALRGEITPKSDIYSFGVVLLEIITGLPAVDEHREPQLLLDIKEEIEDEEKTIEDYIDKKMNDADSTSVEAMYSVASQCLHEKKNKRPDIKKVQQLLQEMTAS

SEQ ID NO: 743740 - protein, 336 aa, Homo sapiens
MPFCDKDRTLMTPVQNLEQSYMPPDSSSPENKSLEVSDTRFHSFSFYELKNVTNNFDERPISVGGNKMGEGGFGVVYKGYVNNTTVAVKKLAAMVDITTEELKQQFDQEIKVMAKCQHENLVELLGFSSDGDDLCLVYVYMPNGSLLDRLSCLDGTPPLSWHMRCKIAQGAANGINFLHENHHIHRDIKSANILLDEAFTAKISDFGLARASEKFAQTVMTSRIVGTTAYMAPEALRGEITPKSDIYSFGVVLLEIITGLPAVDEHREPQLLLDIKEEIEDEEKTIEDYIDKKMNDADSTSVEAMYSVASQCLHEKKNKRPDIKKVQQLLQEMTAS

SEQ ID NO: 743741 - protein, 257 aa, Homo sapiens
MSQITLMNDPFLLVMVDITTEELKQQFDQEIKVMAKCQHENLVELLGFSSDGDDLCLVYVYMPNGSLLDRLSCLDGTPPLSWHMRCKIAQGAANGINFLHENHHIHRDIKSANILLDEAFTAKISDFGLARASEKFAQTVMTSRIVGTTAYMAPEALRGEITPKSDIYSFGVVLLEIITGLPAVDEHREPQLLLDIKEEIEDEEKTIEDYIDKKMNDADSTSVEAMYSVASQCLHEKKNKRPDIKKVQQLLQEMTAS

SEQ ID NO: 743742 - protein, 238 aa, Homo sapiens
MNKPITPSTYVRCLNVGLIRKLSDFIDPQEGWKKLAVAIKKPSGDDRYNQFHIRRFEALLQTGKSPTSELLFDWGTTNCTVGDLVDLLIQNEFFAPASLLLPDAVPKTANTLPSKEAITVQQKQMPFCDKDRTLMTPVQNLEQSYMPPDSSSPENKSLEVSDTRFHSFSFYELKNVTNNFDERPISVGGNKMGEGGFGVVYKGYVNNTTVAVKKLAAVSYIFRNKKKELLHSVPYNRF

SEQ ID NO: 743743 - protein, 336 aa, Homo sapiens; identical to SEQ ID NO: 743740

SEQ ID NO: 743744 - protein, 460 aa, Homo sapiens; identical to SEQ ID NO: 743739

SEQ ID NO: 743745 - protein, 460 aa, Homo sapiens; identical to SEQ ID NO: 743739

SEQ ID NO: 743746 - protein, 117 aa, Homo sapiens
TLSPVPTCLLEDVGSRILCLPPAGIVAFTADLQRAQMHLINKECTVLQDGCGVAVWGWAGWSRQEPREAGRTVQGLLTRWKMMGASEGVVGQGQGEGSMRPGSGCRLLRLKFGSDPF

SEQ ID NO: 743747 - protein, 81 aa, Homo sapiens
QDEQRSKPPTTAAVCPVLDKLSAFVRCGRIVVPTSNVAVGIGPQPQTSPTGVCSKRHWPGPAHRLPRPPPPHSTFPEFCQH

SEQ ID NO: 743748 - protein, 122 aa, Homo sapiens
QDEQRSKPPTTAAVCPVLDKLSAFVRCGRIVVPTSNVAVGIGPQPQTSPTGVCSKRHWPGPAHRSPRKENKSTLRTELEVVYLGILHSCKLNVLSLLVLRKCLGTSFYIEGSAYGQNECPWA

SEQ ID NO: 743749 - protein, 154 aa, Homo sapiens
  misc_feature (80)..(80): Xaa can be any naturally occurring amino acid
MGSTTNTVPSNQHKSRSTIHATHVKPEQSILSYDQKPGPSERSRATKSGSRGTERTVVMDKSKGVPVISVKTSGSKERAXKARIANQPAERLQAPGPSLHERGEEGGALREAQSRAPSCKGQQHGEKDPAFGPGLHLSVTGYKQRHPERVQRGS

SEQ ID NO: 743750 - protein, 586 aa, Homo sapiens
MILSSGRKPEEEGVEDNGLEENSGDGQEDVETSLENLQDIDIMDISVLDEAEIDNGSVADCVEDDDADNLQESLSDSRELVEGEMKELPEQLQEHAIEDKETINNLDTSSSDFTILQEIEEPSLEPENEKILDILGETCKSEPVKEESSELEQPFAQDTSSVGPDRKLAEEEDLFDSAHPEEGDLDLASESTAHAQSSKADSLLAVVKREPAEQPGDGERTDCEPVGLEPAVEQSSAASELAEASSEELAEAPTEAPSPEARDSKEDGRKFDFDACNEVPPAPKESSTSEGADQKMSSPEDDSDTKRLSKEEKGRSSCGRNFWVSGLSSTTRATDLKNLFSKYGKVVGAKVVTNARSPGARCYGFVTMSTAEEATKCINHLHKTELHGKMISVEKAKNEPVGKKTSDKRDSDGKKEKSSNSDRSTNLKRDDKCDRKDDAKKGDDGSGEKSKDQDDQKPGPSERSRATKSGSRGTERTVVMDKSKGVPVISVKTSGSKERASKSQDRKSASREKRSVVSFDKVKEPRKSRDSESHSRVRERSDCRTRMQAQGSARSVSGWEIGRREGGLQRQGWNESPRAGQVDAKE

SEQ ID NO: 743751 - protein, 575 aa, Homo sapiens
MILSSGRKPEEEGVEDNGLEENSGDGQEDVETSLENLQDIDIMDISVLDEAEIDNGSVADCVEDDDADNLQESLSDSRELVEGEMKELPEQLQEHAIEDKETINNLDTSSSDFTILQEIEEPSLEPENEKILDILGETCKSEPVKEESSELEQPFAQDTSSVGPDRKLAEEEDLFDSAHPEEGDLDLASESTAHAQSSKADSLLAVVKREPAEQPGDGERTDCEPVGLEPAVEQSSAASELAEASSEELAEAPTEAPSPEARDSKEDGRKFDFDACNEVPPAPKESSTSEGADQKMSSPEDDSDTKRLSKEEKGRSSCGRNFWVSGLSSTTRATDLKNLFSKYGKVVGAKVVTNARSPGARCYGFVTMSTAEEATKCINHLHKTELHGKMISVEKAKNEPVGKKTSDKRDSDGKKEKSSNSDRSTNLKRDDKCDRKDDAKKGDDGSGEKSKDQDDQKPGPSERSRATKSGSRGTERTVVMDKSKGVPVISVKTSGSKERASKSQDRKSASREKRSVVSFDKVKELRRQQELRYEQERRPAVRRPYDLDRRDDAYWPEAKRAALDERYHSDFNRQD

SEQ ID NO: 743752 - protein, 560 aa, Homo sapiens
MILSSGRKPEEEGVEDNGLEENSGDGQEDVETSLENLQDIDIMDISVLDEAEIDNGSVADCVEDDDADNLQESLSDSRELVEGEMKELPEQLQEHAIEDKETINNLDTSSSDFTILQEIEEPSLEPENEKILDILGETCKSEPVKEESSELEQPFAQDTSSVGPDRKLAEEEDLFDSAHPEEGDLDLASESTAHAQSSKADSLLAVVKREPAEQPGDGERTDCEPVGLEPAVEQSSAASELAEASSEELAEAPTEAPSPEARDSKEDGRKFDFDACNEVPPAPKESSTSEGADQKMSSPEDDSDTKRLSKEEKGRSSCGRNFWVSGLSSTTRATDLKNLFSKYGKVVGAKVVTNARSPGARCYGFVTMSTAEEATKCINHLHKTELHGKMISVEKAKNEPVGKKTSDKRDSDGKKEKSSNSDRSTNLKRDDKCDRKDDAKKGDDGSGEKSKDQDDQKPGPSERSRATKSGSRGTERTVVMDKSKGVPVISVKTSGSKERASKSQDRKSASREKRSVVSFDKVKEPRKSRDSESHSRVRERSDCRTYATQAQWSAMNETRR

SEQ ID NO: 743753 - protein, 291 aa, Homo sapiens
MSSPEDDSDTKRLSKEEKGRSSCGRNFWVSGLSSTTRATDLKNLFSKYGKVVGAKVVTNARSPGARCYGFVTMSTAEEATKCINHLHKTELHGKMISVEKAKNEPVGKKTSDKRDSDGKKEKSSNSDRSTNLKRDDKCDRKDDAKKGDDGSGEKSKDQDDQKPGPSERSRATKSGSRGTERTVVMDKSKGVPVISVKTSGSKERASKSQDRKSASREKRSVVSFDKVKEPRKSRDSESHSRVRERSDRRTRMQAQGSARSVSGWEIGRREGGLQRQGWNESPRAGQVDAKE

SEQ ID NO: 743754 - protein, 446 aa, Homo sapiens
MILSSGRKPEEEGVEDNGLEENSGDGQEDVETSLENLQDIDIMDISVLDEAEIDNGSVADCVEDDDADNLQESLSDSRELVEGEMKELPEQLQEHAIEDKETINNLDTSSSDFTILQEIEEPSLEPENEKILDILGETCKSEPVKEESSELEQPFAQDTSSVGPDRKLAEEEDLFDSAHPEEGDLDLASESTAHAQSSKADSLLAVVKREPAEQPGDGERTDCEPVGLEPAVEQSSAASELAEASSEELAEAPTEAPSPEARDSKEDGRKFDFDACNEVPPAPKESSTSEGADQKMSSPEDDSDTKRLSKEEKGRSSCGRNFWVSGLSSTTRATDLKNLFSKYGKVVGAKVVTNARSPGARCYGFVTMSTAEEATKCINHLHKTELHGKMISVEKAKNEDTDSEEEIREAFRVFDKDGNGYISAAELRHVMTKLGEKLQMKKLMND

SEQ ID NO: 743755 - protein, 318 aa, Homo sapiens
MQPQHEFYGFEFVSSMLLPCGVTLSFVSSSPEDDSDTKRLSKEEKGRSSCGRNFWVSGLSSTTRATDLKNLFSKYGKVVGAKVVTNARSPGARCYGFVTMSTAEEATKCINHLHKTELHGKMISVEKAKNEPVGKKTSDKRDSDGKKEKSSNSDRSTNLKRDDKCDRKDDAKKGDDGSGEKSKDQDDQKPGPSERSRATKSGSRGTERTVVMDKSKGVPVISVKTSGSKERASKSQDRKSASREKRSVVSFDKVKEPRKSRDSESHSRVRERSDRRTRMQAQGSARSVSGWEIGRREGGLQRQGWNESPRAGQVDAKE

SEQ ID NO: 743756 - protein, 321 aa, Homo sapiens
GIQRRDSAIHLHKVPPAPKESSTSEGADQKMSSPEDDSDTKRLSKEEKGRSSCGRNFWVSGLSSTTRATDLKNLFSKYGKVVGAKVVTNARSPGARCYGFVTMSTAEEATKCINHLHKTELHGKMISVEKAKNEPVGKKTSDKRDSDGKKEKSSNSDRSTNLKRDDKCDRKDDAKKGDDGSGEKSKDQDDQKPGPSERSRATKSGSRGTERTVVMDKSKGVPVISVKTSGSKERASKSQDRKSASREKRSVVSFDKVKEPRKSRDSESHSRVRERSDCRTRMQAQGSARSVSGWEIGRREGGLQRQGWNESPRAGQVDAKE

SEQ ID NO: 743757 - protein, 111 aa, Homo sapiens
MILSSGRKPEEEGVEDNGLEENSGDGQEDVETSLENLQDIDIMDISVLDEAEIDNGSVADCVEDDDADNLQESLSDSRELVEGEMKELPEQLQEHAIVKSDDEVSKLFIVS

SEQ ID NO: 743758 - protein, 34 aa, Homo sapiens
QPHQVSQAPRHRLSLFPPNLVPISFFSDHYPDPS

SEQ ID NO: 743759 - protein, 384 aa, Homo sapiens
MEGLGRSCLWLRRELSPPRPRLLLLDCRSRELYESARIGGALSVALPALLLRRLRRGSLSVRALLPGPPLQPPPPAPVLLYDQGGGRRRRGEAEAEAEEWEAESVLGTLLQKLREEGYLAYYLQGGFSRFQAECPHLCETSLAGRAGSSMAPVPGPVPVVGLGSLCLGSDCSDAESEADRDSMSCGLDSEGATPPPVGLRASFPVQILPNLYLGSARDSANLESLAKLGIRYILNVTPNLPNFFEKNGDFHYKQIPISDHWSQNLSRFFPEAIEFIDEALSQNCGVLVHCLAGVSRSVTVTVAYLMQKLHLSLNDAYDLVKRKKSNISPNFNFMGQLLDFERSLRLEERHSQEQGSGGQASAASNPPSFFTTPTSDGAFELAPT

SEQ ID NO: 743760 - protein, 384 aa, Homo sapiens; identical to SEQ ID NO: 743759

SEQ ID NO: 743761 - protein, 355 aa, Homo sapiens
TSLASSLRNKEGTLGSKVGYLDVEARGPGEGRGGGGESPPLQPPPPAPVLLYDQGGGRRRRGEAEAEAEEWEAESVLGTLLQKLREEGYLAYYLQGGFSRFQAECPHLCETSLAGRAGSSMAPVPGPVPVVGLGSLCLGSDCSDAESEADRDSMSCGLDSEGATPPPVGLRASFPVQILPNLYLGSARDSANLESLAKLGIRYILNVTPNLPNFFEKNGDFHYKQIPISDHWSQNLSRFFPEAIEFIDEALSQNCGVLVHCLAGVSRSVTVTVAYLMQKLHLSLNDAYDLVKRKKSNISPNFNFMGQLLDFERSLRLEERHSQEQGSGGQASAASNPPSFFTTPTSDGAFELAPT

SEQ ID NO: 743762 - protein, 105 aa, Homo sapiens
MGSQSESCGGGGEEEGLTFAAAGPTQPLLLWGVGKGPSCRHTQSFISVHTPVGGGCACVCLCVRTCRRSHTHASPLMHPAQGWQSLQRGAVSPWSLERIYACLFL

SEQ ID NO: 743763 - protein, 472 aa, Homo sapiens
VSKVEAGSGCQEAAGARAARAARGSASTCEPAPPPRPLLAARPGDSLPRDGASRSAVAVAVARTSTRGRPPPDLAPAPVVQRVGSRSPMEGLGRSCLWLRRELSPPRPRLLLLDCRSRELYESARIGGALSVALPALLLRRLRRGSLSVRALLPGPPLQPPPPAPVLLYDQGGGRRRRGEAEAEAEEWEAESVLGTLLQKLREEGYLAYYLQGGFSRFQAECPHLCETSLAGRAGSSMAPVPGPVPVVGLGSLCLGSDCSDAESEADRDSMSCGLDSEGATPPPVGLRASFPVQILPNLYLGSARDSANLESLAKLGIRYILNVTPNLPNFFEKNGDFHYKQIPISDHWSQNLSRFFPEAIEFIDEALSQNCGVLVHCLAGVSRSVTVTVAYLMQKLHLSLNDAYDLVKRKKSNISPNFNFMGQLLDFERSLRLEERHSQEQGSGGQASAASNPPSFFTTPTSDGAFELAPT

SEQ ID NO: 743764 - protein, 472 aa, Homo sapiens; identical to SEQ ID NO: 743763

SEQ ID NO: 743765 - protein, 228 aa, Homo sapiens
TTSTSQPHLIFILADDQGFRDVGYHGSEIKTPTLDKLAAEGVKLENYYVQPICTPSRSQFITGKYQIHTGLQHSIIRPTQPNCLPLDNATLPQKLKEVGYSTHMVGKWHLGFYRKECMPTRRGFDTFFGSLLGSGDYYTHYKCDSPGMCGYDLYENDNAAWDYDNGIYSTQMYTQRVQQILASHNPTKPIFLYIAYQAVHSPLQAPGRYFEHYRSIININRRRYAAML

SEQ ID NO: 743766 - protein, 181 aa, Homo sapiens
VAERYVFPFFSLEKTPMYQIHTGLQHSIIRPTQPNCLPLDNATLPQKLKEVGYSTHMVGKWHLGFYRKECMPTRRGFDTFFGSLLGSGDYYTHYKCDSPGMCGYDLYENDNAAWDYDNGIYSTQMYTQRVQQILASHNPTKPIFLYIAYQAVHSPLQAPGRYFEHYRSIININRRRYAAML

SEQ ID NO: 743767 - protein, 146 aa, Homo sapiens
EEEVPQESWDEGYSTLSIPPEMLASYKSYSSTFHSLEEQQVCMAVDIGRHRWNQVKKEDQEATGPRLSRELLEVVEPEVLQDSLDRCYSTPSSCLEQPDSCQPYGSSFYALEEKHVGFSLDVGEIEKKGKGKIRRGRRSKKKRRRG

SEQ ID NO: 743768 - protein, 155 aa, Homo sapiens
YGGGSHLLLGIMAALRPLVKPKIVKKRTKKFIRHQSDRYVKIKRNWRKPRGIDNRVRRRFKGQILMPNIGYGSNKKTKHMLPSGFRKFLVHNVKELEVLLMCNKSYCAEIAHNVSSKNRKAIVERAAQLAIRVTNPMPGCAVKKMSRQLMCTFSV

SEQ ID NO: 743769 - protein, 369 aa, Homo sapiens
YGGGSHLLLGIMAALRPLVKPKIVKKRTKKFIRHQSDRYVKIKRNWRKPRGIDNRVRRRFKGQILMPNIGYGSNKKTKHMLPSGFRKFLVHNVKELEVLLMCKSYCAEIAHNVSSKNRKAIVERAAQLAIRVTNPNASVRSEENERQLMCNKSYCAEIAHNVSSKNRKAIVERAAQLAIRVTNPMPGCAVKKMSRQLMCTFSVLNKCKNCHLASSFLAFLSLQLLGQTEYCHQRSCFRLSPFGISHIGGDQYQDTQSLEQGNVAYKCTRQPLVISSSTLGYEPYKTWAPHNKGRSRAHLERTLAASKVNNERHSLSPAPRKVKVTTACQCAPPPQSANTPHGTHHTDTTHAHHTQPTRPEQPGHTKRRT

SEQ ID NO: 743770 - protein, 157 aa, Homo sapiens
YGGGSHLLLGIMAALRPLVKPKIVKKRTKKFIRHQSDRYVKIKRNWRKPRGIDNRVRRRFKGQILMPNIGYGSNKKTKHMLPSGFRKFLVHNVKELEVLLMCNKSYCAEIAHNVSSKNRKAIVERAAQLAIRVTNPMPGCAVKKMSRPAHVHVFCFK

SEQ ID NO: 743771 - protein, 376 aa, Homo sapiens
ARRRRGRGRRGCRSSSWGLPRTLLGRRRVPSAGGRGVRGPRSAAVRGDMSAAGLLAPAPAQAGAPPAPEYYPEEDEELESAEDDERSCRGRESDEDTEDASETDLAKHDEEDYVEMKEQMYQDKLASLKRQLQQLQEGTLQEYQKRMKKLDQQYKERIRNAELFLQLETEQVERNYIKEKKAAVKEFEDKKVELKENLIAELEEKKKMIENEKLTMELTGDSMEVKPIMTRKLRRRPNDPVPIPDKRRKPAPAQLNYLLTDEQIMEDLRTLNKLKSPKRPASPSSPEHLPATPAESPAQRFEARIEDGKLYYDKRWYHKSQAIYLESKDNQKLSCVISSVGANEIWVRKTSDSTKMRIYLGQLQRGLFVIRRRSAA

SEQ ID NO: 743772 - protein, 376 aa, Homo sapiens; identical to SEQ ID NO: 743771

SEQ ID NO: 743773 - protein, 123 aa, Homo sapiens
MITRLLDYSHIPLLTESCGRKQSLLFLASPSSPEHLPATPAESPAQRFEARIEDGKLYYDKRWYHKSQAIYLESKDNQKLSCVISSVGANEIWVRKTSDSTKMRIYLGQLQRGLFVIRRRSAA

SEQ ID NO: 743774 - protein, 106 aa, Homo sapiens
MVELKSPKRPASPSSPEHLPATPAESPAQRFEARIEDGKLYYDKRWYHKSQAIYLESKDNQKLSCVISSVGANEIWVRKTSDSTKMRIYLGQLQRGLFVIRRRSAA

SEQ ID NO: 743775 - protein, 376 aa, Homo sapiens; identical to SEQ ID NO: 743771

SEQ ID NO: 743776 - protein, 103 aa, Homo sapiens
LLGSGAISAIIKVISLSFNVAGAFLKSKCWHTGLRLGRPMIVDGASLMSPDETAFPTSFPHSHDWRNDSLGDECWGFLYSCCHLEMFKKFGVRATVSVSMSNQ

SEQ ID NO: 743777 - protein, 74 aa, Homo sapiens
GRYYYYYYYFAAASTCSNIHFTSAWGFCVFPSPHALPTPFSLNHVLLNNFQMDFCSHTKARVFSFMRILVFIDV

SEQ ID NO: 743778 - protein, 143 aa, Homo sapiens
ARRRRGRGRRGCRSSSWGLPRTLLGRRRVPSAGGRGVRGPRSAAVRGDMSAAGLLAPAPAQAGAPPAPEYYPEEDEELESAEDDERSCRGRESDEDTEDASETDLAKHDEEDYVEMKEQYITGISEENEKTRSAVQREDTECR

SEQ ID NO: 743779 - protein, 914 aa, Homo sapiens
MASESSPLLAYRLLGEEGVALPANGAGGPGGASARKLSTFLGVVVPTVLSMFSIVVFLRIGFVVGHAGLLQALAMLLVAYFILALTVLSVCAIATNGAVQGGGAYFMISRTLGPEVGGSIGLMFYLANVCGCAVSLLGLVESVLDVFGADATGPSGLRVLPQGYGWNLLYGSLLLGLVGGVCTLGAGLYARASFLTFLLVSGSLASVLISFVAVGPRDIRLTPRPGPNGSSLPPRFGHFTGFNSSTLKDNLGAGYAEDYTTGAVMNFASVFAVLFNGCTGIMAGANMSGELKDPSRAIPLGTIVAVAYTFFVYVLLFFLSSFTCDRTLLQEDYGFFRAISLWPPLVLIGIYATALSASMSSLIGASRILHALARDDLFGVILAPAKVVSRGGNPWAAVLYSWGLVQLVLLAGKLNTLAAVVTVFYLVAYAAVDLSCLSLEWASAPNFRPTFSLFSWHTCLLGVASCLLMMFLISPGAAGGSLLLMGLLAALLTARGGPSSWGYVSQALLFHQVRKYLLRLDVRKDHVKFWRPQLLLLVGNPRGALPLLRLANQLKKGGLYVLGHVTLGDLDSLPSDPVQPQYGAWLSLVDRAQVKAFVDLTLSPSVRQGAQHLLRISGLGGMKPNTLVLGFYDDAPPQDHFLTDPAFSEPADSTREGSSPALSTLFPPPRAPGSPRALNPQDYVATVADALKMNKNVVLARASGALPPERLSRGSGGTSQLHHVDVWPLNLLRPRGGPGYVDVCGLFLLQMATILGMVPAWHSARLRIFLCLGPREAPGAAEGRLRALLSQLRIRAEVQEVVWGEGAGAGEPEAEEEGDFVNSGRGDAEAEALARSANALVRAQQGRGTGGGPGGPEGGDAEGPITALTFLYLPRPPADPARYPRYLALLETLTRDLGPTLLVHGVTPVTCTDL

SEQ ID NO: 743780 - protein, 538 aa, Homo sapiens
MASESSPLLAYRLLGEEGVALPANGAGGPGGASARKLSTFLGVVVPTVLSMFSIVVFLRIDATGPSGLRVLPQGYGWNLLYGSLLLGLVGGVCTLGAGLYARASFLTFLLVSGSLASVLISFVAVGPRDIRLTPRPGPNGSSLPPRFGHFTGFNSSTLKDNLGAGYAEDYTTGAVMNFASVFAVLFNGCTGIMAGANMSGELKDPSRAIPLGTIVAVAYTFFVYVLLFFLSSFTCDRTLLQEDYGFFRAISLWPPLVLIGIYATALSASMSSLIGASRILHALARDDLFGVILAPAKVVSRGGNPWAAVLYSWGLVQLVLLAGKLNTLAAVVTVFYLVAYAAVDLSCLSLEWASAPNFRPTFSLFSWHTCLLGVASCLLMMFLISPGAAGGSLLLMGLLAALLTARGGPSSWGYVSQALLFHQVRKYLLRLDVRKDHVKFWRPQLLLLVGNPRGALPLLRLANQLKKGGLYVLGHVTLGDLDSLPSDPVQPQYGAWLSLVDRAQVKAFVDLTLSPSVRQGAQHLLRISGLESNSHPLP

SEQ ID NO: 743781 - protein, 1206 aa, Homo sapiens
MGVECRTRLVHLGHQGETQAGGLGSRNPACWGGGWLPAIDNLQPAAAMDPVLLQALSLGVRVGSGFLPSLHFHKYLASCAYTIRYDSRVRWLTPVIPALWEAEAGGIAGAQEFQTSLGNRARASPQIQKLARCDGKCLYVLATWEAEVGGLLESKKVEAAVSYDYSTALQPGGWSETLSLKKKEGMTTEGLNPRLPNEYQAYPFSTFDDLSLILKIGAGDFLTPGRMIIRVLLFLLPRTLLQEDYGFFRAISLWPPLVLIGIYATALSASMSSLIGASRILHALARDDLFGGFSASLLAWSTPSLVCLSVPAEALADVSAVDSVFLGVILAPAKVVSRGGNPWAAVLYSWGLVQVSLLLQGALSLTPPAGRMGVQLDAGWETNVKTNAYALGVALALCRVHWHFVGFTSTLQVAPVLCRVHWHPGRFTGTFWGTRALCRVHCHFLGYTSIFQYSLALCGVPQHFEGFTGTLWDVPTLCGGSLILWRFGGTLWECIGPFWGSLTLGVHLHFTGLTGTFQGSLTFGVHWHSLGFIDTLGVRWHFAWFTGTFQGSLTLWGYTGTFWGSLTLGIHWHFWGLIAFLGLIDTLGVHWHFWGLIAFWGFIDTLGVHWHFAGFTGTFWGSLTLWGTLAFFGVHWHFGGALALWNNGTPLGPCPAGAPGWEAEHTGCCGHCLLPGGLCCRGPVLPEPGVGLGPQLPVRDSDLCPQREEGRTRAQAWGWGLQPRVRPALSFCPSSPPARSPTFSLFSWHTCLLGVASCLLMMFLISPGAAGGSLLLMGLLAALLTARGGPSSWGYVSQALLFHQVRKYLLRLDVRKDHVKFWRPQLLLLVGNPRGALPLLRLANQLKKGGLYVLGHVTLGDLDSLPSDPVQPQYGAWLSLVDRAQVKAFVDLTLSPSVRQGAQHLLRISGLGGMKPNTLVLGFYDDAPPQDHFLTDPAFSEPADSTREGSSPALSTLFPPPRAPGSPRALNPQDYVATVADALKMNKNVVLARASGALPPERLSRGSGGTSQLHHVDVWPLNLLRPRGGPGYVDVCGLFLLQMATILGMVPAWHSARLRIFLCLGPREAPGAAEGRLRALLSQLRIRAEVQEVVWGEGAGAGEPEAEEEGDFVNSGRGDAEAEALARSANALVRAQQGRGTGGGPGGPEGGDAEGPITALTFLYLPRPPADPARYPRYLALLETLTRDLGPTLLVHGVTPVTCTDL

SEQ ID NO: 743782 - protein, 527 aa, Homo sapiens
MLGVHWHFGTTARLLALAQLVLLAGKLNTLAAVVTVFYLVAYAAVDLSCLSLEWASAPNFRPTFSLFSWHTCLLGVASCLLMMFLISPGAAGGSLLLMGLLAALLTARGGPSSWGYVSQALLFHQVRKYLLRLDVRKDHVKFWRPQLLLLVGNPRGALPLLRLANQLKKGGLYVLGHVTLGDLDSLPSDPVQPQYGAWLSLVDRAQVKAFVDLTLSPSVRQGAQHLLRISGLGGMKPNTLVLGFYDDAPPQDHFLTDPAFSEPADSTREGSSPALSTLFPPPRAPGSPRALNPQDYVATVADALKMNKNVVLARASGALPPERLSRGSGGTSQLHHVDVWPLNLLRPRGGPGYVDVCGLFLLQMATILGMVPAWHSARLRIFLCLGPREAPGAAEGRLRALLSQLRIRAEVQEVVWGEGAGAGEPEAEEEGDFVNSGRGDAEAEALARSANALVRAQQGRGTGGGPGGPEGGDAEGPITALTFLYLPRPPADPARYPRYLALLETLTRDLGPTLLVHGVTPVTCTDL

SEQ ID NO: 743783 - protein, 914 aa, Homo sapiens; identical to SEQ ID NO: 743779

SEQ ID NO: 743784 - protein, 254 aa, Homo sapiens
MASESSPLLAYRLLGEEGVALPANGAGGPGGASARKLSTFLGVVVPTVLSMFSIVVFLRIGFVVGHAGLLQALAMLLVAYFILALTVLSVCAIATNGAVQGGGAYFMISRTLGPEVGGSIGLMFYLANVCGCAVSLLGLVESVLDVFGADATGPSGLRVLPQGYGWNLLYGSLLLGLVGGVCTLGAGLYARASFLTFLLVSGSLASVLISFVAVGPRDIRLTPRPGPNGSSLPPRFEATVARGPALGTWSPGEV

SEQ ID NO: 743785 - protein, 650 aa, Homo sapiens
MNFASVFAVLFNGCTGIMAGANMSGELKDPSRAIPLGTIVAVAYTFFVYVLLFFLSSFTCDRTLLQEDYGFFRAISLWPPLVLIGIYATALSASMSSLIGASRILHALARDDLFGVILAPAKVVSRGGNPWAAVLYSWGLVQLVLLAGKLNTLAAVVTVFYLVAYAAVDLSCLSLEWASAPNFRPTFSLFSWHTCLLGVASCLLMMFLISPGAAGGSLLLMGLLAALLTARGGPSSWGYVSQALLFHQVRKYLLRLDVRKDHVKFWRPQLLLLVGNPRGALPLLRLANQLKKGGLYVLGHVTLGDLDSLPSDPVQPQYGAWLSLVDRAQVKAFVDLTLSPSVRQGAQHLLRISGLGGMKPNTLVLGFYDDAPPQDHFLTDPAFSEPADSTREGSSPALSTLFPPPRAPGSPRALNPQDYVATVADALKMNKNVVLARASGALPPERLSRGSGGTSQLHHVDVWPLNLLRPRGGPGYVDVCGLFLLQMATILGMVPAWHSARLRIFLCLGPREAPGAAEGRLRALLSQLRIRAEVQEVVWGEGAGAGEPEAEEEGDFVNSGRGDAEAEALARSANALVRAQQGRGTGGGPGGPEGGDAEGPITALTFLYLPRPPADPARYPRYLALLETLTRDLGPTLLVHGVTPVTCTDL

SEQ ID NO: 743786 - protein, 876 aa, Homo sapiens
MSPGVRDQPGQHGETPSLLKIQKLARRGGGHLYSQLPERLRQGNCLNLGGRSCSEAEIAPLHSRLGDTARLHLKINKLNKIKKLDGHGGAHLESQLLGRLRQEDRSSPGGRGCSELRWCHCTPAWMTEPDPVSEKINKEIKERGLGSGGRNIGALGGRGNVSGCPRASAGTGWGLSEGSAGEARGPWECVERVAKRPGSLRRMLMHSPPWEDPPAGYAEDYTTGAVMNFASVFAVLFNGCTGIMAGANMSGELKDPSRAIPLGTIVAVAYTFFVYVLLFFLSSFTCDRTLLQEDYGFFRAISLWPPLVLIGIYATALSASMSSLIGASRILHALARDDLFGVILAPAKVVSRGGNPWAAVLYSWGLVQLVLLAGKLNTLAAVVTVFYLVAYAAVDLSCLSLEWASAPNFRPTFSLFSWHTCLLGVASCLLMMFLISPGAAGGSLLLMGLLAALLTARGGPSSWGYVSQALLFHQVRKYLLRLDVRKDHVKFWRPQLLLLVGNPRGALPLLRLANQLKKGGLYVLGHVTLGDLDSLPSDPVQPQYGAWLSLVDRAQVKAFVDLTLSPSVRQGAQHLLRISGLGGMKPNTLVLGFYDDAPPQDHFLTDPAFSEPADSTREGSSPALSTLFPPPRAPGSPRALNPQDYVATVADALKMNKNVVLARASGALPPERLSRGSGGTSQLHHVDVWPLNLLRPRGGPGYVDVCGLFLLQMATILGMVPAWHSARLRIFLCLGPREAPGAAEGRLRALLSQLRIRAEVQEVVWGEGAGAGEPEAEEEGDFVNSGRGDAEAEALARSANALVRAQQGRGTGGGPGGPEGGDAEGPITALTFLYLPRPPADPARYPRYLALLETLTRDLGPTLLVHGVTPVTCTDL

SEQ ID NO: 743787 - protein, 445 aa, Homo sapiens
MFLISPGAAGGSLLLMGLLAALLTARGGPSSWGYVSQALLFHQVRKYLLRLDVRKDHVKFWRPQLLLLVGNPRGALPLLRLANQLKKGGLYVLGHVTLGDLDSLPSDPVQPQYGAWLSLVDRAQVKAFVDLTLSPSVRQGAQHLLRISGLGGMKPNTLVLGFYDDAPPQDHFLTDPAFSEPADSTREGSSPALSTLFPPPRAPGSPRALNPQDYVATVADALKMNKNVVLARASGALPPERLSRGSGGTSQLHHVDVWPLNLLRPRGGPGYVDVCGLFLLQMATILGMVPAWHSARLRIFLCLGPREAPGAAEGRLRALLSQLRIRAEVQEVVWGEGAGAGEPEAEEEGDFVNSGRGDAEAEALARSANALVRAQQGRGTGGGPGGPEGGDAEGPITALTFLYLPRPPADPARYPRYLALLETLTRDLGPTLLVHGVTPVTCTDL

SEQ ID NO: 743788 - protein, 760 aa, Homo sapiens
MASESSPLLAYRLLGEEGVALPANGAGGPGGASARKLSTFLGVVVPTVLSMFSIVVFLRIGFVVGHAGLLQALAMLLVAYFILALTVLSVCAIATNGAVQGGGAYFMISRTLGPEVGGSIGLMFYLANVCGCAVSLLGLVESVLDVFGADATGPSGLRVLPQGYGWNLLYGSLLLGLVGGVCTLGAGLYARASFLTFLLVSGSLASVLISFVAVGPRDIRLTPRPGPNGSSLPPRFGHFTGFNSSTLKDNLGAGYAEDYTTGAVMNFASVFAVLFNGCTGIMAGANMSGELKDPSRAIPLGTIVAVAYTFFVYVLLFFLSSFTCDRTLLQEDYGFFRAISLWPPLVLIGIYATALSASMSSLIGASRILHALARDDLFGVILAPAKVVSRGGNPWAAVLYSWGLVQLVLLAGKLNTLAAVVTVFYLVAYAAVDLSCLSLEWASAPNFRPTFSLFSWHTCLLGVASCLLMMFLISPGAAGGSLLLMGLLAALLTARGGPSSWGYVSQALLFHQVRKYLLRLDVRKDHVKFWRPQLLLLVGNPRGALPLLRLANQLKKGGLYVLGHVTLGDLDSLPSDPVQPQYGAWLSLVDRAQVKAFVDLTLSPSVRQGAQHLLRISGLGGMKPNTLVLGFYDDAPPQDHFLTDPAFSEPADSTREGSSPALSTLFPPPRAPGSPRALNPQDYVATVADALKMNKNVVLARASGALPPERLSRGSGGTSQLHHVDVWPLNLLRPRGGPGYVDVCGLFLLQMATILGMVPA

SEQ ID NO: 743789 - protein, 109 aa, Homo sapiens
GSTNTPASPYLRATHSDLSREISIKAQREPIHFILWTLGPGRNILTDSQHPLRNSNSLALTHQRPLPQQKEDLAVFSLLEEGQENSCIAYFPKAGKECNPSLWVWASPS

SEQ ID NO: 743790 - protein, 69 aa, Homo sapiens
WKVQIQCVLNFRQVFMKMYLELVGPPRCLAPDHTGHELSSRGGGSAVTRLHALIEQKAMVCAGRGGSHL

SEQ ID NO: 743791 - protein, 114 aa, Homo sapiens
MACLTSFCKYSFLQYVSTDLIIQNTLLMFSTKPHLLLDGKDKNNYEIFRILNAPQINRYSKYGSELNVFNRGKMRNLLSGNAQGKGCYGKGKHPLWASFLFTQISGYYRSDHVP

SEQ ID NO: 743792 - protein, 98 aa, Homo sapiens
LFLLFLVAKRPVSPYSGYNGQLLTSVYQPTEMALMHKVPSEGAYDIILPRATANSQVMGSANSTLRAEDMYSAQSHQAATPPKDGKNSQVFRNPYVWD

SEQ ID NO: 743793 - protein, 453 aa, Homo sapiens
MGTQPEPGLGARMAIHKALVMCLGLPLFLFPGAWAQGHVPPGCSQGLNPLYYNLCDRSGAWGIVLEAVAGAGIVTTFVLTIILVASLPFVQDTKKRSLLGTQVFFLLGTLGLFCLVFACVVKPDFSTCASRRFLFGVLFAICFSCLAAHVFALNFLARKNHGPRGWVIFTVALLLTLVEVIINTEWLIITLVRGSGEGGPQGNSSAGWAVASPCAIANMDFVMALIYVMLLLLGAFLGAWPALCGRYKRWRKHGVFVLLTTATSVAIWVVWIVMYTYGNKQHNSPTWDDPTLAIALAANAWAFVLFYVIPEVSQVTKSSPEQSYQGDMYPTRGVGYETILKEQKGQSMFVENKAFSMDEPVAAKRPVSPYSGYNGQLLTSVYQPTEMALMHKVPSEGAYDIILPRATANSQVMGSANSTLRAEDMYSAQSHQAATPPKDGKNSQVFRNPYVWD

SEQ ID NO: 743794 - protein, 150 aa, Homo sapiens
MRGRGSQQQQPTRRQGQKLPSPSPAGKYESAQPGGTQPEPGLGARMAIHKALVMCLGLPLFLFPGAWAQGHVPPGCSQGLNPLYYNLCDRSGAWGIVLEAVAGAGIVTTFVLTIILVASLPFVQDTKKRSLLGTQLRGRCHHTAGTMGSC

SEQ ID NO: 743795 - protein, 101 aa, Homo sapiens
  misc_feature (37)..(37): Xaa can be any naturally occurring amino acid
LKSYKRKPGCDILSESFPIAVDQLTPTFPCVPDPGFXVPTHSSVFVESRSQPQPPARITSAVTLQPNSVLGVVAGQRLCFSGDSCNLKRLPRRSGLDLAPL

SEQ ID NO: 743796 - protein, 441 aa, Homo sapiens
MAIHKALVMCLGLPLFLFPGAWAQGHVPPGCSQGLNPLYYNLCDRSGAWGIVLEAVAGAGIVTTFVLTIILVASLPFVQDTKKRSLLGTQVFFLLGTLGLFCLVFACVVKPDFSTCASRRFLFGVLFAICFSCLAAHVFALNFLARKNHGPRGWVIFTVALLLTLVEVIINTEWLIITLVRGSGEGGPQGNSSAGWAVASPCAIANMDFVMALIYVMLLLLGAFLGAWPALCGRYKRWRKHGVFVLLTTATSVAIWVVWIVMYTYGNKQHNSPTWDDPTLAIALAANAWAFVLFYVIPEVSQVTKSSPEQSYQGDMYPTRGVGYETILKEQKGQSMFVENKAFSMDEPVAAKRPVSPYSGYNGQLLTSVYQPTEMALMHKVPSEGAYDIILPRATANSQVMGSANSTLRAEDMYSAQSHQAATPPKDGKNSQVFRNPYVWD

SEQ ID NO: 743797 - protein, 264 aa, Homo sapiens
SENKFYLNKGLNTLHITLKLKEEKKTKNQFVTSHGIGQLLLLSCKLFLGAWPALCGRYKRWRKHGVFVLLTTATSVAIWVVWIVMYTYGNKQHNSPTWDDPTLAIALAANAWAFVLFYVIPEVSQVTKSSPEQSYQGDMYPTRGVGYETILKEQKGQSMFVENKAFSMDEPVAAKRPVSPYSGYNGQLLTSVYQPTEMALMHKVPSEGAYDIILPRATANSQVMGSANSTLRAEDMYSAQSHQAATPPKDGKNSQVFRNPYVWD

SEQ ID NO: 743798 - protein, 475 aa, Homo sapiens
  misc_feature (10)..(10): Xaa can be any naturally occurring amino acid
KAGWYGLRCXISPAGKYESAQPGGTQPEPGLGARMAIHKALVMCLGLPLFLFPGAWAQGHVPPGCSQGLNPLYYNLCDRSGAWGIVLEAVAGAGIVTTFVLTIILVASLPFVQDTKKRSLLGTQVFFLLGTLGLFCLVFACVVKPDFSTCASRRFLFGVLFAICFSCLAAHVFALNFLARKNHGPRGWVIFTVALLLTLVEVIINTEWLIITLVRGSGEGGPQGNSSAGWAVASPCAIANMDFVMALIYVMLLLLGAFLGAWPALCGRYKRWRKHGVFVLLTTATSVAIWVVWIVMYTYGNKQHNSPTWDDPTLAIALAANAWAFVLFYVIPEVSQVTKSSPEQSYQGDMYPTRGVGYETILKEQKGQSMFVENKAFSMDEPVAAKRPVSPYSGYNGQLLTSVYQPTEMALMHKVPSEGAYDIILPRATANSQVMGSANSTLRAEDMYSAQSHQAATPPKDGKNSQVFRNPYVWD

SEQ ID NO: 743799 - protein, 475 aa, Homo sapiens; identical to SEQ ID NO: 743798
  misc_feature (10)..(10): Xaa can be any naturally occurring amino acid

SEQ ID NO: 743800 - protein, 475 aa, Homo sapiens; identical to SEQ ID NO: 743798
  misc_feature (10)..(10): Xaa can be any naturally occurring amino acid

SEQ ID NO: 743801 - protein, 110 aa, Homo sapiens
PEPDVRCAVLTARPAPRPRAKRPVSPYSGYNGQLLTSVYQPTEMALMHKVPSEGAYDIILPRATANSQVMGSANSTLRAEDMYSAQSHQAATPPKDGKNSQVFRNPYVWD

SEQ ID NO: 743802 - protein, 102 aa, Homo sapiens
GLPGGGGAWRVPCPGPGPLCPRCGRASLSASVWVGVMGVPTHSSVFVESRSQPQPPARITSAVTLQPNSVLGVVAGQRLCFSGDSCNLKRLPRRSGLDLAPL

SEQ ID NO: 743803 - protein, 475 aa, Homo sapiens; identical to SEQ ID NO: 743798
  misc_feature (10)..(10): Xaa can be any naturally occurring amino acid

SEQ ID NO: 743804 - protein, 207 aa, Homo sapiens
MRGRGSQQQQPTRRQGQKLPSPSPAGKYESAQPGGTQPEPGLGARMAIHKALVMCLGLPLFLFPEQSYQGDMYPTRGVGYETILKEQKGQSMFVENKAFSMDEPVAAKRPVSPYSGYNGQLLTSVYQPTEMALMHKVPSEGAYDIILPRATANSQVMGSANSTLRAEDMYSAQSHQAATPPKDGKNSQVSELTQRGQANTNQVFLRL

SEQ ID NO: 743805 - protein, 486 aa, Homo sapiens
MRGRGSQQQQPTRRQGQKLPSPSPAGKYESAQPGGTQPEPGLGARMAIHKALVMCLGLPLFLFPGAWAQGHVPPGCSQGLNPLYYNLCDRSGAWGIVLEAVAGAGIVTTFVLTIILVASLPFVQDTKKRSLLGTQVFFLLGTLGLFCLVFACVVKPDFSTCASRRFLFGVLFAICFSCLAAHVFALNFLARKNHGPRGWVIFTVALLLTLVEVIINTEWLIITLVRGSGEGGPQGNSSAGWAVASPCAIANMDFVMALIYVMLLLLGAFLGAWPALCGRYKRWRKHGVFVLLTTATSVAIWVVWIVMYTYGNKQHNSPTWDDPTLAIALAANAWAFVLFYVIPEVSQVTKSSPEQSYQGDMYPTRGVGYETILKEQKGQSMFVENKAFSMDEPVAAKRPVSPYSGYNGQLLTSVYQPTEMALMHKVPSEGAYDIILPRATANSQVMGSANSTLRAEDMYSAQSHQAATPPKDGKNSQVFRNPYVWD

SEQ ID NO: 743806 - protein, 485 aa, Homo sapiens
  misc_feature (10)..(10): Xaa can be any naturally occurring amino acid
KAGWYGLRCXISPAGKYESAQPGGTQPEPGLGARMAIHKALVMCLGLPLFLFPGAWAQGHVPPGCSQGLNPLYYNLCDRSGAWGIVLEAVAGAGIVTTFVLTIILVASLPFVQDTKKRSLLGTQVFFLLGTLGLFCLVFACVVKPDFSTCASRRFLFGVLFAICFSCLAAHVFALNFLARKNHGPRGWVIFTVALLLTLVEVIINTEWLIITLVRGSGEGGPQGNSSAGWAVASPCAIANMDFVMALIYVMLLLLGAFLGAWPALCGRYKRWRKHGVFVLLTTATSVAIWVVWIVMYTYGNKQHNSPTWDDPTLAIALAANAWAFVLFYVIPEVSQVTKSSPEQSYQGDMYPTRGVGYETILKEQKGQSMFVENKAFSMDEPVAAKRPVSPYSGYNGQLLTSVYQPTEMALMHKVPSEGAYDIILPRATANSQVMGSANSTLRAEDMYSAQSHQAATPPKDGKNSQVSELTQRGQANTNQVFLRL

SEQ ID NO: 743807 - protein, 485 aa, Homo sapiens; identical to SEQ ID NO: 743806
  misc_feature (10)..(10): Xaa can be any naturally occurring amino acid

SEQ ID NO: 743808 - protein, 485 aa, Homo sapiens; identical to SEQ ID NO: 743806
  misc_feature (10)..(10): Xaa can be any naturally occurring amino acid

SEQ ID NO: 743809 - protein, 79 aa, Homo sapiens
AHLQAALEAGTEMACCTKFLSEGAYDIILPRATANSQVMGSANSTLRAEDMYSAQSHQAATPPKDGKNSQVFRNPYVWD

SEQ ID NO: 743810 - protein, 118 aa, Homo sapiens
PAGPASHPPHHQLSTWRPPVPCSLRVGRGSPGWRGPLPWPGVRGDPAALLGGSCCLLFRGLAPALPPDPDLAKRTPGQGVVWKAGLAGTWVFLHLLAQFLLVGGRVPGLGGVPGGGEG

SEQ ID NO: 743811 - protein, 118 aa, Homo sapiens; identical to SEQ ID NO: 743810

SEQ ID NO: 743812 - protein, 163 aa, Homo sapiens
MSLGLLKFQAVGEEDEEDEEGESLDSVKALTAKLQLQTRRPSYLEWTAQVQSQAWRRAQAKPGPGGPGDICGFDSMDSALEWLRRELREMQAQDRQLAGQLLRLRAQLHRLKMDQACHLHQELLDEAELELELEPGAGLALAPLLRHLGLTRMNISARRFTLC

SEQ ID NO: 743813 - protein, 235 aa, Homo sapiens
RKMYERRHSVLYFNARDGVLIVYTVAVGFTNSHTPWHALLTLNFCHLSLGNTASLSLISELQPCPVTHLKPAMSLGLLKFQAVGEEDEEDEEGESLDSVKALTAKLQLQTRRPSYLEWTAQVQSQAWRRAQAKPGPGGPGDICGFDSMDSALEWLRRELREMQAQDRQLAGQLLRLRAQLHRLKMDQACHLHQELLDEAELELELEPGAGLALAPLLRHLGLTRMNISARRFTLC

SEQ ID NO: 743814 - protein, 603 aa, Homo sapiens
PGGGSSWLYDRRCRCQRGPGQGRDAQHRGGRGAGEKGVGATHAPSLQSSSSRSSHAQSARSGGLPAQTPARQPAHEPGPKPGSLRGEEAQGGGVGGGGGCRAAAELLLGAFCMKMAAPTANKAASLGCNNKPAFPELDFRSGARVEELNKLIQEFTKHDQREYDDQRALEIHTAKDFIFSMLGMVQKLDQKLPVANEYLLLSGGVREGVVDLDLDELNVYARGTDYDMDFTLLVPALKLHDRNQPVTLDMRHSALCHSWLSLRLFDEGTISKWKDCCTIVDHINGATNYFFSPTKVADWFYDSISIVLSEIQKKPQRGMPKVEKVEKNGTIISIILGVGSSRMLYDIVPVVSFKGWPAVAQSWLMENHFWDGKITEEEVISGFYLVPACSYKGKKDNEWRLSFARSEVQLKKCISSSLMQAYQACKAIIIKLLSRPKAISPYHLRSMMLWACDRLPANYLAQEDYAAHFLLGLIDDLQHCLVNKMCPNYFIPQCNMLEHLSEETVMLHARKLSSVRSDPAEHLRTAIEHVKAANRLTLELQRRGSTTSIPSPQSDGGDPNQPDDRLAKKLQQLVTENPGKSISVFINPDDVTRPHFRIDDKFF

SEQ ID NO: 743815 - protein, 118 aa, Homo sapiens
VHLAAVHFGFHLGLHLALTIKSFFPAFPIPTIICTPVLPMPACASSMSVLPVPMAISMTAAAFWMAVSISMATTISVTWTIAMPIASLSVTVTAAAPVLSISLSFPVAAPSPFSAVIP

SEQ ID NO: 743816 - protein, 149 aa, Homo sapiens
KGGQEGREAAHPGTKRLPLERTPKGRSAVCSELRSGDLAPGPSAAHSPPRTSRSADRRGGCKDGAGSLRPAPPLTIKAAAGCWGPPRLPPAPLLLRFSLGKSSLSSACNGPQLLLRRWCLLHLRWFLQVQRVQMHLLQEELLLLLPRGL

SEQ ID NO: 743817 - protein, 74 aa, Homo sapiens
GRLLLLNSRPRRHPPAPLLLRFSLGKSSLSSACNGPQLLLRRWCLLHLRWFLQVQRVQMHLLQEELLLLLPRGL

SEQ ID NO: 743818 - protein, 141 aa, Homo sapiens
KGGQEGREAAHPGTKRLPLERTPKGRSAVCSELRSGDLAPGPSAAHSPPRTSRSADRRGGCKDGAGSLRPAPSPDYQSSGRLLGSTTPSTCPTASSLLSWKVQSLLGLQWTPTAPAPLVRNAGFRAWGCSIPRHHRECSWV

SEQ ID NO: 743819 - protein, 141 aa, Homo sapiens; identical to SEQ ID NO: 743818

SEQ ID NO: 743820 - protein, 118 aa, Homo sapiens; identical to SEQ ID NO: 743815

SEQ ID NO: 743821 - protein, 74 aa, Homo sapiens; identical to SEQ ID NO: 743817

SEQ ID NO: 743822 - protein, 149 aa, Homo sapiens; identical to SEQ ID NO: 743816

SEQ ID NO: 743823 - protein, 141 aa, Homo sapiens; identical to SEQ ID NO: 743818

SEQ ID NO: 743824 - protein, 137 aa, Homo sapiens
CFWRGLPWERVRDTEAHPLLNGSTPGDFRGLPWERVRDTEAHPLLNGSTPGDFRGLPWERVRDMEAHPLLNGSTPGDFHGLSWEQVRDMEAHALLNGSTPGDFHGLPWMIHSWGFSAALQMTCTHTKHPEVREALIQ

SEQ ID NO: 743825 - protein, 207 aa, Homo sapiens
GSGRGALPAVPGARLTRRPVHGRTMGSRHFEGIYDHVGHFGRFQRVLYFICAFQNISCGIHYLASVFMGVTPHHVCRPPGNVSQVVFHNHSNWSLEDTGALLSSGQKDYVTVQLQNGEIWELSRCSRNKRENTSSLGYEYTGSKKEFPCVDGYIYDQNTWKSTAVTQWNLVCDRKWLAMLIQPLFMFGVLLGSVTFGYFSDRVKSNI

SEQ ID NO: 743826 - protein, 601 aa, Homo sapiens
GSGRGALPAVPGARLTRRPVHGRTMGSRHFEGIYDHVGHFGRFQRVLYFICAFQNISCGIHYLASVFMGVTPHHVCRPPGNVSQVVFHNHSNWSLEDTGALLSSGQKDYVTVQLQNGEIWELSRCSRNKRENTSSLGYEYTGSKKEFPCVDGYIYDQNTWKSTAVTQWNLVCDRKWLAMLIQPLFMFGVLLGSVTFGYFSDRLGRRVVLWATSSSMFLFGIAAAFAVDYYTFMAARFFLAMVASGYLVVGFVYVMEFIGMKSRTWASVHLHSFFAVGTLLVALTGYLVRTWWLYQMILSTVTVPFILCCWVLPETPFWLLSEGRYEEAQKIVDIMAKWNRASSCKLSELLSLDLQGPVSNSPTEVQKHNLSYLFYNWSITKRTLTVWLIWFTGSLGFYSFSLNSVNLGGNEYLNLFLLGVVEIPAYTFVCIAMDKVGRRTVLAYSLFCSALACGVVMVIPQKHYILGVVTAMVGKFAIGAAFGLIYLYTAELYPTIVRSLAVGSGSMVCRLASILAPFSVDLSSIWIFIPQLFVGTMALLSGVLTLKLPETLGKRLATTWEEAAKLESENESKSSKLLLTTNNSGLEKTEAITPRDSGLGE

SEQ ID NO: 743827 - protein, 407 aa, Homo sapiens
MSAGPQAMLGRRVVLWATSSSMFLFGIAAAFAVDYYTFMAARFFLAMVASGYLVVGFVYVMEFIGMKSRTWASVHLHSFFAVGTLLVALTGYLVRTWWLYQMILSTVTVPFILCCWVLPETPFWLLSEGRYEEAQKIVDIMAKWNRASSCKLSELLSLDLQGPVSNSPTEVQKHNLSYLFYNWSITKRTLTVWLIWFTGSLGFYSFSLNSVNLGGNEYLNLFLLGVVEIPAYTFVCIAMDKVGRRTVLAYSLFCSALACGVVMVIPQKHYILGVVTAMVGKFAIGAAFGLIYLYTAELYPTIVRSLAVGSGSMVCRLASILAPFSVDLSSIWIFIPQLFVGTMALLSGVLTLKLPETLGKRLATTWEEAAKLESENESKSSKLLLTTNNSGLEKTEAITPRDSGLGE

SEQ ID NO: 743828 - protein, 598 aa, Homo sapiens
GSGRGALPAVPGARLTRRPVHGRTMGSRHFEGIYDHVGHFGRFQRVLYFICAFQNISCGIHYLASVFMGVTPHHVCRPPGNVSQVVFHNHSNWSLEDTGALLSSGQKDYVTVQLQNGEIWELSRCSRNKRENTSSLGYEYTGSKKEFPCVDGYIYDQNTWKSTAVTQWNLVCDRKWLAMLIQPLFMFGVLLGSVTFGYFSDRLGRRVVLWATSSSMFLFGIAAAFAVDYYTFMAARFFLAMVASGYLVVGFVYVMEFIGMKSRTWASVHLHSFFAVGTLLVALTGYLVRTWWLYQMILSTVTVPFILCCWVLPETPFWLLSEGRYEEAQKIVDIMAKWNRASSCKLSELLSLDLQGPVSNSPTEVQKHNLSYLFYNWSITKRTLTVWLIWFTGSLGFYSFSLNSVNLGGNEYLNLFLLGVVEIPAYTFVCIAMDKVGRRTVLAYSLFCSALACGVVMVIPQKHYILGVVTAMVGKFAIGAAFGLIYLYTAELYPTIVRSLAVGSGSMVCRLASILAPFSVDLSSIWIFIPQLFVGTMALLSGVLTLKLPETLGKRLATTWEESENESKSSKLLLTTNNSGLEKTEAITLVNKCAMPAV

SEQ ID NO: 743829 - protein, 256 aa, Homo sapiens
FSRGARDPKTSPLPPHPAQSGHGRPDAGPELGFSSRPLAAGPGMVSRGAGLARSAPVAGQEGPGFQRVLYFICAFQNISCGIHYLASVFMGVTPHHVCRPPGNVSQVVFHNHSNWSLEDTGALLSSGQKDYVTVQLQNGEIWELSRCSRNKRENTSSLGYEYTGSKKEFPCVDGYIYDQNTWKSTAVTQWNLVCDRKWLAMLIQPLFMFGVLLGSVTFGYFSDSRLGRRSGLVGHQAGGNDSGTEIPPAAGPRLIT

SEQ ID NO: 743830 - protein, 534 aa, Homo sapiens
MGVTPHHVCRPPGNVSQVVFHNHSNWSLEDTGALLSSGQKDYVTVQLQNGEIWELSRCSRNKRENTSSLGYEYTGSKKEFPCVDGYIYDQNTWKSTAVTQWNLVCDRKWLAMLIQPLFMFGVLLGSVTFGYFSDRLGRRVVLWATSSSMFLFGIAAAFAVDYYTFMAARFFLAMVASGYLVVGFVYVMEFIGMKSRTWASVHLHSFFAVGTLLVALTGYLVRTWWLYQMILSTVTVPFILCCWVLPETPFWLLSEGRYEEAQKIVDIMAKWNRASSCKLSELLSLDLQGPVSNSPTEVQKHNLSYLFYNWSITKRTLTVWLIWFTGSLGFYSFSLNSVNLGGNEYLNLFLLGVVEIPAYTFVCIAMDKVGRRTVLAYSLFCSALACGVVMVIPQKHYILGVVTAMVGKFAIGAAFGLIYLYTAELYPTIVRSLAVGSGSMVCRLASILAPFSVDLSSIWIFIPQLFVGTMALLSGVLTLKLPETLGKRLATTWEEAAKLESENESKSSKLLLTTNNSGLEKTEAITPRDSGLGE

SEQ ID NO: 743831 - protein, 797 aa, Homo sapiens
ASRDRKCRMGTKMADLDSPPKLSGVQQPSEGVGGGRCSEISAELIRSLTELQELEAVYERLCGEEKVVERELDALLEQQNTIESKMVTLHRMGPNLQLIEGDAKQLAGMITFTCNLAENVSSKVRQLDLAKNRLYQAIQRADDILDLKFCMDGVQTALRSEDYEQAAAHIHRYLCLDKSVIELSRQGKEGSMIDANLKLLQEAEQRLKAIVAEKFAIATKEGDLPQVERFFKIFPLLGLHEEGLRKFSEYLCKQVASKAEENLLMVLGTDMSDRRAAVIFADTLTLLFEGIARIVETHQPIVETYYGPGRLYTLIKYLQVECDRQVEKVVDKFIKQRDYHQQFRHVQNNLMRNSTTEKIEPRELDPILTEVTLMNARSELYLRFLKKRISSDFEVGDSMASEEVKQEHQKCLDKLLNNCLLSCTMQELIGLYVTMEEYFMRETVNKAVALDTYEKGQLTSSMVDDVFYIVKKCIGRALSSSSIDCLCAMINLATTELESDFRDVLCNKLRMGFPATTFQDIQRGVTSAVNIMHSSLQQGKFDTKGIESTDEAKMSFLVTLNNVEVCSENISTLKKTLESDCTKLFSQGIGGEQAQAKFDSCLSDLAAVSNKFRDLLQEGLTELNSTAIKPQVQPWINSFFSVSHNIEEEEFNDYEANDPWVQQFILNLEQQMAEFKASLSPVIYDSLTGLMTSLVAVELEKVVLKSTFNRLGGLQFDKELRSLIAYLTTVTTWTIRDKFARLSQMATILNLERVTEILDYWGPNSGPLTWRLTPAEVRQVLALRIDFRSEDIKRLRL

SEQ ID NO: 743832 - protein, 712 aa, Homo sapiens
MVTLHRMGPNLQLIEGDAKQLAGMITFTCNLAENVSSKVRQLDLAKNRLYQAIQRADDILDLKFCMDGVQTALRSEDYEQAAAHIHRYLCLDKSVIELSRQGKEGSMIDANLKLLQEAEQRLKAIVAEKFAIATKEGDLPQVERFFKIFPLLGLHEEGLRKFSEYLCKQVASKAEENLLMVLGTDMSDRRAAVIFADTLTLLFEGIARIVETHQPIVETYYGPGRLYTLIKYLQVECDRQVEKVVDKFIKQRDYHQQFRHVQNNLMRNSTTEKIEPRELDPILTEVTLMNARSELYLRFLKKRISSDFEVGDSMASEEVKQEHQKCLDKLLNNCLLSCTMQELIGLYVTMEEYFMRETVNKAVALDTYEKGQLTSSMVDDVFYIVKKCIGRALSSSSIDCLCAMINLATTELESDFRDVLCNKLRMGFPATTFQDIQRGVTSAVNIMHSSLQQGKFDTKGIESTDEAKMSFLVTLNNVEVCSENISTLKKTLESDCTKLFSQGIGGEQAQAKFDSCLSDLAAVSNKFRDLLQEGLTELNSTAIKPQVQPWINSFFSVSHNIEEEEFNDYEANDPWVQQFILNLEQQMAEFKASLSPVIYDSLTGLMTSLVAVELEKVVLKSTFNRLGGLQFDKELRSLIAYLTTVTTWTIRDKFARLSQMATILNLERVTEILDYWGPNSGPLTWRLTPAEVRQVLALRIDFRSEDIKRLRL

SEQ ID NO: 743833 - protein, 639 aa, Homo sapiens
ASRDRKCRMGTKMADLDSPPKLSGVQQPSEGVGGGRCSEISAELIRSLTELQELEAVYERLCGEEKVVERELDALLEQQNTIESKMVTLHRMGPNLQLIEGDAKQLAGMITFTCNLAENVSSKVRQLDLAKNRLYQAIQRADDILDLKFCMDGVQTALRSEDYEQAAAHIHRYLCLDKSVIELSRQGKEGSMIDANLKLLQEAEQRLKAIVAEKFAIATKEGDLPQVERFFKIFPLLGLHEEGLRKFSEYLCKQVASKAEENLLMVLGTDMSDRRAAVIFADTLTLLFEGIARIVETHQPIVETYYGPGRLYTLIKYLQVECDRQVEKVVDKFIKQRDYHQQFRHVQNNLMRNSTTEKIEPRELDPILTEVTLMNARSELYLRFLKKRISSDFEVGDSMASEEVKQEHQKCLDKLLNNCLLSCTMQELIGLYVTMEEYFMRETVNKAVALDTYEKGQLTSSMVDDVFYIVKKCIGRALSSSSIDCLCAMINLATTELESDFRDVLCNKLRMGFPATTFQDIQRGVTSAVNIMHSSLQQGKFDTKGIESTDEAKMSFLVTLNNVEVCSENISTLKKTLESDCTKLFSQGIGGEQAQAKFDSCLSDLAAVSNKFRDLLQEGLTELNSTAITTVTMIMAGIL

SEQ ID NO: 743834 - protein, 596 aa, Homo sapiens
ASRDRKCRMGTKMADLDSPPKLSGVQQPSEGVGGGRCSEISAELIRSLTELQELEAVYERLCGEEKVVERELDALLEQQNTIESKMVTLHRMGPNLQLIEGDAKQLAGMITFTCNLAENVSSKVRQLDLAKNRLYQAIQRADDILDLKFCMDGVQTALRSEDYEQAAAHIHRYLCLDKSVIELSRQGKEGSMIDANLKLLQEAEQRLKAIVAEKFAIATKEGDLPQVERFFKIFPLLGLHEEGLRKFSEYLCKQVASKAEENLLMVLGTDMSDRRAAVIFADTLTLLFEGIARIVETHQPIVETYYGPGRLYTLIKYLQVECDRQVEKVVDKFIKQRDYHQQFRHVQNNLMRNSTTEKIEPRELDPILTEVTLMNARSELYLRFLKKRISSDFEVGDSMASEEVKQEHQKCLDKLLNNCLLSCTMQELIGLYVTMEEYFMRETVNKAVALDTYEKGQLTSSMVDDVFYIVKKCIGRALSSSSIDCLCAMINLATTELESDFRDVLCNKLRMGFPATTFQDIQRGVTSAVNIMHSSLQQGKFDTKGIESTDEAKMSFLVTLNNVEVCSENISTLKKTLEVRGKLPISGQQPSFPMLR

SEQ ID NO: 743835 - protein, 598 aa, Homo sapiens
  misc_feature (55)..(55): Xaa can be any naturally occurring amino acid
TRRELTTRRELTTRRSSLLCNKLRMGFPATTFQDIQRGVTSAVNIMHSSLQQGKXDTKGIESTDEAKMSFLVTLNNVEVCSENISTLKKTLESDCTKLLQPIVETYYGPGRLYTLIKYLQVECDRQVEKVVDKFIKQRDYHQQFRHVQNNLMRNSTTEKIEPRELDPILTEVTLMNARSELYLRFLKKRISSDFEVGDSMASEEVKQEHQKCLDKLLNNCLLSCTMQELIGLYVTMEEYFMRETVNKAVALDTYEKGQLTSSMVDDVFYIVKKCIGRALSSSSIDCLCAMINLATTELESDFRDVLCNKLRMGFPATTFQDIQRGVTSAVNIMHSSLQQGKFDTKGIESTDEAKMSFLVTLNNVEVCSENISTLKKTLESDCTKLFSQGIGGEQAQAKFDSCLSDLAAVSNKFRDLLQEGLTELNSTAIKPQVQPWINSFFSVSHNIEEEEFNDYEANDPWVQQFILNLEQQMAEFKASLSPVIYDSLTGLMTSLVAVELEKVVLKSTFNRLGGLQFDKELRSLIAYLTTVTTWTIRDKFARLSQMATILNLERVTEILDYWGPNSGPLTWRLTPAEVRQVLALRIDFRSEDIKRLRL

SEQ ID NO: 743836 - protein, 439 aa, Homo sapiens [sequence omitted]

SEQ ID NO: 743837 - protein, 483 aa, Homo sapiens
MPKVWSDQQEANRCGGGEEYSHSCGMLQFRHVQNNLMRNSTTEKIEPRELDPILTEVTLMNARSELYLRFLKKRISSDFEVGDSMASEEVKQEHQKCLDKLLNNCLLSCTMQELIGLYVTMEEYFMRETVNKAVALDTYEKGQLTSSMVDDVFYIVKKCIGRALSSSSIDCLCAMINLATTELESDFRDVLCNKLRMGFPATTFQDIQRGVTSAVNIMHSSLQQGKFDTKGIESTDEAKMSFLVTLNNVEVCSENISTLKKTLESDCTKLFSQGIGGEQAQAKFDSCLSDLAAVSNKFRDLLQEGLTELNSTAIKPQVQPWINSFFSVSHNIEEEEFNDYEANDPWVQQFILNLEQQMAEFKASLSPVIYDSLTGLMTSLVAVELEKVVLKSTFNRLGGLQFDKELRSLIAYLTTVTTWTIRDKFARLSQMATILNLERVTEILDYWGPNSGPLTWRLTPAEVRQVLALRIDFRSEDIKRLRL

SEQ ID NO: 743838 - protein, 410 aa, Homo sapiens
LWSLLFICLCFTSSEEIKHEHQKCLDKLLNNCLLSCTMQELIGLYVTMEEYFMRETVNKAVALDTYEKGQLTSSMVDDVFYIVKKCIGRALSSSSIDCLCAMINLATTELESDFRDVLCNKLRMGFPATTFQDIQRGVTSAVNIMHSSLQQGKFDTKGIESTDEAKMSFLVTLNNVEVCSENISTLKKTLESDCTKLFSQGIGGEQAQAKFDSCLSDLAAVSNKFRDLLQEGLTELNSTAIKPQVQPWINSFFSVSHNIEEEEFNDYEANDPWVQQFILNLEQQMAEFKASLSPVIYDSLTGLMTSLVAVELEKVVLKSTFNRLGGLQFDKELRSLIAYLTTVTTWTIRDKFARLSQMATILNLERVTEILDYWGPNSGPLTWRLTPAEVRQVLALRIDFRSEDIKRLRL

SEQ ID NO: 743839 - protein, 368 aa, Homo sapiens
ASRAGSNRPREGDCPYKAVALDTYEKGQLTSSMVDDVFYIVKKCIGRALSSSSIDCLCAMINLATTELESDFRDVLCNKLRMGFPATTFQDIQRGVTSAVNIMHSSLQQGKFDTKGIESTDEAKMSFLVTLNNVEVCSENISTLKKTLESDCTKLFSQGIGGEQAQAKFDSCLSDLAAVSNKFRDLLQEGLTELNSTAIKPQVQPWINSFFSVSHNIEEEEFNDYEANDPWVQQFILNLEQQMAEFKASLSPVIYDSLTGLMTSLVAVELEKVVLKSTFNRLGGLQFDKELRSLIAYLTTVTTWTIRDKFARLSQMATILNLERVTEILDYWGPNSGPLTWRLTPAEVRQVLALRIDFRSEDIKRLRL

SEQ ID NO: 743840 - protein, 114 aa, Homo sapiens
RSAVKRWGPLLLLSPHLWNLIRYAENTRTQITLALGIKTVVSLSFAARRGKLRGPQAAVLPRSPSTKLSVPRVGASLREVCCCPQPQLQSPNSEIFTCGEKQTIKQLLISSQRN

SEQ ID NO: 743841 - protein, 293 aa, Homo sapiens
SLTPGSATQEICIRALIGVISHLFSFSKEYPVVPRSTVRQKVASNHSPFSSESRALSTSSNLGSQYQCENGVSGPSQDLLPPPNPYPLPQEHSQIYHCTKRKEEECSTTDHPYKKPYMETSPSEEDSFYRSSYPQQQGLGASYRTESAQRQACMYASSAPPSEPVPSLEDISCNTWPSMPSYSSCTVTTVQPMDRLPYQHFSAHFTSGPLVPRLAGMANHGSPQLGEGMFQHQTSVAHQPVVRQCGPQTGLQSPGTLQPPEFLYSHGVPRTLSPHQYHSVHGVGMVPEWSDNS

SEQ ID NO: 743842 - protein, 518 aa, Homo sapiens
MADADEGFGLAHTPLEPDAKDLPCDSKPESALGAPSKSPSSPQAAFTQQGMEGIKVFLHERELWLKFHEVGTEMIITKAGRRMFPSYKVKVTGLNPKTKYILLMDIVPADDHRYKFADNKWSVTGKAEPAMPGRLYVHPDSPATGAHWMRQLVSFQKLKLTNNHLDPFGHIILNSMHKYQPRLHIVKADENNGFGSKNTAFCTHVFPETAFIAVTSYQNHKITQLKIENNPFAKGFRGSDDMELHRMSRMQSKEYPVVPRSTVRQKVASNHSPFSSESRALSTSSNLGSQYQCENGVSGPSQDLLPPPNPYPLPQEHSQIYHCTKRKEEECSTTDHPYKKPYMETSPSEEDSFYRSSYPQQQGLGASYRTESAQRQACMYASSAPPSEPVPSLEDISCNTWPSMPSYSSCTVTTVQPMDRLPYQHFSAHFTSGPLVPRLAGMANHGSPQLGEGMFQHQTSVAHQPVVRQCGPQTGLQSPGTLQPPEFLYSHGVPRTLSPHQYHSVHGVGMVPEWSDNS

SEQ ID NO: 743843 - protein, 468 aa, Homo sapiens
MEGIKVFLHERELWLKFHEVGTEMIITKAGRRMFPSYKVKVTGLNPKTKYILLMDIVPADDHRYKFADNKWSVTGKAEPAMPGRLYVHPDSPATGAHWMRQLVSFQKLKLTNNHLDPFGHIILNSMHKYQPRLHIVKADENNGFGSKNTAFCTHVFPETAFIAVTSYQNHKITQLKIENNPFAKGFRGSDDMELHRMSRMQSKEYPVVPRSTVRQKVASNHSPFSSESRALSTSSNLGSQYQCENGVSGPSQDLLPPPNPYPLPQEHSQIYHCTKRKEEECSTTDHPYKKPYMETSPSEEDSFYRSSYPQQQGLGASYRTESAQRQACMYASSAPPSEPVPSLEDISCNTWPSMPSYSSCTVTTVQPMDRLPYQHFSAHFTSGPLVPRLAGMANHGSPQLGEGMFQHQTSVAHQPVVRQCGPQTGLQSPGTLQPPEFLYSHGVPRTLSPHQYHSVHGVGMVPEWSDNS

SEQ ID NO: 743844 - protein, 518 aa, Homo sapiens; identical to SEQ ID NO: 743842

SEQ ID NO: 743845 - protein, 518 aa, Homo sapiens; identical to SEQ ID NO: 743842

SEQ ID NO: 743846 - protein, 243 aa, Homo sapiens
MGPFGLGFDFLKRNLCCPVAVLKSGQEFCKMRKINFGRKPSWEQLRESDSSPKGEGRMRAVAGSGVYCPNDWGKERGFSNLVAISRLSFILFVVRASERLGKPVCEAGLAESFECRSRWLQGPQSGMPEKGTTRKRRYARSFPFSLQPRRGLGLGFRPTSAQRSSRNSSRRPFRKARRSPALCWAGLALLSAPPGASTRYVLQLNLVGFQRCAKVCEHPPLRCLEIVPIDQTKNNSRRDYKTK

SEQ ID NO: 743847 - protein, 349 aa, Homo sapiens
MADADEGFGLAHTPLEPDAKDLPCDSKPESALGAPSKSPSSPQAAFTQQGMEGIKVFLHERELWLKFHEVGTEMIITKAGRRMFPSYKVKVTGLNPKTKYILLMDIVPADDHRYKFADNKWSVTGKAEPAMPGRLYVHPDSPATGAHWMRQLVSFQKLKLTNNHLDPFGHIILNSMHKYQPRLHIVKADENNGFGSKNTAFCTHVFPETAFIAVTSYQNHKITQLKIENNPFAKGFRGSDDMELHRMSRMQSKEYPVVPRSTVRQKVASNHSPFSSESRALSTSSNLGSQYQCENGVSGPSQDLLPPPNPYPLPQEHSQIYHCTKRKGECDHPWSICFLSYLFLSLGWG

SEQ ID NO: 743848 - protein, 106 aa, Homo sapiens
GGCHSELHHSPWQLQGSDLHPQLLSDAYVPLRPIAGARFKSEGVDVASGITVDWAYDSGIKYAFSFELRDTGQYGFLLPATQIIPTAQETWMALRTIMEHTLNHPY

SEQ ID NO: 743849 - protein, 101 aa, Homo sapiens
PAFHPANVILQYDLAKDAVEALYKVHGIEYIFGSISTTLYVASGITVDWAYDSGIKYAFSFELRDTGQYGFLLPATQIIPTAQETWMALRTIMEHTLNHPY

SEQ ID NO: 743850 - protein, 84 aa, Homo sapiens
SIRPGIFCIGVDLNRNWKSGFGDVASGITVDWAYDSGIKYAFSFELRDTGQYGFLLPATQIIPTAQETWMALRTIMEHTLNHPY

SEQ ID NO: 743851 - protein, 131 aa, Homo sapiens
QLSSSCTTQWPSEESPAACELPSPSPQPYRRCSGDPHAGVSNSYPLSSRSEAQSAPEKPQTAPWPASTCSHWSTFLSFRQGLFCILFEAVQKRACETTFKIPPSLSCPTHLFFPPLTVPSLKNGLTNLGYF

SEQ ID NO: 743852 - protein, 143 aa, Homo sapiens
QSDLSLFSPHFPLFYSTKPPLSSWPVLDGRWMFYFPENQTLALCTPHLRADYPRPAQVRAGLETRGLLPSEPPQQRADSILRSGRADLPASSPRALGLPGSGSVSESGSGSGSESGSGPALRARGGDYGPRRARPGPRGHGRG

SEQ ID NO: 743853 - protein, 113 aa, Homo sapiens
SPSLLAPLAPKNLGSATHLRRHKPTYLLSLAHPCSTSTWGPDTTLSNMQPPHPSSARPQIFPLCSLPPQQLLISEPLPSPCWPSPPCPSSCPSSEKRHFGKACFFSMSPSLYS

SEQ ID NO: 743854 - protein, 353 aa, Homo sapiens
MVGQEAALSLGAAMLEAPGPSDGCELSNPSASRVSCAGQMLEVQPGLYFGGAAAVAEPDHLREAGITAVLTVDSEEPSFKAGPGVEDLWRLFVPALDKPETDLLSHLDRCVAFIGQARAEGRAVLVHCHAGVSRSVAIITAFLMKTDQLPFEKAYEKLQILKPEAKMNEGFEWQLKLYQAMGYEVDTSSAIYKQYRLQKVTEKYPELQNLPQELFAVDPTTVSQGLKDEVLYKCRKCRRSLFRSSSILDHREGSGPIAFAHKRMTPSSMLTTGRQAQCTSYFIEPVQWMESALLGVMDGQLLCPKCSAKLGSFNWYGEQCSCGRWITPAFQIHKNRVDEMKILPVLGSQTGKI

SEQ ID NO: 743855 - protein, 163 aa, Homo sapiens
MVGQEAALSLGAAMLEAPGPSDGCELSNPSASRVSCAGQMLEVQPGLYFGGAAAVAEPDHLREAGITAVLTVDSEEPSFKAGPGVEDLWRLFVPALDKPETDLLSHLDRCVAFIGQARAEGRAVLVHCHAGVSRSVAIITAFLMKTDQLPSTGMVNSALVVGG

SEQ ID NO: 743856 - protein, 121 aa, Homo sapiens
MVGQEAALSLGAAMLEAPGPSDGCELSNPSASRVSCAGQMLEVQPGLYFGGAAAVAEPDHLREAGITAVLTVDSEEPSFKAGPGVEDLWRLFVPALDKPETDLLSHLDRVLLCHPGYSVVA

SEQ ID NO: 743857 - protein, 312 aa, Homo sapiens [sequence omitted]

SEQ ID NO: 743858 - protein, 312 aa, Homo sapiens [sequence omitted]

SEQ ID NO: 743859 - protein, 70 aa, Homo sapiens
DHLREAGITAVLTVDSEEPSFKAGPGVEDLWRLFVPALDKPETDLLSHLDRCVAFIGQARAEGRAVLVHW

SEQ ID NO: 743860 - protein, 427 aa, Homo sapiens
MGGDLVLGLGALRRRKRLLEQEKSLAGWALVLAGTGIGLMVLHAEMLWFGGCSWALYLFLVKCTISISTFLLLCLIVAFHAKEVQLFMTDNGLRDWRVALTGRQAAQIVLELVVCGLHPAPVRGPPCVQDLGAPLTSPQPWPGFLGQGEALLSLAMLLRLYLVPRAVLLRSGVLLNASYRSIGALNQVRFRHWFVAKLYMNTHPGRLLLGLTLGLWLTTAWVLSVAERQAVNATGHLSDTLWLIPITFLTIGYGDVVPGTMWGKIVCLCTGVMGVCCTALLVAVVARKLEFNKAEKHVHNFMMDIQYTKEMKESAARVLQEAWMFYKHTRRKESHAARRHQRKLLAAINAFRQVRLKHRKLREQVNSMVDISKMHMILYDLQQNLSSSHRALEKQIDTLAGKLDALTELLSTALGPRQLPEPSQQSK

SEQ ID NO: 743861 - protein, 71 aa, Homo sapiens
  misc_feature (10)..(10): Xaa can be any naturally occurring amino acid
  misc_feature (24)..(24): Xaa can be any naturally occurring amino acid
LPSANLKDPXTDGTVQPIPGVSWXLGTSSSQLQVQATGGRTPGSLGKRVLGARIQDSGRLQLPLAELKNWV

SEQ ID NO: 743862 - protein, 427 aa, Homo sapiens; identical to SEQ ID NO: 743860

SEQ ID NO: 743863 - protein, 427 aa, Homo sapiens; identical to SEQ ID NO: 743860

SEQ ID NO: 743864 - protein, 340 aa, Homo sapiens [sequence omitted]

SEQ ID NO: 743865 - protein, 167 aa, Homo sapiens
MWGKIVCLCTGVMGVCCTALLVAVVARKLEFNKAEKHVHNFMMDIQYTKEMKESAARVLQEAWMFYKHTRRKESHAARRHQRKLLAAINAFRQVRLKHRKLREQVNSMVDISKMHMILYDLQQNLSSSHRALEKQIDTLAGKLDALTELLSTALGPRQLPEPSQQSK

SEQ ID NO: 743866 - protein, 107 aa, Homo sapiens
MILTASVPPRRKESHAARRHQRKLLAAINAFRQVRLKHRKLREQVNSMVDISKMHMILYDLQQNLSSSHRALEKQIDTLAGKLDALTELLSTALGPRQLPEPSQQSK

SEQ ID NO: 743867 - protein, 84 aa, Homo sapiens
VHRLRSTFRRPPPGDPAMEVSQPFLAPYVHPASSLAPRDGGPSPADLSLTLYKALSSSAATRTHCRCSISQDASTSPRGTWGPG

SEQ ID NO: 743868 - protein, 111 aa, Homo sapiens
KVRDYYDLYPTPTHAKRLFPHLWPNFPAWGRSLRGSTRDLLGFFWESSFTYFVSPTGETGKTSGSAATISTDLSMAKAFSTHNQSWLQFSYRVLAFPLSGSKPFDPEAVCP

SEQ ID NO: 743869 - protein, 454 aa, Homo sapiens [sequence omitted]

SEQ ID NO: 743870 - protein, 595 aa, Homo sapiens
MAALSPTFATSTQDSTCLQDSEFPVSSKDHSCPQNLDLFVCSGLEPHTPSVGSQESVTFQDVAVDFTEKEWPLLDSSQRKLYKDVMLENYSNLTSLGYQVGKPSLISHLEQEEEPRTEERGAHQGACADWETPSKTKWSLLMEDIFGKETPSGVTMERAGLGEKSTEYAHLFEVFGMDPHLTQPMGRHAGKRPYHRRDYGVAFKGRPHLTQHMSMYDGRKMHECHQCQKAFTTSASLTRHRRIHTGEKPYECSDCGKAFNDPSALRSHARTHLKEKPFDCSQCGNAFRTLSALKIHMRVHTGERPYKCDQCGKAYGRSCHLIAHKRTHTGERPYECHDCGKAFQHPSHLKEHVRNHTGEKPYACTQCGKAFRWKSNFNLHKKNHMVEKTYECKECGKSFGDLVSRRKHMRIHIVKKPVECRQCGKTFRNQSILKTHMNSHTGEKPYGCDLCGKAFSASSNLTAHRKIHTQERRYECAACGKVFGDYLSRRRHMSVHLVKKRVECRQCGKAFRNQSTLKTHMRSHTGEKPYECDHCGKAFSIGSNLNVHRRIHTGEKPYECLVCGKAFSDHSSLRSHVKTHRGEKLFVSSVWKRLQ

SEQ ID NO: 743871 - protein, 595 aa, Homo sapiens; identical to SEQ ID NO: 743870

SEQ ID NO: 743872 - protein, 595 aa, Homo sapiens; identical to SEQ ID NO: 743870

SEQ ID NO: 743873 - protein, 595 aa, Homo sapiens; identical to SEQ ID NO: 743870

SEQ ID NO: 743874 - protein, 595 aa, Homo sapiens; identical to SEQ ID NO: 743870

SEQ ID NO: 743875 - protein, 595 aa, Homo sapiens; identical to SEQ ID NO: 743870

SEQ ID NO: 743876 - protein, 85 aa, Homo sapiens
RKMAMDRGPLGVLFWHVGTGRITRGEALRMPCLRESLQRPLIPQEPRENSPGREALCVIRVEKAPVSAPALETQDDSDRKQTSWV

SEQ ID NO: 743877 - protein, 711 aa, Homo sapiens
MAALSPTFATSTQDSTCLQDSEFPVSSKDHSCPQNLDLFVCSGLEPHTPSVGSQESVTFQDVAVDFTEKEWPLLDSSQRKLYKDVMLENYSNLTSLGYQVGKPSLISHLEQEEEPRTEERGAHQGACADWETPSKTKWSLLMEDIFGKETPSGVTMERAGLGEKSTEYAHLFEVFGMDPHLTQPMGRHAGKRPYHRRDYGVAFKGRPHLTQHMSMYDGRKMHECHQCQKAFTTSASLTRHRRIHTGEKPYECSDCGKAFNDPSALRSHARTHLKEKPFDCSQCGNAFRTLSALKIHMRVHTGERPYKCDQCGKAYGRSCHLIAHKRTHTGERPYECHDCGKAFQHPSHLKEHVRNHTGEKPYACTQCGKAFRWKSNFNLHKKNHMVEKTYECKECGKSFGDLVSRRKHMRIHIVKKPVECRQCGKTFRNQSILKTHMNSHTGEKPYGCDLCGKAFSASSNLTAHRKIHTQERRYECAACGKVFGDYLSRRRHMSVHLVKKRVECRQCGKAFRNQSTLKTHMRSHTGEKPYECDHCGKAFSIGSNLNVHRRIHTGEKPYECLVCGKAFSDHSSLRSHVKTHLKEKPGDCSQCGNAIRDPSRPLKIHMRVHTGESPYKCDQCGKAYGRSCHLIAHKRTAIVRFALGNNAQEIMTAAFVVVVIGGLGSFWGVVLAALLVGVVRGITVQFYAPAGEASMYLLMLLVLIFRPRVIA

SEQ ID NO: 743878 - protein, 171 aa, Homo sapiens [sequence omitted]

SEQ ID NO: 743879 - protein, 331 aa, Homo sapiens
MDVSVRAAGCSDDLSSGEADVDPKLLELTADEEKCRSIRRQYRQLMYCVRQNREDIVSSANNSLTEALEEANVLFDGVSRTREAALDARFLVMASDLGKEKAKQLNSDMNFFNQLAFCDFLFLFVGLNWMEGDPDKLSDCDDSIALSFWKAIEKEATSWMVKAETFHFVFGSFKLERSAPKPRLEHQKKVRKMEENGNMPTKLQKLDLSSYPEATEKNVERILGLLQTYFRKYPDTPVSYFEFVIDPNSFSRTVENIFYVSFIVRDGFARIRLDEDRLPILEPMNVNQMGEGNDSSCHGRKQGVISLTLQEWKNIVAAFEISEAMITYSSY

SEQ ID NO: 743880 - protein, 104 aa, Homo sapiens
WWESVLPGAGQRCRTEPHLSPLPSEPQALFSRPAGLLSLRPEYTLITVSVPCLPQPRLLLLLASPALRGSPGGRGSSRRGEPRPNSLLLKIQREKVDFDDIQKS

SEQ ID NO: 743881 - protein, 210 aa, Homo sapiens
MEGMDKETFEFKFGKELTFTTVLSDQQVVELIPGGAGIVVGYGDRSRFIQLVQKARLEESKEQVAAMQAGLLKVVPQAVLDLLTWQELEKKVCGDPEVTVDALRKLTRFEDFEPSDSRVQYFWEALNNFTNEDRSRFLRFVTGRSRLPARIYIYPDKLGYETTDALPESSTCSSTLFLPHYASAKVCEEKLRYAAYNCVAIDTDMSPWEE

SEQ ID NO: 743882 - protein, 739 aa, Homo sapiens
MEQLAEHLGDCGLQEGWLLVCRPAEGGARLVPIDTPNHLQRQQQLFGVDYRPVLRWEQVVDLTYSHRLGSRPQPAEAYAEAVQRLLYVPPTWTYECDEDLIHFLYDHLGKEDENLGSVKQYVESIDVSSYTEEFNVSCLTDSNADTYWESDGSQCQHWVRLTMKKGTIVKKLLLTVDTTDDNFMPKRVVVYGGEGDNLKKLSDVSIDETLIGDVCVLEDMTVHLPIIEIRIVECRDDGIDVRLRGVKIKSSRQRELGLNADLFQPTSLVRYPRLEGTDPEVLYRRAVLLQRFIKILDSVLHHLVPAWDHTLGTFSEIKQVKQFLLLSRQRPGLVAQCLRDSESSKPSFMPRLYINRRLAMEHRACPSRDPACKNAVFTQVYEGLKPSDKYEKPLDYRWPMRYDQWWECKFIAEGIIDQGGGFRDSLADMSEELCPSSADTPVPLPFFVRTANQGNGTGEARDMYVPNPSCRDFAKYEWIGQLMGAALRGKEFLVLALPGFVWKQLSGEEVSWSKDFPAVDSVLVKLLEVMEGMDKETFEFKFGKELTFTTVLSDQQVVELIPGGAGIVVGYGDRSRFIQLVQKARLEESKEQVAAMQAGLLKVVPQAVLDLLTWQELEKKVCGDPEVTVDALRKLTRFEDFEPSDSRVQYFWEALNNFTNEDRSRFLRFVTGRSRLPARIYIYPDKLGYETTDALPESSTCSSTLFLPHYASAKVCEEKLRYAAYNCVAIDTDMSPWEE

SEQ ID NO: 743883 - protein, 828 aa, Homo sapiens
RPLPAALAFVPREVLYKLYKDPAGPSRVLLPVWEAEGLGLRVGAAGPAPGTGSGPLRAARDSIELRRGACVRTTGEELCNGHGLWVKLTKEQLAEHLGDCGLQEGWLLVCRPAEGGARLVPIDTPNHLQRQQQLFGVDYRPVLRWEQVVDLTYSHRLGSRPQPAEAYAEAVQRLLYVPPTWTYECDEDLIHFLYDHLGKEDENLGSVKQYVESIDVSSYTEEFNVSCLTDSNADTYWESDGSQCQHWVRLTMKKGTIVKKLLLTVDTTDDNFMPKRVVVYGGEGDNLKKLSDVSIDETLIGDVCVLEDMTVHLPIIEIRIVECRDDGIDVRLRGVKIKSSRQRELGLNADLFQPTSLVRYPRLEGTDPEVLYRRAVLLQRFIKILDSVLHHLVPAWDHTLGTFSEIKQVKQFLLLSRQRPGLVAQCLRDSESSKPSFMPRLYINRRLAMEHRACPSRDPACKNAVFTQVYEGLKPSDKYEKPLDYRWPMRYDQWWECKFIAEGIIDQGGGFRDSLADMSEELCPSSADTPVPLPFFVRTANQGNGTGEARDMYVPNPSCRDFAKYEWIGQLMGAALRGKEFLVLALPGFVWKQLSGEEVSWSKDFPAVDSVLVKLLEVMEGMDKETFEFKFGKELTFTTVLSDQQVVELIPGGAGIVVGYGDRSRFIQLVQKARLEESKEQVAAMQAGLLKVVPQAVLDLLTWQELEKKVCGDPEVTVDALRKLTRFEDFEPSDSRVQYFWEALNNFTNEDRSRFLRFVTGRSRLPARIYIYPDKLGYETTDALPESSTCSSTLFLPHYASAKVCEEKLRYAAYNCVAIDTDMSPWEE

SEQ ID NO: 743884 - protein, 715 aa, Homo sapiens
  misc_feature (6)..(6): Xaa can be any naturally occurring amino acid
MFPWAXRAIDTPNHLQRQQQLFGVDYRPVLRWEQVVDLTYSHRLGSRPQPAEAYAEAVQRLLYVPPTWTYECDEDLIHFLYDHLGKEDENLGSVKQYVESIDVSSYTEEFNVSCLTDSNADTYWESDGSQCQHWVRLTMKKGTIVKKLLLTVDTTDDNFMPKRVVVYGGEGDNLKKLSDVSIDETLIGDVCVLEDMTVHLPIIEIRIVECRDDGIDVRLRGVKIKSSRQRELGLNADLFQPTSLVRYPRLEGTDPEVLYRRAVLLQRFIKILDSVLHHLVPAWDHTLGTFSEIKQVKQFLLLSRQRPGLVAQCLRDSESSKPSFMPRLYINRRLAMEHRACPSRDPACKNAVFTQVYEGLKPSDKYEKPLDYRWPMRYDQWWECKFIAEGIIDQGGGFRDSLADMSEELCPSSADTPVPLPFFVRTANQGNGTGEARDMYVPNPSCRDFAKYEWIGQLMGAALRGKEFLVLALPGFVWKQLSGEEVSWSKDFPAVDSVLVKLLEVMEGMDKETFEFKFGKELTFTTVLSDQQVVELIPGGAGIVVGYGDRSRFIQLVQKARLEESKEQVAAMQAGLLKVVPQAVLDLLTWQELEKKVCGDPEVTVDALRKLTRFEDFEPSDSRVQYFWEALNNFTNEDRSRFLRFVTGRSRLPARIYIYPDKLGYETTDALPESSTCSSTLFLPHYASAKVCEEKLRYAAYNCVAIDTDMSPWEE

SEQ ID NO: 743885 - protein, 649 aa, Homo sapiens
RPLPAALAFVPREVLYKLYKDPAGPSRVLLPVWEAEGLGLREEFNVSCLTDSNADTYWESDGSQCQHWVRLTMKKGTIVKKLLLTVDTTDDNFMPKRVVVYGGEGDNLKKLSDVSIDETLIGDVCVLEDMTVHLPIIEIRIVECRDDGIDVRLRGVKIKSSRQRELGLNADLFQPTSLVRYPRLEGTDPEVLYRRAVLLQRFIKILDSVLHHLVPAWDHTLGTFSEIKQVKQFLLLSRQRPGLVAQCLRDSESSKPSFMPRLYINRRLAMEHRACPSRDPACKNAVFTQVYEGLKPSDKYEKPLDYRWPMRYDQWWECKFIAEGIIDQGGGFRDSLADMSEELCPSSADTPVPLPFFVRTANQGNGTGEARDMYVPNPSCRDFAKYEWIGQLMGAALRGKEFLVLALPGFVWKQLSGEEVSWSKDFPAVDSVLVKLLEVMEGMDKETFEFKFGKELTFTTVLSDQQVVELIPGGAGIVVGYGDRSRFIQLVQKARLEESKEQVAAMQAGLLKVVPQAVLDLLTWQELEKKVCGDPEVTVDALRKLTRFEDFEPSDSRVQYFWEALNNFTNEDRSRFLRFVTGRSRLPARIYIYPDKLGYETTDALPESSTCSSTLFLPHYASAKVCEEKLRYAAYNCVAIDTDMSPWEE

SEQ ID NO: 743886 - protein, 739 aa, Homo sapiens; identical to SEQ ID NO: 743882

SEQ ID NO: 743887 - protein, 277 aa, Homo sapiens [sequence omitted]

SEQ ID NO: 743888 - protein, 739 aa, Homo sapiens; identical to SEQ ID NO: 743882

SEQ ID NO: 743889 - protein, 739 aa, Homo sapiens; identical to SEQ ID NO: 743882

SEQ ID NO: 743890 - protein, 210 aa, Homo sapiens; identical to SEQ ID NO: 743881

SEQ ID NO: 743891 - protein, 739 aa, Homo sapiens; identical to SEQ ID NO: 743882

SEQ ID NO: 743892 - protein, 739 aa, Homo sapiens; identical to SEQ ID NO: 743882

SEQ ID NO: 743893 - protein, 739 aa, Homo sapiens; identical to SEQ ID NO: 743882

SEQ ID NO: 743894 - protein, 108 aa, Homo sapiens
MYRPRVKSAEEPSDSRVQYFWEALNNFTNEDRSRFLRFVTGRSRLPARIYIYPDKLGYETTDALPESSTCSSTLFLPHYASAKVCEEKLRYAAYNCVAIDTDMSPWEE

SEQ ID NO: 743895 - protein, 592 aa, Homo sapiens
MEQLAEHLGDCGLQEGWLLVCRPAEGGARLVPIDTPNHLQRQQQLFGVDYRPVLRWEQVVDLTYSHRLGSRPQPAEAYAEAVQRLLYVPPTWTYECDEDLIHFLYDHLGKEDENLGSVKQYVESIDVSSYTEEFNVSCLTDSNADTYWESDGSQCQHWVRLTMKKGTIVKKLLLTVDTTDDNFMPKRVVVYGGEGDNLKKLSDVSIDETLIGDVCVLEDMTVHLPIIEIRIVECRDDGIDVRLRGVKIKSSRQRELGLNADLFQPTSLVRYPRLEGTDPEVLYRRAVLLQRFIKILDSVLHHLVPAWDHTLGTFSEIKQVKQFLLLSRQRPGLVAQCLRDSESSKPSFMPRLYINRRLAMEHRACPSRDPACKNAVFTQVYEGLKPSDKYEKPLDYRWPMRYDQWWECKFIAEGIIDQGGGFRDSLADMSEELCPSSADTPVPLPFFVRTANQGNGTGEARDMYVPNPSCRDFAKYEWIGQLMGAALRGKEFLVLALPGFVWKQLSGEEVSWSKDFPAVDSVLVKLLEVMEGMDKETFEFKFGKELTFTTVLSDQQVVELIPGGAGIVVGYGDRSRFIQLVQKARLEESKEQ

SEQ ID NO: 743896 - protein, 520 aa, Homo sapiens
MEQLAEHLGDCGLQEGWLLVCRPAEGGARLVPIDTPNHLQRQQQLFGVDYRPVLRWEQVVDLTYSHRLGSRPQPAEAYAEAVQRLLYVPPTWTYECDEDLIHFLYDHLGKEDENLGSVKQYVESIDVSSYTEEFNVSCLTDSNADTYWESDGSQCQHWVRLTMKKGTIVKKLLLTVDTTDDNFMPKRVVVYGGEGDNLKKLSDVSIDETLIGDVCVLEDMTVHLPIIEIRIVECRDDGIDVRLRGVKIKSSRQRELGLNADLFQPTSLVRYPRLEGTDPEVLYRRAVLLQRFIKILDSVLHHLVPAWDHTLGTFSEIKQVKQFLLLSRQRPGLVAQCLRDSESSKPSFMPRLYINRRLAMEHRACPSRDPACKNAVFTQVYEGLKPSDKYEKPLDYRWPMRYDQWWECKFIAEGIIDQGGGFRDSLADMSEELCPSSADTPVPLPFFVRTANQGNGTGEARDMYVPNPSCRDFAKYEWIGQLMGAALRGKEFLVSSLIHTPVRSALALGRKGQPNLGSSG

SEQ ID NO: 743897 - protein, 521 aa, Homo sapiens
MEQLAEHLGDCGLQEGWLLVCRPAEGGARLVPIDTPNHLQRQQQLFGVDYRPVLRWEQVVDLTYSHRLGSRPQPAEAYAEAVQRLLYVPPTWTYECDEDLIHFLYDHLGKEDENLGSVKQYVESIDVSSYTEEFNVSCLTDSNADTYWESDGSQCQHWVRLTMKKGTIVKKLLLTVDTTDDNFMPKRVVVYGGEGDNLKKLSDVSIDETLIGDVCVLEDMTVHLPIIEIRIVECRDDGIDVRLRGVKIKSSRQRELGLNADLFQPTSLVRYPRLEGTDPEVLYRRAVLLQRFIKILDSVLHHLVPAWDHTLGTFSEIKQVKQFLLLSRQRPGLVAQCLRDSESSKPSFMPRLYINRRLAMEHRACPSRDPACKNAVFTQVYEGLKPSDKYEKPLDYRWPMRYDQWWECKFIAEGIIDQGGGFRDSLADMSEELCPSSADTPVPLPFFVRTANQGNGTGEARDMYVPNPSCRDFAKYEWIGQLMGAALRGKEFLVCVGHGGEGSISCAFHLGLSSFFSEAAE

SEQ ID NO: 743898 - protein, 238 aa, Homo sapiens
MEQLAEHLGDCGLQEGWLLVCRPAEGGARLVPIDTPNHLQRQQQLFGVDYRPVLRWEQVVDLTYSHRLGSRPQPAEAYAEAVQRLLYVPPTWTYECDEDLIHFLYDHLGKEDENLGSVKQYVESIDVSSYTEEFNVSCLTDSNADTYWESDGSQCQHWVRLTMKKGTIVKKLLLTVDTTDDNFMPKRVVVYGGEGDNLKKLSDVSIDETLIGDVCVLEDMTVHLPIIEIRIVECRGEV

SEQ ID NO: 743899 - protein, 106 aa, Homo sapiens
MVAAILQTCPEVLMSGPQVHGVLRPPLFIVHCSDLLNVSLRMTCWGHVQPRNVFPCVYPAQCEPLILALLSPSKSPLGTQRLSDVGGLTATSVPRFIPPPLTTPPR

SEQ ID NO: 743900 - protein, 215 aa, Homo sapiens
MASETEKTHALLQTCSTESLISSLGLGAFCLVADRLLQFSTIQQNDWLRALSDNAVHCVIGMWSWAVVTGIKKKTDFGEIILAGFLASVIDVDHFFLAGSMSLKAALTLPRRPFLHCSTVIPVVVLTLKFTMHLFKLKDSWCFLPWMLFISWTSHHIRDGIRHGLWICPFGKTSPLPFWLYVIITSSLPHICSFVMYLTGTRQMMSSKHGVRIDV

SEQ ID NO: 743901 - protein, 215 aa, Homo sapiens; identical to SEQ ID NO: 743900

SEQ ID NO: 743902 - protein, 215 aa, Homo sapiens; identical to SEQ ID NO: 743900

SEQ ID NO: 743903 - protein, 215 aa, Homo sapiens; identical to SEQ ID NO: 743900

SEQ ID NO: 743904 - protein, 215 aa, Homo sapiens; identical to SEQ ID NO: 743900

SEQ ID NO: 743905 - protein, 215 aa, Homo sapiens; identical to SEQ ID NO: 743900

SEQ ID NO: 743906 - protein, 113 aa, Homo sapiens
MEAALTLPRRPFLHCSTVIPVVVLTLKFTMHLFKLKDSWCFLPWMLFISWTSHHIRDGIRHGLWICPFGKTSPLPFWLYVIITSSLPHICSFVMYLTGTRQMMSSKHGVRIDV

SEQ ID NO: 743907 - protein, 133 aa, Homo sapiens
MAPTEGRSRCSSCCWIELREAGAALTLPRRPFLHCSTVIPVVVLTLKFTMHLFKLKDSWCFLPWMLFISWTSHHIRDGIRHGLWICPFGKTSPLPFWLYVIITSSLPHICSFVMYLTGTRQMMSSKHGVRIDV

SEQ ID NO: 743908 - protein, 215 aa, Homo sapiens; identical to SEQ ID NO: 743900

SEQ ID NO: 743909 - protein, 130 aa, Homo sapiens
MRRFLSTWSWPVSRRPLGRRCGLRPLWPAADVSMAPTEGRSRCSSCCWIELREAGAALTLPRRPFLHCSTVIPVVVLTLKFTMHLFKLKDSWCFLPWMLFISWTSHHIRDGIRHGTRQMMSSKHGVRIDV

SEQ ID NO: 743910 - protein, 215 aa, Homo sapiens; identical to SEQ ID NO: 743900

SEQ ID NO: 743911 - protein, 113 aa, Homo sapiens
KTCIGSSFTFRHDCEATPAMWNSPTALRSTCSPFPWGRPLYWAVWNKTPWTGRLTQQKFISCCSRGWEAQGAGCIFILRPLLMCRQLPSDLCSHWREGVSFGVSSCKDTNPIH

SEQ ID NO: 743912 - protein, 380 aa, Homo sapiens
MCPMLLKNGYNGNATPVTTTAPWASLGLSAKTCNNVSFEESRIVLVVVYSAVCTLGVPANCLTAWLALLQVLQGNVLAVYLLCLALCELLYTGTLPLWVIYIRNQHRWTLGLLACKVTAYIFFCNIYVSILFLCCISCDRFVAVVYALESRGRRRRRTAILISACIFILVGIVHYPVFQTEDKETCFDMLQMDSRIAGYYYARFTVGFAIPLSIIAFTNHRIFRSIKQSMGLSAAQKAKVKHSAIAVVVIFLVCFAPYHLVLLVKAAAFSYYRGDRNAMCGLEERLYTASVVFLCLSTVNGVADPIIYVLATDHSRQEVSRIHKGWKEWSMKTDVTRLTHSRDTEELQSPVALADHYTFSRPVHPPGSPCPAKRLIEESC

SEQ ID NO: 743913 - protein, 355 aa, Homo sapiens
MGLSAKTCNNVSFEESRIVLVVVYSAVCTLGVPANCLTAWLALLQVLQGNVLAVYLLCLALCELLYTGTLPLWVIYIRNQHRWTLGLLACKVTAYIFFCNIYVSILFLCCISCDRFVAVVYALESRGRRRRRTAILISACIFILVGIVHYPVFQTEDKETCFDMLQMDSRIAGYYYARFTVGFAIPLSIIAFTNHRIFRSIKQSMGLSAAQKAKVKHSAIAVVVIFLVCFAPYHLVLLVKAAAFSYYRGDRNAMCGLEERLYTASVVFLCLSTVNGVADPIIYVLATDHSRQEVSRIHKGWKEWSMKTDVTRLTHSRDTEELQSPVALADHYTFSRPVHPPGSPCPAKRLIEESC

SEQ ID NO: 743914 - protein, 381 aa, Homo sapiens
SRLVGRNLGSNIRNATPVTTTAPWASLGLSAKTCNNVSFEESRIVLVVVYSAVCTLGVPANCLTAWLALLQVLQGNVLAVYLLCLALCELLYTGTLPLWVIYIRNQHRWTLGLLACKVTAYIFFCNIYVSILFLCCISCDRFVAVVYALESRGRRRRRTAILISACIFILVGIVHYPVFQTEDKETCFDMLQMDSRIAGYYYARFTVGFAIPLSIIAFTNHRIFRSIKQSMGLSAAQKAKVKHSAIAVVVIFLVCFAPYHLVLLVKAAAFSYYRGDRNAMCGLEERLYTASVVFLCLSTVNGVADPIIYVLATDHSRQEVSRIHKGWKEWSMKTDVTRLTHSRDTEELQSPVALADHYTFSRPVHPPGSPCPAKRLIEESC

SEQ ID NO: 743915 - protein, 47 aa, Homo sapiens
STCYAPTGETVLSLSMMLQCFHASRDTKVIQPTALTPAALEEPTKEQ

SEQ ID NO: 743916 - protein, 99 aa, Homo sapiens
TKYRWTEYGLTFTEKWNTDNTLGTKITVEDQLARGLKLTFDSSFSPNTGKKNAKIKTDEFQLHTNVNDGTEFGGSIYQKVNKKLETTVNLAWTAGNSNT

SEQ ID NO: 743917 - protein, 133 aa, Homo sapiens
MTACPRPAGAMHKTGRPHLCRELVSEGVDSCFLPQEKLKPEYLQALPEMLKLYSQFLGKQPWFLGDKITFVDFIAYDVLERNQVFEPSCLDAFPNLKDFISRFEGLEKISAYMKSSRFLPRPVFTKMAVWGNK

SEQ ID NO: 743918 - protein, 133 aa, Homo sapiens; identical to SEQ ID NO: 743917

SEQ ID NO: 743919 - protein, 107 aa, Homo sapiens
ARLVATGRHLYLPRQQPPPSSSADLIILSTNDQTEINATCPRHTALQGRAGAEPRALSMEGALWVVSSLAVSIRKIQIEKKKQSPSCSEVNFKCPFCDVPVAGESWR

SEQ ID NO: 743920 - protein, 116 aa, Homo sapiens
APQRSAWSPAGTTGAGAAAAGAAPGQQWPRHGADGCRPPDRAAARSQRKTKATSLDPALEGCLETSQLASVVADKEAQAQSADMTYQRSQSKLPVKPGLEPRPMTPKPVDSMDLLK

SEQ ID NO: 743921 - protein, 110 aa, Homo sapiens
MLRKADSQQKIRDQLPSWIDQERSWAVATLKIALPSLYQTLCFEDAALWRTYYNNSMCEQEFPSILAKKVSLFQQILVVQALRPDRLQSAMALFACKTLGKCDAFQELDH

SEQ ID NO: 743922 - protein, 708 aa, Homo sapiens
MLRKADSQQKIRDQLPSWIDQERSWAVATLKIALPSLYQTLCFEDAALWRTYYNNSMCEQEFPSILAKKVSLFQQILVVQALRPDRLQSAMALFACKTLGLKEVSPLPLNLKRLYKETLEIEPILIIISPGADPSQELQELANAERSGECYHQVAMGQGQADLAIQMLKECARNGDWLCLKNLHLVVSWLPVLEKELNTLQPKDTFRLWLTAEVHPNFTPILLQSSLKITYESPPGLKKNLMRTYESWTPEQISKKDNTHRAHALFSLAWFHAACQERRNYIPQGWTKFYEFSLSDLRAGYNIIDRLFDGAKDVQWEFVHGLLENAIYGGRIDNYFDLRVLQSYLKQFFNSSVIDVFNQRNKKSIFPYSVSLPQSCSILDYRAVIEKIPEDDKPSFFGLPANIARSSQRMISSQVISQLRILGRSITAGSKFDREIWSNELSPVLNLWKKLNQNSNLIHQKVPPPNDRQGSPILSFIILEQFNAIRLVQSVHQSLAALSKVIRGTTLLSSEVQKLASALLNQKCPLAWQSKWEGPEDPLQYLRGLVARALAIQNWVDKAEKQALLSETLDLSELFHPDTFLNALRQETARAVGRSVDSLKFVASWKGRLQEAKLQIKISGLLLEGCSFDGNQLSENQLDSPSVSSVLPCFMGWIPQDACGPYSPDECISLPVYTSAERDRVVTNIDVPCGGNQDQWIQCGAALFLKNQ

SEQ ID NO: 743923 - protein, 708 aa, Homo sapiens; identical to SEQ ID NO: 743922

SEQ ID NO: 743924 - protein, 638 aa, Homo sapiens
MLRKADSQQKIRDQLPSWIDQERSWAVATLKIALPSLYQTLCFEDAALWRTYYNNSMCEQEFPSILAKKVSLFQQILVVQALRPDRLQSAMALFACKTLGLKEVSPLPLNLKRLYKETLEIEPILIIISPGADPSQELQELANAERSGECYHQVAMGQGQADLAIQMLKECARNGDWLCLKNLHLVVSWLPVLEKELNTLQPKDTFRLWLTAEVHPNFTPILLQSSLKITYESPPGLKKNLMRTYESWTPEQISKKDNTHRAHALFSLAWFHAACQERRNYIPQGWTKFYEFSLSDLRAGYNIIDRLFDGAKDVQWEFVHGLLENAIYGGRIDNYFDLRVLQSYLKQFFNSSVIDVFNQRNKKSIFPYSVSLPQSCSILDYRAVIEKIPEDDKPSFFGLPANIARSSQRMISSQVISQLRILGRSITAGSKFDREIWSNELSPVLNLWKKLNQCPLAWQSKWEGPEDPLQYLRGLVARALAIQNWVDKAEKQALLSETLDLSELFHPDTFLNALRQETARAVGRSVDSLKFVASWKGRLQEAKLQIKISGLLLEGCSFDGNQLSENQLDSPSVSSVLPCFMGWIPQDACGPYSPDECISLPVYTSAERDRVVTNIDVPCGGNQDQWIQCGAALFLKNQ

SEQ ID NO: 743925 - protein, 708 aa, Homo sapiens; identical to SEQ ID NO: 743922

SEQ ID NO: 743926 - protein, 153 aa, Homo sapiens
MLRKADSQQKIRDQLPSWIDQERSWAVATLKIALPSLYQTLCFEDAALWRTYYNNSMCEQEFPSILAKKVSLFQQILVVQALRPDRLQSAMALFACKTLGLKEVSPLPLNLKRLYKETLEIEPRPVDSVWSSSIPKKSVESNDNKSHLHKREH

SEQ ID NO: 743927 - protein, 131 aa, Homo sapiens
MQSGRFHITKIPIPEKQMSIALGMECDPCGQLTNDLKSLTNLPTLSLNLIINAGISSALVASQDQKAVTPLDPVFTILCVSFISQPADLPGNKERALLHCKLLARSRNIVPATWDAEASVEGELPQIINQK

SEQ ID NO: 743928 - protein, 305 aa, Homo sapiens
MLSRSAFCSLDFLLLLLLLLLLPPLPLPLPPPPPLLPLLLPPPPPPPRPPGGTLAPPWRWALEQPSAAFAPPPPAPGEARGSATPARSTSSQRPSLSSSGLCSPPLLSATEPRLALSPYLRQRAAPAGRLLRLGSPPTPAEPTSSPGTPTPPPPPPPLPALPPPPPPGGGNSSPAPSGSAGSKQPRGDEEEDAGRSRGGGARDRSMPGGVERKAASKRLEVEALRLLCRKRSSSPAAAAPRCIPRSMVPRRRAARAAAPAAAAAASAPESGGPTDARELGSGAGARVGPGAAGSPLPFFLFLFRL

SEQ ID NO: 743929 - protein, 391 aa, Homo sapiens
MSREPTPPLPGDMSTGPIAESWCYTQVKVVKFSYMWTINNFSFCREEMGEVLKSSTFSSGPSDKMKWCLRVNPKGLDDESKDYLSLYLLLVSCPKSEVRAKFKFSLLNAKREETKAMESQRAYRFVQGKDWGFKKFIRRDFLLDEANGLLPDDKLTLFCEVSVVQDSVNISGHTNTNTLKVPECRLAEDLGNLWENTRFTDCSFFVRGQEFKAHKSVLAARSPVFNAMFEHEMEESKKNRVEINDLDPEVFKEMMRFIYTGRAPNLDKMADNLLAAADKYALERLKVMCEEALCSNLSVENVADTLVLADLHSAEQLKAQAIDFINRCSVLRQLGCKDGKNWNSNQATDIMESERDRQHFDKEVMKAYIEDLKERESVPSYTTKVSFSLQL

SEQ ID NO: 743930 - protein, 78 aa, Homo sapiens
IGKEGGSGRRDAVRRRRPPQGLAAITPAATTAASGSQGGHGHRLSGRGVSTRTDRCRPARPGKVLNCVGYYINPERLQ

SEQ ID NO: 743931 - protein, 78 aa, Homo sapiens; identical to SEQ ID NO: 743930

SEQ ID NO: 743932 - protein, 392 aa, Homo sapiens
MSREPTPPLPGDMSTGPIAESWCYTQVKVVKFSYMWTINNFSFCREEMGEVLKSSTFSSGPSDKMKWCLRVNPKGLDDESKDYLSLYLLLVSCPKSEVRAKFKFSLLNAKREETKAMESQRAYRFVQGKDWGFKKFIRRDFLLDEANGLLPDDKLTLFCEVSVVQDSVNISGHTNTNTLKVPECRLAEDLGNLWENTRFTDCSFFVRGQEFKAHKSVLAARSPVFNAMFEHEMEESKKNRVEINDLDPEVFKEMMRFIYTGRAPNLDKMADNLLAAADKYALERLKVMCEEALCSNLSVENVADTLVLADLHSAEQLKAQAIDFINRCSVLRQLGCKDGKNWNSNQATDIMETSGWKSMIQSHPHLVAEAFRALASAQCPQFGIPRKRLKQS

SEQ ID NO: 743933 - protein, 392 aa, Homo sapiens; identical to SEQ ID NO: 743932

SEQ ID NO: 743934 - protein, 105 aa, Homo sapiens
MCEEALCSNLSVENVADTLVLADLHSAEQLKAQAIDFINRCSVLRQLGCKDGKNWNSNQATDIMETSGWKSMIQSHPHLVAEAFRALASAQCPQFGIPRKRLKQS

SEQ ID NO: 743935 - protein, 392 aa, Homo sapiens; identical to SEQ ID NO: 743932

SEQ ID NO: 743936 - protein, 290 aa, Homo sapiens
ISEGNCPERIVTITAPTDAIFKGFAMIAYKFEEDIINSMSNSPATSKPPVTLRLVVPASQCGSLIGKGGSKIKEIRESTGAQVQVAGDMLPNSTERAVTISGTPDAIIQCVKQICVVMLESPPKGATIPYRPKPASTPVIFAGGQAYTIQDKYAIPHPDLTKLHQLAMQQTPFPPLGQTNPAFPGEKLPLHSSEEAQNLMGQSSGLDASPPASTHELTIPNDLIGCIIGRQGTKINEIRQMSGAQIKIANATEGSSERQITITGTPANISLAQYLINARLTSEVTGMGTL

SEQ ID NO: 743937 - protein, 290 aa, Homo sapiens; identical to SEQ ID NO: 743936

SEQ ID NO: 743938 - protein, 264 aa, Homo sapiens
MRTLWMALCALSRLWPGAQAGCAEAGRCCPGRDPACFARGWRLDRVYGTCFCDQACRFTGDCCFDYDRACPARPCFVGEWSPWSGCADQCKPTTRVRRRSVQQEPQNGGAPCPPLEERAGCLEYSTPQGQDCGHTYVPAFITTSAFNKERTRQATSPHWSTHTEDAGYCMEFKTESLTPHCALENWPLTRWMQYLREGYTVCVDCQPPAMNSVSLRCSGDGLDSDGNQTLHWQAIGNPRCQGTWKKVRRVDQCSCPAVHSFIFI

SEQ ID NO: 743939 - protein, 264 aa, Homo sapiens; identical to SEQ ID NO: 743938

SEQ ID NO: 743940 - protein, 103 aa, Homo sapiens
PPDHASNPACPHMVACHPRLHYTFKASHCLQYAISSRGLEGCHDQTPSPAPWTFYQPQGCHASLAFLFSFSVHLRPLVQTHNLGLANHSISFPDCSVGSKMDV

SEQ ID NO: 743941 - protein, 119 aa, Homo sapiens
TRPTPDSSVQRVRARAGGCLPGEGRGCPRGLHCFWKDHKEKPPPRRDATRGPLRSRSRPAGGRMSPRVARVFGCPQVTPHRSQPPRLVKGRRTHFCKEGAQRPLPGELFPSTRGLIIYI

SEQ ID NO: 743942 - protein, 87 aa, Homo sapiens
QIWLEQIQKTSYLPQADDVPTDHISHVRSSATVEHVCAEETGTTTGMSCGRTGAPCGPSAQNSGGPTMCGSSVRLKVSARPSSHIVR

SEQ ID NO: 743943 - protein, 110 aa, Homo sapiens
SHFYSRNTLFPNIFVFWKSRFSYLGNLLYFILVLYSMSFSLGELQVELLCWLRLHLVELKVTLGHTSQVLHHRPQNYLYKTECKCRHSSTKLFLAIKSVPLVLQILPPTL

SEQ ID NO: 743944 - protein, 60 aa, Homo sapiens
ARVAATSEASVSPGSGNVTEYQSFEPPPDPSKVASLSGICVLGTYPLLHTLSSISSASSA

SEQ ID NO: 743945 - protein, 375 aa, Homo sapiens [sequence omitted]

SEQ ID NO: 743946 - protein, 297 aa, Homo sapiens
  misc_feature (14)..(14): Xaa can be any naturally occurring amino acid
  misc_feature (17)..(17): Xaa can be any naturally occurring amino acid
AGYRHLLNLFIFDXTHXLTPTSPVGHFAKWSGSPCSRNREEADMWTTFRPRSSSNASSVSTRLSPLRPESEVLAEEIPASVSSYAGGVPPTLNEGLELLDGLNLTSSHSLLSRSGLSGFSLQHPGVTGPLHTYSSSLFSPAEGPLSAGEGCFSSSQALEALLTSDTPPPPADVLMTQVDPILSQAPTLLLLGGLPSSSKLATGVGLCPKPLEAPGPSSLVPTLSMIAPPPVMASAPIPKALGTPVLTPPTEAASQDRMPQDLDLDMYMENLECDMDNIISDLMDEGEGLDFNFEPDP

SEQ ID NO: 743947 - protein, 501 aa, Homo sapiens
MRIQPQKAAAIIDLDPDFEPQSRPRSCTWPLPRPEIANQPSEPPEVEPDLGEKVHTEGRSEPILLPSRLPEPAGGPQPGILGAVTGPRKGGSRRNAWGNQSYAELISQAIESAPEKRLTLAQIYEWMVRTVPYFKDKGDSNSSAGWKNSIRHNLSLHSKFIKVHNEATGKSSWWMLNPEGGKSGKAPRRRAASMDSSSKLLRGRSKAPKKKPSVLPAPPEGATPTSPVGHFAKWSGSPCSRNREEADMWTTFRPRSSSNASSVSTRLSPLRPESEVLAEEIPASVSSYAGGVPPTLNEGLELLDGLNLTSSHSLLSRSGLSGFSLQHPGVTGPLHTYSSSLFSPAEGPLSAGEGCFSSSQALEALLTSDTPPPPADVLMTQVDPILSQAPTLLLLGGLPSSSKLATGVGLCPKPLEAPGPSSLVPTLSMIAPPPVMASAPIPKALGTPVLTPPTEAASQDRMPQDLDLDMYMENLECDMDNIISDLMDEGEGLDFNFEPDP

SEQ ID NO: 743948 - protein, 501 aa, Homo sapiens; identical to SEQ ID NO: 743947

SEQ ID NO: 743949 - protein, 66 aa, Homo sapiens
LAPAPEERMRQLEHQSPLRRACFHKMERITNNNSSPETASLLQNSTPKPRRTPRYTLSHHYHFLGL

SEQ ID NO: 743950 - protein, 100 aa, Homo sapiens
MAPFVRNLVEKTPALVNAAVTYLKPRLAAFWYYTTVELVPPTPAEIPRAIQSLKKIVSSAQTGSFKQLTVKEALLNGLVATEVSTWFYVREITGKRGIIG

SEQ ID NO: 743951 - protein, 170 aa, Homo sapiens
MAATAREDGASGQERGQRGCEHYDRGCLLKAPCCDKLYTCRLCHDNNEDHQLDRFKVKEVQCINCEKIQHAQQTCEECSTLFGEYYCDICHLFDKDKKQYHCENCGICRIGPKEDFFHCLKCNLCLAMNLQGRHKCIENVSRQNCPICLEDIHTSRVVAHVLPCGHLLHR

SEQ ID NO: 743952 - protein, 261 aa, Homo sapiens
MAATAREDGASGQERGQRGCEHYDRGCLLKAPCCDKLYTCRLCHDNNEDHQLDRFKVKEVQCINCEKIQHAQQTCEECSTLFGEYYCDICHLFDKDKKQYHCENCGICRIGPKEDFFHCLKCNLCLAMNLQGRHKCIENVSRQNCPICLEDIHTSRVVAHVLPCGHLLHRTCYEEMLKEGYRCPLCMHSALDMTRYWRQLDDEVAQTPMPSEYQNMTVDILCNDCNGRSTVQFHILGMKCKICESYNTAQAGGRRISLDQQ

SEQ ID NO: 743953 - protein, 261 aa, Homo sapiens; identical to SEQ ID NO: 743952

SEQ ID NO: 743954 - protein, 275 aa, Homo sapiens
MAATAREDGASGQERGQRGCEHYDRGCLLKVTPSMDSSLTSFRQAPCCDKLYTCRLCHDNNEDHQLDRFKVKEVQCINCEKIQHAQQTCEECSTLFGEYYCDICHLFDKDKKQYHCENCGICRIGPKEDFFHCLKCNLCLAMNLQGRHKCIENVSRQNCPICLEDIHTSRVVAHVLPCGHLLHRTCYEEMLKEGYRCPLCMHSALDMTRYWRQLDDEVAQTPMPSEYQNMTVDILCNDCNGRSTVQFHILGMKCKICESYNTAQAGGRRISLDQQ

SEQ ID NO: 743955 - protein, 239 aa, Homo sapiens
MAPAVKSEAPCCDKLYTCRLCHDNNEDHQLDRFKVKEVQCINCEKIQHAQQTCEECSTLFGEYYCDICHLFDKDKKQYHCENCGICRIGPKEDFFHCLKCNLCLAMNLQGRHKCIENVSRQNCPICLEDIHTSRVVAHVLPCGHLLHRTCYEEMLKEGYRCPLCMHSALDMTRYWRQLDDEVAQTPMPSEYQNMTVDILCNDCNGRSTVQFHILGMKCKICESYNTAQAGGRRISLDQQ

SEQ ID NO: 743956 - protein, 261 aa, Homo sapiens; identical to SEQ ID NO: 743952

SEQ ID NO: 743957 - protein, 252 aa, Homo sapiens
MAATAREDGASGQERGQRGCEHYDRGCLLKAPCCDKLYTCRLCHDNNEDHQLDRFKVKEVQCINCEKIQHAQQTCEECSTLFGEYYCDICHLFDKDKKQYHCENCGICRIGPKEDFFHCLKCNLCLAMNLQGRHKCIENVSRQNCPICLEDIHTSRVVAHVLPCGHLLHRGYRCPLCMHSALDMTRYWRQLDDEVAQTPMPSEYQNMTVDILCNDCNGRSTVQFHILGMKCKICESYNTAQAGGRRISLDQQ

SEQ ID NO: 743958 - protein, 252 aa, Homo sapiens; identical to SEQ ID NO: 743957

SEQ ID NO: 743959 - protein, 230 aa, Homo sapiens
MAPAVKSEAPCCDKLYTCRLCHDNNEDHQLDRFKVKEVQCINCEKIQHAQQTCEECSTLFGEYYCDICHLFDKDKKQYHCENCGICRIGPKEDFFHCLKCNLCLAMNLQGRHKCIENVSRQNCPICLEDIHTSRVVAHVLPCGHLLHRGYRCPLCMHSALDMTRYWRQLDDEVAQTPMPSEYQNMTVDILCNDCNGRSTVQFHILGMKCKICESYNTAQAGGRRISLDQQ

SEQ ID NO: 743960 - protein, 619 aa, Homo sapiens
MTGEQMAAFHPSSTPNPLERPIKMGWLKKQRSIVKNWQQRYFVLRAQQLYYYKDEEDTKPQGCMYLPGCTIKEIATNPEEAGKFVFEIIPASWDQNRMGQDSYVLMASSQAEMEEWVKFLRRVAGTPCGVFGQRLDETVAYEQKFGPHLVPILVEKCAEFILEHGRNEEGIFRLPGQDNLVKQLRDAFDAGERPSFDRDTDVHTVASLLKLYLRDLPEPVVPWSQYEGFLLCGQLTNADEAKAQQELMKQLSILPRDNYSLLSYICRFLHEIQLNCAVNKMSVDNLATVIGVNLIRSKVEDPAVIMRGTPQIQRVMTMMIRDHEVLFPKSKDIPLSPPAQKNDPKKAPVARSSVGWDATEDLRISRTDSFSSMTSDSDTTSPTGQQPSDAFPEDSSKVPREKPGDWKMQSRKRTQTLPNRKCFLTSAFQGANSSKMEIFKNEFWSPSSEAKAGEGHRRTMSQDLRQLSDSQRTSTYDNVPSLPGSPGEEASALSSQACDSKGDTLASPNSETGPGKKNSGEEEIDSLQRMVQELRKEIETQKQMYEEQIKNLEKENYDVWAKVVRLNEELEKEKKKSAALEISLRNMERSREDVEKRNKALEEEVKEFVKSMKEPKTEA

SEQ ID NO: 743961 - protein, 619 aa, Homo sapiens; identical to SEQ ID NO: 743960

SEQ ID NO: 743962 - protein, 645 aa, Homo sapiens
MSLKLPKERDFNLKVEAAKIARSRSVMTGEQMAAFHPSSTPNPLERPIKMGWLKKQRSIVKNWQQRYFVLRAQQLYYYKDEEDTKPQGCMYLPGCTIKEIATNPEEAGKFVFEIIPASWDQNRMGQDSYVLMASSQAEMEEWVKFLRRVAGTPCGVFGQRLDETVAYEQKFGPHLVPILVEKCAEFILEHGRNEEGIFRLPGQDNLVKQLRDAFDAGERPSFDRDTDVHTVASLLKLYLRDLPEPVVPWSQYEGFLLCGQLTNADEAKAQQELMKQLSILPRDNYSLLSYICRFLHEIQLNCAVNKMSVDNLATVIGVNLIRSKVEDPAVIMRGTPQIQRVMTMMIRDHEVLFPKSKDIPLSPPAQKNDPKKAPVARSSVGWDATEDLRISRTDSFSSMTSDSDTTSPTGQQPSDAFPEDSSKVPREKPGDWKMQSRKRTQTLPNRKCFLTSAFQGANSSKMEIFKNEFWSPSSEAKAGEGHRRTMSQDLRQLSDSQRTSTYDNVPSLPGSPGEEASALSSQACDSKGDTLASPNSETGPGKKNSGEEEIDSLQRMVQELRKEIETQKQMYEEQIKNLEKENYDVWAKVVRLNEELEKEKKKSAALEISLRNMERSREDVEKRNKALEEEVKEFVKSMKEPKTEA

SEQ ID NO: 743963 - protein, 606 aa, Homo sapiens
MSLKLPKERDFNLKVEAAKIARSRSVMTGEQMAAFHPSSTPNPLERPIKMGWLKKQRSIVKNWQQRYFVLRAQQLYYYKDEEDTKPQGCMYLPGCTIKEIATNPEEAGKFVFEIIPVFGQRLDETVAYEQKFGPHLVPILVEKCAEFILEHGRNEEGIFRLPGQDNLVKQLRDAFDAGERPSFDRDTDVHTVASLLKLYLRDLPEPVVPWSQYEGFLLCGQLTNADEAKAQQELMKQLSILPRDNYSLLSYICRFLHEIQLNCAVNKMSVDNLATVIGVNLIRSKVEDPAVIMRGTPQIQRVMTMMIRDHEVLFPKSKDIPLSPPAQKNDPKKAPVARSSVGWDATEDLRISRTDSFSSMTSDSDTTSPTGQQPSDAFPEDSSKVPREKPGDWKMQSRKRTQTLPNRKCFLTSAFQGANSSKMEIFKNEFWSPSSEAKAGEGHRRTMSQDLRQLSDSQRTSTYDNVPSLPGSPGEEASALSSQACDSKGDTLASPNSETGPGKKNSGEEEIDSLQRMVQELRKEIETQKQMYEEQIKNLEKENYDVWAKVVRLNEELEKEKKKSAALEISLRNMERSREDVEKRNKALEEEVKEFVKSMKEPKTEA

SEQ ID NO: 743964 - protein, 692 aa, Homo sapiens
PCSLTRSSPASEHSMAVKVQTTKRGDPHELRNIFLQYASTEVDGERYMTPEDFVQRYLGLYNDPNSNPKIVQLLAGVADQTKDGLISYQEFLAFESVLCAPDSMFIVAFQLFDKSGNGEVTFENVKEIFGQTIIHHHIPFNWDCEFIRLHFGHNRKKHLNYTEFTQFLQELQLEHARQAFALKDKSKSGMISGLDFSDIMVTIRSHMLTPFVEENLVSAAGGSISHQVSFSYFNAFNSLLNNMELVRKIYSTLAGTRKDVEVTKEEFAQSAIRYGQVTPLEIDILYQLADLYNASGRLTLADIERIAPLAEGALPYNLAELQRQQSPGLGRPIWLQIAESAYRFTLGSVAGAVGATAVYPIDLVKTRMQNQRGSGSVVGELMYKNSFDCFKKVLRYEGFFGLYRGLIPQLIGVAPEKAIKLTVNDFVRDKFTRRDGSVPLPAEVLAGGCAGGSQVIFTNPLEIVKIRLQVAGEITTGPRVSALNVLRDLGIFGLYKGAKACFLRDIPFSAIYFPVYAHCKLLLADENGHVGGLNLLAAGAMAGVPAASLVTPADVIKTRLQVAARAGQTTYSGVIDCFRKILREEGPSAFWKGTAARVFRSSPQFGVTLVTYELLQRWFYIDFGGLKPAGSEPTPKSRIADLPPANPDHIGGYRLATATFAGIENKFGLYLPKFKSPSVAVVQPKAAVAATQ

SEQ ID NO: 743965 - protein, 692 aa, Homo sapiens; identical to SEQ ID NO: 743964

SEQ ID NO: 743966 - protein, 655 aa, Homo sapiens
PCSLTRSSPASEHSMAVKVQTTKRGDPHELRNIFLQYASTEVDGERYMTPEDFVQRYLGLYNDPNSNPKIVQLLAGVADQTKDGLISYQEFLAFESVLCAPDSMFIVAFQLFDKSGNGEVTFENVKEIFGQTIIHHHIPFNWDCEFIRLHFGHNRKKHLNYTEFTQFLQELQLEHARQAFALKDKSKSGMISGLDFSDIMVTIRSHMLTPFVEENLVSAAGGSISHQEEFAQSAIRYGQVTPLEIDILYQLADLYNASGRLTLADIERIAPLAEGALPYNLAELQRQQSPGLGRPIWLQIAESAYRFTLGSVAGAVGATAVYPIDLVKTRMQNQRGSGSVVGELMYKNSFDCFKKVLRYEGFFGLYRGLIPQLIGVAPEKAIKLTVNDFVRDKFTRRDGSVPLPAEVLAGGCAGGSQVIFTNPLEIVKIRLQVAGEITTGPRVSALNVLRDLGIFGLYKGAKACFLRDIPFSAIYFPVYAHCKLLLADENGHVGGLNLLAAGAMAGVPAASLVTPADVIKTRLQVAARAGQTTYSGVIDCFRKILREEGPSAFWKGTAARVFRSSPQFGVTLVTYELLQRWFYIDFGGLKPAGSEPTPKSRIADLPPANPDHIGGYRLATATFAGIENKFGLYLPKFKSPSVAVVQPKAAVAATQ

SEQ ID NO: 743967 - protein, 503 aa, Homo sapiens [sequence omitted]

SEQ ID NO: 743968 - protein, 488 aa, Homo sapiens
KLGTRPRAKENLVSAAGGSISHQVSFSYFNAFNSLLNNMELVRKIYSTLAGTRKDVEVTKEEFAQSAIRYGQVTPLEIDILYQLADLYNASGRLTLADIERIAPLAEGALPYNLAELQRQQSPGLGRPIWLQIAESAYRFTLGSVAGAVGATAVYPIDLVKTRMQNQRGSGSVVGELMYKNSFDCFKKVLRYEGFFGLYRGLIPQLIGVAPEKAIKLTVNDFVRDKFTRRDGSVPLPAEVLAGGCAGGSQVIFTNPLEIVKIRLQVAGEITTGPRVSALNVLRDLGIFGLYKGAKACFLRDIPFSAIYFPVYAHCKLLLADENGHVGGLNLLAAGAMAGVPAASLVTPADVIKTRLQVAARAGQTTYSGVIDCFRKILREEGPSAFWKGTAARVFRSSPQFGVTLVTYELLQRWFYIDFGGLKPAGSEPTPKSRIADLPPANPDHIGGYRLATATFAGIENKFGLYLPKFKSPSVAVVQPKAAVAATQ

SEQ ID NO: 743969 - protein, 692 aa, Homo sapiens; identical to SEQ ID NO: 743964

SEQ ID NO: 743970 - protein, 290 aa, Homo sapiens
MPEEEMVGEFWLTDVVFLIRVNDFVRDKFTRRDGSVPLPAEVLAGGCAGGSQVIFTNPLEIVKIRLQVAGEITTGPRVSALNVLRDLGIFGLYKGAKACFLRDIPFSAIYFPVYAHCKLLLADENGHVGGLNLLAAGAMAGVPAASLVTPADVIKTRLQVAARAGQTTYSGVIDCFRKILREEGPSAFWKGTAARVFRSSPQFGVTLVTYELLQRWFYIDFGGLKPAGSEPTPKSRIADLPPANPDHIGGYRLATATFAGIENKFGLYLPKFKSPSVAVVQPKAAVAATQ

SEQ ID NO: 743971 - protein, 610 aa, Homo sapiens
PCSLTRSSPASEHSMAVKVQTTKRGDPHELRNIFLQYASTEVDGERYMTPEDFVQRYLGLYNDPNSNPKIVQLLAGVADQTKDGLISYQEFLAFESVLCAPDSMFIVAFQLFDKSGNGEVTFENVKEIFGQTIIHHHIPFNWDCEFIRLHFGHNRKKHLNYTEFTQFLQELQLEHARQAFALKDKSKSGMISGLDFSDIMVTIRSHMLTPFVEENLVSAAGGSISHQVSFSYFNAFNSLLNNMELVRKIYSTLAGTRKDVEVTKEEFAQSAIRYGQVTPLEIDILYQLADLYNASGRLTLADIERIAPLAEGALPYNLAELQRQQSPGLGRPIWLQIAESAYRFTLGSVAGAVGATAVYPIDLVKTRMQNQRGSGSVVGELMYKNSFDCFKKVLRYEGFFGLYRGLIPQLIGVAPEKAIKLTVNDFVRDKFTRRDGSVPLPAEVLAGGCAGGSQVIFTNPLEIVKIRLQVAGEITTGPRVSALNVLRDLGIFGLYKGAKACFLRDIPFSAIYFPVYAHCKLLLADENGHVGGLNLLAAGAMAGVPAASLVTPADVIKTRLQVAARAGQTTYSGVIDCFRKILREEGPSAFWKGTAARVFDLSQLCTGTMT

SEQ ID NO: 743972 - protein, 458 aa, Homo sapiens
PCSLTRSSPASEHSMAVKVQTTKRGDPHELRNIFLQYASTEVDGERYMTPEDFVQRYLGLYNDPNSNPKIVQLLAGVADQTKDGLISYQEFLAFESVLCAPDSMFIVAFQLFDKSGNGEVTFENVKEIFGQTIIHHHIPFNWDCEFIRLHFGHNRKKHLNYTEFTQFLQELQLEHARQAFALKDKSKSGMISGLDFSDIMVTIRSHMLTPFVEENLVSAAGGSISHQVSFSYFNAFNSLLNNMELVRKIYSTLAGTRKDVEVTKEEFAQSAIRYGQVTPLEIDILYQLADLYNASGRLTLADIERIAPLAEGALPYNLAELQRQQSPGLGRPIWLQIAESAYRFTLGSVAGAVGATAVYPIDLVKTRMQNQRGSGSVVGELMYKNSFDCFKKVLRYEGFFGLYRGLIPQLIGVAPEKAIKLTVNDFVRDKFTRRDGSVPLPAEVLAGGCVSITVRRFL

SEQ ID NO: 743973 - protein, 1047 aa, Homo sapiens
MDAEAEDKTLRTRSKGTEVPMDSLIQELSVAYDCSMAKKRTAEDQALGVPVNKRKSLLMKPRHYSPKADCQEDRSDRTEDDGPLETHGHSTAEEIMIKPMDESLLSTAQENSSRKEDRYSCYQELMVKSLMHLGKFEKNVSVQTVSENLNDSGIQSLKAESDEADECFLIHSDDGRDKIDDSQPPFCSSDDNESNSESAENGWDSGSNFSEETKPPRVPKYVLTDHKKDLLEVPEIKTEGDKFIPCENRCDSETERKDPQNALAEPLDGNAQPSFPDVEEEDSESLAVMTEEGSDLEKAKGNLSLLEQAIALQAERGCVFHNTYKELDRFLLEHLAGERRQTKVIDMGGRQIFNNKHSPRPEKRETKCPIPGCDGTGHVTGLYPHHRSLSGCPHKVRVPLEILAMHENVLKCPTPGCTGRGHVNSNRNTHRSLSGCPIAAAEKLAMSQDKNQLDSPQTGQCPDQAHRTSLVKQIEFNFPSQAITSPRATVSKEQEKFGKVPFDYASFDAQVFGKRPLIQTVQGRKTPPFPESKHFPNPVKFPNRLPSAGAHTQSPGRASSYSYGQCSEDTHIAAAAAILNLSTRCREATDILSNKPQSLHAKGAEIEVDENGTLDLSMKKNRILDKSAPLTSSNTSIPTPSSSPFKTSSILVNAAFYQALCDQEGWDTPINYSKTHGKTEEEKEKDPVSSLENLEEKKFPGEASIPSPKPKLHARDLKKELITCPTPGCDGSGHVTGNYASHRSVSGCPLADKTLKSLMAANSQELKCPTPGCDGSGHVTGNYASHRSLSGCPRARKGGVKMTPTKEEKEDPELKCPVIGCDGQGHISGKYTSHRTASGCPLAAKRQKENPLNGASLSWKLNKQELPHCPLPGCNGLGHVNNVFVTHRSLSGCPLNAQVIKKGKVSEELMTIKLKATGGIESDEEIRHLDEEIKELNESNLKIEADMMKLQTQITSMESNLKTIEEENKLIEQNNESLLKELAGLSQALISSLADIQLPQMGPISEQNFEAYVNTLTDMYSNLERDYSPECKALLESIKQAVKGIHV

SEQ ID NO: 743974 - protein, 1047 aa, Homo sapiens; identical to SEQ ID NO: 743973

SEQ ID NO: 743975 - protein, 122 aa, Homo sapiens
MLQARNQSPSSQRPLDVLRRNQDPQSPASISVIIFITPKEEPALQEGLHLQEDGLPATAEDAATCLTVLSSQPASCRASLLLKELMGRACLAHTCEHSTEKWEHSTGNLGAQYWEMGAQYLG

SEQ ID NO: 743976 - protein, 177 aa, Homo sapiens
MEEIKPASASCVSKEKPSKVSDLISRFEGGSSLSNYSDLKKESAVNLNAPRTPGRHGLTTTPQQKLLSQHLPQRQGNDTDKTQGAQTCVANGVMAAQNQMECEEEKAATLSSDTSIQASEPLLDTHIVNGERDETATAPASPTTDSCDGNASDSSYRTPGIGPVLPLEERGAETETK

SEQ ID NO: 743977 - protein, 147 aa, Homo sapiens
SIPMFSCFLCILSFSSLSNYSDLKKESAVNLNAPRTPGRHGLTTTPQQKLLSQHLPQRQGNDTDKTQGAQTCVANGVMAAQNQMECEEEKAATLSSDTSIQASEPLLDTHIVNGERDETATAPASPTTDSCDGNASDSSYRTPGIGP

SEQ ID NO: 743978 - protein, 102 aa, Homo sapiens
VSRHCVFPTFSLSPRCCRGVDKPCVYLRIMPSSQSQLLHEISMAGCGCLTVFSLDKSLREVGVVGDGYLLAWGAFSVHPCTLPHLFKGRKVWKREAHGRGGG

SEQ ID NO: 743979 - protein, 106 aa, Homo sapiens
DSNLELTSVAKSIGHFPHKVKRSSCVHCSVAWHASMLASQTGPARVALLANFTPFSEGHWEMEGKRLVLEKEKIGRPDVHPKIGLPRKWVSVSILTSSIFIYSMLT

SEQ ID NO: 743980 - protein, 366 aa, Homo sapiens
SRIRYGGRDYSLDEFEANKILHQHLGAPEERLALHILRTQGLVPEHVETRTLHSTFQPNISQGKLQMWVDVFPKSLGPPGPPFNITPRKAKKYYLRVIIWNTKDVILDEKSITGEEMSDIYVKGWIPGNEENKQKTDVHYRSLDGEGNFNWRFVFPFDYLPAEQLCIVAKKEHFWSIDQTEFRIPPRLIIQIWDNDKFSLDDYLGFLELDLRHTIIPAKSPEKCRLDMIPDLKAMNPLKAKTASLFEQKSMKGWWPCYAEKDGARVMAGKVEMTLEILNEKEADERPAGKGRDEPNMNPKLDLPNRPETSFLWFTNPCKTMKFIVWRRFKWVIIGLLFLLILLLFVAVLLYSLPNYLSMKIVKPNV

SEQ ID NO: 743981 - protein, 297 aa, Homo sapiens
SRIRYGGRDYSLDEFEANKILHQHLGAPEERLALHILRTQGLVPEHVETRTLHSTFQPNISQGKLQMWVDVFPKSLGPPGPPFNITPRKAKKYYLRVIIWNTKDVILDEKSITGEEMSDIYVKGWIPGNEENKQKTDVHYRSLDGEGNFNWRFVFPFDYLPAEQLCIVAKKEHFWSIDQTEFRIPPRLIIQIWDNDKFSLDDYLGFLELDLRHTIIPAKSPEKCRLDMIPDLKAMNPLKAKTASLFEQKSMKGWWPCYAEKDGARVMAGLSSASFSLRISNVISTSSGRELSSSRRL

SEQ ID NO: 743982 - protein, 393 aa, Homo sapiens
SALYPPLLSLPPRPFMAGSYPEGAPAVLADKRQQFGSRFLRDPARVFHHNAWDNVEWSEEQAAAAERKVQENSIQRVCQEKQVDYEINAHKYWNDFYKIHENGFFKDRHWLFTEFPELAPSQNQNHLKDWFLENKSEVPECRNNEDGPGLIMEEQHKCSSKSLEHKTQTPPVEENVTQKISDLEICADEFPGSSATYRILEVGCGVGNTVFPILQTNNDPGLFVYCCDFSSTAIELVQTNSEYDPSRCFAFVHDLCDEEKSYPVPKGSLDIIILIFVLSAIVPDKMQKAINRLSRLLKPGGMMLLRDYGRYDMAQLRFKKGQCLSGNFYVRGDGTRVYFFTQEELDTLFTTAGLEKVQNLVDRRLQVNRGKQLTMYRVWIQCKYCKPLLSSTS

SEQ ID NO: 743983 - protein, 393 aa, Homo sapiens; identical to SEQ ID NO: 743982

SEQ ID NO: 743984 - protein, 242 aa, Homo sapiens [sequence omitted]

SEQ ID NO: 743985 - protein, 330 aa, Homo sapiens
SALYPPLLSLPPRPFMAGSYPEGAPAVLADKRQQFGSRFLRDPARVFHHNAWDNVEWSEEQAAAAERKVQENSIQRVCQEKQVDYEINAHKYWNDFYKIHENGFFKDRHWLFTEFPELAPSQNQNHLKDWFLENKSEVPECRNNEDGPGLIMEEQHKCSSKSLEHKTQTPPVEENVTQKISDLEICADEFPGSSATYRILEVGCGVGNTVFPILQTNNDPGLFVYCCDFSSTAIELVQTNSEYDPSRCFAFVHDLCDEEKSYPVPKGSLDIIILIFVLSAIVPDKMQKAINRLSRLLKPGGMMLLRDYGRYDMAQLRFKKGILKVLNPNH

SEQ ID NO: 743986 - protein, 242 aa, Homo sapiens [sequence omitted]

SEQ ID NO: 743987 - protein, 396 aa, Homo sapiens
YPRRLLVVLPDMSAPFRKPAFVKDLRARFHHIVCHSCASGHAPDSRAMSSECKTFHAHAAILRVVPSTHWFLMTLQVPNTTSCNDFLMKNALDPWESSFQVKTFAPSVSDTYPESGHPQSNHRSIFSGRDWVPWKHSLREVPECRNNEDGPGLIMEEQHKCSSKSLEHKTQTPPVEENVTQKISDLEICADEFPGSSATYRILEVGCGVGNTVFPILQTNNDPGLFVYCCDFSSTAIELVQTNSEYDPSRCFAFVHDLCDEEKSYPVPKGSLDIIILIFVLSAIVPDKMQKAINRLSRLLKPGGMMLLRDYGRYDMAQLRFKKGQCLSGNFYVRGDGTRVYFFTQEELDTLFTTAGLEKVQNLVDRRLQVNRGKQLTMYRVWIQCKYCKPLLSSTS

SEQ ID NO: 743988 - protein, 108 aa, Homo sapiens
MQKAINRLSRLLKPGGMMLLRDYGRYDMAQLRFKKGQCLSGNFYVRGDGTRVYFFTQEELDTLFTTAGLEKVQNLVDRRLQVNRGKQLTMYRVWIQCKYCKPLLSSTS

SEQ ID NO: 743989 - protein, 192 aa, Homo sapiens
HLLLRSILEDPHFYKNNDPGLFVYCCDFSSTAIELVQTNSEYDPSRCFAFVHDLCDEEKSYPVPKGSLDIIILIFVLSAIVPDKMQKAINRLSRLLKPGGMMLLRDYGRYDMAQLRFKKGQCLSGNFYVRGDGTRVYFFTQEELDTLFTTAGLEKVQNLVDRRLQVNRGKQLTMYRVWIQCKYCKPLLSSTS

SEQ ID NO: 743990 - protein, 252 aa, Homo sapiens
SALYPPLLSLPPRPFMAGSYPEGAPAVLADKRQQFGSRFLRDPARVFHHNAWDNVEWSEEQAAAAERKVQENSIQRVCQEKQVDYEINAHKYWNDFYKIHENGFFKDRHWLFTEFPELAPSQNQNHLKDWFLENKSEVPECRNNEDGPGLIMEEQHKCSSKSLEHKTQTPPVEENVTQKISDLEICADEFPGSSATYRILEVGCGVGNTVFPILQTNNDPGLFVYCCDFSSTAIELVQVSTMGNYLLVISTD

SEQ ID NO: 743991 - protein, 160 aa, Homo sapiens
SALYPPLLSLPPRPFMAGSYPEGAPAVLADKRQQFGSRFLRDPARVFHHNAWMQKAINRLSRLLKPGGMMLLRDYGRYDMAQLRFKKGQCLSGNFYVRGDGTRVYFFTQEELDTLFTTAGLEKVQNLVDRRLQVNRGKQLTMYRVWIQCKYCKPLLSSTS

SEQ ID NO: 743992 - protein, 220 aa, Homo sapiens
  misc_feature (215)..(215): Xaa can be any naturally occurring amino acid
SALYPPLLSLPPRPFMAGSYPEGAPAVLADKRQQFGSRFLRDPARVFHHNAWDNVEWSEEQAAAAERKVQENSIQRVCQEKQVDYEINAHKYWNDFYKIHENGFFKDRHWLFTEFPELAPSQNQNHLKDWFLENKSEVPECRNNEDGPGLIMEEQHKCSSKSLEHKTQTPPVEENVTQKISDLEICADEFPGSSATYRILELAVCGRLPFYQNMXQALVL

SEQ ID NO: 743993 - protein, 67 aa, Homo sapiens
VRIEVRRIIRELLKSFKQKLMVAWIRLFKREGEKSLDSGYILDVKPTRFIGRLDVKIEGKKRIMKNP

SEQ ID NO: 743994 - protein, 1610 aa, Homo sapiens
MNTPKEEFQDWPIVRIAAHLPDLIVYGHFSPERPFMDYFDGVLMFVDISGFTAMTEKFSSAMYMDRGAEQLVEILNYHISAIVEKVLIFGGDILKFAGDALLALWRVERKQLKNIITVVIKCSLEIHGLFETQEWEEGLDIRVKIGLAAGHISMLVFGDETHSHFLVIGQAVDDVRLAQNMAQMNDVILSPNCWQLCDRSMIEIESVPDQRAVKVNFLKPPPNFNFDEFFTKCTTFMHYYPSGEHKNLLRLACTLKPDPELEMSLQKYVMESILKQIDNKQLQGYLSELRPVTIVFVNLMFEDQDKAEEIGPAIQDAYMHITSVLKIFQGQINKVFMFDKGCSFLCVFGFPGEKVPDELTHALECAMDIFDFCSQVHKIQTVSIGVASGIVFCGIVGHTVRHEYTVIGQKVNLAARMMMYYPGIVTCDSVTYNGSNLPAYFFKELPKKVMKGVADSGPLYQYWGRTEKVMFGMACLICNRKEDYPLLGRNKEINYFMYTMKKFLISNSSQVLMYEGLPGYGKSQILMKIEYLAQGKNHRIIAISLNKISFHQTFYTIQMFMANVLGLDTCKHYKERQTNLRNKVMTLLDEKFYCLLNDIFHVQFPISREISRMSTLKKQKQLEILFMKILKLIVKEERIIFIIDEAQFVDSTSWRFMEKLIRTLPIFIIMSLCPFVNIPCAAARAVIKNRNTTYIVVGAVQPNDISNKICLDLNVSCISKELDSYLGEGSCGIPFYCEELLKNLEHHEVLVFQQTESEEKTNRTWNNLFKYSIKLTEKLNMVTLHSDKESEEVCHLTSGVRLKNLSPPTSLKEISLIQLDSMRLSHQMLVRCAAIIGLTFTTELLFEILPCWNMKMMIKTLATLVESNIFYCFRNGKELQKALKQNDPSFEVHYRSLSLKPSEGMDHGEEEQLRELENEVIECHRIRFCNPMMQKTAYELWLKDQRKAMHLKCARFLEEDAHRCDHCRGRDFIPYHHFTVNIRLNALDMDAIKKMAMSHGFKTEEKLILSNSEIPETSAFFPENRSPEEIREKILNFFDHVLTKMKTSDEDIIPLESCQCEEILEIVILPLAHHFLALGENDKALYYFLEIASAYLIFCDNYMAYMYLNEGQKLLKTLKKDKSWSQTFESATFYSLKGEVCFNMGQIVLAKKMLRKALKLLNRIFPYNLISLFLHIHVEKNRHFHYVNRQAQESPPPGKKRLAQLYRQTVCLSLLWRIYSYSYLFHCKYYAHLAVMMQMNTALETQNCFQIIKAYLDYSLYHHLAGYKGVWFKYEVMAMEHIFNLPLKGEGIEIVAYVAETLVFNKLIMGHLDLAIELGSRALQMWALLQNPNRHYQSLCRLSRCLLLNSRYPQLIQVLGRLWELSVTQEHIFSKAFFYFVCLDILLYSGFVYRTFEECLEFIHQYENNRILKFHSGLLLGLYSSVAIWYARLQEWDNFYKFSNRAKNLLPRRTMTLTYYDGISRYMEGQVLHLQKQIKEQSENAQASGEELLKNLENLVAQNTTGPVFCPRLYHLMAYVCILMGDGQKCGLFLNTALRLSETQGNILEKCWLNMNKESWYSTSELKEDQWLQTILSLPSWEKIVAGRVNIQDLQKNKFLMRANTVDNHF

SEQ ID NO: 743995 - protein, 1609 aa, Homo sapiens
MNTPKEEFQDWPIVRIAAHLPDLIVYGHFSPERPFMDYFDGVLMFVDISGFTAMTEKFSSAMYMDRGAEQLVEILNYHISAIVEKVLIFGGDILKFAGDALLALWRVERKQLKNIITVVIKCSLEIHGLFETQEWEEGLDIRVKIGLAAGHISMLVFGDETHSHFLVIGQAVDDVRLAQNMAQMNDVILSPNCWQLCDRSMIEIESVPDQRAVKVNFLKPPPNFNFDEFFTKCTTFMHYYPSGEHKNLLRLACTLKPDPELEMSLQKYVMESILKQIDNKQLQGYLSELRPVTIVFVNLMFEDQDKAEEIGPAIQDAYMHITSVLKIFQGQINKVFMFDKGCSFLCVFGFPGEKVPDELTHALECAMDIFDFCSQVHKIQTVSIGVASGIVFCGIVGHTVRHEYTVIGQKVNLAARMMMYYPGIVTCDSVTYNGSNLPAYFFKELPKKVMKGVADSGPLYQYWGRTEKVMFGMACLICNRKEDYPLLGRNKEINYFMYTMKKFLISNSSQVLMYEGLPGYGKSQILMKIEYLAQGKNHRIIAISLNKISFHQTFYTIQMFMANVLGLDTCKHYKERQTNLRNKVMTLLDEKFYCLLNDIFHVQFPISREISRMSTLKKQKQLEILFMKILKLIVKEERIIFIIDEAQFVDSTSWRFMEKLIRTLPIFIIMSLCPFVNIPCAAARAVIKNRNTTYIVVGAVQPNDISNKICLDLNVSCISKELDSYLGEGSCGIPFYCEELLKNLEHHEVLVFQQTESEEKTNRTWNNLFKYSIKLTEKLNMVTLHSDKESEEVCHLTSGVRLKNLSPPTSLKEISLIQLDSMRLSHQMLVRCAAIIGLTFTTELLFEILPCWNMKMMIKTLATLVESNIFYCFRNGKELQKALKQNDPSFEVHYRSLSLKPSEGMDHGEEEQLRELENEVIECHRIRFCNPMMQKTAYELWLKDQRKAMHLKCARFLEEDAHRCDHCRGRDFIPYHHFTVNIRLNALDMDAIKKMAMSHGFKRCMRLGDTASPYYIFKSDLTLVCTRAKICLMMLGGEAEVMRVVQGLTSSSTSQNDPGKGSGGDSSIHLKTEDQLLTDVGMLFKAYMYLNEGQKLLKTLKKDKSWSQTFESATFYSLKGEVCFNMGQIVLAKKMLRKALKLLNRIFPYNLISLFLHIHVEKNRHFHYVNRQAQESPPPGKKRLAQLYRQTVCLSLLWRIYSYSYLFHCKYYAHLAVMMQMNTALETQNCFQIIKAYLDYSLYHHLAGYKGVWFKYEVMAMEHIFNLPLKGEGIEIVAYVAETLVFNKLIMGHLDLAIELGSRALQMWALLQNPNRHYQSLCRLSRCLLLNSRYPQLIQVLGRLWELSVTQEHIFSKAFFYFVCLDILLYSGFVYRTFEECLEFIHQYENNRILKFHSGLLLGLYSSVAIWECEAGVEQETTHFQRPRYARLQEWDNFYKFSNRAKNLLPRRTMTLTYYDGISRYMEGQVLHLQKQIKEQSENAQASGEELLKNLENLVAQNTTGPVFCPRLYHLMAYVCILMGDGQKCGLFLNTALRLSETQGNILEKCWLNMNKESWYSTSELKEDQWLQTILSLPSWEKIVAGRVNIQDLQKNKFLMRANTVDNHF

SEQ ID NO: 743996 - protein, 524 aa, Homo sapiens
MDSPEEIREKILNFFDHVLTKMKTSDEDIIPLESCQCEEILEIVILPLAHHFLALGENDKALYYFLEIASAYLIFCDNYMAYMYLNEGQKLLKTLKKDKSWSQTFESATFYSLKGEVCFNMGQIVLAKKMLRKALKLLNRIFPYNLISLFLHIHVEKNRHFHYVNRQAQESPPPGKKRLAQLYRQTVCLSLLWRIYSYSYLFHCKYYAHLAVMMQMNTALETQNCFQIIKAYLDYSLYHHLAGYKGVWFKYEVMAMEHIFNLPLKGEGIEIVAYVAETLVFNKLIMGHLDLAIELGSRALQMWALLQNPNRHYQSLCRLSRCLLLNSRYPQLIQVLGRLWELSVTQEHIFSKAFFYFVCLDILLYSGFVYRTFEECLEFIHQYENNRILKFHSGLLLGLYSSVAIWYARLQEWDNFYKFSNRAKNLLPRRTMTLTYYDGISRYMEGQVLHLQKQIKEQSENAQASGEELLKESWYSTSELKEDQWLQTILSLPSWEKIVAGRVNIQDLQKNKFLMRANTVDNHF

SEQ ID NO: 743997 - protein, 192 aa, Homo sapiens
VLMIAAFLQPIRDVQRESEGEKKSVPFWSTLLSTFKLYRDKRLCLLILLPLYSGLQQGFLSSEYTRSYVTCTLGIQFVGYVMICFSATDALCSVLYGKVSQYTGRAVLYVLGAVTHVSCMIALLLWRPRADHLAVFFVFSGLWGVADAVWQTQNNALYGVLFEKSKEAAFANYRLWEALGFVIAFGYSMFLC

SEQ ID NO: 743998 - protein, 489 aa, Homo sapiens
FPWLRELTLPNRPATVLSQTLAPSGSVVPECDSIPTPAAAQDPPDPGLDMGDLELLLPGEAEVLVRGLRSFPLREMGSEGWNQQHENLEKLNMQAILDATVSQGEPIQELLVTHGKVPTLVEELIAVEMWKQKVFPVFCRVEDFKPQNTFPIYMVVHHEASIINLLETVFFHKEVCESAEDTVLDLVDYCHRKLTLLVAQSGCGGPPEGEGSQDSNPMQELQKQAELMEFEIALKALSVLRYITDCVDSLSLSTLSRMLSTHNLPCLLVELLEHSPWSRREGGKLQQFEGSRWHTVAPSEQQKLSKLDGQVWIALYNLLLSPEAQARYCLTSFAKGRLLKLRAFLTDTLLDQLPNLAHLQSFLAHLTLTETQPPKKDLVLEQIPEIWERLERENRGKWQAIAKHQLQHVFSPSEQDLRLQARRWAETYRLDVLEAVAPERPRCAYCSAEASKRCSRCQNEWYCCRECQVKHWEKHGKTCVLAAQGDRAK

SEQ ID NO: 743999 - protein, 484 aa, Homo sapiens
FPWLRELTLPNRPATVLSQTLAPSGSVVPECDSIPTPAAAQDPPDPGLDMGDLELLLPGEAEVLVRGLRSFPLREMGSEGWNQQHENLEKLNMQAILDATVSQGEPIQELLVTHGKVPTLVEELIAVEMWKQKVFPVFCRVEDFKPQNTFPIYMVVHHEASIINLLETVFFHKEVCESAEDTVLDLVDYCHRKLTLLVAQSGCGGPPEGEGSQDSNPMQELQKQAELMEFEIALKALSVLRYITDCVDRQWSVSQPPQLAHLKRIQRLHPVCWFLSPGKLQQFEGSRWHTVAPSEQQKLSKLDGQVWIALYNLLLSPEAQARYCLTSFAKGRLLKLRAFLTDTLLDQLPNLAHLQSFLAHLTLTETQPPKKDLVLEQIPEIWERLERENRGKWQAIAKHQLQHVFSPSEQDLRLQARRWAETYRLDVLEAVAPERPRCAYCSAEASKRCSRCQNEWYCCRECQVKHWEKHGKTCVLAAQGDRAK

SEQ ID NO: 744000 - protein, 82 aa, Homo sapiens
FPWLRELTLPNRPATVLSQTLAPSGSVVPECDSIPTPAAAQDPPDPGLDMGDFLPHPVGRPSVLLQQTGPGGPGPDVGTLFL

SEQ ID NO: 744001 - protein, 489 aa, Homo sapiens; identical to SEQ ID NO: 743998

SEQ ID NO: 744002 - protein, 361 aa, Homo sapiens
MWKQKVFPVFCRVEDFKPQNTFPIYMVVHHEASIINLLETVFFHKEVCESAEDTVLDLVDYCHRKLTLLVAQSGCGGPPEGEGSQDSNPMQELQKQAELMEFEIALKALSVLRYITDCVDSLSLSTLSRMLSTHNLPCLLVELLEHSPWSRREGGKLQQFEGSRWHTVAPSEQQKLSKLDGQVWIALYNLLLSPEAQARYCLTSFAKGRLLKLRAFLTDTLLDQLPNLAHLQSFLAHLTLTETQPPKKDLVLEQIPEIWERLERENRGKWQAIAKHQLQHVFSPSEQDLRLQARRWAETYRLDVLEAVAPERPRCAYCSAEASKRCSRCQNEWYCCRECQVKHWEKHGKTCVLAAQGDRAK

SEQ ID NO: 744003 - protein, 443 aa, Homo sapiens
FPWLRELTLPNRPATVLSQTLAPSGSVVPECDSIPTPAAAQDPPDPGLDMGDLELLLPGEAEVLVRGLRSFPLREMGSEGWNQQHENLEKLNMQAILDATVSQGEPIQELLVTHGKVPTLVEELIAVEMWKQKVFPVFCRVEDFKPQNTFPIYMVVHHEASIINLLETVFFHKELQKQAELMEFEIALKALSVLRYITDCVDSLSLSTLSRMLSTHNLPCLLVELLEHSPWSRREGGKLQQFEGSRWHTVAPSEQQKLSKLDGQVWIALYNLLLSPEAQARYCLTSFAKGRLLKLRAFLTDTLLDQLPNLAHLQSFLAHLTLTETQPPKKDLVLEQIPEIWERLERENRGKWQAIAKHQLQHVFSPSEQDLRLQARRWAETYRLDVLEAVAPERPRCAYCSAEASKRCSRCQNEWYCCRECQVKHWEKHGKTCVLAAQGDRAK

SEQ ID NO: 744004 - protein, 395 aa, Homo sapiens
MWKQKVFPVFCRVEDFKPQNTFPIYMVVHHEASIINLLETVFFHKEVCESAEDTVLDLVDYCHRKLTLLVAQSGCGGPPEGEGSQDSNPMQVGVRLPRVVKSLGLGSPRPAQVRVAQREHCVTSQELQKQAELMEFEIALKALSVLRYITDCVDSLSLSTLSRMLSTHNLPCLLVELLEHSPWSRREGGKLQQFEGSRWHTVAPSEQQKLSKLDGQVWIALYNLLLSPEAQARYCLTSFAKGRLLKLRAFLTDTLLDQLPNLAHLQSFLAHLTLTETQPPKKDLVLEQIPEIWERLERENRGKWQAIAKHQLQHVFSPSEQDLRLQARRWAETYRLDVLEAVAPERPRCAYCSAEASKRCSRCQNEWYCCRECQVKHWEKHGKTCVLAAQGDRAK

SEQ ID NO: 744005 - protein, 84 aa, Homo sapiens
MCPLLRLTLLWGQQPYSLGKSCSPGSPIPRQWSVSQPPQLAHLKRIQRLHPVCWFLSPGKLQQFEGSRWHTVAPSEQQKLSKLD

SEQ ID NO: 744006 - protein, 71 aa, Homo sapiens
GRPFGRRGDLTSFFSIAHAQFPGRVRRALLEPGGSGERPAAAHSTLRGPYWACASESRWRANTNFCSLQNG

SEQ ID NO: 744007 - protein, 215 aa, Homo sapiens
NTYWPLVSDFINILSHQSVAKRFLEDHGLLVTWMNFVSFFQGMNLNKRELNEHVEFESQTYYAAFAAELEACAQPMWGLLSHCKVRETQEYTRNVVRYCLEALQDWFDAINFVDEPAPNQVTFHLPLHRYYAMFLSKAVKCQELDLDSVLPDQEMLMKLMIHPLQIQASLAEIHSNMWVRNGLQIKGQAMTYVQSHFCNSMIDPDIYLLQVSQLD

SEQ ID NO: 744008 - protein, 115 aa, Homo sapiens
MSACLFLWELRPSEAQTCCQPKCACRTRLETLVGRSHPVRRNGIRELLKEAVCPCFHRSAVLCWGTASTPGWCGLPKAWRPEQLSRPNSKDGGPSLSGSSVPGRIQISVSQRTPV

SEQ ID NO: 744009 - protein, 92 aa, Homo sapiens
QVPASACLCTWGWESHLVTPLLPLTSFPLSPRSVRFPLEPEGSPVPASLPERPSPRHPASSSGRLQDPGETRNRLGTRARDPDRLGAASKGS

SEQ ID NO: 744010 - protein, 68 aa, Homo sapiens
REALLYPLVGKVEGGVCRTRVPATRCPLPARPAQEQKEARCQPAFLKDQARAIRLPPVDACRTQECFS

SEQ ID NO: 744011 - protein, 47 aa, Homo sapiens
MRMCVSSCFAPSSPKNLLPQFHPGGTPPAWGPGGDRQANGAPGAGRA

SEQ ID NO: 744012 - protein, 97 aa, Homo sapiens
REALLYPLVGKVEGGVCRTRVPATRCPLPARPAQEQKEARCQPAFLKDQARAIRLPPVDACRTQEHYINTVGGDLDTEDSCFKKIQSSLKGCNLYAF

SEQ ID NO: 744013 - protein, 156 aa, Homo sapiens
REALLYPLVGKVEGGVCRTRVPATRCPLPARPAQEQVECKQLKKIPSQSEYHPQDNEENLSSVPTHEMLGGGEDWKRSKGRGRVSSCKKSLHLSAVPGKRAHVLEGSPVPASLPERPSPRHPASSSGRLQDPGETRNRLGTRARDPDRLGAASKGS

SEQ ID NO: 744014 - protein, 516 aa, Homo sapiens
ALPSNGLEAAASHSGLVGSDAETEEPGQRGWQHEEGAEEAVAQESDSDDMDLEATPQDPNSAAPVVFRSPGGVHWGYEETKTYLAILSETQFYEALRNCHRNSQLYGAVAERLWEYGFLRTPEQCRTKFKSLQTSYRKVKNGQAPETCPFFEEMDALVSVRVAAPPNDGQEETASCPVQGTSEAEAQKQAEEADEATEEDSDDDEEDTEIPPGAVITRAPVLFQSPRGFEAGFENEDNSKRDISEEVQLHRTLLARSERKIPRYLHQGKGNESDCRSGRQWAKTSGEKRGKLTLPEKSLSEVLSQQRPCLGERPYKYLKYSKSFGPNSLLMHQVSHQVENPYKCADCGKSFSRSARLIRHRRIHTGEKPYKCLDCGKSFRDSSNFITHRRIHTGEKPYQCGECGKCFNQSSSLIIHQRTHTGEKPYQCEECGKSFNNSSHFSAHRRIHTGERPHVCPDCGKSFSKSSDLRAHHRTHTGEKPYGCHDCGKCFSKSSALNKHGEIHAREKLLTQSAPK

SEQ ID NO: 744015 - protein, 442 aa, Homo sapiens
ALPSNGLEAAASHSGLVGSDAETEEPGQRGWQHEEGAEEAVAQESDSDDMDLEATPQDPNSAAPVVFRSPGGVHWGYEETKTYLAILSETQFYEALRNCHRNSQLYGAVAERLWEYGFLRTPEQCRTKFKSLQTSYRKVKNGQAPETCPFFEEMDALVSVRVAAPPNDGQEETASCPVQGTSEAEAQKQAEEADEATEEDSDDDEEDTEIPPGAVITRAPVLFQSPRGFEAGFENEDNSKRDISEEVQLHRTLLARSERKIPRYLHQGKGNESDCRSGRQWAKTSGEKRGKLTLPEKSLSEVLSQQRPCLGERPYKYLKYSKSFGPNSLLMHQVSHQVENPYKCADCGKSFSRSARLIRHRRIHTGEKPYKCLDCGKSFRDSSNFITHRRIHTGEKPYQCGECGKCFNQSSSLIIHQRTHTGEKPYQCEECSNCPGILKISP

SEQ ID NO: 744016 - protein, 32 aa, Homo sapiens
MEPLQLLFELPSAVPVSKALPSSVCALGAQGM

SEQ ID NO: 744017 - protein, 32 aa, Homo sapiens; identical to SEQ ID NO: 744016

SEQ ID NO: 744018 - protein, 80 aa, Homo sapiens
MAQKLVLLQSCSWEGLQVQGVLSGGVSEEGTQLGYSKQEVPSGRRHLASGKWGGGFSPPLALPIQAFPPPYPPTDPIDPR

SEQ ID NO: 744019 - protein, 66 aa, Homo sapiens
WWGVSISRLPTPKVHITQGRKPSCIIGCFATVWPLEDAIGSVLPVSGQELIFTKEFWMWANKMRLV

SEQ ID NO: 744020 - protein, 113 aa, Homo sapiens
GKDVRQASRTPLAAPERAHCKGGQQTVESPGAELDTASEGRNEVAAVPGPGHARPLFSEPSAVSARPARTLSGPSASPRRPAERRCSESPRDCCAGPAAASRTQHPTALWASC

SEQ ID NO: 744021 - protein, 423 aa, Homo sapiens
MLPWKKHKFELLAEAPPRQASKPKGYAVSLHYSALSSLARACPEGALSRVGSMFRSKRKKLHITSEDPTYTVLYLGNATTIQARGDGCTDLAVGKIWSKSEAGRQGTKMKLTVSAQGIRMVHAEERALRRPGHLYLLHRVTYCVADARLPKVFAWVYRHELKHKAVMLRCHAVLVSKPEKAQAMALLLYQTSANALAEFKRLKRRDDARHQQQELVGAHTIPLVPLRKLLLHGPCCYKPPVERSRSAPKLGSITEDLLGEQLEQELQEEEEEEQPEGCPEEEENRAAEGDPAEEEAEAQRALVVAMHFECGDLLDTLENGRGEALGGGGGSLGPGAGPPPLLLGSASDMKAELSQLISDLGELSFGNDVRTLQADLRVTRLLSGDSTGSESSIEGGGPDATSATAGDSSRQADGASADEPHSG

SEQ ID NO: 744022 - protein, 344 aa, Homo sapiens
MRVIRVGTRKSQLARIQTDSVVATLKASYPGLQFEIIAMSTTGDKILDTALSKIGEKSLFTKELEHALEKNEVDLVVHSLKDLPTVLPPGFTIGAICKRENPHDAVVFHPKFVGKTLETLPEKSVVGTSSLRRAAQLQRKFPHLEFRSIRGNLNTRLRKLDEQQEFSAIILATAGLQRMGWHNRVGQILHPEECMYAVGQGALGVEVRAKDQDILDLVGVLHDPETLLRCIAERAFLRHLEGGCSVPVAVHTAMKDGQLYLTGGVWSLDGSDSIQETMQATIHVPAQHEDGPEDDPQLVGITARNIPRGPQLAAQNLGISLANLLLSKGAKNILDVARQLNDAH

SEQ ID NO: 744023 - protein, 344 aa, Homo sapiens; identical to SEQ ID NO: 744022

SEQ ID NO: 744024 - protein, 344 aa, Homo sapiens; identical to SEQ ID NO: 744022

SEQ ID NO: 744025 - protein, 166 aa, Homo sapiens [sequence omitted]

SEQ ID NO: 744026 - protein, 344 aa, Homo sapiens; identical to SEQ ID NO: 744022

SEQ ID NO: 744027 - protein, 344 aa, Homo sapiens; identical to SEQ ID NO: 744022

SEQ ID NO: 744028 - protein, 154 aa, Homo sapiens
MRVIRVGTRKSQLARIQTDSVVATLKASYPGLQFEIIAMSTTGDKILDTALSKIGEKSLFTKELEHALEKNEVDLVVHSLKDLPTVLPPGFTIGAICKRENPHDAVVFHPKFVGKTLETLPEKSVVGTSSLRRAAQLQRKFPHLEFRSIDVTLL

SEQ ID NO: 744029 - protein, 361 aa, Homo sapiens [sequence omitted]

SEQ ID NO: 744030 - protein, 209 aa, Homo sapiens
MRVIRVGTRKSQLARIQTDSVVATLKASYPGLQFEIIAMSTTGDKILDTALSKIGEKSLFTKELEHALEKNEVDLVVHSLKDLPTVLPPGFTIGAICKRENPHDAVVFHPKFVGKTLETLPEKSVVGTSSLRRAAQLQRKFPHLEFRSIRGNLNTRLRKLDEQQEFSAIILATAGLQRMGWHNRVGQILHPEECMYAVGQVHLTREATW

SEQ ID NO: 744031 - protein, 317 aa, Homo sapiens
MRVIRVGTRKSQLARIQTDSVVATLKASYPGLQFEIIAMSTTGDKILDTALSKIGEKSLFTKELEHALEKNEVDLVVHSLKDLPTVLPPGFTIGAICKRENPHDAVVFHPKFVGKTLETLPEKSVVGTSSLRRAAQLQRKFPHLEFRSIRGNLNTRLRKLDEQQEFSAIILATAGLQRMGWHNRVGQILHPEECMYAVGQGALGVEVRAKDQDILDLVGVLHDPETLLRCIAERAFLRHLEGGCSVPVAVHTAMKDGQLYLTGGVWSLDGSDSIQETMQATIHVPAQVPKLEGEGVINKSAYNLLFSPNPTSFPHTA

SEQ ID NO: 744032 - protein, 107 aa, Homo sapiens
FFPSRSSAASGIFFFHLPSPAPTSDWRLRAKYLAEGLHFSTHLERPQRRRLCAECGADLGSGGVRAGGSPGTGVRFPSPVRCSEHPQDFPHGSCPGCLRRFPENLLV

SEQ ID NO: 744033 - protein, 107 aa, Homo sapiens; identical to SEQ ID NO: 744032

SEQ ID NO: 744034 - protein, 107 aa, Homo sapiens; identical to SEQ ID NO: 744032

SEQ ID NO: 744035 - protein, 107 aa, Homo sapiens; identical to SEQ ID NO: 744032

SEQ ID NO: 744036 - protein, 117 aa, Homo sapiens
RYLFWHCGLCQECCLHLSLLSHPSRPASMPPPPWSLLGVLHCLRLPPATSTVSTTHVICLIIHVPCVHLTELYGGPALCQTLLGWATAMTKKYRAPALRPCVLSPTHPNQEQLAPRT

SEQ ID NO: 744037 - protein, 45 aa, Homo sapiens
ERAENLPHHLFDLDHCREGQQRQGEKSKMMEEGKVIAFAPPPNQL

SEQ ID NO: 744038 - protein, 95 aa, Homo sapiens
VDPVRATQEIQTPANLGPGWGCTGGTLVSEGSLGANGQLKLPVTTIRLPHQLATRAQRTLRTMGAQCLSQGRLVKMEYLQMLLKQPLNFNWSPVM

SEQ ID NO: 744039 - protein, 137 aa, Homo sapiens
RVAKKTPTKRSTLIISGVSKVPIAQDELALSLGYAASLEASVQDDAGTSGGPSSPPSDPPAMSPGPLDALSSPTSVQEADETTRSDISERPSVDDIESETGSTGALETRSLKDHKVSFLRSGTKLIFPGGLGRRKLA

SEQ ID NO: 744040 - protein, 94 aa, Homo sapiens
  misc_feature (11)..(11): Xaa can be any naturally occurring amino acid
MVPGGAESHNXQQLFVMFAFNSSGEPFFDSAALNLFFVETQGGYLVLSEDFVGNGINRTELNQKHSQNLFVMFAFNSQVLNLSLNSAALKHSFL

SEQ ID NO: 744041 - protein, 825 aa, Homo sapiens
MDVSLCPAKCSFWRIFLLGSVWLDYVGSVLACPANCVCSKTEINCRRPDDGNLFPLLEGQDSGNSNGNASINITDISRNITSIHIENWRSLHTLNAVDMELYTGLQKLTIKNSGLRSIQPRAFAKNPHLRYINLSSNRLTTLSWQLFQTLSLRELQLEQNFFNCSCDIRWMQLWQEQGEAKLNSQNLYCINADGSQLPLFRMNISQCDLPEISVSHVNLTVREGDNAVITCNGSGSPLPDVDWIVTGLQSINTHQTNLNWTNVHAINLTLVNVTSEDNGFTLTCIAENVVGMSNASVALTVYYPPRVVSLEEPELRLEHCIEFVVRGNPPPTLHWLHNGQPLRESKIIHVEYYQEGEISEGCLLFNKPTHYNNGNYTLIAKNPLGTANQTINGHFLKEPFPESTDNFILFDEVSPTPPITVTHKPEEDTFGVSIAVGLAAFACVLLVVLFVMINKYGRRSKFGMKGPVAVISGEEDSASPLHHINHGITTPSSLDAGPDTVVIGMTRIPVIENPQYFRQGHNCHKPDTYVQHIKRRDIVLKRELGEGAFGKVFLAECYNLSPTKDKMLVAVKALKDPTLAARKDFQREAELLTNLQHEHIVKFYGVCGDGDPLIMVFEYMKHGDLNKFLRAHGPDAMILVDGQPRQAKGELGLSQMLHIASQIASGMVYLASQHFVHRDLATRNCLVGANLLVKIGDFGMSRDVYSTDYYRVGGHTMLPIRWMPPESIMYRKFTTESDVWSFGVILWEIFTYGKQPWFQLSNTEVIECITQGRVLERPRVCPKEVYDVMLGCWQREPQQRLNIKEIYKILHALGKATPIYLDILG

SEQ ID NO: 744042 - protein, 407 aa, Homo sapiens
ENNHQESYPLSVSPMENNHCPASSESHPKPSSPRQESTRVIQLMPSPIMHPLILNPRHSVDFKQSRLSEDGLHREGKPINLSHREDLAYMNHIMVSVSPPEEHAMPIGRKHVQHIKRRDIVLKRELGEGAFGKVFLAECYNLSPTKDKMLVAVKALKDPTLAARKDFQREAELLTNLQHEHIVKFYGVCGDGDPLIMVFEYMKHGDLNKFLRAHGPDAMILVDGQPRQAKGELGLSQMLHIASQIASGMVYLASQHFVHRDLATRNCLVGANLLVKIGDFGMSRDVYSTDYYRVGGHTMLPIRWMPPESIMYRKFTTESDVWSFGVILWEIFTYGKQPWFQLSNTEVIECITQGRVLERPRVCPKEVYDVMLGCWQREPQQRLNIKEIYKILHALGKATPIYLDILG

SEQ ID NO: 744043 - protein, 839 aa, Homo sapiens
MDVSLCPAKCSFWRIFLLGSVWLDYVGSVLACPANCVCSKTEINCRRPDDGNLFPLLEGQDSGNSNGNASINITDISRNITSIHIENWRSLHTLNAVDMELYTGLQKLTIKNSGLRSIQPRAFAKNPHLRYINLSSNRLTTLSWQLFQTLSLRELQLEQNFFNCSCDIRWMQLWQEQGEAKLNSQNLYCINADGSQLPLFRMNISQCDLPEISVSHVNLTVREGDNAVITCNGSGSPLPDVDWIVTGLQSINTHQTNLNWTNVHAINLTLVNVTSEDNGFTLTCIAENVVGMSNASVALTVYYPPRVVSLEEPELRLEHCIEFVVRGNPPPTLHWLHNGQPLRESKIIHVEYYQEGEISEGCLLFNKPTHYNNGNYTLIAKNPLGTANQTINGHFLKEPFPESTDNFILFDEVSPTPPITVTHKPEEDTFGVSIAVGLAAFACVLLVVLFVMINKYGRRSKFGMKGPVAVISGEEDSASPLHHINHGITTPSSLDAGPDTVVIGMTRIPVIENPQYFRQGHNCHKPDTYVQHIKRRDIVLKRELGEGAFGKVFLAECYNLSPTKDKMLVAVKALKDPTLAARKDFQREAELLTNLQHEHIVKFYGVCGDGDPLIMVFEYMKHGDLNKFLRAHGPDAMILVDGQPRQAKGELGLSQMLHIASQIASGMVYLASQHFVHRDLATRNCLVGANLLVKIGDFGMSRDVYSTDYYRLFNPSGNDFCIWCEVGGHTMLPIRWMPPESIMYRKFTTESDVWSFGVILWEIFTYGKQPWFQLSNTEVIECITQGRVLERPRVCPKEVYDVMLGCWQREPQQRLNIKEIYKILHALGKATPIYLDILG

SEQ ID NO: 744044 - protein, 612 aa, Homo sapiens
MDVSLCPAKCSFWRIFLLGSVWLDYVGSVLACPANCVCSKTEINCRRPDDGNLFPLLEGQDSGNSNGNASINITDISRNITSIHIENWRSLHTLNAVDMELYTGLQKLTIKNSGLRSIQPRAFAKNPHLRYINLSSNRLTTLSWQLFQTLSLRELQLEQNFFNCSCDIRWMQLWQEQGEAKLNSQNLYCINADGSQLPLFRMNISQCDLPEISVSHVNLTVREGDNAVITCNGSGSPLPDVDWIVTGLQSINTHQTNLNWTNVHAINLTLVNVTSEDNGFTLTCIAENVVGMSNASVALTVYYPPRVVSLEEPELRLEHCIEFVVRGNPPPTLHWLHNGQPLRESKIIHVEYYQEGEISEGCLLFNKPTHYNNGNYTLIAKNPLGTANQTINGHFLKEPFPESTDNFILFDEVSPTPPITVTHKPEEDTFGVSIAVGLAAFACVLLVVLFVMINKYGRRSKFGMKGPVAVISGEEDSASPLHHINHGITTPSSLDAGPDTVVIGMTRIPVIENPQYFRQGHNCHKPDTWVFSNIDNHGILNLKDNRDHLVPSTHYIYEEPEVQSGEVSYPRSHGFREIMLNPISLPGHSKPLNHGIYVEDVNVYFSKGRHGF

SEQ ID NO: 744045 - protein, 612 aa, Homo sapiens; identical to SEQ ID NO: 744044

SEQ ID NO: 744046 - protein, 817 aa, Homo sapiens
MDVSLCPAKCSFWRIFLLGSVWLDYVGSVLACPANCVCSKTEINCRRPDDGNLFPLLEGQDSGNSNGNASINITDISRNITSIHIENWRSLHTLNAVDMELYTGLQKLTIKNSGLRSIQPRAFAKNPHLRYINLSSNRLTTLSWQLFQTLSLRELQLEQNFFNCSCDIRWMQLWQEQGEAKLNSQNLYCINADGSQLPLFRMNISQCDLPEISVSHVNLTVREGDNAVITCNGSGSPLPDVDWIVTGLQSINTHQTNLNWTNVHAINLTLVNVTSEDNGFTLTCIAENVVGMSNASVALTVYYPPRVVSLEEPELRLEHCIEFVVRGNPPPTLHWLHNGQPLRESKIIHVEYYQEGEISEGCLLFNKPTHYNNGNYTLIAKNPLGTANQTINGHFLKEPFPVDEVSPTPPITVTHKPEEDTFGVSIAVGLAAFACVLLVVLFVMINKYGRRSKFGMKGPVAVISGEEDSASPLHHINHGITTPSSLDAGPDTVVIGMTRIPVIENPQYFRQGHNCHKPDTYVQHIKRRDIVLKRELGEGAFGKVFLAECYNLSPTKDKMLVAVKALKDPTLAARKDFQREAELLTNLQHEHIVKFYGVCGDGDPLIMVFEYMKHGDLNKFLRAHGPDAMILVDGQPRQAKGELGLSQMLHIASQIASGMVYLASQHFVHRDLATRNCLVGANLLVKIGDFGMSRDVYSTDYYRVGGHTMLPIRWMPPESIMYRKFTTESDVWSFGVILWEIFTYGKQPWFQLSNTEVIECITQGRVLERPRVCPKEVYDVMLGCWQREPQQRLNIKEIYKILHALGKATPIYLDILG

SEQ ID NO: 744047 - protein, 719 aa, Homo sapiens
MELYTGLQKLTIKNSGLRSIQPRAFAKNPHLRYINLSSNRLTTLSWQLFQTLSLRELQLEQNFFNCSCDIRWMQLWQEQGEAKLNSQNLYCINADGSQLPLFRMNISQCDLPEISVSHVNLTVREGDNAVITCNGSGSPLPDVDWIVTGLQSINTHQTNLNWTNVHAINLTLVNVTSEDNGFTLTCIAENVVGMSNASVALTVYYPPRVVSLEEPELRLEHCIEFVVRGNPPPTLHWLHNGQPLRESKIIHVEYYQEGEISEGCLLFNKPTHYNNGNYTLIAKNPLGTANQTINGHFLKEPFPVDEVSPTPPITVTHKPEEDTFGVSIAVGLAAFACVLLVVLFVMINKYGRRSKFGMKGPVAVISGEEDSASPLHHINHGITTPSSLDAGPDTVVIGMTRIPVIENPQYFRQGHNCHKPDTYVQHIKRRDIVLKRELGEGAFGKVFLAECYNLSPTKDKMLVAVKALKDPTLAARKDFQREAELLTNLQHEHIVKFYGVCGDGDPLIMVFEYMKHGDLNKFLRAHGPDAMILVDGQPRQAKGELGLSQMLHIASQIASGMVYLASQHFVHRDLATRNCLVGANLLVKIGDFGMSRDVYSTDYYRVGGHTMLPIRWMPPESIMYRKFTTESDVWSFGVILWEIFTYGKQPWFQLSNTEVIECITQGRVLERPRVCPKEVYDVMLGCWQREPQQRLNIKEIYKILHALGKATPIYLDILG

SEQ ID NO: 744048 - protein, 559 aa, Homo sapiens
MDVSLCPAKCSFWRIFLLGSVWLDYVGSVLACPANCVCSKTEINCRRPDDGNLFPLLEGQDSGNSNGNASINITDISRNITSIHIENWRSLHTLNAVDMELYTGLQKLTIKNSGLRSIQPRAFAKNPHLRYINLSSNRLTTLSWQLFQTLSLRELQLEQNFFNCSCDIRWMQLWQEQGEAKLNSQNLYCINADGSQLPLFRMNISQCDLPEISVSHVNLTVREGDNAVITCNGSGSPLPDVDWIVTGLQSINTHQTNLNWTNVHAINLTLVNVTSEDNGFTLTCIAENVVGMSNASVALTVYYPPRVVSLEEPELRLEHCIEFVVRGNPPPTLHWLHNGQPLRESKIIHVEYYQEGEISEGCLLFNKPTHYNNGNYTLIAKNPLGTANQTINGHFLKEPFPVDEVSPTPPITVTHKPEEDTFGVSIAVGLAAFACVLLVVLFVMINKYGRRSKFGMKGPVAVISGEEDSASPLHHINHGITTPSSLDAGPDTVVIGMTRIPVIENPQYFRQGHNCHKPDTCFREIMLNPISLPGHSKPLNHGIYVEDVNVYFSKGRHGF

SEQ ID NO: 744049 - protein, 594 aa, Homo sapiens
MDVSLCPAKCSFWRIFLLGSVWLDYVGSVLACPANCVCSKTEINCRRPDDGNLFPLLEGQDSGNSNGNASINITDISRNITSIHIENWRSLHTLNAVDMELYTGLQKLTIKNSGLRSIQPRAFAKNPHLRYINLSSNRLTTLSWQLFQTLSLRELQLEQNFFNCSCDIRWMQLWQEQGEAKLNSQNLYCINADGSQLPLFRMNISQCDLPEISVSHVNLTVREGDNAVITCNGSGSPLPDVDWIVTGLQSINTHQTNLNWTNVHAINLTLVNVTSEDNGFTLTCIAENVVGMSNASVALTVYYPPRVVSLEEPELRLEHCIEFVVRGNPPPTLHWLHNGQPLRESKIIHVEYYQEGEISEGCLLFNKPTHYNNGNYTLIAKNPLGTANQTINGHFLKEPFPVDEVSPTPPITVTHKPEEDTFGVSIAVGLAAFACVLLVVLFVMINKYGRRSKFGMKGPVAVISGEEDSASPLHHINHGITTPSSLDAGPDTVVIGMTRIPVIENPQYFRQGHNCHKPDTWVFSNIDNHGILNLKDNRDHLVPSTHYIYEEPEVQSGEVSYPRSHGLFQQRTSWLLKTPFKPPCFDVTLVGWAL

SEQ ID NO: 744050 - protein, 495 aa, Homo sapiens
MDVSLCPAKCSFWRIFLLGSVWLDYVGSVLACPANCVCSKTEINCRRPDDGNLFPLLEGQDSGNSNGNASINITDISRNITSIHIENWRSLHTLNAVDMELYTGLQKLTIKNSGLRSIQPRAFAKNPHLRYINLSSNRLTTLSWQLFQTLSLRELQLEQNFFNCSCDIRWMQLWQEQGEAKLNSQNLYCINADGSQLPLFRMNISQCDLPEISVSHVNLTVREGDNAVITCNGSGSPLPDVDWIVTGLQSINTHQTNLNWTNVHAINLTLVNVTSEDNGFTLTCIAENVVGMSNASVALTVYYPPRVVSLEEPELRLEHCIEFVVRGNPPPTLHWLHNGQPLRESKIIHVEYYQEGEISEGCLLFNKPTHYNNGNYTLIAKNPLGTANQTINGHFLKEPFPVDEVSPTPPITVTHKPEEDTFGVSIAVGLAAFACVLLVVLFVMINKYGRRSKFGMKDGLELLAVLLKCDSKQLKNKEGNKMKNNNGKKKRATSA

SEQ ID NO: 744051 - protein, 461 aa, Homo sapiens
MDVSLCPAKCSFWRIFLLGSVWLDYVGSVLACPANCVCSKTEINCRRPDDGNLFPLLEGQDSGNSNGNASINITDISRNITSIHIENWRSLHTLNAVDMELYTGLQKLTIKNSGLRSIQPRAFAKNPHLRYINLSSNRLTTLSWQLFQTLSLRELQLEQNFFNCSCDIRWMQLWQEQGEAKLNSQNLYCINADGSQLPLFRMNISQCDLPEISVSHVNLTVREGDNAVITCNGSGSPLPDVDWIVTGLQSINTHQTNLNWTNVHAINLTLVNVTSEDNGFTLTCIAENVVGMSNASVALTVYYPPRVVSLEEPELRLEHCIEFVVRGNPPPTLHWLHNGQPLRESKIIHVEYYQEGEISEGCLLFNKPTHYNNGNYTLIAKNPLGTANQTINGHFLKEPFPVDEVSPTPPITVTHKPEEDTFGVSIAVGLAAFACVLLVVLFVMINKYGRRSKFGMKGELS

SEQ ID NO: 744052 - protein, 324 aa, Homo sapiens
MRIPVCTHSTRREAPSPERLSSFSTATHVQHIKRRDIVLKRELGEGAFGKVFLAECYNLSPTKDKMLVAVKALKDPTLAARKDFQREAELLTNLQHEHIVKFYGVCGDGDPLIMVFEYMKHGDLNKFLRAHGPDAMILVDGQPRQAKGELGLSQMLHIASQIASGMVYLASQHFVHRDLATRNCLVGANLLVKIGDFGMSRDVYSTDYYRVGGHTMLPIRWMPPESIMYRKFTTESDVWSFGVILWEIFTYGKQPWFQLSNTEVIECITQGRVLERPRVCPKEVYDVMLGCWQREPQQRLNIKEIYKILHALGKATPIYLDILG

SEQ ID NO: 744053 - protein, 145 aa, Homo sapiens
MWETATAWASILSSDVYWGGDVKRLGFAGLPRTQAGGVRVITGQGKKCHHQPHGQSFLWVEVFACLFTHFVWLPDLPEISVSHVNLTVREGDNAVITCNGSGSPLPDVDWIVTGLQSINTHQVGILGFSPIRRLGSDHTVVLKKR

SEQ ID NO: 744054 - protein, 445 aa, Homo sapiens
MAAPTPARPVLTHLLVALFGMGSWAAVNGIWVELPVVVKELPEGWSLPSYVSVLVALGNLGLLVVTLWRRLAPGKDEQVPIRVVQVLGMVGTALLASLWHHVAPVAGQLHSVAFLALAFVLALACCASNVTFLPFLSHLPPRFLRSFFLGQGLSALLPCVLALVQGVGRLECPPAPINGTPGPPLDFLERFPASTFFWALTALLVASAAAFQGLLLLLPPPPSVPTGELGSGLQVGAPGAEEEVEESSPLQEPPSQAAGTTPGPDPKAYQLLSARSACLLGLLAATNALTNGVLPAVQSFSCLPYGRLAYHLAVVLGSAANPLACFLAMGVLCRSLAGLGGLSLLGVFCGGYLMALAVLSPCPPLVGTSAGVVLVVLSWVLCLGVFSYVKVAASSLLHGGGRPALLAAGVAIQVGSLLGAVAMFPPTSIYHVFHSRKDCADPCDS

SEQ ID NO: 744055 - protein, 445 aa, Homo sapiens; identical to SEQ ID NO: 744054

SEQ ID NO: 744056 - protein, 445 aa, Homo sapiens; identical to SEQ ID NO: 744054

SEQ ID NO: 744057 - protein, 445 aa, Homo sapiens; identical to SEQ ID NO: 744054

SEQ ID NO: 744058 - protein, 445 aa, Homo sapiens; identical to SEQ ID NO: 744054

SEQ ID NO: 744059 - protein, 445 aa, Homo sapiens; identical to SEQ ID NO: 744054

SEQ ID NO: 744060 - protein, 281 aa, Homo sapiens
MAAPTPARPVLTHLLVALFGMGSWAAVNGIWVELPVVVKELPEAAAFQGLLLLLPPPPSVPTGELGSGLQVGAPGAEEEVEESSPLQEPPSQAAGTTPGPDPKAYQLLSARSACLLGLLAATNALTNGVLPAVQSFSCLPYGRLAYHLAVVLGSAANPLACFLAMGVLCRSLAGLGGLSLLGVFCGGYLMALAVLSPCPPLVGTSAGVVLVVLSWVLCLGVFSYVKVAASSLLHGGGRPALLAAGVAIQVGSLLGAVAMFPPTSIYHVFHSRKDCADPCDS

SEQ ID NO: 744061 - protein, 111 aa, Homo sapiens
MAAPTPARPVLTHLLVALFGMGSWAAVNGIWVELPVVVKELPEGAVVGAVSWRVLLREGGSQLPAAWRGPAGIAGSRRGHPGGLSARRCCYVPPDQHLSRVPQQKGLCRPL

SEQ ID NO: 744062 - protein, 201 aa, Homo sapiens
MAAPTPARPVLTHLLVALFGMGSWAAVNGIWVELPVVVKELPEGWSLPSYVSVLVALGNLGLLVVTLWRRLAPGKDEQVPIRVVQVLGMVGTALLASLWHHVAPVAGQLHSVAFLALAFVLALACCASNVTFLPFLSHLPPRFLRSFFLGQGLSALLPCVLALVQGVGRLECPPAPINGTPGFPGWARARSRLGARDQWGL

SEQ ID NO: 744063 - protein, 36 aa, Homo sapiens
MAAPTPARPVLTHLLVALFGMGSWAAVNGIWVELPV

SEQ ID NO: 744064 - protein, 445 aa, Homo sapiens; identical to SEQ ID NO: 744054

SEQ ID NO: 744065 - protein, 445 aa, Homo sapiens; identical to SEQ ID NO: 744054

SEQ ID NO: 744066 - protein, 445 aa, Homo sapiens; identical to SEQ ID NO: 744054

SEQ ID NO: 744067 - protein, 419 aa, Homo sapiens
LGLELRGTGLIGEELPEGWSLPSYVSVLVALGNLGLLVVTLWRRLAPGKDEQVPIRVVQVLGMVGTALLASLWHHVAPVAGQLHSVAFLALAFVLALACCASNVTFLPFLSHLPPRFLRSFFLGQGLSALLPCVLALVQGVGRLECPPAPINGTPGPPLDFLERFPASTFFWALTALLVASAAAFQGLLLLLPPPPSVPTGELGSGLQVGAPGAEEEVEESSPLQEPPSQAAGTTPGPDPKAYQLLSARSACLLGLLAATNALTNGVLPAVQSFSCLPYGRLAYHLAVVLGSAANPLACFLAMGVLCRSLAGLGGLSLLGVFCGGYLMALAVLSPCPPLVGTSAGVVLVVLSWVLCLGVFSYVKVAASSLLHGGGRPALLAAGVAIQVGSLLGAVAMFPPTSIYHVFHSRKDCADPCDS

SEQ ID NO: 744068 - protein, 201 aa, Homo sapiens; identical to SEQ ID NO: 744062

SEQ ID NO: 744069 - protein, 72 aa, Homo sapiens
NKLESAVNRTGPEPPRVSRVVAAAGSCALRTEVASLGRTAVSRRGGKPALERERTGRGTGRRRDRTAPESPT

SEQ ID NO: 744070 - protein, 135 aa, Homo sapiens
VSEPLPGPSHEKGNRIVNGQGEGPPAKHPSLKPTTGVEDPAVKGAVQRKNVQTLRAEQALPVASEEEQERHERSEKKQPQVKKGNNTNKSEKIQLSENICDSTSSAAAGRLTQQRKIGKTYPQQFPKKLKEEHDK

SEQ ID NO: 744071 - protein, 59 aa, Homo sapiens
  misc_feature (57)..(57): Xaa can be any naturally occurring amino acid
MISSAISADLGRQELIQRSSEALATVTGIVDGSGSIGAAVGQYLGSLIRDNPGCGTXVP

SEQ ID NO: 744072 - protein, 633 aa, Homo sapiens
MGEEGSELPVCASCGQRIYDGQYLQALNADWHADCFRCCDCSASLSHQYYEKDGQLFCKKDYWARYGESCHGCSEQITKGLVMVAGELKYHPECFICLTCGTFIGDGDTYTLVEHSKLYCGHCYYQTVVTPVIEQILPDSPGSHLPHTVTLVSIPASSHGKRGLSVSIDPPHGPPGCGTEHSHTVRVQGVDPGCMSPDVKNSIHVGDRILEINGTPIRNVPLDEIDLLIQETSRLLQLTLEHDPHDTLGHGLGPETSPLSSPAYTPSGEAGSSARQKPVLRSCSIDRSPGAGSLGSPASQRKDLGRSESLRVVCRPHRIFRPSDLIHGEVLGKGCFGQAIKVTHRETGEVMVMKELIRFDEETQRTFLKEVKVMRCLEHPNVLKFIGVLYKDKRLNFITEYIKGGTLRGIIKSMDSQYPWSQRVSFAKDIASGMAYLHSMNIIHRDLNSHNCLVRENKNVVVADFGLARLMVDEKTQPEGLRSLKKPDRKKRYTVVGNPYWMAPEMINGRSYDEKVDVFSFGIVLCEIIGRVNADPDYLPRTMDFGLNVRGFLDRYCPPNCPPSFFPITVRCCDLDPEKRPSFVKLEHWLETLRMHLAGHLPLGPQLEQLDRGFWETYRRGESGLPAHPEVPD

SEQ ID NO: 744073 - protein, 633 aa, Homo sapiens; identical to SEQ ID NO: 744072

SEQ ID NO: 744074 - protein, 633 aa, Homo sapiens; identical to SEQ ID NO: 744072

SEQ ID NO: 744075 - protein, 166 aa, Homo sapiens
MGEEGSELPVCASCGQRIYDGQYLQALNADWHADCFSGHCYYQTVVTPVIEQILPDSPGSHLPHTVTLVSIPASSHGKRGLSVSIDPPHGPPGCGTDFFPITVRCCDLDPEKRPSFVKLEHWLETLRMHLAGHLPLGPQLEQLDRGFWETYRRGESGLPAHPEVPD

SEQ ID NO: 744076 - protein, 227 aa, Homo sapiens
MGEEGSELPVCASCGQRIYDGQYLQALNADWHADCFRCCDCSASLSHQYYEKDGQLFCKKDYWARYGESCHGCSEQITKGLVMVAGELKYHPECFICLTCGTFIGDGDTYTLVEHSKLYCGHCYYQTVVTPVIEQILPDSPGSHLPHTVTLVSIPASSHGKRGLSVSIDPPHGPPGCGTEHSHTVRVQGVDPGCMSPDVKNSIHVGDRILEINGTPIRNVPLDEVRS

SEQ ID NO: 744077 - protein, 90 aa, Homo sapiens
RKDLGRSESLRVVCRPHRIFRPSDLIHGEVLGKGCFGQAIKVQSMPGSQGTVWVGPLHPPSFPVYGNTVEGVSGFQTPWPVPSPPLASWS

SEQ ID NO: 744078 - protein, 678 aa, Homo sapiens
AEPVSPPVSERRPRPGRPQPQPRRAPPPVECMRLTLLCCTWREERMGEEGSELPVCASCGQRIYDGQYLQALNADWHADCFRCCDCSASLSHQYYEKDGQLFCKKDYWARYGESCHGCSEQITKGLVMVAGELKYHPECFICLTCGTFIGDGDTYTLVEHSKLYCGHCYYQTVVTPVIEQILPDSPGSHLPHTVTLVSIPASSHGKRGLSVSIDPPHGPPGCGTEHSHTVRVQGVDPGCMSPDVKNSIHVGDRILEINGTPIRNVPLDEIDLLIQETSRLLQLTLEHDPHDTLGHGLGPETSPLSSPAYTPSGEAGSSARQKPVLRSCSIDRSPGAGSLGSPASQRKDLGRSESLRVVCRPHRIFRPSDLIHGEVLGKGCFGQAIKVTHRETGEVMVMKELIRFDEETQRTFLKEVKVMRCLEHPNVLKFIGVLYKDKRLNFITEYIKGGTLRGIIKSMDSQYPWSQRVSFAKDIASGMAYLHSMNIIHRDLNSHNCLVRENKNVVVADFGLARLMVDEKTQPEGLRSLKKPDRKKRYTVVGNPYWMAPEMINGRSYDEKVDVFSFGIVLCEIIGRVNADPDYLPRTMDFGLNVRGFLDRYCPPNCPPSFFPITVRCCDLDPEKRPSFVKLEHWLETLRMHLAGHLPLGPQLEQLDRGFWETYRRGESGLPAHPEVPD

SEQ ID NO: 744079 - protein, 283 aa, Homo sapiens
MVMKELIRFDEETQRTFLKEVKVMRCLEHPNVLKFIGVLYKDKRLNFITEYIKGGTLRGIIKSMDSQYPWSQRVSFAKDIASGMAYLHSMNIIHRDLNSHNCLVRENKNVVVADFGLARLMVDEKTQPEGLRSLKKPDRKKRYTVVGNPYWMAPEMINGRSYDEKVDVFSFGIVLCEIIGRVNADPDYLPRTMDFGLNVRGFLDRYCPPNCPPSFFPITVRCCDLDPEKRPSFVKLEHWLETLRMHLAGHLPLGPQLEQLDRGFWETYRRGESGLPAHPEVPD

SEQ ID NO: 744080 - protein, 633 aa, Homo sapiens; identical to SEQ ID NO: 744072

SEQ ID NO: 744081 - protein, 166 aa, Homo sapiens
SSAPAVISEPLPGPLPQGSLPLLMPRFPCLLSAVAQSRPSCTHTPCSRPAVTSVLAGLSPLASPCMSWRACVSYAPFHTPLPQQPCSRSTCLVHSSLEAGPGGSLRTMPHITLGCVGGRTSGQRPSSRCLCSQEPNGESGARFPPRGCLGSNRYRGLSKPPKQREG

SEQ ID NO: 744082 - protein, 280 aa, Homo sapiens [sequence omitted]

SEQ ID NO: 744083 - protein, 193 aa, Homo sapiens
NIWSRYEAGFTMLSVAALLGARSRPSCRPRPRGCGRAAALVQATVPATPEQPVLDLKRPFLSRELLSGQAVRRPLVASVGLKCSLSSVCYSHTDIKVPDFSEYRRLEVLDSTKSSRESSEARERFLLFGNLEYLLWGVAYAAKNAVTQFVSSMSASADVLALAKIEIKLSDIPEGKNMAFKWRGKPLFVRHRT

SEQ ID NO: 744084 - protein, 166 aa, Homo sapiens
  misc_feature (4)..(4): Xaa can be any naturally occurring amino acid
  misc_feature (12)..(12): Xaa can be any naturally occurring amino acid
  misc_feature (17)..(17): Xaa can be any naturally occurring amino acid
GCRXVVGSSPLXRFAPXLSATPEQPVLDLKRPFLSRELLSGQAVRRPLVASVGLKCSLSSVCYSHTDIKVPDFSEYRRLEVLDSTKSSRESSEARERFLLFGNWEELLWGVAYAAKNAVTQFVSSMSASADVLALAKIEIKLSDIPEGKNMAFKWRGKPLFVRHRT

SEQ ID NO: 744085 - protein, 431 aa, Homo sapiens
AGSQRVFEAASAATMSGRSRGRKSSRAKNRGKGRAKARVRPAPDDAPRDPDPSQYQSLGEDTQAAQVQAGAGWGGLEAAASAQLLRLGEEAACRLPLDCGLALRARAAGDHGQAAARPGPGKAASLSERLAADTVFVGTAGTVGRPKNAPRVGNRRGPAGKKAPETCSTAGRGPQVIAGGRQKKGAAGENTSVSAGEEKKEERDAGSGPPATEGSMDTLENVQLKLENMNAQADRAYLRLSRKFGQLRLQHLERRNHLIQNIPGFWGQAFQNHPQLASFLNSQEKEVLSYLNSLEVEELGLARLGYKIKFYFDRNPYFQNKVLIKEYGCGPSGQVVSRSTPIQWLPGHDLQSLSQGNPENNRSFFGWFSNHSSIESDKIVEIINEELWPNPLQFYLLSEGARVEKGKEKEGRQGPGKQPMETTQPGVSQSN

SEQ ID NO: 744086 - protein, 283 aa, Homo sapiens
AGSQRVFEAASAATMSGRSRGRKSSRAKNRGKGRAKARVRPAPDDAPRDPDPSQYQSLGEDTQAAQVQAGAGWGGLEAAASAQLLRLGEEAACRLPLDCGLALRARAAGDHGQAAARPGPGKAASLSERLAADTVFVGTAGTVGRPKNAPRVGNRRGPAGKKAPETCSTAGRGPQVIAGGRQKKGAAGENTSVSAGEEKKEERDAGSGPPATEGSMDTLENVQLKLENMNAQADRAYLRLSRKFGQLRLQHLERRNHLIQTDGRAGMCGHVFTVIMLWLQLGR

SEQ ID NO: 744087 - protein, 431 aa, Homo sapiens; identical to SEQ ID NO: 744085

SEQ ID NO: 744088 - protein, 453 aa, Homo sapiens
AGSQRVFEAASAATMSGRSRGRKSSRAKNRGKGRAKARVRPAPDDAPRDPDPSQYQSLGEDTQAAQVQAGAGWGGLEAAASAQLLRLGEEAACRLPLDCGLALRARAAGDHGQAAARPGPGKAASLSERLAADTVFVGTAGTVGRPKNAPRVGNRRGPAGKKAPETCSTAGRGPQVIAGGRQKKGAAGENTSVSAGEEKKEERDAGSGPPATEGSMDTLENVQLKLENMNAQADRAYLRLSRKFGQLRLQHLERRNHLIQNIPGFWGQAFQNHPQLASFLNSQEKEVLSYLNSLEVEELGLARLGYKIKFYFDRNPYFQNKVLIKEYGCGPSGQVVSRSTPIQWLPGHDLQSLSQGNPENNRSFFGWFSNHSSIESDKIVEIINEELWPNPLQFYLLSEGARVEKGKEKEGRQGPGKQPMETTQPGGPDPASLSSFFSSPADTEVFSPAAPLI

SEQ ID NO: 744089 - protein, 37 aa, Homo sapiens
CVDWFPCWKVWMIISISVWQEENEVMCVMMRPSTWHT

SEQ ID NO: 744090 - protein, 782 aa, Homo sapiens
MSINLTVDIYIYLLSNARSVCGKQRSKQLYFLFSPKHYWRISHISLQRGFHTNIIRCKWTKSEAHSCSKHCYSPSNHGLHIGILKLSTSAPKGLTKVNICMSRIKSTLNSVSKAVFGNQNEMISRLAQFKPSSQILRKVSDSGWLKQKNIKQAIKSLKKYSDKSAEKSPFPEEKSHIIDKEEDIGKRSLFHYTSSITTKFGDSFYFLSNHINSYFKRKEKMSQQKENEHFRDKSELEDKKVEEGKLRSPDPGILAYKPGSESVHTVDKPTSPSAIPDVLQVSTKQSIANFLSRPTEGVQALVGGYIGGLVPKLKYDSKSQSEEQEEPAKTDQAVSKDRNAEEKKRLSLQREKIIARVSIDNRTRALVQALRRTTDPKLCITRVEELTFHLLEFPEGKGVAVKERIIPYLLRLRQIKDETLQAAVREILALIGYVDPVKGRGIRILSIDGGGTRGVVALQTLRKLVELTQKPVHQLFDYICGVSTGAILAFMLGLFHMPLDECEELYRKLGSDVFSQNVIVGTVKMSWSHAFYDSQTWENILKDRMGSALMIETARNPTCPKVAAVSTIVNRGITPKAFVFRNYGHFPGINSHYLGGCQYKMWQAIRASSAAPGYFAEYALGNDLHQDGGLLLNNPSALAMHECKCLWPDVPLECIVSLGTGRYESDVRNTVTYTSLKTKLSNVINSATDTEEVHIMLDGLLPPDTYFRFNPVMCENIPLDESRNEKLDQLQLEGLKYIERNEQKMKKVAKILSQEKTTLQKINDWIKLKTDMYEGLPFFSKL

SEQ ID NO: 744091 - protein, 682 aa, Homo sapiens
MSRIKSTLNSVSKAVFGNQNEMISRLAQFKPSSQILRKVSDSGWLKQKNIKQAIKSLKKYSDKSAEKSPFPEEKSHIIDKEEDIGKRSLFHYTSSITTKFGDSFYFLSNHINSYFKRKEKMSQQKENEHFRDKSELEDKKVEEGKLRSPDPGILAYKPGSESVHTVDKPTSPSAIPDVLQVSTKQSIANFLSRPTEGVQALVGGYIGGLVPKLKYDSKSQSEEQEEPAKTDQAVSKDRNAEEKKRLSLQREKIIARVSIDNRTRALVQALRRTTDPKLCITRVEELTFHLLEFPEGKGVAVKERIIPYLLRLRQIKDETLQAAVREILALIGYVDPVKGRGIRILSIDGGGTRGVVALQTLRKLVELTQKPVHQLFDYICGVSTGAILAFMLGLFHMPLDECEELYRKLGSDVFSQNVIVGTVKMSWSHAFYDSQTWENILKDRMGSALMIETARNPTCPKVAAVSTIVNRGITPKAFVFRNYGHFPGINSHYLGGCQYKMWQAIRASSAAPGYFAEYALGNDLHQDGGLLLNNPSALAMHECKCLWPDVPLECIVSLGTGRYESDVRNTVTYTSLKTKLSNVINSATDTEEVHIMLDGLLPPDTYFRFNPVMCENIPLDESRNEKLDQLQLEGLKYIERNEQKMKKVAKILSQEKTTLQKINDWIKLKTDMYEGLPFFSKL

SEQ ID NO: 744092 - protein, 782 aa, Homo sapiens; identical to SEQ ID NO: 744090

SEQ ID NO: 744093 - protein, 682 aa, Homo sapiens; identical to SEQ ID NO: 744091

SEQ ID NO: 744094 - protein, 717 aa, Homo sapiens
MSINLTVDIYIYLLSNARSVCGKQRSKQLYFLFSPKHYWRISHISLQRGFHTNIIRCKWTKSEAHSCSKHCYSPSNHGLHIGILKLSTSAPKGLTKVNICMSRIKSTLNSVSKAVFGNQNEMISRLAQFKPSSQILRKVSDSGWLKQKNIKQAIKSLKKYSDKSAEKSPFPEEKSHIIDKEEDIGKRSLFHYTSSITTKFGDSFYFLSNHINSYFKRKEKMSQQKENEHFRDKSELEDKKVEEGKLRSPDPGILAYKPGSESVHTVDKPTSPSAIPDVLQVSTKQSIANFLSRPTEGVQALVGGYIGGLVPKLKYDSKSQSEEQEEPAKTDQAVSKDRNAEEKKRLSLQREKIIARVSIDNRTRALVQALRRTTDPKLCITRVEELTFHLLEFPEGKGVAVKERIIPYLLRLRQIKDETLQAAVREILALIGYVDPVKGRGIRILSIDGGGTRGVVALQTLRKLVELTQKPVHQLFDYICGVSTGAILAFMLGLFHMPLDECEELYRKLGSDVFSQNVIVGTVKMSWSHAFYDSQTWENILKDRMGSALMIETARNPTCPKDGGLLLNNPSALAMHECKCLWPDVPLECIVSLGTGRYESDVRNTVTYTSLKTKLSNVINSATDTEEVHIMLDGLLPPDTYFRFNPVMCENIPLDESRNEKLDQLQLEGLKYIERNEQKMKKVAKILSQEKTTLQKINDWIKLKTDMYEGLPFFSKL

SEQ ID NO: 744095 - protein, 542 aa, Homo sapiens
MSINLTVDIYIYLLSNARSVCGKQRSKQLYFLFSPKHYWRISHISLQRGFHTNIIRCKWTKSEAHSCSKHCYSPSNHGLHIGILKLSTSAPKGLTKVNICMSRIKSTLNSVSKAVFGNQNEMISRLAQFKPSSQILRKVSDSGWLKQKNIKQAIKSLKKYSDKSAEKSPFPEEKSHIIDKEEDIGKRSLFHYTSSITTKFGDSFYFLSNHINSYFKRKEKMSQQKENEHFRDKSELEDKKVEEGKLRSPDPGILAYKPGSESVHTVDKPTSPSAIPDVLQVSTKQSIANFLSRPTEGVQALVGGYIGGLVPKLKYDSKSQSEEQEEPAKTDQAVSKDRNAEEKKRLSLQREKIIARVSIDNRTRALVQALRRTTDPKLCITRVEELTFHLLEFPEGKGVAVKERIIPYLLRLRQIKDETLQAAVREILALIGYVDPVKGRGIRILSIDGGGTRGVVALQTLRKLVELTQKPVHQLFDYICGVSTGAILAFMLGLFHMPLDECEELYRKLGSDVFSQNVIVGTVKMSWSHAFYDSQTWENILK

SEQ ID NO: 744096 - protein, 542 aa, Homo sapiens; identical to SEQ ID NO: 744095

SEQ ID NO: 744097 - protein, 782 aa, Homo sapiens; identical to SEQ ID NO: 744090

SEQ ID NO: 744098 - protein, 983 aa, Homo sapiens
GRAGHHPPRDWYRSPQLQGTQRRQGLQGRGEGGLSLLKGNSGPQTSKPGHCSEVPPRKAKRSPTALTPGNQPRHSTPHQQATPRASRTHARTHTRLSRLPALRSVMLYCAYLGAGEERRLTRRQRPERGGKSSPRPAGRPKLLARHFRWGRSGAGLSGWRPTAAPVFVLEAQLMQAGWSGRHCRERASRRCSPSDCGLHPDCLLLQGLHDYLKFNNNARSVCGKQRSKQLYFLFSPKHYWRISHISLQRGFHTNIIRCKWTKSEAHSCSKHCYSPSNHGLHIGILKLSTSAPKGLTKVNICMSRIKSTLNSVSKAVFGNQNEMISRLAQFKPSSQILRKVSDSGWLKQKNIKQAIKSLKKYSDKSAEKSPFPEEKSHIIDKEEDIGKRSLFHYTSSITTKFGDSFYFLSNHINSYFKRKEKMSQQKENEHFRDKSELEDKKVEEGKLRSPDPGILAYKPGSESVHTVDKPTSPSAIPDVLQVSTKQSIANFLSRPTEGVQALVGGYIGGLVPKLKYDSKSQSEEQEEPAKTDQAVSKDRNAEEKKRLSLQREKIIARVSIDNRTRALVQALRRTTDPKLCITRVEELTFHLLEFPEGKGVAVKERIIPYLLRLRQIKDETLQAAVREILALIGYVDPVKGRGIRILSIDGGGTRGVVALQTLRKLVELTQKPVHQLFDYICGVSTGAILAFMLGLFHMPLDECEELYRKLGSDVFSQNVIVGTVKMSWSHAFYDSQTWENILKDRMGSALMIETARNPTCPKVAAVSTIVNRGITPKAFVFRNYGHFPGINSHYLGGCQYKMWQAIRASSAAPGYFAEYALGNDLHQDGGLLLNNPSALAMHECKCLWPDVPLECIVSLGTGRYESDVRNTVTYTSLKTKLSNVINSATDTEEVHIMLDGLLPPDTYFRFNPVMCENIPLDESRNEKLDQLQLEGLKYIERNEQKMKKVAKILSQEKTTLQKINDWIKLKTDMYEGLPFFSKL

SEQ ID NO: 744099 - protein, 782 aa, Homo sapiens; identical to SEQ ID NO: 744090

SEQ ID NO: 744100 - protein, 193 aa, Homo sapiens
GRAGHHPPRDWYRSPQLQGTQRRQGLQGRGEGGLSLLKGNSGPQTSKPGHCSEVPPRKAKRSPTALTPGNQPRHSTPHQQATPRASRTHARTHTRLSRLPALRSVMLYCAYLGAGEERRLTRRQRPERGGKSSPRPAGRPKLLARHFRWGRSGAGLSGWRPSCCASVCVGSSADAGRLEWTSLPGTSESPLQP

SEQ ID NO: 744101 - protein, 542 aa, Homo sapiens; identical to SEQ ID NO: 744095

SEQ ID NO: 744102 - protein, 193 aa, Homo sapiens; identical to SEQ ID NO: 744100

SEQ ID NO: 744103 - protein, 700 aa, Homo sapiens
GVRGLLASLFAFNSFRENWQRAWVRALNEQACRNGSSIQIAFEEVPQLPPRASISHVTCVDQSEHTMVLRCQLSAEEVRFPVSVTQQSPAAVSMETYHVTLTLPPTQLEVNLEEIPGEGLLISWAFTDRPDLSLTVLPKLQARERGEEQVELSTIEELIKDAIVSTQPAMMVNLRACSAPGGLVPSEKPPMMPQAQPAIPRPNRLFLRQLRASHLGNELEGTEELCCVAELDNPMQQKWTKPARAGSEVEWTEDLALDLGPQSRELTLKVLRSSSCGDTELLGQATLPVGSPSRPLSRRQLCPLTPGPGKALGPAATMAVEVEKLTPGVGGRTQGMGSLRGSVSSLSTPGQLHYEEGSPRNLGTPTSSTPRPSITPTKKIELDRTIMPDGTIVTTVTTVQSRPRIDGKLDSPSRSPSKVEVTEKTTTVLSESSGPSNTSHSSSREWGMGCMSVGWPWCPSIKKYSGWDRRSSNPRKSQGEVRLFILCTPAGDSHLSNGLDPVAETAIRQLTEPSGRVAKKTPTKRSTLIISGVSKVPIAQDELALSLGYAASLEASVQDDAGTSGGPSSPPSDPPAMSPGPLDALSSPTSVQEADETTRSDISERPSVDDIESETGSTGALETRSLKDHKVSFLRSGTKLIFRRRPRQKEAGLSQSHDDLSNATATPSVRKKAGSFSRRLIKRFSFKSKPKANGNPSPQL

SEQ ID NO: 744104 - protein, 668 aa, Homo sapiens
GVRGLLASLFAFNSFRENWQRAWVRALNEQACRNGVLRCQLSAEEVRFPVSVTQQSPAAVSMETYHVTLTLPPTQLEVNLEEIPGEGLLISWAFTDRPDLSLTVLPKLQARERGEEQVELSTIEELIKDAIVSTQPAMMVNLRACSAPGGLVPSEKPPMMPQAQPAIPRPNRLFLRQLRASHLGNELEGTEELCCVAELDNPMQQKWTKPARAGSEVEWTEDLALDLGPQSRELTLKVLRSSSCGDTELLGQATLPVGSPSRPLSRRQLCPLTPGPGKALGPAATMAVEVEKLTPGEVGGHRGWAVSEALSLLSPTPGQLHYEEGSPRNLGTPTSSTPRPSITPTKKIELDRTIMPDGTIVTTVTTVQSRPRIDGKLDSPSRSPSKVEVTEKTTTVLSESSGPSNTSHSSSREWGMGCMSVGWPWCPSIKKYSGWDRRSSNPRKSQGEVRLFILCTPAGDSHLSNGLDPVAETAIRQLTEPSGRVAKKTPTKRSTLIISGVSKVPIAQDELALSLGYAASLEASVQDDAGTSGGPSSPPSDPPAMSPGPLDALSSPTSVQEADETTRSDISERPSVDDIESETGSTGALETRSLKDHKVSFLRSGTKLIFRRRPRQKEAGLSQSHDDLSNATATPSVRKKAGSFSRRLIKRFSFKSKPKANGNPSPQL

SEQ ID NO: 744105 - protein, 623 aa, Homo sapiens
GVRGLLASLFAFNSFRENWQRAWVRALNEQACRNGSSIQIAFEEVPQLPPRASISHVTCVDQSEHTMVLRCQLSAEEVRFPVSVTQQSPAAVSMETYHVTLTLPPTQLEVNLEEIPGEGLLISWAFTDRPDLSLTVLPKLQARERGEEQVELSTIEELIKDAIVSTQPAMMVNLRACSAPGGLVPSEKPPMMPQAQPAIPRPNRLFLRQLRASHLGNELEGTEELCCVAELDNPMQQKWTKPARAGSEVEWTEDLALDLGPQSRELTLKVLRSSSCGDTELLGQATLPVGSPSRPLSRRQLCPLTPGPGKALGPAATMAVELHYEEGSPRNLGTPTSSTPRPSITPTKKIELDRTIMPDGTIVTTVTTVQSRPRIDGKLDSPSRSPSKVEVTEKTTTVLSESSGPSNTSHSSSRDSHLSNGLDPVAETAIRQLTEPSGRVAKKTPTKRSTLIISGVSKVPIAQDELALSLGYAASLEASVQDDAGTSGGPSSPPSDPPAMSPGPLDALSSPTSVQEADETTRSDISERPSVDDIESETGSTGALETRSLKDHKVSFLRSGTKLIFRRRPRQKEAGLSQSHDDLSNATATPSVRKKAGSFSRRLIKRFSFKSKPKANGNPSPQL

SEQ ID NO: 744106 - protein, 417 aa, Homo sapiens
KARYEAGCESAEAERTEELCCVAELDNPMQQKWTKPARAGSEVEWTEDLALDLGPQSRELTLKVLRSSSCGDTELLGQATLPVGSPSRPLSRRQLCPLTPGPGKALGPAATMAVELHYEEGSPRNLGTPTSSTPRPSITPTKKIELDRTIMPDGTIVTTVTTVQSRPRIDGKLDSPSRSPSKVEVTEKTTTVLSESSGPSNTSHSSSRDSHLSNGLDPVAETAIRQLTEPSGRVAKKTPTKRSTLIISGVSKVPIAQDELALSLGYAASLEASVQDDAGTSGGPSSPPSDPPAMSPGPLDALSSPTSVQEADETTRSDISERPSVDDIESETGSTGALETRSLKDHKVSFLRSGTKLIFRRRPRQKEAGLSQSHDDLSNATATPSVRKKAGSFSRRLIKRFSFKSKPKANGNPSPQL

SEQ ID NO: 744107 - protein, 355 aa, Homo sapiens
AQLTVPSLSPAELLGQATLPVGSPSRPLSRRQLCPLTPGPGKALGPAATMAVELHYEEGSPRNLGTPTSSTPRPSITPTKKIELDRTIMPDGTIVTTVTTVQSRPRIDGKLDSPSRSPSKVEVTEKTTTVLSESSGPSNTSHSSSRDSHLSNGLDPVAETAIRQLTEPSGRVAKKTPTKRSTLIISGVSKVPIAQDELALSLGYAASLEASVQDDAGTSGGPSSPPSDPPAMSPGPLDALSSPTSVQEADETTRSDISERPSVDDIESETGSTGALETRSLKDHKVSFLRSGTKLIFRRRPRQKEAGLSQSHDDLSNATATPSVRKKAGSFSRRLIKRFSFKSKPKANGNPSPQL

SEQ ID NO: 744108 - protein, 306 aa, Homo sapiens
KARYEAGVNRPRRSLGTPTSSTPRPSITPTKKIELDRTIMPDGTIVTTVTTVQSRPRIDGKLDSPSRSPSKVEVTEKTTTVLSESSGPSNTSHSSSRDSHLSNGLDPVAETAIRQLTEPSGRVAKKTPTKRSTLIISGVSKVPIAQDELALSLGYAASLEASVQDDAGTSGGPSSPPSDPPAMSPGPLDALSSPTSVQEADETTRSDISERPSVDDIESETGSTGALETRSLKDHKVSFLRSGTKLIFRRRPRQKEAGLSQSHDDLSNATATPSVRKKAGSFSRRLIKRFSFKSKPKANGNPSPQL

SEQ ID NO: 744109 - protein, 547 aa, Homo sapiens
GVRGLLASLFAFNSFRENWQRAWVRALNEQACRNGSSIQIAFEEVPQLPPRASISHVTCVDQSEHTMVLRCQLSAEEVRFPVSVTQQSPAAVSMETYHVTLTLPPTQLEVNLEEIPGEGLLISWAFTDRPDLSLTVLPKLQARERGEEQVELSTIEELIKDAIVSTQPAMMVNLRACSAPGGLVPSEKPPMMPQAQPAIPRPNRLFLRQLRASHLGNELEGTEELCCVAELDNPMQQKWTKPARAGSEVEWTEDLALDLGPQSRELTLKVLRSSSCGDTELLGQATLPVGSPSRPLSRRQLCPLTPGPGKALGPAATMAVELHYEEGSPRNLGTPTSSTPRPSITPTKKIELDRTIMPDGTIVTTVTTVQSRPRIDGKLDSPSRSPSKVEVTEKTTTVLSESSGPSNTSHSSSRDSHLSNGLDPVAETAIRQLTEPSGRVAKKTPTKRSTLIISGVSKVPIAQDELALSLGYAASLEASVQDDAGTSGGPSSPPSDTACSGRNALCQRPTKKRDLSLVLQTAADPKKGQAIGEGTKKGTHKTPVLRG

SEQ ID NO: 744110 - protein, 538 aa, Homo sapiens
GVRGLLASLFAFNSFRENWQRAWVRALNEQACRNGSSIQIAFEEVPQLPPRASISHVTCVDQSEHTMVLRCQLSAEEVRFPVSVTQQSPAAVSMETYHVTLTLPPTQLEVNLEEIPGEGLLISWAFTDRPDLSLTVLPKLQARERGEEQVELSTIEELIKDAIVSTQPAMMVNLRACSAPGGLVPSEKPPMMPQAQPAIPRPNRLFLRQLRASHLGNELEGTEELCCVAELDNPMQQKWTKPARAGSEVEWTEDLALDLGPQSRELTLKVLRSSSCGDTELLGQATLPVGSPSRPLSRRQLCPLTPGPGKALGPAATMAVELHYEEGSPRNLGTPTSSTPRPSITPTKKIELDRTIMPDGTIVTTVTTVQSRPRIDGKLDSPSRSPSKVEVTEKTTTVLSESSGPSNTSHSSSRDSHLSNGLDPVAETAIRQLTEPSGRVAKKTPTKRSTLIISGVSKVPIAQDELALSLGYAASLEASVQDDAGTSGGPSSPPSDPPAMSPGPLDALSSPTSVQEADETIQQAQEVDAAANLVVVGG

SEQ ID NO: 744111 - protein, 205 aa, Homo sapiens
MALQLSREQGITLRGSAEIVAEFFSFGINSILYQRGIYPSETFTRVQKYGLTLLVTTDLELIKYLNNVVEQLKDWLYKCSVQKLVVVISNIESGEVLERWQFDIECDKTAKDDSAPREKSQKAIQDEIRSVIRQITATVTFLPLLEVSCSFDLLIYTDKDLVVPEKWEESGPQFITNSEEVRLRSFTTTIHKVNSMVAYKIPVND

SEQ ID NO: 744112 - protein, 102 aa, Homo sapiens
MRERAGPRCVGLGLKARRACAKDLTTCCVVTFETLGGEVLLEPLWLLSAEWKRVLLFVSLAMALQLSREQGITLRGSAEIVAEFFLHPEKSLRKLSRMKSVQ

SEQ ID NO: 744113 - protein, 205 aa, Homo sapiens; identical to SEQ ID NO: 744111

SEQ ID NO: 744114 - protein, 187 aa, Homo sapiens
MALQLSREQGITLRGSAEIVAEFFSFGINSILYQRGIYPSETFTRVQKYGLTLLVTTDLELIKYLNNVVEQLKDWLYKCSVQKLVVVISNIESGEVLERWQFDIECDKTAKDDSAPREKSQKAIQDEIRSVIRQITATVTFLPLLEVSCSFDLLIYTDKDLVVPDRSFTTTIHKVNSMVAYKIPVND

SEQ ID NO: 744115 - protein, 250 aa, Homo sapiens
HSVETLWRREMLLKTGDESWCPAEMPWLVAFGSVIPGQLELATPASPGRSVLTHVPECRLLSSSLSSSLRDLPAFLYHPWVIYPSETFTRVQKYGLTLLVTTDLELIKYLNNVVEQLKDWLYKCSVQKLVVVISNIESGEVLERWQFDIECDKTAKDDSAPREKSQKAIQDEIRSVIRQITATVTFLPLLEVSCSFDLLIYTDKDLVVPEKWEESGPQFITNSEEVRLRSFTTTIHKVNSMVAYKIPVND

SEQ ID NO: 744116 - protein, 156 aa, Homo sapiens
MALQLSREQGITLRGSAEIVAEFFYWLYKCSVQKLVVVISNIESGEVLERWQFDIECDKTAKDDSAPREKSQKAIQDEIRSVIRQITATVTFLPLLEVSCSFDLLIYTDKDLVVPEKWEESGPQFITNSEEVRLRSFTTTIHKVNSMVAYKIPVND

SEQ ID NO: 744117 - protein, 142 aa, Homo sapiens
MGLGLKARRACAKDLTTCCVVTFETLGGEVLLEPLWLLSAEWKRVLLFVSLAMALQLSREQGITLRGSAEIVAEFFSFGINSILYQRGIYPSETFTRVQKYGLTLLVTTDLELIKYLNNVVEQLKVHPEKSLRKLSRMKSVQ

SEQ ID NO: 744118 - protein, 62 aa, Homo sapiens
LAEKGTLLPAGSQAPELASHWATPSLDWVLSAQPFTRALPRDRSQGPQMPPSANCSFCPEDM

SEQ ID NO: 744119 - protein, 93 aa, Homo sapiens
LGLERRVPGPSYQRSAGSGPAARVLLGSQGHGWVNGLTAGLLAQQTLSSPMAQSTSSLQGQLEGRGTTRPSLQLALPLQLRGGLNYRTHSQDP

SEQ ID NO: 744120 - protein, 73 aa, Homo sapiens
ERFAGSDAELCAREAWPTLCSAQVAAWFFATLAAVAESLIPVPGAPRLVHAARHAGFTTVLLATPEPPRRLND

SEQ ID NO: 744121 - protein, 438 aa, Homo sapiens
MASAVWGSAPWWGPPPPAPARPLTDIDFCSGAQLQELTQLIQELGVQESWSDGPKPGADLLRAKDFVFSLLGLVHRRDPRFPPQAELLLLRGGIREGSLDLGHAPLGPYARGPHYDAGFTLLVPMFSLDGTELQLDLESCYAQVCLPEMVCGTPIREMWQDCLGPPVPGARDSIHRTESEESSKDWQSSVDQPHSYVTEHEAPVSLEKSPSDVSASESPQHDVVDLGSTAPLKTMSSDVTKAAVESPVPKPSEAREAWPTLCSAQVAAWFFATLAAVAESLIPVPGAPRLVHAARHAGFTTVLLATPEPPRRLLLFDLIPVGVRGGLARGGFGATRGPVRWPLSRLPSTWCPVAAPSGRAPPPGSSVLPARSWRSKRAYQRRCCRRTRRPRRYCARWWPGPGRRRPTSCGRCCTGRASGCLRSTWRGQKMRAPAASGC

SEQ ID NO: 744122 - protein, 482 aa, Homo sapiens
MASAVWGSAPWWGPPPPAPARPLTDIDFCSGAQLQELTQLIQELGVQESWSDGPKPGADLLRAKDFVFSLLGLVHRRDPRFPPQAELLLLRGGIREGSLDLGHAPLGPYARGPHYDAGFTLLVPMFSLDGTELQLDLESCYAQVCLPEMVCGTPIREMWQDCLGPPVPGARDSIHRTESEESSKDWQSSVDQPHSYVTEHEAPVSLEKSPSDVSASESPQHDVVDLGSTAPLKTMSSDVTKAAVESPVPKPSEAREAWPTLCSAQVAAWFFATLAAVAESLIPVPGAPRLVHAARHAGFTTVLLVRSHSWAGPLASESASFYLVPGGGTERPCASAWQLCFARQELALKARIPAPLLQAHAAAQALLRPLVAGTRAAAPYLLRTLLYWACERLPALYLARPENAGACCLGLLDELGRVLEAGTLPHYFLNGRQLRTGDDSAALLGELARLRGDPARALRAAVEEAKVARKGGGLAGVGGGGT

SEQ ID NO: 744123 - protein, 508 aa, Homo sapiens
MASAVWGSAPWWGPPPPAPARPLTDIDFCSGAQLQELTQLIQELGVQESWSDGPKPGADLLRAKDFVFSLLGLVHRRDPRFPPQAELLLLRGGIREGSLDLGHAPLGPYARGPHYDAGFTLLVPMFSLDGTELQLDLESCYAQVCLPEMVCGTPIREMWQDCLGPPVPGARDSIHRTESEESSKDWQSSVDQPHSYVTEHEAPVSLEKSPSDVSASESPQHDVVDLGSTAPLKTMSSDVTKAAVESPVPKPSEAREAWPTLCSAQVAAWFFATLAAVAESLIPVPGAPRLVHAARHAGFTTVLLATPEPPRRLLLFDLIPVGVRGGLARGARSHSWAGPLASESASFYLVPGGGTERPCASAWQLCFARQELALKARIPAPLLQAHAAAQALLRPLVAGTRAAAPYLLRTLLYWACERLPALYLARPENAGACCLGLLDELGRVLEAGTLPHYFLNGRQLRTGDDSAALLGELARLRGDPARALRAAVEEAKVARKGGGLAGVGGGAH

SEQ ID NO: 744124 - protein, 314 aa, Homo sapiens
MFSLDGTELQLDLESCYAQVCLPEMVCGTPIREMWQDCLGPPVPGARDSIHRTESEESSKDWQSSVDQPHSYVTEHEAPVSLEKSPSDVSASESPQHDVVDLGSTAPLKTMSSDVTKAAVESPVPKPSEAREAWPTLCSAQVAAWFFATLAAVAESLIPVPGAPRLVHAARHAGFTTVLLATPEPPRRLLLFDLIPVGVRGGLARGGFGATRGPVRWPLSRLPSTWCPVAAPSGRAPPPGSSVLPARSWRSKRAYQRRCCRRTRRPRRYCARWWPGPGRRRPTSCGRCCTGRASGCLRSTWRGQKMRAPAASGC

SEQ ID NO: 744125 - protein, 224 aa, Homo sapiens
MASAVWGSAPWWGPPPPAPARPLTDIDFCSGAQLQELTQLIQELGVQESWSDGPKPGADLLRAKDFVFSLLGLVHRRDPRFPPQAELLLLRGGIREGSLDLGHAPLGPYARGPHYDAGFTLLVPMFSLDGTELQLDLESCYAQVCLPEMVCGTPIREMWQDCLGPPVPGARDSIHRTESEESSKDWQSSVDQPHSYVTEHEAPVSLEKSPSDVSASESPAASGC

SEQ ID NO: 744126 - protein, 59 aa, Homo sapiens
SVLVMGRIPVGKKSNRKEVAAGPGFSCFLCMCQELESRSIAQAEVQWHGLRSLQAPPPG

SEQ ID NO: 744127 - protein, 66 aa, Homo sapiens
RFRTVAMESGVAAAIPGQSVPSAKSRTGNILSGPVTRLALSTSSRPLSALGLRFLSFQVKGFDLAF

SEQ ID NO: 744128 - protein, 119 aa, Homo sapiens
TDAFGSTEEGEKRWKDLKNRVVEHNIRIMAKYYTRITMKRMAQLLDLSVDESEAFLSNLVVNKTIFAKVDRLAGIINFQRPKDPNNLLNDWSQKLNSLMSLVNKTTHLIAKEEMIHNLQ

SEQ ID NO: 744129 - protein, 655 aa, Homo sapiens
MAKGGEALPQGSPAPVQDPHLIKVTVKTPKDKEDFSVTDTCTIQQLKEEISQRFKAHPDQLVLIFAGKILKDPDSLAQCGVRDGLTVHLVIKRQHRAMGNECPAASVPTQGPSPGSLPQPSSIYPADGPPAFSLGLLTGLSRLGLAYRGFPDQPSSLMRQHVSVPEFVTQLIDDPFIPGLLSNTGLVRQLVLDNPHMQQLIQHNPEIGHILNNPEIMRQTLEFLRNPAMMQEMIRSQDRVLSNLESIPGGYNVLCTMYTDIMDPMLNAVQEQFGGNPFATATTDNATTTTSQPSRMENCDPLPNPWTSTHGGSGSRQGRQDGDQDAPDIRNRFPNFLGIIRLYDYLQQLHENPQSLGTYLQGTASALSQSQEPPPSVNRVPPSSPSSQEPGSGQPLPEESVAIKGRSSCPAFLRYPTENSTGQGGDQDGAGKSSTGHSTNLPDLVSGLGDSANRVPFAPLSFSPTAAIPGIPEPPWLPSPAYPRSLRPDGMNPAPQLQDEIQPQLPLLMHLQAAMANPRALQALRQIEQGLQVLATEAPRLLLWFMPCLAGTGSVAGGIESREDPLMSEDPLPNPPPEVFPALDSAELGFLSPPFLHMLQDLVSTNPQQLQPEAHFQVQLEQLRSMGFLNREANLQALIATGGDVDAAVEKLRQS

SEQ ID NO: 744130 - protein, 655 aa, Homo sapiens; identical to SEQ ID NO: 744129

SEQ ID NO: 744131 - protein, 101 aa, Homo sapiens
FFLRDEVSLCCPGWSQTPGLKPSSHFSLPKGAAFLIYLISYEQAIGTAPFLFHKELCPLREGHRCWDPTAWDSESQALTYQLCGLGKVTLSEPWFSHLENR

SEQ ID NO: 744132 - protein, 70 aa, Homo sapiens
TWARQPRGQSPRGGRGVVCGQKVNPEGTVSGEGGQPRAGTLQRPVHPSLCCATGGVRTTGPTSQLQTQGH

SEQ ID NO: 744133 - protein, 388 aa, Homo sapiens
EKHELRAIRLSREDCGCDCRVFCDPDTCTCSLAGIKCQVDRMSFPCGCTKEGCSNTAGRIEFNPIRVRTHFLHTIMKLELEKNREQQIPTLNGCHSEISAHSSSMGPVAHSVEYSIADSFEIETEPQAAVLHLQSAEELDCQGEEEEEEEDGSSFCSGVTDSSTQSLAPSESDEEEEEEEEEEEEEDDDDDKGDGFVEGLGTHAEVVPLPSVLCYSDGTAVHESHAKNASFYANSSTLYYQIDSHIPGTPNQISENYSERDTVKNGTLSLVPYTMTPEQFVDYARQAEEAYGASHYPAANPSVIVCCSSSENDSGVPCNSLYPEHRSNHPQVEFHSYLKGPSQEGFVSALNGDSHISEHPAENSLSLAEKSILHEECIKSPVVETVPV

SEQ ID NO: 744134 - protein, 531 aa, Homo sapiens
TRANPVEFMCQAFKIVPYNTETLDKLLTESLKNNIPASGLHLFGINQLEEEDMMTNQRDEELPTLLHFAAKYGLKNLTALLLTCPGALQAYSVANKHGHYPNTIAEKHGFRDLRQFIDEYVETVDMLKSHIKEELMHGEEADAVYESMAHLSTDLLMKCSLNPGCDEDLYESMAAFVPAATEDLYVEMLQASTSNPIPGDGFSRATKDSMIRKFLEGNSMGMTNLERDQCHLGQEEDVYHTVDDDEAFSVDLASRPPVPVPRPETTAPGAHQLPDNEPYIFKVFAEKSQERPGNFYVSSESIRKGPPVRPWRDRPQSSIYDPFAGMKTPGQRQLITLQEQVKLGIVNVDEAVLHFKEWQLNQKKRSESFRFQQENLKRLRDSITRRQREKQKSGKQTDLEITVPIRHSQHLPAKVEFGVYESGPRKSVIPPRTELRRGDWKTDSTSSTASSTSNRSSTRSLLSVSSGMEGDNEDNEVPEVTRSRSPGPPQVDGTPTMSLERPPRVPPRAASQRPPTRETFHPPPPVPPRGR

SEQ ID NO: 744135 - protein, 531 aa, Homo sapiens; identical to SEQ ID NO: 744134

SEQ ID NO: 744136 - protein, 402 aa, Homo sapiens
TRANPVEFMCQAFKIVPYNTETLDKLLTESLKNNIPASGLHLFGINQLEEEDMMTNQRDEELPTLLHFAAKYGLKNLTALLLTCPGALQAYSVANKHGHYPNTIAEKHGFRDLRQFIDEYVETVDMLKSHIKEELMHGEEADAVYESMAHLSTDLLMKCSLNPGCDEDLYESMAAFVPAATEDLYVEMLQASTSNPIPGDGFSRATKDSMIRKFLEVNVDEAVLHFKEWQLNQKKRSESFRFQQENLKRLRDSITRRQREKQKSGKQTDLEITVPIRHSQHLPAKVEFGVYESGPRKSVIPPRTELRRGDWKTDSTSSTASSTSNRSSTRSLLSVSSGMEGDNEDNEVPEVTRSRSPGPPQVDGTPTMSLERPPRVPPRAASQRPPTRETFHPPPPVPPRGR

SEQ ID NO: 744137 - protein, 531 aa, Homo sapiens; identical to SEQ ID NO: 744134

SEQ ID NO: 744138 - protein, 404 aa, Homo sapiens
MRFFTSVACYGSCLFASELLIRCKDWLKGRPALFTALLACVLYLCEWTGAKHVPGSSYVEMLQASTSNPIPGDGFSRATKDSMIRKFLEGNSMGMTNLERDQCHLGQEEDVYHTVDDDEAFSVDLASRPPVPVPRPETTAPGAHQLPDNEPYIFKVFAEKSQERPGNFYVSSESIRKGPPVRPWRDRPQSSIYDPFAGMKTPGQRQLITLQEQVKLGIVNVDEAVLHFKEWQLNQKKRSESFRFQQENLKRLRDSITRRQREKQKSGKQTDLEITVPIRHSQHLPAKVEFGVYESGPRKSVIPPRTELRRGDWKTDSTSSTASSTSNRSSTRSLLSVSSGMEGDNEDNEVPEVTRSRSPGPPQVDGTPTMSLERPPRVPPRAASQRPPTRETFHPPPPVPPRGR

SEQ ID NO: 744139 - protein, 214 aa, Homo sapiens
HASRTRGSTHASGQRQLITLQEQVKLGIVNVDEAVLHFKEWQLNQKKRSESFRFQQENLKRLRDSITRRQREKQKSGKQTDLEITVPIRHSQHLPAKVEFGVYESGPRKSVIPPRTELRRGDWKTDSTSSTASSTSNRSSTRSLLSVSSGMEGDNEDNEVPEVTRSRSPGPPQVDGTPTMSLERPPRVPPRAASQRPPTRETFHPPPPVPPRGR

SEQ ID NO: 744140 - protein, 531 aa, Homo sapiens; identical to SEQ ID NO: 744134

SEQ ID NO: 744141 - protein, 531 aa, Homo sapiens; identical to SEQ ID NO: 744134

SEQ ID NO: 744142 - protein, 531 aa, Homo sapiens; identical to SEQ ID NO: 744134

SEQ ID NO: 744143 - protein, 513 aa, Homo sapiens
TRANPVEFMCQAFKIVPYNTETLDKLLTESLKNNIPASGLHLFGINQLEEEDMMTNQRDEELPTLLHFAAKYGLKNLTALLLTCPGALQAYSVANKHGHYPNTIAEKHGFRDLRQFIDEYVETVDMLKSHIKEELMHGEEADAVYESMAHLSTDLLMKCSLNPGCDEDLYESMAAFVPAATEDLYVEMLQASTSNPIPGDGFSRATKDSMIRKFLEGNSMGMTNLERDQCHLGQEEDVYHTVDDDEAFSVDLASRPPVPVPRPETTAPGAHQLPDNEPYIFKVFAEKSQERPGNFYVSSESIRKGPPVRPWRDRPQSSIYDPFAGMKTPGQRQLITLQEQVKLGIVNVDEAVLHFKEWQLNQKKRSESFRFQQENLKRLRDSITRRQREKQKSGKQTDLEITVPIRHSQHLPAKVEFGVYESGPRKSVIPPRTELRRGDWKTDSTSSTASSTSNRSSTRSLLSVSSGMEGDNEVRAGTPPHLSCPRGRFIARDRNPGERSQAQKVIYYRIPFI

SEQ ID NO: 744144 - protein, 650 aa, Homo sapiens
DFYTVETITSGSSCKCACVAPPSALNPCEGDFRLQKLREADSQDLKLSTIIDMLEGAFYGLDLLKLHSVTTKLVGRVDKLEEEVSKNLTKENEQIKEDMEEIRTEMNKRGKENCSENILDSMPDIRSALQRDAAAAYAHPEYEERFLQEETVSQQINSIELLQTRPLALPEVVKSQRPLQRQVHLRGRPASQPTVIRGITYYKAKVSEEENDIEEQQDEFFSGDNGVDLLIEDQLLRHNGLMTSVTRRPAATRQGHSTAVTSDLNARTAPWSSALPQPSTSDPSIANHASVGPTLQTTSVSPDPTRESVLQPSPQVPATTVAHTATQQPAAPAPPAVSPREALMEAMHTVPVPPTTVRTDSLGKDAPAGRGTTPASPTLSPEEEDDIRNVIGRCKDTLSTITGPTTQNTYGRNEGAWMKDPLAKDERIYVTNYYYGNTLVEFRNLENFKQGRWSNSYKLPYSWIGTGHVVYNGAFYYNRAFTRNIIKYDLKQRYVAAWAMLHDVAYEEATPWRWQGHSDVDFAVDENGLWLIYPALDDEGFSQEVIVLSKLNAADLSTQKETTWRTGLRRNFYGNCFVICGVLYAVDSYNQRNANISYAFDTHTNTQIVPRLLFENEYSYTTQIDYNPKDRLLYAWDNGHQVTYHVIFAY

SEQ ID NO: 744145 - protein, 462 aa, Homo sapiens
MPVPASTFSVIPYYKAKVSEEENDIEEQQDEFFSGDNGVDLLIEDQLLRHNGLMTSVTRRPAATRQGHSTAVTSDLNARTAPWSSALPQPSTSDPSIANHASVGPTLQTTSVSPDPTRESVLQPSPQVPATTVAHTATQQPAAPAPPAVSPREALMEAMHTVPVPPTTVRTDSLGKDAPAGRGTTPASPTLSPEEEDDIRNVIGRCKDTLSTITGPTTQNTYGRNEGAWMKDPLAKDERIYVTNYYYGNTLVEFRNLENFKQGRWSNSYKLPYSWIGTGHVVYNGAFYYNRAFTRNIIKYDLKQRYVAAWAMLHDVAYEEATPWRWQGHSDVDFAVDENGLWLIYPALDDEGFSQEVIVLSKLNAADLSTQKETTWRTGLRRNFYGNCFVICGVLYAVDSYNQRNANISYAFDTHTNTQIVPRLLFENEYSYTTQIDYNPKDRLLYAWDNGHQVTYHVIFAY

SEQ ID NO: 744146 - protein, 233 aa, Homo sapiens
MKDPLAKDERIYVTNYYYGNTLVEFRNLENFKQGRWSNSYKLPYSWIGTGHVVYNGAFYYNRAFTRNIIKYDLKQRYVAAWAMLHDVAYEEATPWRWQGHSDVDFAVDENGLWLIYPALDDEGFSQEVIVLSKLNAADLSTQKETTWRTGLRRNFYGNCFVICGVLYAVDSYNQRNANISYAFDTHTNTQIVPRLLFENEYSYTTQIDYNPKDRLLYAWDNGHQVTYHVIFAY

SEQ ID NO: 744147 - protein, 185 aa, Homo sapiens
MYYMAIIDQAFPSSVPQIITVIKCCHNERHGDIAEEMTVAYEEATPWRWQGHSDVDFAVDENGLWLIYPALDDEGFSQEVIVLSKLNAADLSTQKETTWRTGLRRNFYGNCFVICGVLYAVDSYNQRNANISYAFDTHTNTQIVPRLLFENEYSYTTQIDYNPKDRLLYAWDNGHQVTYHVIFAY

SEQ ID NO: 744148 - protein, 70 aa, Homo sapiens
RVLAVLVEPGLEGILGVPDFDAFSNTQIVPRLLFENEYSYTTQIDYNPKDRLLYAWDNGHQVTYHVIFAY

SEQ ID NO: 744149 - protein, 650 aa, Homo sapiens; identical to SEQ ID NO: 744144

SEQ ID NO: 744150 - protein, 650 aa, Homo sapiens; identical to SEQ ID NO: 744144

SEQ ID NO: 744151 - protein, 68 aa, Homo sapiens
RIFSEGICQYLWQLGASCPSLSSSGTPNLSTVVSMEEPSLRVRGMLTLTSKEGIISLKKGNIVLNPTT

SEQ ID NO: 744152 - protein, 623 aa, Homo sapiens
QYLKILTSLAEVATTNGHKLLSLSSNYDAQMKSLLRIVRMFCHVFRIGPSSPSNGIDMGYNGNKTPRSQVFKPLELLWHSLDEWLVLIATELMKNKRDSTEITSILLKQKGQDQDAASIPPFEPPGPGSYENLSTGTRESKPDALAGRQEASADCQDVISMTANRLSAVIQAFYMCCSCQMPPGMTSPRFIEFVCKHDEVLKCFVNRNPKIIFDHFHFLLECPELMSRFMHIIKAQPFKDRCEWFYEHLHSGQPDSDMVHRPVNENDILLVHRDSIFRSSCEVVSKANCAKLKQGIAVRFHGEEGMGQGVVREWFDILSNEIVNPDYALFTQSADGTTFQPNSNSYVNPDHLNYFRFAGQILGLALNHRQLVNIYFTRSFYKHILGIPVNYQDVASIDPEYAKNLQWILDNDISDLGLELTFSVETDVFGAMEEVPLKPGGGSILVTQNNKAEYVQLVTELRMTRAIQPQINAFLQGFHMFIPPSLIQLFDEYELELLLSGMPEIDVSDWIKNTEYTSGYEREDPVIQWFWEVVEDITQEERVLLLQFVTGSSRVPHGGFANIMGGSGLQNFTIAAVPYTPNLLPTSSTCINMLKLPEYPSKEILKDRLLVALHCGSYGYTMA

SEQ ID NO: 744153 - protein, 623 aa, Homo sapiens; identical to SEQ ID NO: 744152

SEQ ID NO: 744154 - protein, 95 aa, Homo sapiens
  misc_feature (24)..(24): Xaa can be any naturally occurring amino acid
GITNWYDERCKNPSVILDDSLLVXEEKSYGSGDICSLEFIHAHKMHSPVGQGVTASLKLIIQVSSTVVLCYCHLIPSMMSYVGSVIQLEALVLSQ

SEQ ID NO: 744155 - protein, 102 aa, Homo sapiens
MFTYSVPKPALGLVTIFFFSLELRWCENIHKCVKINSVTQDLLCRPSRPVAIATPTWFLPSQPWEATCSSHPSNRAGTWRGVGVRDSPGAGQRGPAGRLGSQ

SEQ ID NO: 744156 - protein, 924 aa, Homo sapiens
NLCSLIIPLREVTIVEKADSSSVLPSPLSISTRNRMTFLFANLKDRDFLVQRISDFLQQTTSKIYSDKEFAGSYNSSDDEVYSRPSSLVSSSPQRSTSSDADGERQFNLNGNSVPTATQTLMTMYRRRSPEEFNPKLAKEFLKEQAWKIHFAEYGQGICMYRTEKTRELVLKGIPESMRGELWLLLSGAINEKATHPGYYEDLVEKSMGKYNLATEEIERDLHRSLPEHPAFQNEMGIAALRRVLTAYAFRNPNIGYCQAMNIVTSVLLLYAKEEEAFWLLVALCERMLPDYYNTRVVGALVDQGVFEELARDYVPQLYDCMQDLGVISTISLSWFLTLFLSVMPFESAVVVVDCFFYEGIKVIFQLALAVLDANVDKLLNCKDDGEAMTVLGRYLDSVTNKDSTLPPIPHLHSLLSDDVEPYPEVDIFRLIRTSYEKFGTIRADLIEQMRFKQRLKVIQTLEDTTKRNVVRTIVTETSFTIDELEELYALFKAEHLTSCYWGGSSNALDRHDPSLPYLEQYRIDFEQFKGMFALLFPWACGTHSDVLASRLFQLLDENGDSLINFREFVSGLSAACHGDLTEKLKLLYKMHVLPEPSSDQDEPDSAFEATQYFFEDITPECTHVVGLDSRSKQGADDGFVTVSLKPDKGKRANSQENRNYLRLWTPENKSKSKNAKDLPKLNQGQFIELCKTMYNMFSEDPNEQELYHATAAVTSLLLEIGEVGKLFVAQPAKEGGSGGSGPSCHQGIPGVLFPKKGPGQPYVVESVEPLPASLAPDSEEHSLGGQMEDIKLEDSSPRDNGACSSMLISDDDTKDDSSMSSYSVLSAGSHEEDKLHCEDIGEDTVLVRSGQGTAALPRSTSLDRDWAITFEQFLASLLTEPALVKYFDKPVCMMARITSAKNIRMMGKPLTSASDYEISAMSG

SEQ ID NO: 744157 - protein, 924 aa, Homo sapiens; identical to SEQ ID NO: 744156

SEQ ID NO: 744158 - protein, 194 aa, Homo sapiens
NLCSLIIPLREVTIVEKADSSSVLPSPLSISTRNRMTFLFANLKDRDFLVQRISDFLQQTTSKIYSDKEFAGSYNSSDDEVYSRPSSLVSSSPQRSTSSDADGERQFNLNGNSVPTATQTLMTMYRRRSPEEFNPKLAKEFLKEQAWKIHFAEYGQGICMYRTEKTRELVLKGIPESMRGELWLLLSGTAAGLG

SEQ ID NO: 744159 - protein, 924 aa, Homo sapiens; identical to SEQ ID NO: 744156

SEQ ID NO: 744160 - protein, 924 aa, Homo sapiens; identical to SEQ ID NO: 744156

SEQ ID NO: 744161 - protein, 326 aa, Homo sapiens
MASKVSCLYVLTVVCWASALWYLSITRPTSSYTGSKPFSHLTVARKNFTFGNIRTRPINPHSFEFLINEPNKCEKNIPFLVILISTTHKEFDARQAIRETWGDENNFKGIKIATLFLLGKNADPVLNQMVEQESQIFHDIIVEDFIDSYHNLTLKTLMGMRWVATFCSKAKYVMKTDSDIFVNMDNLIYKLLKPSTKPRRRYFTGYVINGGPIRDVRSKWYMPRDLYPDSNYPPFCSGTGYIFSADVAELIYKTSLHTRLLHLEDVYVGLCLRKLGIHPFQNSGFNHWKMAYSLCRYRRVITVHQISPEEMHRIWNDMSSKKHLRC

SEQ ID NO: 744162 - protein, 81 aa, Homo sapiens
PRSADRSFSSRFAWSTLPLSEGDLAPWLPALSSLMCAILPGLCLVLREAIREATAGLEVCLSVSTSGLLVHLLYLEVIQAH

SEQ ID NO: 744163 - protein, 133 aa, Homo sapiens [sequence omitted]

SEQ ID NO: 744164 - protein, 194 aa, Homo sapiens
MPREDRATWKSNYFLKIIQLLDDYPKCFIVGADNVGSKQMQQIRMSLRGKAVVLMGKNTMMRKAIRGHLENNPALEKLLPHIRGNVGFVFTKEDLTEIRDMLLANKVPAAARAGAIAPCEVTVPAQNTGLGPEKTSFFQALGITTKISRGTIEILCAADQDWRLLWGGHQQGVRNGGFTTLSGWYYKGTLLLRS

SEQ ID NO: 744165 - protein, 147 aa, Homo sapiens
  misc_feature (139)..(139): Xaa can be any naturally occurring amino acid
  misc_feature (147)..(147): Xaa can be any naturally occurring amino acid
MPREDRATWKSNYFLKIIQLLDDYPKCFIVGADNVGSKQMQQIRMSLRGKAVVLMGKNTMMRKAIRGHLENNPALEKLLPHIRGNVGFVFTKEDLTEIRDMLLANKVPAAARAGAIAPCEVTVPAQNTGLGPELLFQLXIPFPGTVX

SEQ ID NO: 744166 - protein, 315 aa, Homo sapiens
MPREDRATWKSNYFLKIIQLLDDYPKCFIVGADNVGSKQMQQIRMSLRGKAVVLMGKNTMMRKAIRGHLENNPALEKLLPHIRGNVGFVFTKEDLTEIRDMLLANKVPAAARAGAIAPCEVTVPAQNTGLGPEKTSFFQALGITTKISRGTIEILSDVQLIKTGDKVGASEATLLNMLNISPFSFGLVIQQVFDNGSIYNPEVLDITEETLHSRFLEGVRNVASVCLQIGYPTVASVPHSIINGYKRVLALSVETDYTFPLAEKVKAFLADPSAFVAAAPVAAATTVLLLLLQPQLRLKPRKSRRSRTRIWDWSL

SEQ ID NO: 744167 - protein, 315 aa, Homo sapiens; identical to SEQ ID NO: 744166

SEQ ID NO: 744168 - protein, 315 aa, Homo sapiens; identical to SEQ ID NO: 744166

SEQ ID NO: 744169 - protein, 339 aa, Homo sapiens
MPREDRATWKSNYFLKIIQLLDDYPKCFIVGADNVGSKQMQQIRMSLRGKAVVLMGKNTMMRKAIRGHLENNPALEKLLPHIRGNVGFVFTKEDLTEIRDMLLANKVPAAARAGAIAPCEVTVPAQNTGLGPEKTSFFQALGITTKISRGTIEILSDVQLIKTGDKVGASEATLLNMLNISPFSFGLVIQQVFDNGSIYNPEVLDITEETLHSRFLEGVRNVASVCLQIGYPTVASVPHSIINGYKRVLALSVIAQAPYTSESYDQVQLDPWLLVSAARMYFAPPPALVVPAAPVKVQSKKEYYHPSHRIWSRSCPRPTSAPPHHLWTLESGINAVCLI

SEQ ID NO: 744170 - protein, 253 aa, Homo sapiens
MPREDRATWKSNYFLKIIQLLDDYPKCFIVGADNVGSKQMQQIRMSLRGKAVVLMGKNTMMRKAIRGHLENNPALEKLLPHIRGNVGFVFTKEDLTEIRDMLLANKVPAAARAGAIAPCEVTVPAQNTGLGPEKTSFFQALGITTKISRGTIEILGVRNVASVCLQIGYPTVASVPHSIINGYKRVLALSVETDYTFPLAEKVKAFLADPSAFVAAAPVAAATTVLLLLLQPQLRLKPRKSRRSRTRIWDWSL

SEQ ID NO: 744171 - protein, 244 aa, Homo sapiens
MPREDRATWKSNYFLKIIQLLDDYPKCFIVGADNVGSKQMQQIRMSLRGKAVVLMGKNTMMRKAIRGHLENNPALEKLLPHIRGNVGFVFTKEDLTEIRDMLLANKVPAAARAGAIAPCEVTVPAQNTGLGPEKTSFFQALGITTKISRGTIEILSDVQLIKTGDKVGASEATLLNMLNISPFSFGLVIQQVFDNGSIYNPEVLDITEETLHSRFLEQGLAWQIGLSQLVCIRSPHSIYSGTRP

SEQ ID NO: 744172 - protein, 297 aa, Homo sapiens
MPREDRATWKSNYFLKIIQLLDDYPKCFIVGADNVGSKQMQQIRMSLRGKAVVLMGKNTMMRKAIRGHLVVFTKEDLTEIRDMLLANKVPAAARAGAIAPCEVTVPAQNTGLGPEKTSFFQALGITTKISRGTIEILSDVQLIKTGDKVGASEATLLNMLNISPFSFGLVIQQVFDNGSIYNPEVLDITEETLHSRFLEGVRNVASVCLQIGYPTVASVPHSIINGYKRVLALSVETDYTFPLAEKVKAFLADPSAFVAAAPVAAATTVLLLLLQPQLRLKPRKSRRSRTRIWDWSL

SEQ ID NO: 744173 - protein, 197 aa, Homo sapiens
MPREDRATWKSNYFLKIIQLLDDYPKCFIVGADNVGSKQMQQIRMSLRGKAVVLMGKNTMMRKAIRGHLENNPALEKLLPHIRGNVGFVFTKEDLTEIRDMLLANKVPAAARAGAIAPCEVTVPAQNTGLGPEKTSFFQALGITTKISRGTIEILCELIRRRRGSRKHAVQCHIPPFLGCITGRRQINLICSGNYSV

SEQ ID NO: 744174 - protein, 154 aa, Homo sapiens
MPREDRATWKSNYFLKIIQLLDDYPKCFIVGADNVGSKQMQQIRMSLRGKAVVLMGKNTMMRKAIRGHLENNPALEKLLPHIRGNVGFVFTKEDLTEIRDMLLANKVPAAARAGAIAPCVDCQLAIHAWPAIHAWRTSALSTFDGSRRAYHAWL

SEQ ID NO: 744175 - protein, 134 aa, Homo sapiens
MPREDRATWKSNYFLKIIQLLDDYPKCFIVGADNVGSKQMQQIRMSLRGKAVVLMGKNTMMRKAIRGHLENNPALENCCLISGDVGFVSTKEAYLDQGHFLAIVPPLRLPIPCKYFPPDIVGQSSFQVGTNSGH

SEQ ID NO: 744176 - protein, 105 aa, Homo sapiens
MPREDRATWKSNYFLKIIQLLDDYPKCFIVGADNVGSKQMQQIRMSLRGKAVVLMGKNTMMLANKVQLLPCWCIAHVGTFSQTLFGPEDLFSGSGYTEFRDIESR

SEQ ID NO: 744177 - protein, 231 aa, Homo sapiens
MPREDRATWKSNYFLKIIQLLDDYPKCFIVGADNVGSKQMQQIRMSLRGKAVVLMGKNTMMRKAIRGHLENNPALEKLLPHIRGNVGFVFTKEDLTEIRDMLLANKVPAAARAGAIAPCEVTVPAQNTGLGPEKTSFFQALGITTKISRGTIEILSDVQLIKTGDKVGASEATLLNMLNISPFSFGLVIQQVFDNGSIYNPEVLDITEETLHSRFLEVPNVAVLLRCYHCA

SEQ ID NO: 744178 - protein, 242 aa, Homo sapiens
  misc_feature (237)..(237): Xaa can be any naturally occurring amino acid
MPREDRATWKSNYFLKIIQLLDDYPKCFIVGADNVGSKQMQQIRMSLRGKAVVLMGKNTMMRKAIRGHLENNPALEKLLPHIRGNVGFVFTKEDLTEIRDMLLANKVPAAARAGAIAPCEVTVPAQNTGLGPEKTSFFQALGITTKISRGTIEILCAADQDWRPQWGGREAAGGLVIFPFPLGRASAGVPRWRLTLGCVPGNGFLRGGPGPLRSVPRVAPLRETARWEPLECPLARXDGSRI

SEQ ID NO: 744179 - protein, 315 aa, Homo sapiens; identical to SEQ ID NO: 744166

SEQ ID NO: 744180 - protein, 315 aa, Homo sapiens; identical to SEQ ID NO: 744166

SEQ ID NO: 744181 - protein, 325 aa, Homo sapiens
MPREDRATWKSNYFLKIIQLLDDYPKCFIVGADNVGSKQMQQIRMSLRGKAVVLMGKNTMMRKAIRGHLENNPALEKLLPHIRGNVGFVFTKEDLTEIRDMLLANKVPAAARAGAIAPCEVTVPAQNTGLGPEKTSFFQALGITTKISRGTIEILSDVQLIKTGDKVGASEATLLNMLNISPFSFGLVIQQVFDNGSIYNPEVLDITEETLHSRFLEGVRNVASVCLQIGYPTVASVPHSIINGYKRVLALSVETDYTFPLAEKVKAFLADPSAFVAAAPVAAATTVLLLLLQPQLRLKPSKTLTTPTPRLPSFASPPLLKAPFL

SEQ ID NO: 744182 - protein, 263 aa, Homo sapiens
MPREDRATWKSNYFLKIIQLLDDYPKCFIVGADNVGSKQMQQIRMSLRGKAVVLMGKNTMMRKAIRGHLENNPALEKLLPHIRGNVGFVFTKEDLTEIRDMLLANKVPAAARAGAIAPCEVTVPAQNTGLGPEKTSFFQALGITTKISRGTIEILSDVQLIKTGDKVGASEATLLNMLNISPFSFGLVIQQVFDNGSIYNPEVLDITEETLHSRFLERVSVLEGPQCRVVALSPVVSHYTGTCGLREPLVGRLSLGAGGLLCA

SEQ ID NO: 744183 - protein, 183 aa, Homo sapiens
MPREDRATWKSNYFLKIIQLLDDYPKCFIVGADNVGSKQMQQIRMSLRGKAVVLMGKNTMMRKAIRGHLENNPALEKLLPHIRGNVGFVFTKEDLTEIRDMLLANKVPAAARAGAIAPCEVTVPAQNTGLGPEKTSFFQALGITNWRQSGSQRSHAAEHAQHLPLLLWAGHPAGVRQWQHLQP

SEQ ID NO: 744184 - protein, 199 aa, Homo sapiens
  misc_feature (161)..(161): Xaa can be any naturally occurring amino acid
MPREDRATWKSNYFLKIIQLLDDYPKCFIVGADNVGSKQMQQIRMSLRGKAVVLMGKNTMMRKAIRGHLENNPALEKLLPHIRGNVGFVFTKEDLTEIRDMLLANKVPAAARAGAIAPCEVTVPAQNTGLGPEKTSFFQALGITTKISRGTIEILCEDDKXWRKSGSKRSKDDENVKNFPLILWDGNKEGVRKWKNIKT

SEQ ID NO: 744185 - protein, 183 aa, Homo sapiens; identical to SEQ ID NO: 744183

SEQ ID NO: 744186 - protein, 164 aa, Homo sapiens
MPREDRATWKSNYFLKIIQLLDDYPKCFIVGADNVGSKQMQQIRMSLRGKAVVLMGKNTMMRKAIRGHLENNPALEKLLPHIRGNVGFVFTKEDLTEIRDMLLANKVPAAARAGAIAPCEVTVPAVGSSFRYHTKISDDVQLIKTGDFFGVVTNKGFAMEDLQP

SEQ ID NO: 744187 - protein, 298 aa, Homo sapiens
MSVASVFVGPPQTRGPHVRTPMTFPPRVIWGCTAQHDHGGRKRSGTSRLQVPVSACAPSRFGRRPREPGALRRTDLRGCLKAEAKMAVLSAPGLRGFRILGLRSSVGLAVQARGVHQSVATDGPSSTQPALPKARAVAPKPSSRGEYVVAKLDDLVNWARRSSLWPMTFGLACCAVEMMHMAAPRYDMDRFGVVFRASPRQSDVMIVAGTLTNKMAPALRKVYDQMPEPRYVVSMGSCANGGGYYHYSYSVVRGCDRIVPVDIYIPGCPPTAEALLYGILQLQRKIKRERRLQIWYRR

SEQ ID NO: 744188 - protein, 298 aa, Homo sapiens; identical to SEQ ID NO: 744187

SEQ ID NO: 744189 - protein, 335 aa, Homo sapiens
MTRGSTHASMAVLSAPGLRGFRILGLRSSVGLAVQARGVHQSVATDGPSSTQPALPKARAVAPKPSSRGEYVVAKLDDLVNWARRSSLWPMTFGLACCAVEMMHMAAPRYDMDRFGVVFRASPRQSDVMIVAGTLTNKMAPALRKVYDQMPEPRYVVSMGSCANGGGYYHYSYSVVRGCDRIVPVDIYIPVQTNGASCECGCTPPSLQTELLPPWGPRSSLPADCAPCLGTALLPPWGPCSSLPPCGPRSSLPGDRAPPSLRTALGPPWGPRPSLPADRAPPSLGTSLLPPSLRTVLLPPCGLCFSLPWSSLDLPELCQVGPGRPFPGPAVALSF

SEQ ID NO: 744190 - protein, 103 aa, Homo sapiens
PLTRVPSPGSSSVGLAVQARGVHQSVATDGPSSTQPALPKARAVAPKPSSRGEYVVAKLDDLVNWARRVSTMSCRPSSSARASLHTHRHTHTHTNVQTRTHTT

SEQ ID NO: 744191 - protein, 284 aa, Homo sapiens
MRSEPLWAAAPGTRSAKENGPQRLSEGRGQDGGAVRWSLPLSPKLECSGAASAHCNLYLPGSSDSPASASRVAGITAPGLRGFRILGLRSSVGLAVQARGVHQSVATDGPSSTQPALPKARAVAPKPSSRGEYVVAKLDDLVNWARRSSLWPMTFGLACCAVEMMHMAAPRYDMDRFGVVFRASPRQSDVMIVAGTLTNKMAPALRKVYDQMPEPRYVVSMGSCANGGGYYHYSYSVVRGCDRIVPVDIYIPGCPPTAEALLYGILQLQRKIKRERRLQIWYRR

SEQ ID NO: 744192 - protein, 222 aa, Homo sapiens
MTRGSTHASMAVLSAPGLRGFRILGLRSSVGLAVQARGVHQSVATDGPSSTQPALPKARAVAPKPSSRGEYVVAKLDDLVNWARRSSLWPMTFGLACCAVEMMHMAAPRYDMDRFGVVFRASPRQSDVMIVAGTLTNKMAPALRKVYDQMPEPRYVVSMGSCANGGGYYHYSYSVVRGCDRIVPVDIYIPGCPPTAEALLYGILQLQRKIKRERRLQIWYRR

SEQ ID NO: 744193 - protein, 214 aa, Homo sapiens
PSGRAAAPGLRGFRILGLRSSVGLAVQARGVHQSVATDGPSSTQPALPKARAVAPKPSSRGEYVVAKLDDLVNWARRSSLWPMTFGLACCAVEMMHMAAPRYDMDRFGVVFRASPRQSDVMIVAGTLTNKMAPALRKVYDQMPEPRYVVSMGSCANGGGYYHYSYSVVRGCDRIVPVDIYIPGCPPTAEALLYGILQLQRKIKRERRLQIWYRR

SEQ ID NO: 744194 - protein, 291 aa, Homo sapiens
MSVASVFVGPPQTRGPHVRTPMTFPPRVIWGCTAQHDHGGRKRSGTSRLQVPVSACAPSRFGRRPREPGALRRTDLRGCLKAEAKMAVLSAPGLRGFRILGLRSSVGLAVQARGVHQSVATDGPSSTQPALPKARAVAPKPSSRGEYVVAKLDDLVNWARRSSLWPMTFGLACCAVEMMHMAAPRYDMDRFGVVFRASPRQSDVMIVAGTLTNKMAPALRKVYDQMPEPRYVVSMGSCANGGGYYHYSYSVVRGCDRIVPVDIYIPGRAGTAPPTRELETGPAPHGARRPL

SEQ ID NO: 744195 - protein, 217 aa, Homo sapiens
QLYARITGSRQMAVLSAPGLRGFRILGLRSSVGLAVQARGVHQSVATDGPSSTQPALPKARAVAPKPSSRGEYVVAKLDDLVNWARRSSLWPMTFGLACCAVEMMHMAAPRYDMDRFGVVFRASPRQSDVMIVAGTLTNKMAPALRKVYDQMPEPRYVVSMGSCANGGGYYHYSYSVVRGCDRIVPVDIYIPGRAGTAPPTRELETGPAPHGARRPL

SEQ ID NO: 744196 - protein, 267 aa, Homo sapiens
MSVASVFVGPPQTRGPHVRTPMTFPPRVIWGCTAQHDHGGRKRSGTSRLQVPVSACAPSRFGRRPREPGALRRTDLRGCLKAEAKMAVLSAPGLRGFRILGLRSSVGLAVQARGVHQSVATDGPSSTQPALPKARAVAPKPSSRGEYVVAKLDDLVNWARRSSLWPMTFGLACCAVEMMHMAAPRYDMDRFGVVFRASPRQSDVMIVAGTLTNKMAPALRKVYDQMPEPRYVVSMGSCANGGGYYHYSYSVVRGCDRIVPVDIYIPD

SEQ ID NO: 744197 - protein, 252 aa, Homo sapiens
MTRGSTHASMAVLSAPGLRGFRILGLRSSVGLAVQARGVHQSVATDGPSRPLAAAVGARIRLWEAPAWLTPPVPVCLCASTQPALPKARAVAPKPSSRGEYVVAKLDDLVNWARRSSLWPMTFGLACCAVEMMHMAAPRYDMDRFGVVFRASPRQSDVMIVAGTLTNKMAPALRKVYDQMPEPRYVVSMGSCANGGGYYHYSYSVVRGCDRIVPVDIYIPGCPPTAEALLYGILQLQRKIKRERRLQIWYRR

SEQ ID NO: 744198 - protein, 237 aa, Homo sapiens
PSGRAAAPGLRGFRILGLRSSVGLAVQARGVHQSVATDGPSRPLAAAVGARIRLWEAPAWLTPPVPVCLCASTQPALPKARAVAPKPSSRGEYVVAKLDDLVNWARRSSLWPMTFGLACCAVEMMHMAAPRYDMDRFGVVFRASPRQSDVMIVAGTLTNKMAPALRKVYDQMPEPRYVVSMGSCANGGGYYHYSYSVVRGCDRIVPVDIYIPGRAGTAPPTRELETGPAPHGARRPL

SEQ ID NO: 744199 - protein, 84 aa, Homo sapiens
IQGHQTLALAPGGCPQPLHRASPHPQRQSTITWAASTEADCSHSSGGWKAKIGGQQGWFLLRPLSLACPWPSSPCVFPLYMFVS

SEQ ID NO: 744200 - protein, 79 aa, Homo sapiens
MGQGGGHTSQSLTSCGSRPLAAAVGARIRLWEAPAWLTPPVPVCLCASTQPALPKARAVAPKPSSRGEYVVAKLDDLVN

SEQ ID NO: 744201 - protein, 132 aa, Homo sapiens [sequence omitted]

SEQ ID NO: 744202 - protein, 132 aa, Homo sapiens [sequence omitted]

SEQ ID NO: 744203 - protein, 132 aa, Homo sapiens [sequence omitted]

SEQ ID NO: 744204 - protein, 410 aa, Homo sapiens
DLAVEMHEPYTFLNGLTVADMEDLLEDIQVYMELEQGKNADFWRDMTTITEDEISKLRKLEASGKGPGHRGQNPRWWPQPGHGLLGEPPAAASCPHGTGPVSTRLRERHQDVLRQKLYKLKQEQGVESEPLFPILKQEPQSPSRSLEPEDAAPTPPGPSSEGGPAEAEVDGATPTEGDGDGDGEGEGEGEAVLMEEDLIQQSLDDYDAGRYSPRLLTAHELPLDAHVLEPDEDLQRLQLSRQQLQVTGDASESAEDIFFRRAKEGMGQDEAQFSVEMPLTGKAYLWADKYRPRKPRFFNRVHTGFEWNKYNQTHYDFDNPPPKIVQGYKFNIFYPDLIDKRSTPEYFLEACADNKDFAILRFHAGPPYEDIAFKIVNREWEYSHRHGFRCQFANGIFQLWFHFKRYRYRR

SEQ ID NO: 744205 - protein, 441 aa, Homo sapiens
DLAVEMHEPYTFLNGLTVADMEDLLEDIQVYMELEQGKNADFWRDMTTITEDEISKLRKLEASGKGPGERREGVNASVSSDVQSVFKGKTYNQLQVIFQGIEGKIRAGGPNLDMGYWESLLQQLRAHMAGPGEHRLRERHQDVLRQKLYKLKQEQGVESEPLFPILKQEPQSPSRSLEPEDAAPTPPGPSSEGGPAEAEVDGATPTEGDGDGDGEGEGEGEAVLMEEDLIQQSLDDYDAGRYSPRLLTAHELPLDAHVLEPDEDLQRLQLSRQQLQVTGDASESAEDIFFRRAKEGMGQDEAQFSVEMPLTGKAYLWADKYRPRKPRFFNRVHTGFEWNKYNQTHYDFDNPPPKIVQGYKFNIFYPDLIDKRSTPEYFLEACADNKDFAILRFHAGPPYEDIAFKIVNREWEYSHRHGFRCQFANGIFQLWFHFKRYRYRR

SEQ ID NO: 744206 - protein, 441 aa, Homo sapiens; identical to SEQ ID NO: 744205

SEQ ID NO: 744207 - protein, 441 aa, Homo sapiens; identical to SEQ ID NO: 744205

SEQ ID NO: 744208 - protein, 441 aa, Homo sapiens; identical to SEQ ID NO: 744205

SEQ ID NO: 744209 - protein, 441 aa, Homo sapiens; identical to SEQ ID NO: 744205

SEQ ID NO: 744210 - protein, 1228 aa, Homo sapiens
MKGARLFVLLSSLWSGGIGLNNSKHSWTIPEDGNSQKTMPSASVPPNKIQSLQILPTTRVMSAEIATTPEARTSEDSLLKSTLPPSETSAPAEGVRNQTLTSTEKAEGVVKLQNLTLPTNASIKFNPGAESVVLSNSTLKFLQSFARKSNEQATSLNTVGGTGGIGGVGGTGGVGNRAPRETYLSRGDSSSSQRTDYQKSNFETTRGKNWCAYVHTRLSPTVILDNQVTYVPGGKGPCGWTGGSCPQRSQKISNPVYRMQHKIVTSLDWRCCPGYSGPKCQLRAQEQQSLIHTNQAESHTAVGRGVAEQQQQQGCGDPEVMQKMTDQVNYQAMKLTLLQKKIDNISLTVNDVRNTYSSLEGKVSEDKSREFQSLLKGLKSKSINVLIRDIVREQFKIFQNDMQETVAQLFKTVSSLSEDLESTRQIIQKVNESVVSIAAQQKFVLVQENRPTLTDIVELRNHIVNVRQEMTLTCEKPIKELEVKQTHLEGALEQEHSRSILYYESLNKTLSKLKEVHEQLLSTEQVSDQKNAPAAESVSNNVTEYMSTLHENIKKQSLMMLQMFEDLHIQESKINNLTVSLEMEKESLRGECEDMLSKCRNDFKFQLKDTEENLHVLNQTLAEVLFPMDNKMDKMSEQLNDLTYDMEILQPLLEQGASLRQTMTYEQPKEAIVIRKKIENLTSAVNSLNFIIKELTKRHNLLRNEVQGRDDALERRINEYALEMEDGLNKTMTIINNAIDFIQDNYALKETLSTIKDNSEIHHKCTSDMETILTFIPQFHRLNDSIQTLVNDNQRYNFVLQVAKTLAGIPRDEKLNQSNFQKMYQMFNETTSQVRKYQQNMSHLEEKLLLTTKISKNFETRLQDIESKVTQTLIPYYISVKKGSVVTNERDQALQLQVLNSRFKALEAKSIHLSINFFSLNKTLHEVLTMCHNASTSVSELNATIPKWIKHSLPDIQLLQKGLTEFVEPIIQIKTQAALSNSTCCIDRSLPGSLANVVKSQKQVKSLPKKINALKKPTVNLTTVLIGRTQRNTDNIIYPEEYSSCSRHPCQNGGTCINGRTSFTCACRHPFTGDNCTIKLVEENALAPDFSKGSYRYAPMVAFFASHTYGMTIPGPILFNNLDVNYGASYTPRTGKFRIPYLGVYVFKYTIESFSAHISGFLVVDGIDKLAFESENINSEIHCDRVLTGDALLELNYGQEVWLRLAKGTIPAKFPPVTTFSGYLLYRT

SEQ ID NO: 744211 - protein, 970 aa, Homo sapiens
MQHKIVTSLDWRCCPGYSGPKCQLRAQEQQSLIHTNQAESHTAVGRGVAEQQQQQGCGDPEVMQKMTDQVNYQAMKLTLLQKKIDNISLTVNDVRNTYSSLEGKVSEDKSREFQSLLKGLKSKSINVLIRDIVREQFKIFQNDMQETVAQLFKTVSSLSEDLESTRQIIQKVNESVVSIAAQQKFVLVQENRPTLTDIVELRNHIVNVRQEMTLTCEKPIKELEVKQTHLEGALEQEHSRSILYYESLNKTLSKLKEVHEQLLSTEQVSDQKNAPAAESVSNNVTEYMSTLHENIKKQSLMMLQMFEDLHIQESKINNLTVSLEMEKESLRGECEDMLSKCRNDFKFQLKDTEENLHVLNQTLAEVLFPMDNKMDKMSEQLNDLTYDMEILQPLLEQGASLRQTMTYEQPKEAIVIRKKIENLTSAVNSLNFIIKELTKRHNLLRNEVQGRDDALERRINEYALEMEDGLNKTMTIINNAIDFIQDNYALKETLSTIKDNSEIHHKCTSDMETILTFIPQFHRLNDSIQTLVNDNQRYNFVLQVAKTLAGIPRDEKLNQSNFQKMYQMFNETTSQVRKYQQNMSHLEEKLLLTTKISKNFETRLQDIESKVTQTLIPYYISVKKGSVVTNERDQALQLQVLNSRFKALEAKSIHLSINFFSLNKTLHEVLTMCHNASTSVSELNATIPKWIKHSLPDIQLLQKGLTEFVEPIIQIKTQAALSNSTCCIDRSLPGSLANVVKSQKQVKSLPKKINALKKPTVNLTTVLIGRTQRNTDNIIYPEEYSSCSRHPCQNGGTCINGRTSFTCACRHPFTGDNCTIKLVEENALAPDFSKGSYRYAPMVAFFASHTYGMTIPGPILFNNLDVNYGASYTPRTGKFRIPYLGVYVFKYTIESFSAHISGFLVVDGIDKLAFESENINSEIHCDRVLTGDALLELNYGQEVWLRLAKGTIPAKFPPVTTFSGYLLYRT

SEQ ID NO: 744212 - protein, 378 aa, Homo sapiens
MKGARLFVLLSSLWSGGIGLNNSKHSWTIPEDGNSQKTMPSASVPPNKIQSLQILPTTRVMSAEIATTPEARTSEDSLLKSTLPPSETSAPAEGVRNQTLTSTEKAEGVVKLQNLTLPTNASIKFNPGAESVVLSNSTLKFLQSFARKSNEQATSLNTVGGTGGIGGVGGTGGVGNRAPRETYLSRGDSSSSQRTDYQKSNFETTRGKNWCAYVHTRLSPTVILDNQVTYVPGGKGPCGWTGGSCPQRSQKISNPVYRMQHKIVTSLDWRCCPGYSGPKCQLRAQEQQSLIHTNQAESHTAVGRGVAEQQQQQGCGDPEVMQKMTDQVNYQAMKLTLLQKKIDNISLTVNDVRNTYSSLEGKVSEDKSREFQSLLKGK

SEQ ID NO: 744213 - protein, 322 aa, Homo sapiens
MKGARLFVLLSSLWSGGIGLNNSKHSWTIPEDGNSQKTMPSASVPPNKIQSLQILPTTRVMSAEIATTPEARTSEDSLLKSTLPPSETSAPAEGVRNQTLTSTEKAEGVVKLQNLTLPTNASIKFNPGAESVVLSNSTLKFLQSFARKSNEQATSLNTVGGTGGIGGVGGTGGVGNRAPRETYLSRGDSSSSQRTDYQKSNFETTRGKNWCAYVHTRLSPTVILDNQVTYVPGGKGPCGWTGGSCPQRSQKISNPVYRMQHKIVTSLDWRCCPGYSGPKCQLRAQEQQSLIHTNQAESHTAVGRGVAEQQQQQGCGDPGHRL

SEQ ID NO: 744214 - protein, 208 aa, Homo sapiens
RRSVLEKNLIKVTVAPFNPTVCDALLDKDETDSSKDTEKLSSLGEEMREDGLSPNESKLCTESEGISPNNSAWNGPQLSSSNNNFQQTVSDKNMPDSENPTSVFSRISDHSETPNMELSCRNGGSHKSSCEMRSLVVSTSSNKQDVLNKDSGKMKGHERRLGKVIPVLQTKTRTNVPTFSQSNLEQQKQLYLRSLIAHIEDPEDTNQG

SEQ ID NO: 744215 - protein, 208 aa, Homo sapiens; identical to SEQ ID NO: 744214

SEQ ID NO: 744216 - protein, 334 aa, Homo sapiens
RRVRFSALDLGGSVACSRRETRCRGEPSGRTFQDRNRPSAEKMSLRIDVDTNFPECVVDAGKVTLGTQQRQEMDPRLREKQNEIILRAVCALLNSGGGIIKAEIENKGYNYERHGVGLDVPPIFRSHLDKMQKENHFLIFVKSWNTEAGVPLATLCSNLYHRERTSTDVMDSQEALAFLKCRTQTPTNINVSNSLGPQAAQGSVQYEGNINVSAAALFDRKRLQYLEKLNLPESTHVEFVMFSTDVSHCVKDRLPKCVSAFANTEGGYVFFGVHDETCQVIGCEKKKAYYGGIMTFAWATDNDALRHLSTEIIQARFLASGLKCRYYNPAIHTA

SEQ ID NO: 744217 - protein, 331 aa, Homo sapiens
MVRGPRVIGSVACSRRETRCRGEPSGRTFQDRNRPSAEKMSLRIDVDTNFPECVVDAGKVTLGTQQRQEMDPRLREKQNEIILRAVCALLNSGGGIIKAEIENKGYNYERHGVGLDVPPIFRSHLDKMQKENHFLIFVKSWNTEAGVPLATLCSNLYHRERTSTDVMDSQEALAFLKCRTQTPTNINVSNSLGPQAAQGSVQYEGNINVSAAALFDRKRLQYLEKLNLPESTHVEFVMFSTDVSHCVKDRLPKCVSAFANTEGGYVFFGVHDETCQVIGCEKKKAYYGGIMTFAWATDNDALRHLSTEIIQARFLASGLKCRYYNPAIHTA

SEQ ID NO: 744218 - protein, 150 aa, Homo sapiens
MHSTRPACYRLRCLLPEGDALPRRTQRVMNPPRFFAQAFPKPPPGLRGFSYWAVVKTRCGDCSSPGLGAAGRESFPLGRFSLLTQEHLQRQLVAEDPGAGRFGTRGELGRRERRRPSAAYILANQTWQHFPTVQEHEGLKGKRRNRGSRG

SEQ ID NO: 744219 - protein, 67 aa, Homo sapiens
QCRDSVCCLAQNGCPNILLEVNGMAVNTKTHPHSAHHHSHCWLAGTLARLGDNMVAGSSLGFDRTSG

SEQ ID NO: 744220 - protein, 693 aa, Homo sapiens
PTKKNAEKYSGILEGPVDRPVLSNYSDTPSGLVNGRKNESEPWQPSLNSEAVYPMNCVPDVITASKAGVSSALPPADVSASIGSSPGVASNLTEPSYSSSTCGSHTVPSLHAGLPSQEYAPGYNGSYLHSTYSSQPAPALPSPHPSPLHSSGLLQPPPPPPPPPALVPGYNGTSNLSSYSYPSASYPPQTAVGSGYSPGGAPPPPSAYLPSGIPAPTPLPPTTVPGYTYQGHGLTPIAPSALTNSSASSLKRKAFYMAGQGDMDSSYGNYSYGQQRSTQSPMYRMPDNSISNTNRGNGFDRSAETSSLAFKPTKQLMSSEQQRKFSSQSSRALTPPSYSTAKNSLGSRSSESFGKYTSPVMSEHGDEHRQLLSHPMQGPGLRAATSSNHSVDEQLKNTDTHLIDLVTNEIITQGPPVDWNDIAGLDLVKAVIKEEVLWPVLRSDAFSGLTALPRSILLFGPRGTGKTLLGRCIASQLGATFFKIAGSGLVAKWLGEAEKIIHASFLVARCRQPSVIFVSDIDMLLSSQVNEEHSPVSRMRTEFLMQLDTVLTSAEDQIVVICATSKPEEIDESLRRYFMKRLLIPLPDSTARHQIIVQLLSQHNYCLNDKEFALLVQRTEGFSGLDVAHLCQEAVVGPLHAMPATDLSAIMPSQLRPVTYQDFENAFCKIQPSISQKELDMYVEWNKMFGCSQ

SEQ ID NO: 744221 - protein, 184 aa, Homo sapiens
VTLPYMNWGNLKLFLRQCKLVEANNPQAISQQDLVHMAIQIACGMSYLARREVIHKDLAARNCVIDDTLQVKITDNANENRPVRWMALESLVNNEFSSASDVWAFGVTLWELMTLGQTPYVDIDPFEMAAYLKDGYRIAQPINCPDELFAVMACCWALDPEERPKFQQLVQCLTEFHAALGAYV

SEQ ID NO: 744222 - protein, 194 aa, Homo sapiens
VTLPYMNWGNLKLFLRQCKLVEANNPQAISQQDLVHMAIQIACGMSYLARREVIHKDLAARNCVIDDTLQVKITDNAVSWTITVWGTMKTGQFVGWLLKVWLITSSLALVMCWAFGVTLWELMTLGQTPYVDIDPFEMAAYLKDGYRIAQPINCPDELFAVMACCWALDPEERPKFQQLVQCLTEFHAALGAYV

SEQ ID NO: 744223 - protein, 99 aa, Homo sapiens
LTHLTGDILGETIVGSLTPSEIQQLLRVPTGCPEQTLSSLTPVIILSRYLDTTGQWGKVGVEHRDQVMKNIVSGYTQMLTHRSSDGTYHTSKGNPGSTW

SEQ ID NO: 744224 - protein, 367 aa, Homo sapiens
SSRRLREEIRAGRLALPSHRVLVHRSRRRLPASPAMYRPRARAAPEGRVRGCAVPSTVLLLLAYLAYLALGTGVFWTLEGRAAQDSSRSFQRDKWELLQNFTCLDRPALDSLIRDVVQAYKNGASLLSNTTSMGRWELVGSFFFSVSTITTIGYGNLSPNTMAARLFCIFFALVGIPLNLVVLNRLGHLMQQGVNHWASRLGGTWQDPDKARWLAGSGALLSGLLLFLLLPPLLFSHMEGWSYTEGFYFAFITLSTVGFGDYVIGMNPSQRYPLWYKNMVSLWILFGMAWLALIIKLILSQLETPGRVCSCCHHSSKEDFKSQSWRQGPDREPESHSPQQGCYPEGPMGIIQHLEPSAHAAGCGKDS

SEQ ID NO: 744225 - protein, 211 aa, Homo sapiens
QRLQAGNLENTDQVKSPLLTGDSSGLPPAPSAPTHGVKASGGLGTMLHPQDPDKARWLAGSGALLSGLLLFLLLPPLLFSHMEGWSYTEGFYFAFITLSTVGFGDYVIGMNPSQRYPLWYKNMVSLWILFGMAWLALIIKLILSQLETPGRVCSCCHHSSKEDFKSQSWRQGPDREPESHSPQQGCYPEGPMGIIQHLEPSAHAAGCGKDS

SEQ ID NO: 744226 - protein, 133 aa, Homo sapiens
SYKRECINLGCDVDFDFAGPAIHGSAVFGYEGWLAGYQMTFDSAKSKLTRNNFAVGYRTGDFQLHTNVNDGTEFGGSIYQKVCEDLDTSVNLAWTSGTNCTRFGIAAKYQLDPTASISVSTFVDLEWGFWLWE

SEQ ID NO: 744227 - protein, 200 aa, Homo sapiens
DPSIVGQDSSPLRREALAAVLYIGPAPGLTGREPRFNQASTPHGGLLPASACRLCSASSGSAAVHLLPCPRCARNSVVLGRLKASHCQETQKEKCQMFNTQLDLGMLTRSSQRCGCPPLPAPCRRRCGLQELGCCQPKGSLHSHSHLSSHQSPSYPLLPLFKTISLKARDLHIPKSIGHFHSLPDLTPNSIKNNSTVLSS

SEQ ID NO: 744228 - protein, 706 aa, Homo sapiens
MDPGWGQRDVGWAALLILFAASLLTVFAWLLQYARGLWLARARGDRGPGPALAGEPAGSLRELGVWRSLLRLRATRAGAAEEPGVRGLLASLFAFKSFRENWQRAWVRALNEQACRNGSSIQIAFEEVPQLPPRASISHVTCVDQSEHTMVLRCQLSAEEVRFPVSVTQQSPAVVSMETYHVTLTLPPTQLEVNLEEIPGEGLLISWAFTDRPDLSLTVLPKLQARERGEEQVELSTIEELIKDAIVSTQPAMMVNLRACSAPGGLVPSEKPPMMPQAQPAIPRPNRLFLRQLRASHLGNELEGTEELCCVAELDNPMQQKWTKPARAGSEVEWTEDLALDLGPQSRELTLKVLRSSSCGDTELLGQATLPVGSPSRPLSRRQLCPLTPGPGKALGPAATMAVELHYEEGSPRNLGTPTSSTPRPSITPTKKIELDRTIMPDGTIVTTVTTVQSRPRIDGKLDSPSRSPSKVEVTEKTTTVLSESSGPSNTSHSSSRDSHLSNGLDPVAETAIRQLTEPSGRVAKKTPTKRSTLIISGVSKVPIAQDELALSLGYAASLEASVQDDAGTSGGPSSPPSDPPAMSPGPLDALSSPTSVQEADETTRSDISERPSVDDIESETGSTGALETRSLKDHKVSFLRSGTKLIFRRRPRQKEAGLSQSHDDLSNATATPSVRKKAGSFSRRLIKRFSFKSKPKANGNPSPQL

SEQ ID NO: 744229 - protein, 706 aa, Homo sapiens; identical to SEQ ID NO: 744228

SEQ ID NO: 744230 - protein, 101 aa, Homo sapiens
QPICCMNCARCMPKDKAIKKFVIRNIVEPAAVRDIFEARVFNAYVLSKQYMKLHYCVSCAIHSKVVRNQSHEGFKDPTLPPLDLWVLPHDPHQSPCKELSP

SEQ ID NO: 744231 - protein, 322 aa, Homo sapiens
MWRLVPPKLGRLSRSLKLAALGSLLVLMVLHSPSLLASWQRNELTDRRFLQLNKCPACFGTSWCRRFLNGQVVFEAWGRLRLLDFLNVKNVYFAQYGEPREGGRRRVVLKRLGSQRELAQLDQSICKRATGRPRCDLLQAMPRTEFARLNGDVRLLTPEAVEGWSDLVHCPSQRLLDRLVRRYAETKDSGSFLLRNLKDSERMQLLLTLAFNPEPLVLQSFPSDEGWPFAKYLGACGRMVAVNYVGEELWSYFNAPWEKRVDLAWQLMEIAEQLTNNDFEFALYLLDVSFDNFAVGPRDGKVIIVDAENVLVADKRLIRQSK

SEQ ID NO: 744232 - protein, 322 aa, Homo sapiens; identical to SEQ ID NO: 744231

SEQ ID NO: 744233 - protein, 280 aa, Homo sapiens
MWRLVPPKLGRLSRSLKLAALGSLLVLMVLHSPSLLASWQRNELTDRRFLQLNKCPACFGTSWCRRFLNGQVVFEAWGRLRLLDFLNVKNVYFAQYGEPREGGRRRVVLKRLGSQRELAQLDQSICKRATGRPRCDLLQAMPRTEFARLNGDVRLLTPEAVEGWSDLVHCPSQRLLDRLVRRYAETKDSGSFLLRNLKDSERMQLLLTLAFNPEPLVLQHIPPTHPPYLCVPDGNYRSGWSYIKLCPSFECLTETYAALPFNRNYDKWWRQITEKKQVRR

SEQ ID NO: 744234 - protein, 267 aa, Homo sapiens
MWRLVPPKLGRLSRSLKLAALGSLLVLMVLHSPSLLASWQRNELTDRRFLQLNKCPACFGTSWCRRFLNGQVVFEAWGRLRLLDFLNVKNVYFAQYGEPREGGRRRVVLKRLGSQRELAQLDQSICKRATGRPRCDLLQAMPRTEFARLNGDVRLLTPEAVEGWSDLVHCPSQRLLDRLVRRYAETKDSGSFLLRNLKDSERMQLLLTLAFNPEPLVLQKCLLQRQTEVCVYRADSEENEGICQEIMSDYSDMFQSINAFGGFPNIC

SEQ ID NO: 744235 - protein, 243 aa, Homo sapiens
MWRLVPPKLGRLSRSLKLAALGSLLVLMVLHSPSLLASWQRNELTDRRFLQLNKCPACFGTSWCRRFLNGQVVFEAWGRLRLLDFLNVKNVYFAQYGEPREGGRRRVVLKRLGSQRELAQLDQSICKRATGRPRCDLLQAMPRTEFARLNGDVRLLTPEAVEGWSDLVHCPSQRLLDRLVRRYAETKDSGSFLLRNLKDSERMQLLLTLAFNPEPLVLQAFGLKGWKDGRRKQVAYYVGEFSV

SEQ ID NO: 744236 - protein, 182 aa, Homo sapiens
MPRTEFARLNGDVRLLTPEAVEGWSDLVHCPSQRLLDRLVRRYAETKDSGSFLLRNLKDSERMQLLLTLAFNPEPLVLQSFPSDEGWPFAKYLGACGRMVAVNYVGEELWSYFNAPWEKRVDLAWQLMEIAEQLTNNDFEFALYLLDVSFDNFAVGPRDGKVIIVDAENVLVADKRLIRQSK

SEQ ID NO: 744237 - protein, 337 aa, Homo sapiens
MWRLVPPKLGRLSRSLKLAALGSLLVLMVLHSPSLLASWQRNELTDRRFLQLNKCPALAFFPGPNRKALGLAPAPGRFPVQSVNGQVVFEAWGRLRLLDFLNVKNVYFAQYGEPREGGRRRVVLKRLGSQRELAQLDQSICKRATGRPRCDLLQAMPRTEFARLNGDVRLLTPEAVEGWSDLVHCPSQRLLDRLVRRYAETKDSGSFLLRNLKDSERMQLLLTLAFNPEPLVLQSFPSDEGWPFAKYLGACGRMVAVNYVGEELWSYFNAPWEKRVDLAWQLMEIAEQLTNNDFEFALYLLDVSFDNFAVGPRDGKVIIVDAENVLVADKRLIRQSK

SEQ ID NO: 744238 - protein, 304 aa, Homo sapiens
MAGNFDSEERSSWYWGRLSRQEAVALLQGQRHGVFLVRDSSTSPGDYVLSVSENSRVSHYIINSSGPRPPVPPSPAQPPPGVSPSRLRIGDQEFDSLPALLEFYKIHYLDTTTLIEPVSRSRQGSGVILRQEEAEYVRALFDFNGNDEEDLPFKKGDILRIRDKPEEQWWNAEDSEGKRGMIPVPYVEKYRPASASVSALIGGNQEGSHPQPLGGPEPGPYAQPSVNTPLPNLQNGPIYARVIQKRVPNAYDKTALALEVGELVKVTKINVSGQWEGECNGKRGHFPFTHVRLLDQQNPDEDFS

SEQ ID NO: 744239 - protein, 304 aa, Homo sapiens; identical to SEQ ID NO: 744238

SEQ ID NO: 744240 - protein, 204 aa, Homo sapiens
MAGNFDSEERSSWYWGRLSRQEAVALLQGQRHGVFLVRDSSTSPGDYVLSVSENSRVSHYIINSSGPRPPVPPSPAQPPPGVSPSRLRIGDQEFDSLPALLEFYKIHYLDTTTLIEPVSRSRQGSGVILRQEEAEYVRALFDFNGNDEEDLPFKKGDILRIRDKPEEQWWNAEDSEGKRGMIPVPYVEKYRPASASVSALIGGR

SEQ ID NO: 744241 - protein, 304 aa, Homo sapiens; identical to SEQ ID NO: 744238

SEQ ID NO: 744242 - protein, 304 aa, Homo sapiens; identical to SEQ ID NO: 744238

SEQ ID NO: 744243 - protein, 304 aa, Homo sapiens; identical to SEQ ID NO: 744238

SEQ ID NO: 744244 - protein, 304 aa, Homo sapiens; identical to SEQ ID NO: 744238

SEQ ID NO: 744245 - protein, 304 aa, Homo sapiens; identical to SEQ ID NO: 744238

SEQ ID NO: 744246 - protein, 293 aa, Homo sapiens
MAGNFDSEERSSWYWGRLSRQEAVALLQGQRHGVFLVRDSSTSPGDYVLSVSENSRVSHYIINSSGPRPPVPPSPAQPPPGVSPSRLRIGDQEFDSLPALLEFYKIHYLDTTTLIEPVSRSRQGSGVILRQEEAEYVRALFDFNGNDEEDLPFKKGDILRIRDKPEEQWWNAEDSEGKRGMIPVPYVEKYRPASASVSALIGGNQEGSHPQPLGGPEPGPYAQPSVNTPLPNLQNGPIYARVIQKRVPNAYDKTALALEVHNVHNVERRDLLQGLLSVLLELCSNADYSIGML

SEQ ID NO: 744247 - protein, 80 aa, Homo sapiens
CREASVWTSWEQSPRHYRAGAGNGLDSGPRQKALCFPSSGEQCCLEPGVRADGKYERKAEVSGRVARGSFSDTQARLTGS

SEQ ID NO: 744248 - protein, 162 aa, Homo sapiens
MAPGYSRRARWPSRAGEPHTRQEDQDASGGASALGCLGNSQSPNNHPPLPEAGFLVCSGYRGGENTVPRFPLLKALFAAAAAAAFGEARSSPQSRRALGLSRGFAWARPPRSPLRFHDLLRAASPPEARRKHHPRRPGPVARPRSSDSLEHPRARARGRGSA

SEQ ID NO: 744249 - protein, 84 aa, Homo sapiens
ETDNFSSVLTIKNCLRRDTGEYQITVSNAAGSKTVAVHLTVLDVPGPPTGPINILDVTPEHMTISWQPPKDDGGSPVINYIVEK

SEQ ID NO: 744250 - protein, 106 aa, Homo sapiens
MANFKLTKRISLIMVLGRDVQIDSCQLVGAGSSTPRHLCPGTRLRCGKAREGGGWQMPEGWEGLHPGGRPWWASLHWGAAGPKIQGDRKHKWCWGSVPHSPWGRGG

SEQ ID NO: 744251 - protein, 1185 aa, Homo sapiens
MADGGEREELLSPSPVSPAKRQCSWPSPQAHHPRGSPGAAGGGAGGVGSSCLVLGARPHLQPDSLLDCAAKTVAEKWAYERVEERFERIPEPVQRRIVYWSFPRNEREICMYSSFQYRGGPGAGAAGGAAGASPAEEGPQPPPGAAAPAGSAPGGVAAGASPGLGAGAGAAGCGGEGLPFRRGIRLLDSGSVENVLQVGFHLSGTVTELATASEPAVTYKVAISFDRCKITSVTCGCGNKDIFYCAHVVALSLYRIRKPDQVKLRLPISETLFQMNRDQLQKFIQYLITAHHTEVLPTAQKLADEILSSNSEINQVNGAPDPTAGASIDDENCWHLDEEQVKEQVKLFLSQGGYCGSGKQLNSMFAKVREMLRMRDSNGARMLTLITEQFVADPRLTLWRQQGTNMTDKCRQLWDELGALWVCIILNPHCKLEEKSCWLQQLQKWSDLDVCPLEDGNYGHELPNITNALPQSAIHSPDSLSRPRRTVFTRAIEGRELHWQDSHLQRIISSDVYTAPACQRESERLLFNSQGQPLWLEHVPTACARVDALRSHGYPKEALRLTVAIINTLRLQQQRQLEIYKHQKKELLQRGTTTITNLEGWVGHPLDPIDCLFLTLTEACRLNDDGYLEMSDMNESRPPVYQHVPVAAGSPNSSESYLSLALEVALMGLGQQRLMPEGLYAQDKVCRNEEQLLSQLQELQLDDELVQTLQKQCILLLEGGPFSGLGEVIHRESVPMHTFAKYLFSALLPHDPDLSYKLALRAMRLPVLENSASAGDTSHPHHMVSVVPSRYPRWFTLGHLESQQCELASTMLTAAKGDTLRLRTILEAIQKHIHSSSLIFKLAQDAFKIATPTDSSTDSTLLNVALELGLQVMRMTLSTLNWRRREMVRWLVTCATEVGVRALVSILQSWYTLFTPTEATSIVAATAVSHTTILRLSLDYPQREELASCARTLALQCAMKDPQSCALSALTLCEKDHIAFEAAYQIAIDAAAGGMTHSQLFTIARYMELRGYPLRAFKLASLAMSHLNLAYNQDTHPAINDVLWACALSHSLGKNELAALIPLVVKSVHCATVLSDILRRCTVTAPGLAGIPGRRSSGKLMSTDKAPLRQLLDATINAYINTTHSRLTHISPRHYGEFIEFLSKARETFLLPQDGHLQFAQFIDNLKQIYKGKKKLMLLVRERFG

SEQ ID NO: 744252 - protein, 1114 aa, Homo sapiens
MLDLPSGHGPSTTPVPLKSGPRRTFARWVLGVCPRLRSQGVPLPRVGAPVEIKADGMTPLEGARGRGAGWCSCCRFQASSAFYSRQVSRGGGPGCGWPRSRTREATFLLQLLTQARRLAGPLPLLRNRFHLSGTVTELATASEPAVTYKVAISFDRCKITSVTCGCGNKDIFYCAHVVALSLYRIRKPDQVKLRLPISETLFQMNRDQLQKFIQYLITAHHTEVLPTAQKLADEILSSNSEINQVNGAPDPTAGASIDDENCWHLDEEQVKEQVKLFLSQGGYCGSGKQLNSMFAKVREMLRMRDSNGARMLTLITEQFVADPRLTLWRQQGTNMTDKCRQLWDELGALWVCIILNPHCKLEEKSCWLQQLQKWSDLDVCPLEDGNYGHELPNITNALPQSAIHSPDSLSRPRRTVFTRAIEGRELHWQDSHLQRIISSDVYTAPACQRESERLLFNSQGQPLWLEHVPTACARVDALRSHGYPKEALRLTVAIINTLRLQQQRQLEIYKHQKKELLQRGTTTITNLEGWVGHPLDPIDCLFLTLTEACRLNDDGYLEMSDMNESRPPVYQHVPVAAGSPNSSESYLSLALEVALMGLGQQRLMPEGLYAQDKVCRNEEQLLSQLQELQLDDELVQTLQKQCILLLEGGPFSGLGEVIHRESVPMHTFAKYLFSALLPHDPDLSYKLALRAMRLPVLENSASAGDTSHPHHMVSVVPSRYPRWFTLGHLESQQCELASTMLTAAKGDTLRLRTILEAIQKHIHSSSLIFKLAQDAFKIATPTDSSTDSTLLNVALELGLQVMRMTLSTLNWRRREMVRWLVTCATEVGVRALVSILQSWYTLFTPTEATSIVAATAVSHTTILRLSLDYPQREELASCARTLALQCAMKDPQSCALSALTLCEKDHIAFEAAYQIAIDAAAGGMTHSQLFTIARYMELRGYPLRAFKLASLAMSHLNLAYNQDTHPAINDVLWACALSHSLGKNELAALIPLVVKSVHCATVLSDILRRCTVTAPGLAGIPGRRSSGKLMSTDKAPLRQLLDATINAYINTTHSRLTHISPRHYGEFIEFLSKARETFLLPQDGHLQFAQFIDNLKQIYKGKKKLMLLVRERFG

SEQ ID NO: 744253 - protein, 1062 aa, Homo sapiens
EQELGSLNNNFRLEQSNNNKKTNNMITERSNCRQVSRGGGPGCGWPRSRTREATFLLQLLTQARRLAGPLPLLRNRFHLSGTVTELATASEPAVTYKVAISFDRCKITSVTCGCGNKDIFYCAHVVALSLYRIRKPDQVKLRLPISETLFQMNRDQLQKFIQYLITAHHTEVLPTAQKLADEILSSNSEINQVNGAPDPTAGASIDDENCWHLDEEQVKEQVKLFLSQGGYCGSGKQLNSMFAKVREMLRMRDSNGARMLTLITEQFVADPRLTLWRQQGTNMTDKCRQLWDELGALWVCIILNPHCKLEEKSCWLQQLQKWSDLDVCPLEDGNYGHELPNITNALPQSAIHSPDSLSRPRRTVFTRAIEGRELHWQDSHLQRIISSDVYTAPACQRESERLLFNSQGQPLWLEHVPTACARVDALRSHGYPKEALRLTVAIINTLRLQQQRQLEIYKHQKKELLQRGTTTITNLEGWVGHPLDPIDCLFLTLTEACRLNDDGYLEMSDMNESRPPVYQHVPVAAGSPNSSESYLSLALEVALMGLGQQRLMPEGLYAQDKVCRNEEQLLSQLQELQLDDELVQTLQKQCILLLEGGPFSGLGEVIHRESVPMHTFAKYLFSALLPHDPDLSYKLALRAMRLPVLENSASAGDTSHPHHMVSVVPSRYPRWFTLGHLESQQCELASTMLTAAKGDTLRLRTILEAIQKHIHSSSLIFKLAQDAFKIATPTDSSTDSTLLNVALELGLQVMRMTLSTLNWRRREMVRWLVTCATEVGVRALVSILQSWYTLFTPTEATSIVAATAVSHTTILRLSLDYPQREELASCARTLALQCAMKDPQSCALSALTLCEKDHIAFEAAYQIAIDAAAGGMTHSQLFTIARYMELRGYPLRAFKLASLAMSHLNLAYNQDTHPAINDVLWACALSHSLGKNELAALIPLVVKSVHCATVLSDILRRCTVTAPGLAGIPGRRSSGKLMSTDKAPLRQLLDATINAYINTTHSRLTHISPRHYGEFIEFLSKARETFLLPQDGHLQFAQFIDNLKQIYKGKKKLMLLVRERFG

SEQ ID NO: 744254 - protein, 1126 aa, Homo sapiens
  misc_feature (1115)..(1116): Xaa can be any naturally occurring amino acid
MLDLPSGHGPSTTPVPLKSGPRRTFARWVLGVCPRLRSQGVPLPRVGAPVEIKADGMTPLEGARGRGAGWCSCCRFQASSAFYSRQVSRGGGPGCGWPRSRTREATFLLQLLTQARRLAGPLPLLRNRFHLSGTVTELATASEPAVTYKVAISFDRCKITSVTCGCGNKDIFYCAHVVALSLYRIRKPDQVKLRLPISETLFQMNRDQLQKFIQYLITAHHTEVLPTAQKLADEILSSNSEINQVNGAPDPTAGASIDDENCWHLDEEQVKEQVKLFLSQGGYCGSGKQLNSMFAKVREMLRMRDSNGARMLTLITEQFVADPRLTLWRQQGTNMTDKCRQLWDELGALWVCIILNPHCKLEEKSCWLQQLQKWSDLDVCPLEDGNYGHELPNITNALPQSAIHSPDSLSRPRRTVFTRAIEGRELHWQDSHLQRIISSDVYTAPACQRESERLLFNSQGQPLWLEHVPTACARVDALRSHGYPKEALRLTVAIINTLRLQQQRQLEIYKHQKKELLQRGTTTITNLEGWVGHPLDPIDCLFLTLTEACRLNDDGYLEMSDMNESRPPVYQHVPVAAGSPNSSESYLSLALEVALMGLGQQRLMPEGLYAQDKVCRNEEQLLSQLQELQLDDELVQTLQKQCILLLEGGPFSGLGEVIHRESVPMHTFAKYLFSALLPHDPDLSYKLALRAMRLPVLENSASAGDTSHPHHMVSVVPSRYPRWFTLGHLESQQCELASTMLTAAKGDTLRLRTILEAIQKHIHSSSLIFKLAQDAFKIATPTDSSTDSTLLNVALELGLQVMRMTLSTLNWRRREMVRWLVTCATEVGVRALVSILQSWYTLFTPTEATSIVAATAVSHTTILRLSLDYPQREELASCARTLALQCAMKDPQSCALSALTLCEKDHIAFEAAYQIAIDAAAGGMTHSQLFTIARYMELRGYPLRAFKLASLAMSHLNLAYNQDTHPAINDVLWACALSHSLGKNELAALIPLVVKSVHCATVLSDILRRCTVTAPGLAGIPGRRSSGKLMSTDKAPLRQLLDATINAYINTTHSRLTHISPRHYGEFIEFLSKARETFLLPQDGHLQFAQFIDNLKQIYKGKKKLMLLVREQIAXXIVHRERSVTL

SEQ ID NO: 744255 - protein, 103 aa, Homo sapiens
HTRATFLCVGVTVCLVNDSRTYCFLGRPLVHQNCWLYFAGISMPRRWSYQSCSFVPGLEMQCDGLASSAQPMFRLMPRIWILCDHFWLGVRTVYHTVWIGGHS

SEQ ID NO: 744256 - protein, 636 aa, Homo sapiens
  misc_feature (23)..(24): Xaa can be any naturally occurring amino acid
GGTAAAATAAPPAAAGARRRQRXXGKRPRHQRVKTAKTIPSTVVNSIAARLLLQIIRNEPLLLIFIGLEPGVLHSVDFQGKKKTVLVVVIINIWTSVMVKEMRLRNGTVATALAFITSFLTLSWYTTWQNGKEKLIAYQREFLALKERLRIAEHRISQRSSELNTIVQQFKRVGAETNGSKDALNKFSDNTLKLLKELTSKKSLQVPSIYYHLPHLLKNEGSLQPAVQIGNGRTGVSIVMGIPTVKREVKSYLIETLHSLIDNLYPEEKLDCVIVVFIGETDIDYVHGVVANLEKEFSKEISSGLVEVISPPESYYPDLTNLKETFGDSKERVRWRTKQNLDYCFLMMYAQEKGIYYIQLEDDIIVKQNYFNTIKNFALQLSSEEWMILEFSQLGFIGKMFQAPDLTLIVEFIFMFYKEKPIDWLLDHILWVKVCNPEKDAKHCDRQKANLRIRFRPSLFQHVGLHSSLSGKIQKLTDKDYMKPLLLKIHVNPPAEVSTSLKVYQGHTLEKTYMGEDFFWAITPIAGDYILFKFDKPVNVESYLFHSGNQEHPGDILLNTTVEVLPFKSEGLEISKETKDKRLEDGYFRIGKFENGVAEGMVDPSLNPISAFRLSVIQNSAVWAILNEIHIKKATN

SEQ ID NO: 744257 - protein, 397 aa, Homo sapiens [sequence omitted]

SEQ ID NO: 744258 - protein, 397 aa, Homo sapiens [sequence omitted]

SEQ ID NO: 744259 - protein, 227 aa, Homo sapiens
MGGKQSTAARSRGPFPGVSTDDSAVPPPGGAPHFGHYRTGGGAMGLRSRSVSSVAGMGMDPSTAGGVPFGLYTPASRGTGDSERAPGGGGSASDSTYAHGNGYQETGGGHHRDGMLYLGSRASLADALPLHIAPRWFSSHSGFKCPICSKSVASDEMEMHFIMCLSKPRLSYNDDVLTKDAGECVICLEELLQGDTIARLPCLCIYHKSCIDSWFEVNRSCPEHPAD

SEQ ID NO: 744260 - protein, 183 aa, Homo sapiens
LKVAGPRYALGLQCEPRPCFQLEGRHPLAQDRTLCCLGPAPVESSSPELLPDTQAFQSLTLRATAAQGDNRAWHAVWLVQRRLKAGLGEILGLAPSTEPCLCPRAALTRTRKGNLWPSGRIMPIICLVPVFENAQMLVYKSGSCLGAISVPSLMQRAFLCKHWRAGLHCLAPLPPLAGRTRCC

SEQ ID NO: 744261 - protein, 227 aa, Homo sapiens; identical to SEQ ID NO: 744259

SEQ ID NO: 744262 - protein, 227 aa, Homo sapiens; identical to SEQ ID NO: 744259

SEQ ID NO: 744263 - protein, 269 aa, Homo sapiens
LNVTNTAGTSLPLYARPALPLLLRSGGGSRPPGSRPTGARASMGGKQSTAARSRGPFPGVSTDDSAVPPPGGAPHFGHYRTGGGAMGLRSRSVSSVAGMGMDPSTAGGVPFGLYTPASRGTGDSERAPGGGGSASDSTYAHGNGYQETGGGHHRDGMLYLGSRASLADALPLHIAPRWFSSHSGFKCPICSKSVASDEMEMHFIMCLSKPRLSYNDDVLTKDAGECVICLEELLQGDTIARLPCLCIYHKSCIDSWFEVNRSCPEHPAD

SEQ ID NO: 744264 - protein, 227 aa, Homo sapiens; identical to SEQ ID NO: 744259

SEQ ID NO: 744265 - protein, 251 aa, Homo sapiens
MGGKQSTAARSRGPFPGVSTDDSAVPPPGGAPHFGHYRTGGGAMGLRSRSVSSVAGMGMDPSTAGGVPFGLYTPASRGTGDSERAPGGGGSASDSTYAHGNGYQETGGGHHRDGMLYLGSRASLADALPLHIAPRWFSSHSGFKCPICSKSVASDEMEMHFIMCLSKPRLSYNDDVLTKDAGECVICLEELLQGDTIARLPCLCIYHKRDRAPLLQGGGSPDPGAELSLGHQREQGTPSALTSRSWFSLPP

SEQ ID NO: 744266 - protein, 183 aa, Homo sapiens; identical to SEQ ID NO: 744260

SEQ ID NO: 744267 - protein, 227 aa, Homo sapiens; identical to SEQ ID NO: 744259

SEQ ID NO: 744268 - protein, 1704 aa, Homo sapiens
MSSVSEVNVDIKDFLMSINLEQYLLHFHESGFTTVKDCAAINDSLLQKIGISPTGHRRRILKQLQIILSKMQDIPIYANVHKTKKNDDPSKDYHVPSSDQNICIELSNSGSVQTSSPPQLETVRKNLEDSDASVERSQYPQSDDKLSPPKRDFPTAEEPHLNLGSLNDSLFGSDNIKIESLITKKTVDHTVEEQQTEKVKLITENLSKLPNADSECLSFVGCSTSGTNSGNGTNGLLEGSPPSPFFKFQGEMIVNDLYVPSSPILAPVRSRSKLVSRPSRSFLLRHRPVPEIPGSTKGVSGSYFRERRNVATSTEKSVAWQNSNEENSSSIFPYGETFLFQRLENSKKRSIKNEFLTQGEALKGEAATATNSFIIKSSIYDNRKEKISEDKVEDIWIPREDKNNFLIDTASESEYSTVEECFQSLRRKNSKASKSRTQKALILDSVNRHSYPLSSTSGNADSSAVSSQAISPYACFYGASAKKVKSGWLDKLSPQGKRMFQKRWVKFDGLSISYYNNEKEMYSKGIIPLSAISTVRVQGDNKFEVVTTQRTFVFRVEKEEERNDWISILLNALKSQSLTSQSQAVVTPEKCGYLELRGYKAKIFTVLSGNSVWLCKNEQDFKSGLGITIIPMNVANVKQVDRTVKQSFEIITPYRSFSFTAETEKEKQDWIEAVQQSIAETLSDYEVAEKIWFNESNRSCADCKAPDPDWASINLCVVICKKCAGQHRSLGPKDSKVRSLKMDASIWSNELIELFIVIGNKRANDFWAGNLQKDEELHMDSPVEKRKNFITQKYKEGKFRKTLLASLTKEELNKALCAAVVKPDVLETMALLFSGADVMCATGDPVHSTPYLLAKKAGQSLQMEFLYHNKFSDFPQHDIHSEGVLSQESSQSTFLCDFLYQAPSAASKLSSEKKLLEETNKKWCVLEGGFLSYYENDKSTTPNGTININEVICLAIHKEDFYLNTGPIFIFEIYLPSERVFLFGAETSQAQRKWTEAIAKHFVPLFAENLTEADYDLIGQLFYKDCHALDQWRKGWFAMDKSSLHFCLQMQEVQGDRMHLRRLQELTISTMVQNGEKLDVLLLVEKGRTLYIHGHTKLDFTVWHTAIEKAAGTDGNALQDQQLSKNDVPIIVNSCIAFVTQYGLGCKYIYQKNGDPLHISELLESFKKDARSFKLRAGKHQLEDVTAVLKSFLSDIDDALLTKELYPYWISALDTQDDKERIKKYGAFIRSLPGVNRATLAAIIEHLYRVQKCSEINHMNAHNLALVFSSCLFQTKGQTSEEVNVIEDLINNYVEIFEVKEDQVKQMDIENSFITKWKDTQVSQAGDLLIEVYVERKEPDCSIIIRISPVMEAEELTNDILAIKNIIPTKGDIWATFEVIENEELERPLHYKENVLEQVLRWSSLAEPGSAYLVVKRFLTADTIKHCSDRSTLGSIKEGILKIKEEPSKILSGNKFQDRYFVLRDGFLFLYKDVKSSKHDKMFSLSSMKFYRGVKKKMKPPTSWGLTAYSEKHHWHLCCDSSQTQTEWMTSIFIAQHEYDIWPPAGKERKRSITKNPKIGGLPLIPIQHEGNATLARKNIESARAELERLRLSEKCDKESVDSSLKERASMVAHCLEHKDDKLRNRPRKHRSFNCLEDTEPEAPLGQPKGHKGLKTLRKTEDRNSKATLDSDHKLPSRVIEELNVVLQRSRTLPKELQDEQILK

SEQ ID NO: 744269 - protein, 166 aa, Homo sapiens
MALLFSGADVMCATGDPVHSTPYLLAKKAGQSLQMEFLYHNKFSDFPQHDIHSEGVLSQESSQSTFLCDFLYQAPSAASKLSSEKKLLEETNKKWCVLEGGFLSYYENDKSTTPNGTININEVICLAIHKEDFYLNTGPIFIFEIYLPSERVFLFGAETSFFPSPQ

SEQ ID NO: 744270 - protein, 1704 aa, Homo sapiens; identical to SEQ ID NO: 744268

SEQ ID NO: 744271 - protein, 1704 aa, Homo sapiens; identical to SEQ ID NO: 744268

SEQ ID NO: 744272 - protein, 1640 aa, Homo sapiens
MSSVSEVNVDIKDFLMSINLEQYLLHFHESGFTTVKDCAAINDSLLQKIGISPTGHRRRILKQLQIILSKMQDIPIYANVHKTKKNDDPSKDYHVPSSDQNICIELSNSGSVQTSSPPQLETVRKNLEDSDASVERSQYPQSDDKLSPPKRDFPTAEEPHLNLGSLNDSLFGSDNIKIESLITKKTVDHTVEEQQTEKVKLITENLSKLPNADSECLSFVGCSTSGTNSGNGTNGLLEGSPPSPFFKFQGEMIVNDLYVPSSPILAPVRSRSKLVSRPSRSFLLRHRPVPEIPGSTKGVSGSYFRERRNVATSTEKSVAWQNSNEENSSSIFPYGETFLFQRLENSKKRSIKNEFLTQGEALKGEAATATNSFIIKSSIYDNRKEKISEDKVEDIWIPREDKNNFLIDTASESEYSTVEECFQSLRRKNSKASKSRTQKALILDSVNRHSYPLSSTSGNADSSAVSSQAISPYACFYGASAKKVKSGWLDKLSPQGKRMFQKRWVKFDGLSISYYNNEKEMYSKGIIPLSAISTVRVQGDNKFEVVTTQRTFVFRVEKEEERNDWISILLNALKSQSLTSQSQAVVTPEKCGYLELRGYKAKIFTVLSGNSVWLCKNEQDFKSGLGITIIPMNVANVKQVDRTVKQSFEIITPYRSFSFTAETEKEKQDWIEAVQQSIAETLSDYEVAEKIWFNESNRSCADCKAPDPDWASINLCVVICKKCAGQHRSLGPKDSKVRSLKMDASIWSNELIELFIVIGNKRANDFWAGNLQKDEELHMDSPVEKRKNFITQKYKEGKFRKTLLASLTKEELNKALCAAVVKPDVLETMALLFSGADVMCATGDPVHSTPYLLAKKAGQSLQMEFLYHNKFSDFPQHDIHSEGVLSQESSQSTFLCDFLYQAPSAASKLSSEKKLLEETNKKWCVLEGGFLSYYENDKSTTPNGTININEVICLAIHKEDFYLNTGPIFIFEIYLPSERVFLFGAETSQAQRKWTEAIAKHFVPLFAENLTEADYDLIGQLFYKDCHALDQWRKGWFAMDKSSLHFCLQMQEVQGDRMHLRRLQELTISTMVQNGEKLDVLLLVEKGRTLYIHGHTKLDFTVWHTAIEKAAGTDGNALQDQQLSKNDVPIIVNSCIAFVTQYGLGCKYIYQKNGDPLHISELLESFKKDARSFKLRAGKHQLEDVTAVLKSFLSDIDDALLTKELYPYWISALDTQDDKERIKKYGAFIRSLPGVNRATLAAIIEHLYRVQKCSEINHMNAHNLALVFSSCLFQTKGQTSEEVNVIEDLINNYVEIFEVKEDQVKQMDIENSFITKWKDTQVSQAGDLLIEVYVERKEPDCSIIIRISPVMEAEELTNDILAIKNIIPTKGDIWATFEVIENEELERPLHYKENVLEQVLRWSSLAEPGSAYLVVKRFLTADTIKHCSDRSTLGSIKEGILKIKEEPSKILSGNKFQDRYFVLRDGFLFLYKDVKSSKHDKMFSLSSMKFYRGVKKKMKPPTSWGLTAYSEKHHWHLCCDSSQTQTEWMTSIFIAQHEYDIWPPAGKERKRSITKNPKIGGLPLIPIQHEGNATLARKNIERDPCEHTSSHLEASGSHMVGAGMNWNLDRTSSKLPTTSIQLSPIGSGSSASSLPEDGKV

SEQ ID NO: 744273 - protein, 104 aa, Homo sapiens
GPTQAELLLSGELLTQGELLSTELLLLEAFSWNLCLPTPAHFLDYYLLASVSQKDHHCHTWPTTCPRKTKECLLPGQKVAMPPCFQLKPNLLTCHREQLAPELG

SEQ ID NO: 744274 - protein, 422 aa, Homo sapiens [sequence omitted]

SEQ ID NO: 744275 - protein, 403 aa, Homo sapiens
CEPRRDPSARRGAATAGASRAAEAAVGSAERLGRGSNRRQAPEGTAGSALGGARRSQPPTPREDAVRPESRVASDSGAAYAMMDEPWWEGRVASDVHCTLREKVLDTFEPVLSEKQMGDSPGGAAILGLAGKLRRVWRESLPPIQALRSHFLGQPRLSGGSPDRHPSAPPVLQELKLPTFRAHSPLLKSRRFFVDILTLLSSHCQLCPAARHLAVYLLDHFMDRYNVTTSKQLYTVAVSCLLLASKFEDREDHVPKLEQINSTRILSSQNFTLTKKELLSTELLLLEAFSWNLCLPTPAHFLDYYLLASVSQKDHHCHTWPTTCPRKTKECLKEYAHYFLEVTLQDHIFYKFQPSVVAAACVGASRICLQLSPYWTRDLQRISSYSLEHLSTCIEILLVPLFR

SEQ ID NO: 744276 - protein, 67 aa, Homo sapiens
FVLVLESARDKIIYLHEKVQSASGDGDGEAARSFVVVFFSFANLRSIYVQAVWIQVLVSVCSGTWGL

SEQ ID NO: 744277 - protein, 136 aa, Homo sapiens
RAPASSELAELTTFSATFAKGKIKILQVVAQLHIAPCPASRGEGAPQPSADQRRPPAPLSGAGGGARRGPGPGAREDRDTGGRSPGYALAAEVARVHRRVRPESRVASDSGAAYAMMDEPWWEGRVASDVHCTLRE

SEQ ID NO: 744278 - protein, 110 aa, Homo sapiens
MHDCVSSSPHCGPLEEAPLGLDMAFPSSATCGLCLFTLKTSLLVPLRSCPPTLLPVSAVTFIHGSSGHPNAVFLHSTTSFGSVDFSPLFETLTAGFLGRMFFFPSPHPFS

SEQ ID NO: 744279 - protein, 67 aa, Homo sapiens
VLLEKEATDGAIVGQWCPEEGASQTHFMGVEVHEMAFVLQSVSLGQVRWLTPVIPALWEAKAGRSRG

SEQ ID NO: 744280 - protein, 109 aa, Homo sapiens
ICQTHDRWFNRGATAPRELSDKSSFPVQQLLAVFHQKSIHLELPIVIGQVVLLWLPGLRSVEYDIPEISWIFFVSFKNNFCGRPGALAYACNPSTFMRPRRVDHLRSGV

SEQ ID NO: 744281 - protein, 117 aa, Homo sapiens
MLSSLSSFSAHEAEDGACHPEVGLLSAIHPSQVPTAPHCAPCLVRTSLLSHLQSLQTLRPASIPHPPASLSQTPGCTIRSLQVLWNRAFQLVFLGALEFLRCPRSCHSGERAGWKGF

SEQ ID NO: 744282 - protein, 117 aa, Homo sapiens; identical to SEQ ID NO: 744281

SEQ ID NO: 744283 - protein, 333 aa, Homo sapiens
MKGEAGHMLHNEKSKQEGHIWGSMRRTAFILGSGLLSFVAFWNSVTWHLQRFWGASGYFWQAQWERLLTTFEGKEWILFFIGAIQVPCLFFWSFNGLLLVVDTTGKPNFISRYRIQVGKNEPVDPVKLRQSIRTVLFNQCMISFPMVVFLYPFLKWWRDPCRRELPTFHWFLLELAIFTLIEEVLFYYSHRLLHHPTFYKKIHKKHHEWTAPIGVISLYAHPIEHAVSNMLPVIVGPLVMGSHLSSITMWFSLALIITTISHCGYHLPFLPSPEFHDYHHLKFNQCYGVLGVLDHLHGTDTMFKQTKAYERHVLLLGFTPLSESIPDSPKRME

SEQ ID NO: 744284 - protein, 107 aa, Homo sapiens
MPSTNQSPETLTFSRSGSRKFASGTTLGLSVYPTKSLHLPGPCLQSSLLLQVSNMLPVIVGPLVMGSHLSSITMWFSLALIITTISHCGYHLPFLPSPEFHDYHHLK

SEQ ID NO: 744285 - protein, 333 aa, Homo sapiens; identical to SEQ ID NO: 744283

SEQ ID NO: 744286 - protein, 368 aa, Homo sapiens
WRITRPGDRDHPGQHGETLSLLKIQKISRAWWWKPVVPATQEAEQENGVNLGGRACSEPRLCHCTPAWATERDSVSKKKEQTHLQRFWGASGYFWQAQWERLLTTFEGKEWILFFIGAIQVPCLFFWSFNGLLLVVDTTGKPNFISRYRIQVGKNEPVDPVKLRQSIRTVLFNQCMISFPMVVFLYPFLKWWRDPCRRELPTFHWFLLELAIFTLIEEVLFYYSHRLLHHPTFYKKIHKKHHEWTAPIGVISLYAHPIEHAVSNMLPVIVGPLVMGSHLSSITMWFSLALIITTISHCGYHLPFLPSPEFHDYHHLKFNQCYGVLGVLDHLHGTDTMFKQTKAYERHVLLLGFTPLSESIPDSPKRME

SEQ ID NO: 744287 - protein, 333 aa, Homo sapiens; identical to SEQ ID NO: 744283

SEQ ID NO: 744288 - protein, 333 aa, Homo sapiens; identical to SEQ ID NO: 744283

SEQ ID NO: 744289 - protein, 333 aa, Homo sapiens; identical to SEQ ID NO: 744283

SEQ ID NO: 744290 - protein, 333 aa, Homo sapiens; identical to SEQ ID NO: 744283

SEQ ID NO: 744291 - protein, 333 aa, Homo sapiens; identical to SEQ ID NO: 744283

SEQ ID NO: 744292 - protein, 191 aa, Homo sapiens
MKGEAGHMLHNEKSKQEGHIWGSMRRTAFILGSGLLSFVAFWNSVTWHLQRFWGASGYFWQAQWERLLTTFEGKEWILFFIGAIQVPCLFFWSFNGLLLVVDTTGKPNFISRYRIQVGKNEPVDPVKLRQSIRTVLFNQCMISFPMVVFLYPFLKWWRDPCRRELPTFHWFLLELAIFTLIEEVLFYYSHR

SEQ ID NO: 744293 - protein, 333 aa, Homo sapiens; identical to SEQ ID NO: 744283

SEQ ID NO: 744294 - protein, 158 aa, Homo sapiens [sequence omitted]

SEQ ID NO: 744295 - protein, 419 aa, Homo sapiens
MHLLGFFSVACSLLAAALLPGPREAPAAAAAFESGLDLSDAEPDAGEATAYASKDLEEQLRSVSSVDELMTVLYPEYWKMYKCQLRKGGWQHNREQANLNSRTEETIKFAAAHYNTEILKSIDNEWRKTQCMPREVCIDVGKEFGVATNTFFKPPCVSVYRCGGCCNSEGLQCMNTSTSYLSKTLFEITVPLSQGPKPVTISFANHTSCRCMSKLDVYRQVHSIIRRSLPATLPQCQAANKTCPTNYMWNNHICRCLAQEDFMFSSDAGDDSTDGFHDICGPNKELDEETCQCVCRAGLRPASCGPHKELDRNSCQCVCKNKLFPSQCGANREFDENTCQCVCKRTCPRNQPLNPGKCACECTESPQKCLLKGKKFHHQTCSCYRRPCTNRQKACEPGFSYSEEVCRCVPSYWKRPQMS

SEQ ID NO: 744296 - protein, 407 aa, Homo sapiens
MQQKAFEESRYPWQESFENVAVCLPLRCPRCGDHTRFRSLSSLRAHLEFSHSYEERTLLTKCSLFPSLKDTDLVTSSELLKPGKLQSSGNVVKQKPSYVNLYSISHEHSKDRKPFEVVAERPVSYVQTYTAMDLHADSLDGTRSGPGLPTSDTKASFEAHVREKFNRMVEAVDRTIEKRIDKLTKELAQKTAELLEVRAAFVQLTQKKQEVQRRERALNRQVDVAVEMIAVLRQRLTESEEELLRKEEEVVTFNHFLEAAAEKEVQGKARLQDFIENLLQRVELAEKQLEYYQSQQASGFVRDLSGHVLTDISSNRKPKCLSRGHPHSVCNHPDLKSHFHPKGRNHLKKAKDDRASMQPAKAIHEQAESSRDLCRPPKKGELLGFGRKGNIRPKMAKKKPTAIVNII

SEQ ID NO: 744297 - protein, 151 aa, Homo sapiens
MEAAAEKEVQGKARLQDFIENLLQRVELAEKQLEYYQSQQASGFVRDLSGHVLTDISSNRKPKCLSRGHPHSVCNHPDLKSHFHPKGRNHLKKAKDDRASMQPAKAIHEQAESSRDLCRPPKKGELLGFGRKGNIRPKMAKKKPTAIVNII

SEQ ID NO: 744298 - protein, 369 aa, Homo sapiens
MQQKAFEESRYPWQESFENVAVCLPLRCPRCGDHTRFRSLSSLRAHLEFSHSYEERTLLTKCSLFPSLKDTDLVTSSELLKPGKLQSSGNVVKQKPSYVNLYSISHEHSKDRKPFEVVAERPVSYVQTYTAMDLHADSLDGTRSGPGLPTSDTKASFEAHVREKFNRMVEAVDRTIEKRIDKLTKELAQKTAELLEVRAAFVQLTQKKQEVQRRERALNRQVDVAVEMIAVLRQRLTESEEELLRKEEEVVTFNHFLEAAAEKEVQGKARLQDFIENLLQRVELAEKQLEYYQSQQASGFVRDLSGHVLTDISSNRKPKCLSRGHPHSVTGSYLQGSSCLDIVFQYSAGPVSCTEVGIFCSRIKEVFRL

SEQ ID NO: 744299 - protein, 124 aa, Homo sapiens
MWVTEWPGRLRLSHRDGCAELPPPGVPGQRFQAGEPDRELPGHTPSASCTATFWVNRSSPSPSPQPPLQPLSRPAFIRRTSLNAVAKKRGAPGRGDPDGHTRNAPPQPREVAHSVQVFGGRVCI

SEQ ID NO: 744300 - protein, 135 aa, Homo sapiens
LSPSRVPVFLMTPTAAAAEAPRPLGGDWAGRAPPHAGIFLSCLGRSGRLVLQSVSPFKKLISCPARSWDHKLACLHSCTFPSVCSSLSGPQGRYPMTWKDAPSRRRSQSGRQETQPSLFCLPPHLSLSLSVLCSC

SEQ ID NO: 744301 - protein, 114 aa, Homo sapiens [sequence omitted]

SEQ ID NO: 744302 - protein, 138 aa, Homo sapiens
MHSGQVLALVLVAALWGGTQPLLKRASAGLQRVHEPTWAQQLLQEMKTLFLNTEYLMPFLLNQCGSLLYYLTLASTDLTLAVPICNSLAIIFTLIVGKALGEDIGGKRAVAGMVLTVIGISLCITSSVSKTQGQQSTL

SEQ ID NO: 744303 - protein, 173 aa, Homo sapiens
PEVEDSGVAMAASLGQVLALVLVAALWGGTQPLLKRASAGLQRVHEPTWAQQLLQEMKTLFLNTEYLMPFLLNQCGSLLYYLTLASTDLTLAVPICNSLAIIFTLIVGKALGEDIGGKRAVAGMVLTVIGISLCITSSVPWTAELQLHGKGQLQTLSQKCKREASGTQSERFG

SEQ ID NO: 744304 - protein, 105 aa, Homo sapiens
PEVEDSGVAMAASLGQVLALVLVAALWGGTQPLLKRASAGLQRVHEPTWAQQLLQEMKTLFLNTEYLMPFLLNQCGSLLYYLTLASTGWSQTSEFRSSCWNPGKH

SEQ ID NO: 744305 - protein, 105 aa, Homo sapiens; identical to SEQ ID NO: 744304

SEQ ID NO: 744306 - protein, 117 aa, Homo sapiens
MKTLFLNTEYLMPFLLNQCGSLLYYLTLASTDLTLAVPICNSLAIIFTLIVGKALGEDIGGKRAVAGMVLTVIGISLCITSSVPWTAELQLHGKGQLQTLSQKCKREASGTQSERFG

SEQ ID NO: 744307 - protein, 843 aa, Homo sapiens
GAGRHRTPARLRCGSGPRSGPTRSVTAGSGAHLPAAAPGPCGGPRGGRRPRASRSPGGPGLHRGGLGAMEPPYSLTAHYDEFQEVKYVSRCGAGGARGASLPPGFPLGAARSATGARSGLPRWNRREVCLLSGLVFAAGLCAILAAMLALKYLGPVAAGGGACPEGCPERKAFARAARFLAANLDASIDPCQDFYSFACGGWLRRHAIPDDKLTYGTIAAIGEQNEERLRRLLARPGGGPGGAAQRKVRAFFRSCLDMREIERLGPRPMLEVIEDCGGWDLGGAEERPGVAARWDLNRLLYKAQGVYSAAALFSLTVSLDDRNSSRYVIRIDQDGLTLPERTLYLAQDEDSEKILAAYRVFMERVLSLLGADAVEQKAQEILQVEQQLANITVSEYDDLRRDVSSMYNKVTLGQLQKITPHLRWKWLLDQIFQEDFSEEEEVVLLATDYMQQVSQLIRSTPHRVLHNYLVWRVVVVLSEHLSPPFREALHELAQEMEGSDKPQELARVCLGQANRHFGMALGALFVHEHFSAASKAKVQQLVEDIKYILGQRLEELDWMDAETRAAARAKLQYMMVMVGYPDFLLKPDAVDKEYEFEVHEKTYFKNILNSIRFSIQLSVKKIRQEVDKSTWLLPPQALNAYYLPNKNQMVFPAGILQPTLYDPDFPQSLNYGGIGTIIGHELTHGYDDWGGQYDRSGNLLHWWTEASYSRFLRKAECIVRLYDNFTVYNQRVNGKHTLGENIADMGGLKLAYHAYQKWVREHGPEHPLPRLKYTHDQLFFIAFAQNWCIKRRSQSIYLQVLTDKHAPEHYRVLGSVSQFEEFGRAFHCPKDSPMNPAHKCSVW

SEQ ID NO: 744308 - protein, 272 aa, Homo sapiens
SGGHPDNSSMIFYANDTGAQQFEKWWDKSRTVPFYLVGLLLPLLNFKSPSFFSKFNILGTVSVLYLIFLVTFKAVRLGFHLEFHWFIPTEFFVPEIRFQFPQLTGVLTLAFFIHNCIITLLKNNKKQENNVRDLCIAYMLVTLTYLYIGVLVFASFPSPPLSKDCIEQNFLDNFPSSDTLSFIARIFLLFQMMTVYPLLGYLARVQLLGHIFGDIYPRYSGAACGLAFVFIYPSLIYIISLHQEERLTWPKLIFHVFIIILGVANLIVQFFM

SEQ ID NO: 744309 - protein, 302 aa, Homo sapiens
SGGHPDNSSMIFYANDTGAQQFEKWWDKSRTVPFYLVGLLLPLLNFKSPSFFSKFNILGTVSVLYLIFLVTFKAVRLGFHLEFHWFIPTEFFVPEIRFQFPQLTGVLTLAFFIHNCIITLLKNNKKQENNVRDLCIAYMLVTLTYLYIGVLVFASFPSPPLSKDCIEQNFLDNFPSSDTLSFIARIFLLFQMMTVYPLLGYLARVQLLGHIFGDIYPSIFHVLILNLIIVGAGVIMACFYPNIGGIIRYSGAACGLAFVFIYPSLIYIISLHQEERLTWPKLIFHVFIIILGVANLIVQFFM

SEQ ID NO: 744310 - protein, 344 aa, Homo sapiens
EPPAASPARHPCSMAWNTNLRWRLPLTCLLLQVIMVILFGVFVRYDFEADAHWWSERTHKNLSDMENEFYYRYPSFQDVHVMVFVGFGFLMTFLQRYGFSAVGFNFLLAAFGIQWALLMQGWFHFLQDRYIVVGVENLINADFCVASVCVAFGAVLGKVSPIQLLIMTFFQVTLFAVNEFILLNLLKVKDAGGSMTIHTFGAYFGLTVTRILYRRNLEQSKERQNSVYQSDLFAMIGTLFLWMYWPSFNSAISYHGDSQHRAAINTYCSLAACVLTSVAISSALHKKGKLDMVHIQNATLAGGVAVGTAAEMMLMPYGALIIGFVCGIISTLGFVYLTAASWVL

SEQ ID NO: 744311 - protein, 492 aa, Homo sapiens
EPPAASPARHPCSMAWNTNLRWRLPLTCLLLQVIMVILFGVFVRYDFEADAHWWSERTHKNLSDMENEFYYRYPSFQDVHVMVFVGFGFLMTFLQRYGFSAVGFNFLLAAFGIQWALLMQGWFHFLQDRYIVVGVENLINADFCVASVCVAFGAVLGKVSPIQLLIMTFFQVTLFAVNEFILLNLLKVKDAGGSMTIHTFGAYFGLTVTRILYRRNLEQSKERQNSVYQSDLFAMIGTLFLWMYWPSFNSAISYHGDSQHRAAINTYCSLAACVLTSVAISSALHKKGKLDMVHIQNATLAGGVAVGTAAEMMLMPYGALIIGFVCGIISTLGFVYLTPFLESRLHIQDTCGINNLHGIPGIIGGIVGAVTAASASLEVYGKEGLVHSFDFQGFNGDWTARTQGKFQIYGLLVTLAMALMGGIIVGLILRLPFWGQPSDENCFEDAVYWEMPEGNSTVYIPEDPTFKPSGPSVPSVPMVSPLPMASSVPLVP

SEQ ID NO: 744312 - protein, 492 aa, Homo sapiens; identical to SEQ ID NO: 744311

SEQ ID NO: 744313 - protein, 250 aa, Homo sapiens
MYWPSFNSAISYHGDSQHRAAINTYCSLAACVLTSVAISSALHKKGKLDMVHIQNATLAGGVAVGTAAEMMLMPYGALIIGFVCGIISTLGFVYLTPFLESRLHIQDTCGINNLHGIPGIIGGIVGAVTAASASLEVYGKEGLVHSFDFQGFNGDWTARTQGKFQIYGLLVTLAMALMGGIIVGLILRLPFWGQPSDENCFEDAVYWEMPEGNSTVYIPEDPTFKPSGPSVPSVPMVSPLPMASSVPLVP

SEQ ID NO: 744314 - protein, 34 aa, Homo sapiens
SEVGGELGECVERGECGKEGHGENWPFPVVLKEE

SEQ ID NO: 744315 - protein, 179 aa, Homo sapiens
KHLRPTEGFPHTQVSLQLASGAFLLNEAFCEATHIPMEKLKWTSPFTCHRVSLTTRPSESKTPSPQLCTSSPPRHPSCDSFSLEPLAKGKLGLEPRAVVEHTGKLWATVVGLAWLEHSSASYFTEWELVAAKANSWLEQQEVPEGRTQGTLKAAARQLFVLLRHWDENLEFNMLCYNPN

SEQ ID NO: 744316 - protein, 153 aa, Homo sapiens
GQSGLFTQYNIQKKAMTVGEYRRLANSEKYCTPRHQDFDDLERKYWKNLTFVSPIYGADISGSLYDDDVAQWNIGSLRTILDMVERECGTIIEGVNTPYLYFGMWKTTFAWHTEDMDLYSINYLPPGEATPGGPRSTEFVHPSSQAQPDVLFA

SEQ ID NO: 744317 - protein, 104 aa, Homo sapiens
GALGSRWLRVGCVAPRPHPELVLGCLFTRYCTPRHQDFDDLERKYWKNLTFVSPIYGADISGSLYDDVSMRLRGRTGTSFLVGGGGRALNGTLPWQMKLPGRQG

SEQ ID NO: 744318 - protein, 77 aa, Homo sapiens
RIARLRGASHGVRAWPRQGWGDAVRAARDRNPHSGAAERAVLLFSGSLASDVGKKRRAQERQLESGLARPRFLQLLP

SEQ ID NO: 744319 - protein, 104 aa, Homo sapiens
VETRSHYVAQAGLELLCSSDPPGSASQSGGITGVSHHTWPKSSLDHTQPSPATTLFVCFSLAQNSLKVICTCCFQFFSFHFSEIPLNQAFICLTPRNCSCQGPP

SEQ ID NO: 744320 - protein, 107 aa, Homo sapiens [sequence omitted]

SEQ ID NO: 744321 - protein, 103 aa, Homo sapiens
MEGPGETAPVAEGFTGPARSTQVRSPVEVMLRSPESLIIFKTWSSLFPVLLSFQKCLRCILPFSFLHMKTSLTIFSGLLSNTEHQVLQRSWCPGAESYLCGHL

SEQ ID NO: 744322 - protein, 254 aa, Homo sapiens
  misc_feature (170)..(170): Xaa can be any naturally occurring amino acid
TLALFRGASEVFSCFKMKLNISFPATGCQKLIEVDDERKLRTFYEKRMATEVAADALGEEWKGYVVRISGGNNKQGFPLKQGVLTHGRVHLLLSKGHSYYRPRRTGERKRTKSQSGGCALVAYRNILDAVSQSVVYCVQPNTGREGHIPGNVTWILQWPTPLWGPQNDAXSRIRKLFSLSKENDVCQYVVKKPLNKEGKKPRTKAPKIQRLVTPHVLQHKQRRIALKQPHIKKNKEEAAEYAKLLAKRMKEAKK

SEQ ID NO: 744323 - protein, 141 aa, Homo sapiens
TLALFRGASEVFSCFKMKLNISFPATGCQKLIEVDDERKLRTFYEKRMATEVAADALGEEWKGYVVRISGGNNKQGFPLKQGVLTHGRVHLLLSKGHSYYRPRRTGERKRRSVHGCIVDANLSVLNLVIVKKRREGYSWTD

SEQ ID NO: 744324 - protein, 91 aa, Homo sapiens
AQRGPGKAGLTGGRERLERGARAARTDQHQRIQEEERDLTGSGDISPPQHPSRHSLHLLVLQAAQAIVESPPGVQNGASASCHSGPLKSPM

SEQ ID NO: 744325 - protein, 129 aa, Homo sapiens
GCYFGGGGGGSVSREGQHPLFAAFPGRAARERKREASEIPEWIDRCYVIGAASSTPQEARSWGERGSPAAGATRTVSPPHRSLELGIQEEAASFVFWCHRRWPPMAFGLLTWGGWVLHHPPTLLPPCGR

SEQ ID NO: 744326 - protein, 84 aa, Homo sapiens
GLSEFGFREAWSWASKKKQPHLFSGVIVGGHLWLLGFSPGAGGFCTTLPPSFLRVDDRATSSTTDSSRATKKKNVLHLVGLDSL

SEQ ID NO: 744327 - protein, 129 aa, Homo sapiens; identical to SEQ ID NO: 744325

SEQ ID NO: 744328 - protein, 187 aa, Homo sapiens
AQRGPGKAGLTGGRERLERGARAARTDQHQRIQEEERDLTGSGDISPPQHPSRHSFSPGAGGFCTTLPPSFLRVDDRATSSTTDSSRAPSSPRPPGSTSHCGISTRCTERCLCVLPLRTSQVPDVMAPQHDQEKFHDLAYSCLGKSFSMSNQDLYGYSTSSLALGLAWLSWETKKKNVLHLVGLDSL

SEQ ID NO: 744329 - protein, 121 aa, Homo sapiens
MGVLCYVATEEQPRLMPLKFEYTQINTPVRRGTSCVLVAMINHARCMNLYSIVIASSHGGPDMKAANPLYYSPLEAEGLTAAGHIGKEAGACSVSGQGYANQKEECTSSGWAGFPLISLPS

SEQ ID NO: 744330 - protein, 166 aa, Homo sapiens
KNFQFYSLDTATSTIFTGNQIVSWFLYSFLSSAPHFNTLLLNSRSRKPKAIFSQIFDPSVALSATPSLLDKFSSHPIPGMERVLLISSYSHRNHPSQQAVGETEIETANLTKPRSMFGCFHLSSTQISEPQFRYLYNQDKKPLGLLCAENEEFYIKDRILCYDTHG

SEQ ID NO: 744331 - protein, 177 aa, Homo sapiens
MELGREDGERRKEGETMNGGPQKRCKVEHRSRGGREASALGLVPRLLRGLWVIRKVLEESEWGNISMRRERVRCGQAVSSASLRVSLGPVKGDCVLEVMLHLLSSAQHSGETASSQRPLTAPSTKTTGPSQAQSSLTCMENVMPFSQSFPLAFCSSVTSMIICSWFHSFSPPDGPVP

SEQ ID NO: 744332 - protein, 156 aa, Homo sapiens
MFLTEDLITFNLRNFLLFQLWESSFSPGAGGFCTTLPPSFLRVDDRATSSTTDSSRAPSSPRPPGSTSHCGISTRCTERCLCVLPLRTSQVPDVMAPQHDQEKFHDLAYSCLGKSFSMSNQDLYGYSTSSLALGLAWLSWETKKKNVLHLVGLDSL

SEQ ID NO: 744333 - protein, 127 aa, Homo sapiens
MIRSERNSDLFRSVSPRTRGTLSRTVFCLQAVIPCYTSKSQEEEWFWHHPPQTAMGPLGLEGRTQAAAGIWRLSPGHGASASPGWGCLLLGLSIWHQLASQHRPHNQPDSSFCCCHGNWLPYCTSEH

SEQ ID NO: 744334 - protein, 127 aa, Homo sapiens; identical to SEQ ID NO: 744333

SEQ ID NO: 744335 - protein, 127 aa, Homo sapiens; identical to SEQ ID NO: 744333

SEQ ID NO: 744336 - protein, 68 aa, Homo sapiens
  misc_feature (17)..(17): Xaa can be any naturally occurring amino acid
GLWLLSALRAAPPAAVXAPCLLLIVTAKQVNVIILVILCWWGWAPWLGLLWSEGGEHLAEAVSRGTRC

SEQ ID NO: 744337 - protein, 127 aa, Homo sapiens; identical to SEQ ID NO: 744333

SEQ ID NO: 744338 - protein, 127 aa, Homo sapiens; identical to SEQ ID NO: 744333

SEQ ID NO: 744339 - protein, 119 aa, Homo sapiens
MVEWVGEEKENWPCLTYVFSCSLYPSTPLPVSSSFRPLILVYSNCRKTYIVNDRPPCFQFCDREERHWGYRELFPLLQWAPEGKVGGQLTLGEMIGWRREQRYLYLGDRGEKEEEHGVW

SEQ ID NO: 744340 - protein, 410 aa, Homo sapiens
KCSPDPPLCSAAHRGKMALEVGDMEDGQLSDSDSDMTVAPSDRPLQLPKVLGGDSAMRAFQNTATACAPVSHYRAVESVDSSEESFSDSDDDSCLWKRKRQKCFNPPPKPEPFQFGQSSQKPPVAGGKKINNIWGAVLQEQNQDAVATELGILGMEGTIDRSRQSETYNYLLAKKLRKESQEHTKDLDKELDEYMHGGKKMGSKEEENGQGHLKRKRPVKDRLGNRPEMNYKGRYEITAEDSQEKVADEISFRLQEPKKDLIARVVRIIGNKKAIELLMETAEVEQNGGLFIMNGSRRRTPGGVFLNLLKNTPSISEEQIKDIFYIENQKEYENKKAARKRRTQVLGKKMKQAIKSLNFQEDDDTSRETFASDTNEALASLDESQEGHAEAKLEAEEAIEVDHSHDLDIF

SEQ ID NO: 744341 - protein, 410 aa, Homo sapiens; identical to SEQ ID NO: 744340

SEQ ID NO: 744342 - protein, 410 aa, Homo sapiens; identical to SEQ ID NO: 744340

SEQ ID NO: 744343 - protein, 410 aa, Homo sapiens; identical to SEQ ID NO: 744340

SEQ ID NO: 744344 - protein, 410 aa, Homo sapiens; identical to SEQ ID NO: 744340

SEQ ID NO: 744345 - protein, 410 aa, Homo sapiens; identical to SEQ ID NO: 744340

SEQ ID NO: 744346 - protein, 410 aa, Homo sapiens; identical to SEQ ID NO: 744340

SEQ ID NO: 744347 - protein, 410 aa, Homo sapiens; identical to SEQ ID NO: 744340

SEQ ID NO: 744348 - protein, 407 aa, Homo sapiens
GYFKSPGTWRLKFVNDMASWFDQFDNSDSDSDMTVAPSDRPLQLPKVLGGDSAMRAFQNTATACAPVSHYRAVESVDSSEESFSDSDDDSCLWKRKRQKCFNPPPKPEPFQFGQSSQKPPVAGGKKINNIWGAVLQEQNQDAVATELGILGMEGTIDRSRQSETYNYLLAKKLRKESQEHTKDLDKELDEYMHGGKKMGSKEEENGQGHLKRKRPVKDRLGNRPEMNYKGRYEITAEDSQEKVADEISFRLQEPKKDLIARVVRIIGNKKAIELLMETAEVEQNGGLFIMNGSRRRTPGGVFLNLLKNTPSISEEQIKDIFYIENQKEYENKKAARKRRTQVLGKKMKQAIKSLNFQEDDDTSRETFASDTNEALASLDESQEGHAEAKLEAEEAIEVDHSHDLDIF

SEQ ID NO: 744349 - protein, 213 aa, Homo sapiens
KCSPDPPLCSAAHRGKMALEVGDMEDGQLSDSDSDMTVAPSDRPLQLPKVLGGDSAMRAFQNTATACAPVSHYRAVESVDSSEESFSDSDDDSCLWKRKRQKCFNPPPKPEPFQFGQSSQKPPVAGGKKINNIWGAVLQEQNQDAVATELGILGMEGTIDRSRQSETYNYLLAKKLRKESQEHTKDLDKELDEYMHGGKKMGSKEEENGQGHL

SEQ ID NO: 744350 - protein, 221 aa, Homo sapiens
AEVISEDPPGLFPSKEEENGQGHLKRKRPVKDRLGNRPEMNYKGRYEITAEDSQEKVADEISFRLQEPKKDLIARVVRIIGNKKAIELLMETAEVEQNGGLFIMNGSRRRTPGGVFLNLLKNTPSISEEQIKDIFYIENQKEYENKKAARKRRTQVLGKKMKQAIKSLNFQEDDDTSRETFASDTNEALASLDESQEGHAEAKLEAEEAIEVDHSHDLDIF

SEQ ID NO: 744351 - protein, 157 aa, Homo sapiens
MALSGSVEELLFLQNALGRNVRKALVSGPDLLPQDWLLRPSALSGRTARGSSRTWGSILQNSSWLFQDLGLHLAEQLVALPGPGAPSCRTARGSSRTWGSILQNSSWLFQDLGLPSCRTARGSSRTWGSILQNKSWLFQDLGLHLANSSWLFQDLGS

SEQ ID NO: 744352 - protein, 48 aa, Homo sapiens
MQQAKSHLEELRIRSKSLNTESASGFSGCSVACVLGAPGEVSEAAGTC

SEQ ID NO: 744353 - protein, 718 aa, Homo sapiens
MSVSGKKEFDVKQILRLRWRWFSHPFQGSTNTGSCLQQEGYEHRGTPVQGRLKSHSRDRNGLKKSNSPVHHNILAPVPGPAPAHQRAVQNLQQHNLIVHFQANEDTPKSVPEKNLFKEACEKRAQDLEMMADDNIEDSTARLDTQHSEDMNATRSEEQFHVINHAEQTLRKMENYLKEKQLCDVLLIAGHLRIPAHRLVLSAVSDYFAAMFTNDVLEAKQEEVRMEGVDPNALNSLVQYAYTGVLQLKEDTIESLLAAACLLQLTQVIDVCSNFLIKQLHPSNCLGIRSFGDAQGCTELLNVAHKYTMEHFIEVIKNQEFLLLPANEISKLLCSDDINVPDEETIFHALMQWVGHDVQNRQGELGMLLSYIRLPLLPPQLLADLETSSMFTGDLECQKLLMEAMKYHLLPERRSMMQSPRTKPRKSTVGALYAVGGMDAMKGTTTIEKYDLRTNSWLHIGTMNGRRLQFGVAVIDNKLYVVGGRDGLKTLNTVECFNPVGKIWTVMPPMSTHRHGLGVATLEGPMYAVGGHDGWSYLNTVERWDPEGRQWNYVASMSTPRSTVGVVALNNKLYAIGGRDGSSCLKSMEYFDPHTNKWSLCAPMSKRRGGVGVATYNGFLYVVGGHDAPASNHCSRLSDCVERYDPKGDSWSTVAPLSVPRDAVAVCPLGDKLYVVGGYDGHTYLNTVESYDAQRNEWKEEVPVNIGRAGACVVVVKLP

SEQ ID NO: 744354 - protein, 720 aa, Homo sapiens
MSVSGKKEFDVKQILRLRWRWFSHPFQGSTNTGSCLQQEGYEHRGTPVQGRLKSHSRDRNGLKKSNSPVHHNILAPVPGPAPAHQRAVQNLQQHNLIVHFQANEDTPKSVPEKNLFKEACEKRAQDLEMMADDNIEDSTARLDTQHSEDMNATRSEEQFHVINHAEQTLRKMENYLKEKQLCDVLLIAGHLRIPAHRLVLSAVSDYFAAMFTNDVLEAKQEEVRMEGVDPNALNSLVQYAYTGVLQLKEDTIESLLAAACLLQLTQVIDVCSNFLIKQLHPSNCLGIRSFGDAQGCTELLNVAHKYTMEHFIEVIKNQEFLLLPANEISKLLCSDDINVPDEETIFHALMQWVGHDVQNRQGELGMLLSYIRLPLLPPQLLADLETSSMFTGDLECQKLLMEAMKYHLLPERRSMMQSPRTKPRKSTVGALYAVGGMDAMKGTTTIEKYDLRTNSWLHIGTMNGRRLQFGVAVIDNKLYVVGGRDGLKTLNTVECFNPVGKIWTVMPPMSTHRHGLGVATLEGPMYAVGGHDGWSYLNTVERWDPEGRQWNYVASMSTPRSTVGVVALNNKLYAIGGRDGSSCLKSMEYFDPHTNKWSLCAPMSKRRGGVGVATYNGFLYVVGGHDAPASNHCSRLSDCVERYDPKGDSWSTVAPLSVPRDAVAVCPLGDKLYVVGGYDGHTYLNTVESYDAQRNEWKESMQELLQNFYTTQKLKETLGH

SEQ ID NO: 744355 - protein, 30 aa, Homo sapiens
MGMQAQTQTQKHWQTLWGHSRAESCTYRET

SEQ ID NO: 744356 - protein, 133 aa, Homo sapiens
DWGAGNRGLGEKDGEADGVLVGSGHSGVPFSEFPKARVPRPLPPGGGSLPEAPPALPLPGWLQTTPPLRPPRIVLQSRPGRPDWGLPGAPIPNLRVERRSQERRVAGKVGQGVRQKREQLGGNGKDEPGELDL

SEQ ID NO: 744357 - protein, 1430 aa, Homo sapiens
MFRFPMGLLLGSVLLVASAPATLEPPGCSNKEQQVTVSHTYKIDVPKSALVQVDADPQPLSDDGASLLALGEAREEQNIIFRHNIRLQTPQKDCELAGSVQDLLARVKKLEEEMVEMKEQCSAQRCCQGVTDLSRHCSGHGTFSLETCSCHCEEGREGPACERLACPGACSGHGRCVDGRCLCHEPYVGADCGYPACPENCSGHGECVRGVCQCHEDFMSEDCSEKRCPGDCSGHGFCDTGECYCEEGFTGLDCAQVVTPQGLQLLKNTEDSLLVSWEPSSQVDHYLLSYYPLGKELSGKQIQVPKEQHSYEILGLLPGTKYIVTLRNVKNEVSSSPQHLLATTDLAVLGTAWVTDETENSLDVEWENPSTEVDYYKLRYGPMTGQEVAEVTVPKSSDPKSRYDITGLHPGTEYKITVVPMRGELEGKPILLNGRTEIDSPTNVVTDRVTEDTATVSWDPVQAVIDKYVVRYTSADGDTKEMAVHKDESSTVLTGLKPGEAYKVYVWAERGNQGSKKADTNALTEIDSPANLVTDRVTENTATISWDPVQATIDKYVVRYTSADDQETREVLVGKEQSSTVLTGLRPGVEYTVHVWAQKGDRESKKADTNAPTDIDSPKNLVTDRVTENMATVSWDPVQAAIDKYVVRYTSAGGETREVPVGKEQSSTVLTGLRPGMEYMVHVWAQKGDQESKKADTKAQTDIDSPQNLVTDRVTENMATVSWDPVRATIDRYVVRYTSAKDGETREVPVGKEQSSTVLTGLRPGVEYTVHVWAQKGAQESKKADTKAQTDIDSPQNLVTDWVTENTATVSWDPVQATIDRYVVHYTSANGETREVPVGKEQSSTVLTGLRPGMEYTVHVWAQKGNQESKKADTKAQTEIDGPKNLVTDWVTENMATVSWDPVQATIDKYMVRYTSADGETREVPVGKEHSSTVLTGLRPGMEYMVHVWAQKGAQESKKADTKAQTELDPPRNLRPSAVTQSGGILTWTPPSAQIHGYILTYQFPDGTVKEMQLGREDQRFALQGLEQGATYPVSLVAFKGGRRSRNVSTTLSTVGARFPHPSDCSQVQQNSNAASGLYTIYLHGDASRPLQVYCDMETDGGGWIVFQRRNTGQLDFFKRWRSYVEGFGDPMKEFWLGLDKLHNLTTGTPARYEVRVDLQTANESAYAIYDFFQVASSKERYKLTVGKYRGTAGDALTYHNGWKFTTFDRDNDIALSNCALTHHGGWWYKNCHLANPNGRYGETKHSEGVNWEPWKGHEFSIPYVELKIRPHGYSREPVLGRKKRTLRGRLLNVLMARVSSPRRRHHQLWQLGAGWVVVTAVWECSDSPQNKSCHQASSHGGSFPLTCIFARLYEGLENQNSSCTVCVGKTVLERQGFSAYLQQHIYWIRAREGITQHFTSWKSLEIYIYVFKVLLMQIFSLERSTEEEF

SEQ ID NO: 744358 - protein, 397 aa, Homo sapiens
LKRSGKWLKTWKKKYVTLCSNGVLTYYSSLGDYMKNIHKKEIDLRTSTIKVPGKWPSLATSACAPISSSKSNGLSKDMDTGLGDSICFSPSISSTTSPKLNPPPSPHANKKKHLKKKSTNNFMIVSATGQTWHFEATTYEERDAWVQAIQSQILASLQSCESSKSKSQLTSQSEAMALQSIQNMRGNAHCVDYETQNPKWASLNLGVLMCIECSGIHRSLGTRLSRVRSLELDDWPVELRKVMSSIGNDLANSIWEGSSQGQTKPSVKSTREEKERWIRSKYEEKLFLAPLPCTELSLGQHLLRATADEDLQTAILLLAHGSREEVNETCGEGDGCTALHLACRKGNVVLAQLLIWYGVDVMARDAHGNTALTYARQASSQECINVLLQYGCPDECV

SEQ ID NO: 744359 - protein, 49 aa, Homo sapiens
HHGSKVSECVQSKRLNPTDARWPCRIEISSPKHRHGRKHPGSWLECWFP

SEQ ID NO: 744360 - protein, 158 aa, Homo sapiens
MAFMVKTMVGGQLKNLTGSLGGGEDKGDGDKSAAEAQGMSREEYEEYQKQLVEEKMERDAQFTQRKAERATLRSHFRDKYRLPKNETDESQIQMAGGDVELPRELAKMIEEDTEEEEEKASVLGQLASLPGLNLGSLKDKAQATLGDLKQSAEKCHVM

SEQ ID NO: 744361 - protein, 158 aa, Homo sapiens; identical to SEQ ID NO: 744360

SEQ ID NO: 744362 - protein, 217 aa, Homo sapiens
CGLSCYTGTTGTRHMPNFIFCRDRLWLCWPGWSQVIFPPQPPKNTGITGTSQHSGSCWCTWAAMVHRRYELGGRICSWTSTQACTQTDPWATGNRCGENAAKQSGLVSDGDPGRMERDAQFTQRKAERATLRSHFRDKYRLPKNETDESQIQMAGGDVELPRELAKMIEEDTEEEEEKASVLGQLASLPGLNLGSLKDKAQATLGDLKQSAEKCHVM

SEQ ID NO: 744363 - protein, 158 aa, Homo sapiens; identical to SEQ ID NO: 744360

SEQ ID NO: 744364 - protein, 924 aa, Homo sapiens
TTFRAKPGCCCSGGEDRGTAMAESSESFTMASSPAQRRRGNDPLTSSPGRSSRRTDALTSSPGRDLPPFEDESEGLLGTEGPLEEEEDGEELIGDGMERDYRAIPELDAYEAEGLALDDEDVEELTASQREAAERAMRQRDREAGRGLGRMRRGLLYDSDEEDEERPARKRRQVERATEDGEEDEEMIESIENLEDLKGHSVREWVSMAGPRLEIHHRFKNFLRTHVDSHGHNVFKERISDMCKENRESLVVNYEDLAAREHVLAYFLPEAPAELLQIFDEAALEVVLAMYPKYDRITNHIHVRISHLPLVEELRSLRQLHLNQLIRTSGVVTSCTGVLPQLSMVKYNCNKCNFVLGPFCQSQNQEVKPGSCPECQSAGPFEVNMEETIYQNYQRIRIQESPGKVAAGRLPRSKDAILLADLVDSCKPGDEIELTGIYHNNYDGSLNTANGFPVFATVILANHVAKKDNKVAVGELTDEDVKMITSLSKDQQIGEKIFASIAPSIYGHEDIKRGLALALFGGEPKNPGGKHKVRGDINVLLCGDPGTAKSQFLKYIEKVSSRAIFTTGQGASAVGLTAYVQRHPVSREWTLEAGALVLADRGVCLIDEFDKMNDQDRTSIHEAMEQQSISISKAGIVTSLQARCTVIAAANPIGGRYDPSLTFSENVDLTEPIISRFDILCVVRDTVDPVQDEMLARFVVGSHVRHHPSNKEEEGLANGSAAEPAMPNTYGVEPLPQEVLKKYIIYAKERVHPKLNQMDQDKVAKMYSDLRKESMATGSIPITVRHIESMIRMAEAHARIHLRDYVIEDDVNMAIRVMLESFIDTQKFSVMRSMRKTFARYLSFRRDNNELLLFILKQLVAEQVTYQRNRFGAQQDTIEVPEKDLVDKARQINIHNLSAFYDSELFRMNKFSHDLKRKMILQQF

SEQ ID NO: 744365 - protein, 908 aa, Homo sapiens
MWYAMAESSESFTMASSPAQRRRGNDPLTSSPGRSSRRTDALTSSPGRDLPPFEDESEGLLGTEGPLEEEEDGEELIGDGMERDYRAIPELDAYEAEGLALDDEDVEELTASQREAAERAMRQRDREAGRGLGRMRRGLLYDSDEEDEERPARKRRQVERATEDGEEDEEMIESIENLEDLKGHSVREWVSMAGPRLEIHHRFKNFLRTHVDSHGHNVFKERISDMCKENRESLVVNYEDLAAREHVLAYFLPEAPAELLQIFDEAALEVVLAMYPKYDRITNHIHVRISHLPLVEELRSLRQLHLNQLIRTSGVVTSCTGVLPQLSMVKYNCNKCNFVLGPFCQSQNQEVKPGSCPECQSAGPFEVNMEETIYQNYQRIRIQESPGKVAAGRLPRSKDAILLADLVDSCKPGDEIELTGIYHNNYDGSLNTANGFPVFATVILANHVAKKDNKVAVGELTDEDVKMITSLSKDQQIGEKIFASIAPSIYGHEDIKRGLALALFGGEPKNPGGKHKVRGDINVLLCGDPGTAKSQFLKYIEKVSSRAIFTTGQGASAVGLTAYVQRHPVSREWTLEAGALVLADRGVCLIDEFDKMNDQDRTSIHEAMEQQSISISKAGIVTSLQARCTVIAAANPIGGRYDPSLTFSENVDLTEPIISRFDILCVVRDTVDPVQDEMLARFVVGSHVRHHPSNKEEEGLANGSAAEPAMPNTYGVEPLPQEVLKKYIIYAKERVHPKLNQMDQDKVAKMYSDLRKESMATGSIPITVRHIESMIRMAEAHARIHLRDYVIEDDVNMAIRVMLESFIDTQKFSVMRSMRKTFARYLSFRRDNNELLLFILKQLVAEQVTYQRNRFGAQQDTIEVPEKDLVDKARQINIHNLSAFYDSELFRMNKFSHDLKRKMILQQF

SEQ ID NO: 744366 - protein, 895 aa, Homo sapiens
MASSPAQRRRGNDPLTSSPGRSSRRTDALTSSPGRDLPPFEDESEGLLGTEGPLEEEEDGEELIGDGMERDYRAIPELDAYEAEGLALDDEDVEELTASQREAAERAMRQRDREAGRGLGRMRRGLLYDSDEEDEERPARKRRQVERATEDGEEDEEMIESIENLEDLKGHSVREWVSMAGPRLEIHHRFKNFLRTHVDSHGHNVFKERISDMCKENRESLVVNYEDLAAREHVLAYFLPEAPAELLQIFDEAALEVVLAMYPKYDRITNHIHVRISHLPLVEELRSLRQLHLNQLIRTSGVVTSCTGVLPQLSMVKYNCNKCNFVLGPFCQSQNQEVKPGSCPECQSAGPFEVNMEETIYQNYQRIRIQESPGKVAAGRLPRSKDAILLADLVDSCKPGDEIELTGIYHNNYDGSLNTANGFPVFATVILANHVAKKDNKVAVGELTDEDVKMITSLSKDQQIGEKIFASIAPSIYGHEDIKRGLALALFGGEPKNPGGKHKVRGDINVLLCGDPGTAKSQFLKYIEKVSSRAIFTTGQGASAVGLTAYVQRHPVSREWTLEAGALVLADRGVCLIDEFDKMNDQDRTSIHEAMEQQSISISKAGIVTSLQARCTVIAAANPIGGRYDPSLTFSENVDLTEPIISRFDILCVVRDTVDPVQDEMLARFVVGSHVRHHPSNKEEEGLANGSAAEPAMPNTYGVEPLPQEVLKKYIIYAKERVHPKLNQMDQDKVAKMYSDLRKESMATGSIPITVRHIESMIRMAEAHARIHLRDYVIEDDVNMAIRVMLESFIDTQKFSVMRSMRKTFARYLSFRRDNNELLLFILKQLVAEQVTYQRNRFGAQQDTIEVPEKDLVDKARQINIHNLSAFYDSELFRMNKFSHDLKRKMILQQF

SEQ ID NO: 744367 - protein, 911 aa, Homo sapiens
GNHGCCIMSESSESFTMASSPAQRRRGNDPLTSSPGRSSRRTDALTSSPGRDLPPFEDESEGLLGTEGPLEEEEDGEELIGDGMERDYRAIPELDAYEAEGLALDDEDVEELTASQREAAERAMRQRDREAGRGLGRMRRGLLYDSDEEDEERPARKRRQVERATEDGEEDEEMIESIENLEDLKGHSVREWVSMAGPRLEIHHRFKNFLRTHVDSHGHNVFKERISDMCKENRESLVVNYEDLAAREHVLAYFLPEAPAELLQIFDEAALEVVLAMYPKYDRITNHIHVRISHLPLVEELRSLRQLHLNQLIRTSGVVTSCTGVLPQLSMVKYNCNKCNFVLGPFCQSQNQEVKPGSCPECQSAGPFEVNMEETIYQNYQRIRIQESPGKVAAGRLPRSKDAILLADLVDSCKPGDEIELTGIYHNNYDGSLNTANGFPVFATVILANHVAKKDNKVAVGELTDEDVKMITSLSKDQQIGEKIFASIAPSIYGHEDIKRGLALALFGGEPKNPGGKHKVRGDINVLLCGDPGTAKSQFLKYIEKVSSRAIFTTGQGASAVGLTAYVQRHPVSREWTLEAGALVLADRGVCLIDEFDKMNDQDRTSIHEAMEQQSISISKAGIVTSLQARCTVIAAANPIGGRYDPSLTFSENVDLTEPIISRFDILCVVRDTVDPVQDEMLARFVVGSHVRHHPSNKEEEGLANGSAAEPAMPNTYGVEPLPQEVLKKYIIYAKERVHPKLNQMDQDKVAKMYSDLRKESMATGSIPITVRHIESMIRMAEAHARIHLRDYVIEDDVNMAIRVMLESFIDTQKFSVMRSMRKTFARYLSFRRDNNELLLFILKQLVAEQVTYQRNRFGAQQDTIEVPEKDLVDKARQINIHNLSAFYDSELFRMNKFSHDLKRKMILQQF

SEQ ID NO: 744368 - protein, 916 aa, Homo sapiens
MRVLRGEDRGTAMAESSESFTMASSPAQRRRGNDPLTSSPGRSSRRTDALTSSPGRDLPPFEDESEGLLGTEGPLEEEEDGEELIGDGMERDYRAIPELDAYEAEGLALDDEDVEELTASQREAAERAMRQRDREAGRGLGRMRRGLLYDSDEEDEERPARKRRQVERATEDGEEDEEMIESIENLEDLKGHSVREWVSMAGPRLEIHHRFKNFLRTHVDSHGHNVFKERISDMCKENRESLVVNYEDLAAREHVLAYFLPEAPAELLQIFDEAALEVVLAMYPKYDRITNHIHVRISHLPLVEELRSLRQLHLNQLIRTSGVVTSCTGVLPQLSMVKYNCNKCNFVLGPFCQSQNQEVKPGSCPECQSAGPFEVNMEETIYQNYQRIRIQESPGKVAAGRLPRSKDAILLADLVDSCKPGDEIELTGIYHNNYDGSLNTANGFPVFATVILANHVAKKDNKVAVGELTDEDVKMITSLSKDQQIGEKIFASIAPSIYGHEDIKRGLALALFGGEPKNPGGKHKVRGDINVLLCGDPGTAKSQFLKYIEKVSSRAIFTTGQGASAVGLTAYVQRHPVSREWTLEAGALVLADRGVCLIDEFDKMNDQDRTSIHEAMEQQSISISKAGIVTSLQARCTVIAAANPIGGRYDPSLTFSENVDLTEPIISRFDILCVVRDTVDPVQDEMLARFVVGSHVRHHPSNKEEEGLANGSAAEPAMPNTYGVEPLPQEVLKKYIIYAKERVHPKLNQMDQDKVAKMYSDLRKESMATGSIPITVRHIESMIRMAEAHARIHLRDYVIEDDVNMAIRVMLESFIDTQKFSVMRSMRKTFARYLSFRRDNNELLLFILKQLVAEQVTYQRNRFGAQQDTIEVPEKDLVDKARQINIHNLSAFYDSELFRMNKFSHDLKRKMILQQF

SEQ ID NO: 744369 - protein, 697 aa, Homo sapiens
MCKSLRYCFSHCLYLAMTRLEEVNREVNMHSSVRYLGYLARINLLVAICLGLYVRWEKTANSLILVIFILGLFVLGIASILYYYFSMEAASLSLSNLWFGFLLGLLCFLDNSSFKNDVKEESTKYLLLTSIVLRILCSLVERISGYVRHRPTLLTTVEFLELVGFAIASTTMLVEKSLSVILLVVALAMLIIDLRMKSFLAIPNLVIFAVLLFFSSLETPKNPIAFACFFICLITDPFLDIYFSGLSVTERWKPFLYRGRICRRLSVVFAGMIELTFFILSAFKLRDTHLWYFVIPGFSIFGIFWMICHIIFLLTLWGFHTKLNDCHKVYFTPRTDYNSLDRIMASKGMRHFCLISEQLVFFSLLATAILGAVSWQPTNGIFLSMFLIVLPLESMAHGLFHELGNCLGGTSVGYAIVIPTNFCSPDGQPTLLPPEHVQELNLRSTGMLNAIQRFFAYHMIETYGCDYSTSGLSFDTLHSKLKAFLELRTVDGPRHDTYILYYSGHTHGTGEWALAGGDTLRLDTLIEWWREKNGSFCSRLIIVLDSENSTPWVKEVRKINDQYIAVQGAELIKTVDIEEADPPQLGDFTKDWVEYNCNSSNNICWTEKGRTVKAVYGVSKRWSDYTLHLPTGSDVAKHWMLHFPRITYPLVHLANWLCGLNLFWICKTCFRCLKRLKMSWFLPTVLDTGQGFKLVKS

SEQ ID NO: 744370 - protein, 697 aa, Homo sapiens; identical to SEQ ID NO: 744369

SEQ ID NO: 744371 - protein, 697 aa, Homo sapiens; identical to SEQ ID NO: 744369

SEQ ID NO: 744372 - protein, 313 aa, Homo sapiens
MFLIVLPLESMAHGLFHELGNCLGGTSVGYAIVIPTNFCSPDGQPTLLPPEHVQELNLRSTGMLNAIQRFFAYHMIETYGCDYSTSGLSFDTLHSKLKAFLELRTVDGPRHDTYILYYSGHTHGTGEWALAGGDTLRLDTLIEWWREKNGSFCSRLIIVLDSENSTPWVKEVRKINDQYIAVQGAELIKTVDIEEADPPQLGDFTKDWVEYNCNSSNNICWTEKGRTVKAVYGVSKRWSDYTLHLPTGSDVAKHWMLHFPRITYPLVHLANWLCGLNLFWICKTCFRCLKRLKMSWFLPTVLDTGQGFKLVKS

SEQ ID NO: 744373 - protein, 697 aa, Homo sapiens; identical to SEQ ID NO: 744369

SEQ ID NO: 744374 - protein, 697 aa, Homo sapiens; identical to SEQ ID NO: 744369

SEQ ID NO: 744375 - protein, 430 aa, Homo sapiens
MCKSLRYCFSHCLYLAMTRLEEVNREVNMHSSVRYLGYLARINLLVAICLGLYVRWEKTANSLILVIFILGLFVLGIASILYYYFSMEAASLSLSNLWFGFLLGLLCFLDNSSFKNDVKEESTKYLLLTSIVLRILCSLVERISGYVRHRPTLLTTVEFLELVGFAIASTTMLVEKSLSVILLVVALAMLIIDLRMKSFLAIPNLVIFAVLLFFSSLETPKNPIAFACFFICLITDPFLDIYFSGLSVTERWKPFLYRGRICRRLSVVFAGMIELTFFILSAFKLRDTHLWYFVIPGFSIFGIFWMICHIIFLLTLWGFHTKLNDCHKVYFTPRTDYNSLDRIMASKGMRHFCLISEQLVFFSLLATAILGAVSWQPTNGIFLSMFLIVLPLESMAHGLFHELGNCLGGTSVGYAIVIPTNFCRWRYTTP

SEQ ID NO: 744376 - protein, 128 aa, Homo sapiens
VTATDLPDVLGNLQYNLLKNTLQCTAHLPEVKELVWGEDLDKNFPKSAFYYDYVLASDVVYHHYFLDKLLTTMVYLSQPGTVLLWANKFRFSTDYEFLDKFKQVFDTTLLAEYPESSVKLFKGILKWD

SEQ ID NO: 744377 - protein, 138 aa, Homo sapiens
QRGDRNPLREYLSRGLMVSLSTDDPLQFHFTKEPLMEEYSIATQVWKLSSCDMCELARNSVLMSGFSHKVKSHWLGPNYTKEGPEGNDIRRTNVPDIRVGYRYETLCQELALITQAVQSEMLETIPEEAGITMSPGPQ

SEQ ID NO: 744378 - protein, 108 aa, Homo sapiens
  misc_feature (9)..(9): Xaa can be any naturally occurring amino acid
RFSNRFFPXLSIHSAGQSSLDLSELTDTMKLSGMFLLLSLALFCFLTGVFSQGGQVDCGEFQDTKVYCTRESNPHCGSDGQTYGNKCAFCKAIVKSGGKISLKHPGKC

SEQ ID NO: 744379 - protein, 1075 aa, Homo sapiens
GGIGQTDKERGAAALPGEEGDPTRGRSLGRASWESGSPRRPRSPFSSFLPRPICLSLEARPCSIEDRRNWSLIGRPGAPASGLNRSSGLWLGPDRCRPRSRCSCRVMENPSPAAALGKALCALLLATLGAAGQPLGGESICSARAPAKYSITFTGKWSQTAFPKQYPLFRPPAQWSSLLGAAHSSDYSMWRKNQYVSNGLRDFAERGEAWALMKEIEAAGEALQSVHEVFSAPAVPSGTGQTSAELEVQRRHSLVSFVVRIVPSPDWFVGVDSLDLCDGDRWREQAALDLYPYDAGTDSGFTFSSPNFATIPQDTVTEVSGHPACARAAMAPAVGTGLGPGCTLASQPRTAACGFCVEEALLLAPAVSKGVQPSHTLPTRGHSTAGRTAGRASRGGCPFLASVSSPCSVGWLRGVHGTLSPTVVQRARWTLGSGPSEAIRIPEGGLLGPQANPLLPPQITSSSPSHPANSFYYPRLKALPPIARVTLVRLRQSPRAFIPPAPVLPSRDNEIVDSASGNGHTGHMGHTAAPNPATGRPPNPNQGSEKFQVGIRSAYCKMVPRRFRILLIHTLKMDSCTLFAVESILQGHSPEERMKGGSRQYLRDSVLSDTHPQVTCVSQLTRKLARMALCGHRVTAMLQGTCGGLGTQPPHSSGLCSQAPWPGAGQVLMSILLALPGTCWTGQAGNAGAEWQFPPYSAGWQPLASRSACGLERIAGSWVRACWLWVSGSHLIWVWDSQCRPQTTADFRLSRGGTGAHQPGHGPRRPPPSMLLAGVEAGTGPPHTCPPSHVVGTDVVLRSSSNYKLTVSRPWKQGPGQVRQEAAWLAGTTPQTETVPSPGSLLIWDELGLPVPASVLPLPSAGLGSSLICPRGCPIPSRCPRATYPTGRRASTVRGVQLVWREEPLVGRGSREVRFAPHLGALGHSGQGSTWPVPWARRGIKSAVAKQKQYCRGRVGRDCAMSSEQEAGHGEKGGRRTEPAVPAEGPEWAVGTEHRPPPTRVSPVTSGFPRAEAGMGMWRLAPRRLRQVHAKPAWLSSGFLLTRWMPVPRPPDRALQHWRGLWWGPRCRTGTASAH

SEQ ID NO: 744380 - protein, 437 aa, Homo sapiens
GGIGQTDKERGAAALPGEEGDPTRGRSLGRASWESGSPRRPRSPFSSFLPRPICLSLEARPCSIEDRRNWSLIGRPGAPASGLNRSSGLWLGPDRCRPRSRCSCRVMENPSPAAALGKALCALLLATLGAAGQPLGGESICSARAPAKYSITFTGKWSQTAFPKQYPLFRPPAQWSSLLGAAHSSDYSMWRKNQYVSNGLRDFAERGEAWALMKEIEAAGEALQSVHEVFSAPAVPSGTGQTSAELEVQRRHSLVSFVVRIVPSPDWFVGVDSLDLCDGDRWREQAALDLYPYDAGTDSGFTFSSPNFATIPQDTVTEITSSSPSHPANSFYYPRLKALPPIARVTLVRLRQSPRAFIPPAPVLPSRDNEIVDSASVPETPLDCEVSLWSSWGLCGGHCGRLGTKSRTRYVRVQPANNGSPCPELEEEAECVPDNCV

SEQ ID NO: 744381 - protein, 935 aa, Homo sapiens
GGIGQTDKERGAAALPGEEGDPTRGRSLGRASWESGSPRRPRSPFSSFLPRPICLSLEARPCSIEDRRNWSLIGRPGAPASGLNRSSGLWLGPDRCRPRSRCSCRVMENPSPAAALGKALCALLLATLGAAGQPLGGESICSARAPAKYSITFTGKWSQTAFPKQYPLFRPPAQWSSLLGAAHSSDYSMWRKNQYVSNGLRDFAERGEAWALMKEIEAAGEALQSVHEVFSAPAVPSGTGQTSAELEVQRRHSLVSFVVRIVPSPDWFVGVDSLDLCDGDRWREQAALDLYPYDAGTDSGFTFSSPNFATIPQDTVTEITSSSPSHPANSFYYPRLKALPPIARVTLVRLRQSPRAFIPPAPVLPSRDNEIVDSASGNGHTGHMGHTAAPNPATGRPPNPNQGSEKFQVGIRSAYCKMVPRRFRILLIHTLKMDSCTLFAVESILQGHSPEERMKGGSRQYLRDSVLSDTHPQVTCVSQLTRKLARMALCGHRVTAMLQGTCGGLGTQPPHSSGLCSQAPWPGAGQVLMSILLALPGTCWTGQAGNAGAEWQFPPYSAGWQPLASRSACGLERIAGSWVRACWLWVSGSHLIWVWDSQCRPQTTADFRLSRGGTGAHQPGHGPRRPPPSMLLAGVEAGTGPPHTCPPSHVVGTDVVLRSSSNYKLTVSRPWKQGPGQVRQEAAWLAGTTPQTETVPSPGSLLIWDELGLPVPASVLPLPSAGLGSSLICPRGCPIPSRCPRATYPTGRRASTVRGVQLVWREEPLVGRGSREVRFAPHLGALGHSGQGSTWPVPWARRGIKSAVAKQKQYCRGRVGRDCAMSSEQEAGHGEKGGRRTEPAVPAEGPEWAVGTEHRPPPTRVSPVTSGFPRAEAGMGMWRLAPRRLRQVHAKPAWLSSGFLLTRWMPVPRPPDRALQHWRGLWWGPRCRTGTASAH

SEQ ID NO: 744382 - protein, 168 aa, Homo sapiens [sequence omitted]

SEQ ID NO: 744383 - protein, 437 aa, Homo sapiens; identical to SEQ ID NO: 744380

SEQ ID NO: 744384 - protein, 1100 aa, Homo sapiens
GCSPLCSQVMENPSPAAALGKALCALLLATLGAAGQPLGGESICSARAPAKYSITFTGKWSQTAFPKQYPLFRPPAQWSSLLGKYSPLLASCSTRRAAAPEPPAQLHGGASQSGALLTSGDSNTRMFAERLRCAVPGMRWGQGALTGRAQVGRGRGSHRVSRSDVTGGHGSLRAAGRDFLGRPLESKPDRSVRPWSAARPGGPAGAAHSSDYSMWRKNQYVSNGLRDFAERGEAWALMKEIEAAGEALQSVHEVFSAPAVPSGTGQTSAELEVQRRHSLVSFVVRIVPSPDWFVGVDSLDLCDGDRWREQAALDLYPYDAGTDSGFTFSSPNFATIPQDTVTEVSGHPACARAAMAPAVGTGLGPGCTLASQPRTAACGFCVEEALLLAPAVSKGVQPSHTLPTRGHSTAGRTAGRASRGGCPFLASVSSPCSVGWLRGVHGTLSPTVVQRARWTLGSGPSEAIRIPEGGLLGPQANPLLPPQITSSSPSHPANSFYYPRLKALPPIARVTLVRLRQSPRAFIPPAPVLPSRDNEIVDSASGNGHTGHMGHTAAPNPATGRPPNPNQGSEKFQVGIRSAYCKMVPRRFRILLIHTLKMDSCTLFAVESILQGHSPEERMKGGSRQYLRDSVLSDTHPQVTCVSQLTRKLARMALCGHRVTAMLQGTCGGLGTQPPHSSGLCSQAPWPGAGQVLMSILLALPGTCWTGQAGNAGAEWQFPPYSAGWQPLASRSACGLERIAGSWVRACWLWVSGSHLIWVWDSQCRPQTTADFRLSRGGTGAHQPGHGPRRPPPSMLLAGVEAGTGPPHTCPPSHVVGTDVVLRSSSNYKLTVSRPWKQGPGQVRQEAAWLAGTTPQTETVPSPGSLLIWDELGLPVPASVLPLPSAGLGSSLICPRGCPIPSRCPRATYPTGRRASTVRGVQLVWREEPLVGRGSREVRFAPHLGALGHSGQGSTWPVPWARRGIKSAVAKQKQYCRGRVGRDCAMSSEQEAGHGEKGGRRTEPAVPAEGPEWAVGTEHRPPPTRVSPVTSGFPRAEAGMGMWRLAPRRLRQVHAKPAWLSSGFLLTRWMPVPRPPDRALQHWRGLWWGPRCRTGTASAH

SEQ ID NO: 744385 - protein, 437 aa, Homo sapiens; identical to SEQ ID NO: 744380

SEQ ID NO: 744386 - protein, 356 aa, Homo sapiens
MHHQWLLLAACFWVIFMFMVASKFITLTFKDPDVYSAKQEFLFLTTMPEVRKLPEEKHIPEELKPTGKELPDSQLVQPLVYMERLELIRNVCRDDALKNLSHTPVSKFVLDRIFVCDKHKILFCQTPKVGNTQWKKVLIVLNGAFSSIEEIPENVVHDHEKNGLPRLSSFSDAEIQKRLKTYFKFFIVRDPFERLISAFKDKFVHNPRFEPWYRHEIAPGIIRKYRRNRTETRGIQFEDFVRYLGDPNHRWLDLQFGDHIIHWVTYVELCAPCEIMYSVIGHHETLEDDAPYILKEAGIDHLVSYPTIPPGITVYNRTKVEHYFLGISKRDIRRLYARFEGDFKLFGYQKPDFLLN

SEQ ID NO: 744387 - protein, 356 aa, Homo sapiens; identical to SEQ ID NO: 744386

SEQ ID NO: 744388 - protein, 356 aa, Homo sapiens; identical to SEQ ID NO: 744386

SEQ ID NO: 744389 - protein, 109 aa, Homo sapiens
MHHQWLLLAACFWVIFMFMVASKFITLTFKDPDVYSAKQEFLFLTTMPEVRKLPEEKHIPEELKVGTAGRGPCPLEHGTLVAGSWPSPVAGSACHHVCVRAFSCVTSPC

SEQ ID NO: 744390 - protein, 356 aa, Homo sapiens; identical to SEQ ID NO: 744386

SEQ ID NO: 744391 - protein, 319 aa, Homo sapiens
TSRSGSAWPGPASFNGPWASSALCHLQPTGKELPDSQLVQPLVYMERLELIRNVCRDDALKNLSHTPVSKFVLDRIFVCDKHKILFCQTPKVGNTQWKKVLIVLNGAFSSIEEIPENVVHDHEKNGLPRLSSFSDAEIQKRLKTYFKFFIVRDPFERLISAFKDKFVHNPRFEPWYRHEIAPGIIRKYRRNRTETRGIQFEDFVRYLGDPNHRWLDLQFGDHIIHWVTYVELCAPCEIMYSVIGHHETLEDDAPYILKEAGIDHLVSYPTIPPGITVYNRTKVEHYFLGISKRDIRRLYARFEGDFKLFGYQKPDFLLN

SEQ ID NO: 744392 - protein, 356 aa, Homo sapiens; identical to SEQ ID NO: 744386

SEQ ID NO: 744393 - protein, 292 aa, Homo sapiens
MADLHRQLQEYLAQGKAGGPAAAEPLLAAEKAEEPGDRPAEEWLGRAGLRWTWARSPAESAAAGLTCLPSVTRGQRLAAGGGCLLLAALCFGLAALYAPVLLLRARKFALLWSLGSALALAGSALLRGGAACGRLLRCEEAPSRPALLYMAALGATLFAALGLRSTLLTVLGAGAQVAALLAALVGLLPWGGGTALRLALGRLGRGAGLAKCCPCEDLAPSPLGKYAEPAPSETAPAELRTARRCAEARGEGPALTACESNPGAAAASGGDSSVGSSSMSAFCAGLGTRSEN

SEQ ID NO: 744394 - protein, 543 aa, Homo sapiens
MEQVNELKEKGNKALSVGNIDDALQCYSEAIKLDPHNHVLYSNRSAAYAKKGDYQKAYEDGCKTVDLKPDWGKGYSRKAAALEFLNRFEEAKRTYEEGLKHEANNPQLKEGLQNMEARLAERKFMNPFNMPNLYQKLESDPRTRTLLSDPTYRELIEQLRNKPSDLGTKLQDPRIMTTLSVLLGVDLGSMDEEEEIATPPPPPPPKKETKPEPMEEDLPENKKQALKEKELGNDAYKKKDFDTALKHYDKAKELDPTNMTYITNQAAVYFEKGDYNKCRELCEKAIEVGRENREDYRQIAKAYARIGNSYFKEEKYKDAIHFYNKSLAEHRTPDVLKKCQQAEKILKEQERLAYINPDLALEEKNKGNECFQKGDYPQAMKHYTEAIKRNPKDAKLYSNRAACYTKLLEFQLALKDCEECIQLEPTFIKGYTRKAAALEAMKDYTKAMDVYQKALDLDSSCKEAADGYQRCMMAQYNRHDSPEDVKRRAMADPEVQQIMSDPAMRLILEQMQKDPQALSEHLKNPVIAQKIQKLMDVGLIAIR

SEQ ID NO: 744395 - protein, 543 aa, Homo sapiens; identical to SEQ ID NO: 744394

SEQ ID NO: 744396 - protein, 227 aa, Homo sapiens
MEQVNELKEKGNKALSVGNIDDALQCYSEAIKLDPHNHVLYSNRSAAYAKKGDYQKAYEDGCKTVDLKPDWGKGYSRKAAALEFLNRFEEAKRTYEEGLKHEANNPQLKEGLQNMEARLAERKFMNPFNMPNLYQKLESDPRTRTLLSDPTYRELIEQLRNKPSDLGTKLQDPRIMTTLSVLLGVDLGSMDEEEEIATPPPPPPPKKETKPEPMECVPEGARPGLQL

SEQ ID NO: 744397 - protein, 516 aa, Homo sapiens
KLRLVRGLVLNRPRSNRSAAYAKKGDYQKAYEDGCKTVDLKPDWGKGYSRKAAALEFLNRFEEAKRTYEEGLKHEANNPQLKEGLQNMEARLAERKFMNPFNMPNLYQKLESDPRTRTLLSDPTYRELIEQLRNKPSDLGTKLQDPRIMTTLSVLLGVDLGSMDEEEEIATPPPPPPPKKETKPEPMEEDLPENKKQALKEKELGNDAYKKKDFDTALKHYDKAKELDPTNMTYITNQAAVYFEKGDYNKCRELCEKAIEVGRENREDYRQIAKAYARIGNSYFKEEKYKDAIHFYNKSLAEHRTPDVLKKCQQAEKILKEQERLAYINPDLALEEKNKGNECFQKGDYPQAMKHYTEAIKRNPKDAKLYSNRAACYTKLLEFQLALKDCEECIQLEPTFIKGYTRKAAALEAMKDYTKAMDVYQKALDLDSSCKEAADGYQRCMMAQYNRHDSPEDVKRRAMADPEVQQIMSDPAMRLILEQMQKDPQALSEHLKNPVIAQKIQKLMDVGLIAIR

SEQ ID NO: 744398 - protein, 458 aa, Homo sapiens
LGEGGVDIGRGEGLKHEANNPQLKEGLQNMEARLAERKFMNPFNMPNLYQKLESDPRTRTLLSDPTYRELIEQLRNKPSDLGTKLQDPRIMTTLSVLLGVDLGSMDEEEEIATPPPPPPPKKETKPEPMEEDLPENKKQALKEKELGNDAYKKKDFDTALKHYDKAKELDPTNMTYITNQAAVYFEKGDYNKCRELCEKAIEVGRENREDYRQIAKAYARIGNSYFKEEKYKDAIHFYNKSLAEHRTPDVLKKCQQAEKILKEQERLAYINPDLALEEKNKGNECFQKGDYPQAMKHYTEAIKRNPKDAKLYSNRAACYTKLLEFQLALKDCEECIQLEPTFIKGYTRKAAALEAMKDYTKAMDVYQKALDLDSSCKEAADGYQRCMMAQYNRHDSPEDVKRRAMADPEVQQIMSDPAMRLILEQMQKDPQALSEHLKNPVIAQKIQKLMDVGLIAIR

SEQ ID NO: 744399 - protein, 152 aa, Homo sapiens
MEQVNELKEKGNKALSVGNIDDALQCYSEAIKLDPHNHVLYSNRSAAYAKKGDYQKAYEDGCKTVDLKPDWGKGYSRKAAALEFYNRHDSPEDVKRRAMADPEVQQIMSDPAMRLILEQMQKDPQALSEHLKNPVIAQKIQKLMDVGLIAIR

SEQ ID NO: 744400 - protein, 254 aa, Homo sapiens
RIFSTSALTDCQAYARIGNSYFKEEKYKDAIHFYNKSLAEHRTPDVLKKCQQAEKILKEQERLAYINPDLALEEKNKGNECFQKGDYPQAMKHYTEAIKRNPKDAKLYSNRAACYTKLLEFQLALKDCEECIQLEPTFIKGYTRKAAALEAMKDYTKAMDVYQKALDLDSSCKEAADGYQRCMMAQYNRHDSPEDVKRRAMADPEVQQIMSDPAMRLILEQMQKDPQALSEHLKNPVIAQKIQKLMDVGLIAIR

SEQ ID NO: 744401 - protein, 292 aa, Homo sapiens
MEQVNELKEKGNKALSVGNIDDALQCYSEAIKLDPHNHVLYSNRSAAYAKKGDYQKAYEDGCKTVDLKPDWGKGYSRKAAALEFLNRFEEAKRTYEEGLKHEANNPQLKEGLQNMEARLAERKFMNPFNMPNLYQKLESDPRTRTLLSDPTYRELIEQLRNKPSDLGTKLQDPRIMTTLSVLLGVDLGSMDEEEEIATPPPPPPPKKETKPEPMEEDLPENKKQALKEKELGNDAYKKKDFDTALKHYDKAKELDPTNMTYITNQAGVPGRGAHSAGLGRHEGGDAEKGMQV

SEQ ID NO: 744402 - protein, 543 aa, Homo sapiens; identical to SEQ ID NO: 744394

SEQ ID NO: 744403 - protein, 271 aa, Homo sapiens
  misc_feature (263)..(263): Xaa can be any naturally occurring amino acid
  misc_feature (266)..(266): Xaa can be any naturally occurring amino acid
MEQVNELKEKGNKALSVGNIDDALQCYSEAIKLDPHNHVLYSNRSAAYAKKGDYQKAYEDGCKTVDLKPDWGKGYSRKAAALEFLNRFEEAKRTYEEGLKHEANNPQLKEGLQNMEARLAERKFMNPFNMPNLYQKLESDPRTRTLLSDPTYRELIEQLRNKPSDLGTKLQDPRIMTTLSVLLGVDLGSMDEEEEIATPPPPPPPKKETKPEPMEEDLPENKKQALKEKELGNDAYKKKDFDTALKHYDKAKELDPYLITYHXPRXLKGDS

SEQ ID NO: 744404 - protein, 260 aa, Homo sapiens
MEQVNELKEKGNKALSVGNIDDALQCYSEAIKLDPHNHVLYSNRSAAYAKKGDYQKAYEDGCKTVDLKPDWGKGYSRKAAALEFLNRFEEAKRTYEEGLKHEANNPQLKEGLQNMEARLAERKFMNPFNMPNLYQKLESDPRTRTLLSDPTYRELIEQLRNKPSDLGTKLQDPRIMTTLSVLLGVDLGSMDEEEEIATPPPPLPSSSMSLSPAPSCCLGCSPIVGFFFIWGSGHVMGRGGGSSSLRSQLSHVVYSAVPFS

SEQ ID NO: 744405 - protein, 340 aa, Homo sapiens
YVGQPLLFLQDFLCLLAFLEHALKEKELGNDAYKKKDFDTALKHYDKAKELDPTNMTYITNQAAVYFEKGDYNKCRELCEKAIEVGRENREDYRQIAKAYARIGNSYFKEEKYKDAIHFYNKSLAEHRTPDVLKKCQQAEKILKEQERLAYINPDLALEEKNKGNECFQKGDYPQAMKHYTEAIKRNPKDAKLYSNRAACYTKLLEFQLALKDCEECIQLEPTFIKGYTRKAAALEAMKDYTKAMDVYQKALDLDSSCKEAADGYQRCMMAQYNRHDSPEDVKRRAMADPEVQQIMSDPAMRLILEQMQKDPQALSEHLKNPVIAQKIQKLMDVGLIAIR

SEQ ID NO: 744406 - protein, 93 aa, Homo sapiens
MEQVNELKEKGNKALSVGNIDDALQCYSEAIKLDPHNHVLYSNRSAAYAKKGDYQKAYEDGCKTVDLKPDWGKVSCGQWRERGPSDPSRNAFW

SEQ ID NO: 744407 - protein, 464 aa, Homo sapiens
MARRDPKPGAKRLVRAQTLQKQRRAPVGPRAPPPDEEDPRLKCKNCEAFGHTARSTRCPMKCWKAALVPPNFGEKEGKENLKPWKPQVEANPGPLNKDKGEKEERPRPQDPQRKALLHIFSGKPPEKPLPNQKGSTESSDYLRVASGPMPVHTTSKRPRVDPVLSDRSATEMSDRGSVLASLSPLRKASLSSSSSLGPKERQTGAAADIPQTAVRHQGPEPLLVVKPTHSSPAGGCREVPQAASKTHGLLQAVSPQAQDKRPAVTSQPCPPAATHSLGLGSNLSFGPGAKRSAPAPIQACLNFPKKPRLGPFQIPESAIQGGELGAPENLQPPPAATELGPRTVSPQIGTRTPAQVLSGDRQPPHSRPCLPTAQACTMSHHPAASHDGAQPLRVLFRRLENGRWSSSLLTAPSFHSPEKPGAFLAQSPHVSEKSEGPCVRVPPSVLYEDLQVPSSSEDSDSDLE

SEQ ID NO: 744408 - protein, 464 aa, Homo sapiens; identical to SEQ ID NO: 744407

SEQ ID NO: 744409 - protein, 181 aa, Homo sapiens
AWSRQEGEMRPDWMPHSTTQAGSPLRGRVPNHCSHRIWLQRVSLSLSHLSNHPGLLLRLPLRPWPPRGSGVCPQQTLPGLPGSALHLPPGCVCPSSTRCALVLPLLPSRDPPEARSLPGDTATALATSWRLVLVWGLRPLETPGSQVELRELRPGAGGWPSRHCPHLAWTSLTVPWSTPRR

SEQ ID NO: 744410 - protein, 481 aa, Homo sapiens
MKVLSEGQLKLCVVQPVHLTSWLLIFFILKSISCLKPARLPIYQRKPFIAAWNAPTDQCLIKYNLRLNLKMFPVIGSPLAKARGQNVTIFYVNRLGYYPWYTSQGVPINGGLPQNISLQVHLEKADQDINYYIPAEDFSGLAVIDWEYWRPQWARNWNSKDVYRQKSRKLISDMGKNVSATDIEYLAKVTFEESAKAFMKETIKLGIKSRPKGLWGYYLYPDCHNYNVYAPNYSGSCPEDEVLRNNELSWLWNSSAALYPSICVWKSLGDSENILRFSKFRVHESMRISTMTSHDYALPVFVYTRLGYRDEPLFFLSKQDLVSTIGESAALGAAGIVIWGDMNLTASKANCTKVKQFVSSDLGSYIANVTRAAEVCSLHLCRNNGRCIRKMWNAPSYLHLNPASYHIEASEDGEFTVKGKASDTDLAVMADTFSCHCYQGYEGADCREIKTADGCSGVSPSPGSLMTLCLLLLASYRSIQL

SEQ ID NO: 744411 - protein, 155 aa, Homo sapiens
TLFSLLRPLLQSRFFPRLLFLVLYMLSALFPGPSLSFLLSLSLVLLSRALVPFVLLLPQPSLKSLLWHLGLCSLHSSEPTSPNGGGLKPRKWTEKPQPLFCIFFVITNPKKPSMNCPLPSIPAAYCLEICFLSQSPVAAGLLFPSEMMSPQRRLG

SEQ ID NO: 744412 - protein, 173 aa, Homo sapiens
LFVTWKTGRDKRLRGCIGTFSAMNLHSGLREYTLTSALKDSRFPPLTREELPKLFCSVSLLTNFEDASDYLDWEVGVHGIRIEFINEKGVKRTATYLPEVAKEQDWDQIQTIDSLLRKGGFKAPITSEFRKTIKLTRYRSEKVTISYAEYIASRQHCFQNGTLHAPPLYNHYS

SEQ ID NO: 744413 - protein, 218 aa, Homo sapiens
LFVTWKTGRDKRLRGCIGTFSAMNLHSGLREYTLTSALKDSRFPPLTREELPKLFCSVSLLTNFEDASDYLDWEVGVHGIRIEFINEKGVKRTATYLPEVAKEQDNYTGVTSDRKDAGAGSLGTAIMACVGLSSHVSESPRDWQTDWAPDWDQIQTIDSLLRKGGFKAPITSEFRKTIKLTRYRSEKVTISYAEYIASRQHCFQNGTLHAPPLYNHYS

SEQ ID NO: 744414 - protein, 218 aa, Homo sapiens; identical to SEQ ID NO: 744413

SEQ ID NO: 744415 - protein, 218 aa, Homo sapiens; identical to SEQ ID NO: 744413

SEQ ID NO: 744416 - protein, 138 aa, Homo sapiens
LFVTWKTGRDKRLRGCIGTFSAMNLHSGLREYTLTSALKDSRFPPLTREELPKLFCSVSLLTNFEDASDYLDWEVGVHGIRIEFINEKGVKRTATYLPEVAKEQGELDEWDFNDKYHSQWCQLKGKKVKCVILQPNCS

SEQ ID NO: 744417 - protein, 257 aa, Homo sapiens
VQTKLTAAPVQPSELSWGLSLQPVLSDPPMAAQGGGVHCATCWVPPSADSQSRRWTNRGQGAAGQAAPGSPSSELCYANKNAPVWGGMAVGGIAGRVVEGLEISVVVWGSPCFSPSEYAWIVRSVTMAREPGQHELLSLKFRGLLGFPELRADVPRTQHQETPVPPAAAATQEGWATLAASHQLPLLAHSLLSLPSPRSFCPNHAGGSCSASWRDVHRASCAHPCSKQLDSFPSTPTLVSPWGPEKDGVPAPSQLHL

SEQ ID NO: 744418 - protein, 159 aa, Homo sapiens
RKGKSRRAEPAPGLGKASFLPRTLSLRNSISRIMSEAGSGTLEDEWQAISEIASTCNTILESLSREGQPIPESGDPKGTPKSDAEPEPGNLSEKVSHLESMLRKLQEDLQKEKADRAALEEEVRSLRHNNRRLQAESESAATRLLLASKQLGSPTADLA

SEQ ID NO: 744419 - protein, 111 aa, Homo sapiens
EAAGAITAHTGDLAEERTEFLHSQNSLSPRSSLSDEAPVLPNTTPDLLLATTAKPSVPSADSETPLTQDRPGSPSGSEDKGNPAPELRASFLPRTLSLRNSISRSESGPRR

SEQ ID NO: 744420 - protein, 1092 aa, Homo sapiens
RESGSGTPARAAAAGREPQRAGTAATTSGWAPNTRARQCGPAPGESGPQSMPMWAGGVGSPRRGMAPASTDDLFARKLRQPARPPLTPHTFEPRPVRGPLLRSGSDAGEARPPTPASPRARAHSHEEASRPAATSTRLFTDPLALLGLPAEEPEPAFPPVLEPRWFAHYDVQSLLFDWAPRSQGMGSHSEASSGTLASAEDQAASSDLLHGAPGFVCELGGEGELGLGGPASPPVPPALPNAAVSILEEPQNRTSAYSLEHADLGAGYYRKYFYGKEHQNFFGMDESLGPVAVSLRREEKEGSGGGTLHSYRVIVRTTQLRTLRGTISEDALPPGPPRGLSPRKLLEHVAPQLSPSCLRLGSASPKVPRTLLTLDEQVLSFQRKVGILYCRAGQGSEEEMYNNQEAGPAFMQFLTLLGDVVRLKGFESYRAQLDTKTDSTGTHSLYTTYQDHEIMFHVSTMLPYTPNNQQQLLRKRHIGNDIVTIVFQEPGSKPFCPTTIRSHFQHVFLVVRAHTPCTPHTTYRVAVSRTQDTPAFGPALPAGGGPFAANADFRAFLLAKALNGEQAAGHARQFHAMATRTRQQYLQDLATNEVTTTSLDSASRFGLPSLGGRRRAAPRGPGAELQAAGSLVWGVRAAPGARVAAGAQASGPEGIEVPCLLGISAEALVLVAPRDGRVVFNCACRDVLAWTFSEQQLDLYHGRGEAITLRFDGSPGQAVGEVVARLQLVSRGCETRELALPRDGQGRLGFEVDAEGFVTHVERFTFAETAGLRPGARLLRVCGQTLPSLRPEAAAQLLRSAPKVCVTVLPPDESGRPRRSFSELYTLSLQEPSRRGAPDPVQDEVQGVTLLPTTKQLLHLCLQDGGSPPGPGDLAEERTEFLHSQNSLSPRSSLSDEAPVLPNTTPDLLLATTAKPSVPSADSETPLTQDRPGSPSGSEDKGNPAPELRASFLPRTLSLRNSISRIMSEAGSGTLEDEWQAISEIASTCNTILESLSREGQPIPESGDPKGTPKSDAEPEPGNLSEKVSHLESMLRKLQEDLQKEKADRAALEEEVRSLRHNNRRLQAESESAATRLLLASKQLGSPTADLA

SEQ ID NO: 744421 - protein, 1092 aa, Homo sapiens; identical to SEQ ID NO: 744420

SEQ ID NO: 744422 - protein, 1042 aa, Homo sapiens
MPMWAGGVGSPRRGMAPASTDDLFARKLRQPARPPLTPHTFEPRPVRGPLLRSGSDAGEARPPTPASPRARAHSHEEASRPAATSTRLFTDPLALLGLPAEEPEPAFPPVLEPRWFAHYDVQSLLFDWAPRSQGMGSHSEASSGTLASAEDQAASSDLLHGAPGFVCELGGEGELGLGGPASPPVPPALPNAAVSILEEPQNRTSAYSLEHADLGAGYYRKYFYGKEHQNFFGMDESLGPVAVSLRREEKEGSGGGTLHSYRVIVRTTQLRTLRGTISEDALPPGPPRGLSPRKLLEHVAPQLSPSCLRLGSASPKVPRTLLTLDEQVLSFQRKVGILYCRAGQGSEEEMYNNQEAGPAFMQFLTLLGDVVRLKGFESYRAQLDTKTDSTGTHSLYTTYQDHEIMFHVSTMLPYTPNNQQQLLRKRHIGNDIVTIVFQEPGSKPFCPTTIRSHFQHVFLVVRAHTPCTPHTTYRVAVSRTQDTPAFGPALPAGGGPFAANADFRAFLLAKALNGEQAAGHARQFHAMATRTRQQYLQDLATNEVTTTSLDSASRFGLPSLGGRRRAAPRGPGAELQAAGSLVWGVRAAPGARVAAGAQASGPEGIEVPCLLGISAEALVLVAPRDGRVVFNCACRDVLAWTFSEQQLDLYHGRGEAITLRFDGSPGQAVGEVVARLQLVSRGCETRELALPRDGQGRLGFEVDAEGFVTHVERFTFAETAGLRPGARLLRVCGQTLPSLRPEAAAQLLRSAPKVCVTVLPPDESGRPRRSFSELYTLSLQEPSRRGAPDPVQDEVQGVTLLPTTKQLLHLCLQDGGSPPGPGDLAEERTEFLHSQNSLSPRSSLSDEAPVLPNTTPDLLLATTAKPSVPSADSETPLTQDRPGSPSGSEDKGNPAPELRASFLPRTLSLRNSISRIMSEAGSGTLEDEWQAISEIASTCNTILESLSREGQPIPESGDPKGTPKSDAEPEPGNLSEKVSHLESMLRKLQEDLQKEKADRAALEEEVRSLRHNNRRLQAESESAATRLLLASKQLGSPTADLA

SEQ ID NO: 744423 - protein, 1042 aa, Homo sapiens; identical to SEQ ID NO: 744422

SEQ ID NO: 744424 - protein, 809 aa, Homo sapiens
MDESLGPVAVSLRREEKEGSGGGTLHSYRVIVRTTQLRTLRGTISEDALPPGPPRGLSPRKLLEHVAPQLSPSCLRLGSASPKVPRTLLTLDEQVLSFQRKVGILYCRAGQGSEEEMYNNQEAGPAFMQFLTLLGDVVRLKGFESYRAQLDTKTDSTGTHSLYTTYQDHEIMFHVSTMLPYTPNNQQQLLRKRHIGNDIVTIVFQEPGSKPFCPTTIRSHFQHVFLVVRAHTPCTPHTTYRVAVSRTQDTPAFGPALPAGGGPFAANADFRAFLLAKALNGEQAAGHARQFHAMATRTRQQYLQDLATNEVTTTSLDSASRFGLPSLGGRRRAAPRGPGAELQAAGSLVWGVRAAPGARVAAGAQASGPEGIEVPCLLGISAEALVLVAPRDGRVVFNCACRDVLAWTFSEQQLDLYHGRGEAITLRFDGSPGQAVGEVVARLQLVSRGCETRELALPRDGQGRLGFEVDAEGFVTHVERFTFAETAGLRPGARLLRVCGQTLPSLRPEAAAQLLRSAPKVCVTVLPPDESGRPRRSFSELYTLSLQEPSRRGAPDPVQDEVQGVTLLPTTKQLLHLCLQDGGSPPGPGDLAEERTEFLHSQNSLSPRSSLSDEAPVLPNTTPDLLLATTAKPSVPSADSETPLTQDRPGSPSGSEDKGNPAPELRASFLPRTLSLRNSISRIMSEAGSGTLEDEWQAISEIASTCNTILESLSREGQPIPESGDPKGTPKSDAEPEPGNLSEKVSHLESMLRKLQEDLQKEKADRAALEEEVRSLRHNNRRLQAESESAATRLLLASKQLGSPTADLA

SEQ ID NO: 744425 - protein, 1004 aa, Homo sapiens
RESGSGTPARAAAAGREPQRAGTAATTSGWAPNTRARQCGPAPGESGPQSMPMWAGGVGSPRRGMAPASTDDLFARKLRQPARPPLTPHTFEPRPVRGPLLRSGSDAGEARPPTPASPRARAHSHEEASRPAATSTRLFTDPLALLGLPAEEPEPAFPPVLEPRWFAHYDVQSLLFDWAPRSQGMGSHSEASSGTLASAEDQAASSDLLHGAPGFVCELGGEGELGLGGPASPPVPPALPNAAVSILEEPQNRTSAYSLEHADLGAGYYRKYFYGKEHQNFFGMDESLGPVAVSLRREEKEGSGGGTLHSYRVIVRTTQLRTLRGTISEDALPPGPPRGLSPRKLLEHVAPQLSPSCLRLGSASPKVPRTLLTLDEQVLSFQRKVGILYCRAGQGSEEEMYNNQEAGPAFMQFLTLLGDVVRLKGFESYRAQLDTKTDSTGTHSLYTTYQDHEIMFHVSTMLPYTPNNQQQLLRKRHIGNDIVTIVFQEPGSKPFCPTTIRSHFQHVFLVVRAHTPCTPHTTYRVAVSRTQDTPAFGPALPAGGGPFAANADFRAFLLAKALNGEQAAGHARQFHAMATRTRQQYLQDLATVQLRLSRRAGLDLLRAAAGPVPRPRGGDHAALRRVPRPSRGRGGGAPAAGEPWLRDPRAGAAPRRSRPPGLRGGRRGIRHARGALHIRRDGGLRPGARLLRVCGQTLPSLRPEAAAQLLRSAPKVCVTVLPPDESGRPRRSFSELYTLSLQEPSRRGAPDPVQDEVQGVTLLPTTKQLLHLCLQDGGSPPGPGDLAEERTEFLHSQNSLSPRSSLSDEAPVLPNTTPDLLLATTAKPSVPSADSETPLTQDRPGSPSGSEDKGNPAPELRASFLPRTLSLRNSISRIMSEAGSGTLEDEWQAISEIASTCNTILESLSREGQPIPESGDPKGTPKSDAEPEPGNLSEKVSHLESMLRKLQEDLQKEKADRAALEEEVRSLRHNNRRLQAESESAATRLLLASKQLGSPTADLA

SEQ ID NO: 744426 - protein, 1035 aa, Homo sapiens
RESGSGTPARAAAAGREPQRAGTAATTSGWAPNTRARQCGPAPGESGPQSMPMWAGGVGSPRRGMAPASTDDLFARKLRQPARPPLTPHTFEPRPVRGPLLRSGSDAGEARPPTPASPRARAHSHEEASRPAATSTRLFTDPLALLGLPAEEPEPAFPPVLEPRWFAHYDVQSLLFDWAPRSQGMGSHSEASSGTLASAEDQAASSDLLHGAPGFVCELGGEGELGLGGPASPPVPPALPNAAVSILEEPQNRTSAYSLEHADLGAGYYRKYFYGKEHQNFFGMDESLGPVAVSLRREEKEGSGGGTLHSYRVIVRTTQLRTLRGTISEDALPPGPPRGLSPRKLLEHVAPQLSPSCLRLGSASPKVPRTLLTLDEQVLSFQRKVGILYCRAGQGSEEEMYNNQEAGPAFMQFLTLLGDVVRLKGFESYRAQLDTKTDSTGTHSLYTTYQDHEIMFHVSTMLPYTPNNQQQLLRKRHIGNDIVTIVFQEPGSKPFCPTTIRSHFQHVFLVVRAHTPCTPHTTYRVAVSRTQDTPAFGPALPAGGGPFAANADFRAFLLAKALNGEQAAGHARQFHAMATRTRQQYLQDLATNEVTTTSLDSASRFGLPSLGGRRRAAPRGPGAELQAAGSLVWGVRAAPGARVAAGAQASGPEGIEVPCLLGISAEALVLVAPRDGRVVFNCACRDVLAWTFSEQQLDLYHGRGEAITLRFDGSPGQAVGEVVARLQLVSRGCETRELALPRDGQGRLGFEVDAEGFVTHVERFTFAETAGLRPGARLLRVCGQTLPSLRPEAAAQLLRSAPKVCVTVLPPDESGRPRRPLGKRLPFLSHPCSPSSLSDEAPVLPNTTPDLLLATTAKPSVPSADSETPLTQDRPGSPSGSEDKGNPAPELRASFLPRTLSLRNSISRIMSEAGSGTLEDEWQAISEIASTCNTILESLSREGQPIPESGDPKGTPKSDAEPEPGNLSEKVSHLESMLRKLQEDLQKEKADRAALEEEVRSLRHNNRRLQAESESAATRLLLASKQLGSPTADLA

SEQ ID NO: 744427 - protein, 829 aa, Homo sapiens
RESGSGTPARAAAAGREPQRAGTAATTSGWAPNTRARQCGPAPGESGPQSMPMWAGGVGSPRRGMAPASTDDLFARKLRQPARPPLTPHTFEPRPVRGPLLRSGSDAGEARPPTPASPRARAHSHEEASRPAATSTRLFTDPLALLGLPAEEPEPAFPPVLEPRWFAHYDVQSLLFDWAPRSQGMGSHSEASSGTLASAEDQAASSDLLHGAPGFVCELGGEGELGLGGPASPPVPPALPNAAVSILEEPQNRTSAYSLEHADLGAGYYRKYFYGKEHQNFFGMDESLGPVAVSLRREEKEGSGGGTLHSYRVIVRTTQLRTLRGTISEDALPPGPPRGLSPRKLLEHVAPQLSPSCLRLGSASPKVPRTLLTLDEQVLSFQRKVGILYCRAGQGSEEEMYNNQEAGPAFMQFLTLLGDVVRLKGFESYRAQLDTKTDSTGTHSLYTTYQDHEIMFHVSTMLPYTPNNQQQLLRKRHIGNDIVTIVFQEPGSKPFCPTTIRSHFQHVFLVVRAHTPCTPHTTYRVAVSRTQDTPAFGPALPAGGGPFAANADFRAFLLAKALNGEQAAGHARQFHAMATRTRQQYLQDLATKQLLHLCLQDGGSPPGPGDLAEERTEFLHSQNSLSPRSSLSDEAPVLPNTTPDLLLATTAKPSVPSADSETPLTQDRPGSPSGSEDKGNPAPELRASFLPRTLSLRNSISRIMSEAGSGTLEDEWQAISEIASTCNTILESLSREGQPIPESGDPKGTPKSDAEPEPGNLSEKVSHLESMLRKLQEDLQKEKADRAALEEEVRSLRHNNRRLQAESESAATRLLLASKQLGSPTADLA

SEQ ID NO: 744428 - protein, 1018 aa, Homo sapiens
RESGSGTPARAAAAGREPQRAGTAATTSGWAPNTRARQCGPAPGESGPQSMPMWAGGVGSPRRGMAPASTDDLFARKLRQPARPPLTPHTFEPRPVRGPLLRSGSDAGEARPPTPASPRARAHSHEEASRPAATSTRLFTDPLALLGLPAEEPEPAFPPVLEPRWFAHYDVQSLLFDWAPRSQGMGSHSEASSGTLASAEDQAASSDLLHGAPGFVCELGGEGELGLGGPASPPVPPALPNAAVSILEEPQNRTSAYSLEHADLGAGYYRKYFYGKEHQNFFGMDESLGPVAVSLRREEKEGSGGGTLHSYRVIVRTTQLRTLRGTISEDALPPGPPRGLSPRKLLEHVAPQLSPSCLRLGSASPKVPRTLLTLDEQVLSFQRKVGILYCRAGQGSEEEMYNNQEAGPAFMQFLTLLGDVVRLKGFESYRAQLDTKTDSTGTHSLYTTYQDHEIMFHVSTMLPYTPNNQQQLLRKRHIGNDIVTIVFQEPGSKPFCPTTIRSHFQHVFLVVRAHTPCTPHTTYRVAVSRTQDTPAFGPALPAGGGPFAANADFRAFLLAKALNGEQAAGHARQFHAMATRTRQQYLQDLATNEVTTTSLDSASRFGLPSLGGRRRAAPRGPGAELQAAGSLVWGVRAAPGARVAAGAQASGPEGIEVPCLLGISAEALVLVAPRDGRVVFNCACRDVLAWTFSEQQLDLYHGRGEAITLRFDGSPGQAVGEVVARLQLVSRGCETRELALPRDGQGRLGFEVDAEGFVTHVERFTFAETAGLRPGARLLRVCGQTLPSLRPEAAAQLLRSAPKVCVTVLPPDESGRPRRSFSELYTLSLQEPSRRGAPDPVQDEVQGVTLLPTTKQLLHLCLQDGGSPPGPGDLAEERTEFLHSQNSLSPRSSLSDEAPVLPNTTPDLLLATTAKPSVPSADSETPLTQDRPGSPSGSEDKGNPAPELRASFLPRTLSLRNSISRIMSEAGSGTLEDEWQAISEIASTCNTILESLSREGQPIPESGDPKGTPKSDAE

SEQ ID NO: 744429 - protein, 231 aa, Homo sapiens
EAAGAITAHTGDLAEERTEFLHSQNSLSPRSSLSDEAPVLPNTTPDLLLATTAKPSVPSADSETPLTQDRPGSPSGSEDKGNPAPELRASFLPRTLSLRNSISRIMSEAGSGTLEDEWQAISEIASTCNTILESLSREGQPIPESGDPKGTPKSDAEPEPGNLSEKVSHLESMLRKLQEDLQKEKADRAALEEEVRSLRHNNRRLQAESESAATRLLLASKQLGSPTADLA

SEQ ID NO: 744430 - protein, 285 aa, Homo sapiens
ASGSCCGGGNMADVINVSVNLEAFSQAISAIQALRSSVSRVFDCLKDGMRNKETLEGREKAFIAHFQDNLHSVNRDLNELERLSNLVGKPSENHPLHNSGLLSLDPVQDKTPLYSQLLQAYKWSNKLQYHAGLASGLLNQQSLKRSANQMGVSAKRRPKAQPTTLVLPPQYVDDVISRIDRMFPEMSIHLSRPNGTSAMLLLDIWSKSNYQVFQKVTDHATTALLHYQLPQMPDVVVRSFMTWLRSYIKLFQAPCQRCGKFLQDGLPPTWRDFRTLEAFHDTCRQ

SEQ ID NO: 744431 - protein, 156 aa, Homo sapiens
KFAVASTWSNKLQYHAGLASGLLNQQSLKRSANQMGVSAKRRPKAQPTTLVLPPQYVDDVISRIDRMFPEMSIHLSRPNGTSAMLLVTLGKVLKVIVVMRSLFIDRTIVKGYNENVYTEDGKLDIWSKSNYQVFQKACFFQVLDAEQKNNFVVEKC

SEQ ID NO: 744432 - protein, 321 aa, Homo sapiens
ASGSCCGGGNMADVINVSVNLEAFSQAISAIQALRSSVSRVFDCLKDGMRNKETLEGREKAFIAHFQDNLHSVNRDLNELERLSNLVGKPSENHPLHNSGLLSLDPVQDKTPLYSQLLQAYKWSNKLQYHAGLASGLLNQQSLKRSANQMGVSAKRRPKAQPTTLVLPPQYVDDVISRIDRMFPEMSIHLSRPNGTSAMLLVTLGKVLKVIVVMRSLFIDRTIVKGYNENVYTEDGKLDIWSKSNYQVFQKVTDHATTALLHYQLPQMPDVVVRSFMTWLRSYIKLFQAPCQRCGKFLQDGLPPTWRDFRTLEAFHDTCRQ

SEQ ID NO: 744433 - protein, 321 aa, Homo sapiens; identical to SEQ ID NO: 744432

SEQ ID NO: 744434 - protein, 317 aa, Homo sapiens
TARYEAWVAVINVSVNLEAFSQAISAIQALRSSVSRVFDCLKDGMRNKETLEGREKAFIAHFQDNLHSVNRDLNELERLSNLVGKPSENHPLHNSGLLSLDPVQDKTPLYSQLLQAYKWSNKLQYHAGLASGLLNQQSLKRSANQMGVSAKRRPKAQPTTLVLPPQYVDDVISRIDRMFPEMSIHLSRPNGTSAMLLVTLGKVLKVIVVMRSLFIDRTIVKGYNENVYTEDGKLDIWSKSNYQVFQKVTDHATTALLHYQLPQMPDVVVRSFMTWLRSYIKLFQAPCQRCGKFLQDGLPPTWRDFRTLEAFHDTCRQ

SEQ ID NO: 744435 - protein, 321 aa, Homo sapiens; identical to SEQ ID NO: 744432

SEQ ID NO: 744436 - protein, 321 aa, Homo sapiens; identical to SEQ ID NO: 744432

SEQ ID NO: 744437 - protein, 172 aa, Homo sapiens
MGVSAKRRPKAQPTTLVLPPQYVDDVISRIDRMFPEMSIHLSRPNGTSAMLLVTLGKVLKVIVVMRSLFIDRTIVKGYNENVYTEDGKLDIWSKSNYQVFQKVTDHATTALLHYQLPQMPDVVVRSFMTWLRSYIKLFQAPCQRCGKFLQDGLPPTWRDFRTLEAFHDTCRQ

SEQ ID NO: 744438 - protein, 214 aa, Homo sapiens
RHYSTHTLYPNNPTLYIFILQYHAGLASGLLNQQSLKRSANQMGVSAKRRPKAQPTTLVLPPQYVDDVISRIDRMFPEMSIHLSRPNGTSAMLLVTLGKVLKVIVVMRSLFIDRTIVKGYNENVYTEDGKLDIWSKSNYQVFQKVTDHATTALLHYQLPQMPDVVVRSFMTWLRSYIKLFQAPCQRCGKFLQDGLPPTWRDFRTLEAFHDTCRQ

SEQ ID NO: 744439 - protein, 263 aa, Homo sapiens
ASGSCCGGGNMADVINVSVNLEAFSQAISAIQALRSSVSRVFDCLKDGMRNKETLEGREKAFIAHFQDNLHSVNRDLNELERLSNLVGKPSENHPLHNSGLLSLDPVQDKTPLYSQLLQAYKWSNKLQYHAGLASGLLNQQSLKRSANQMGVSAKRRPKAQPTTLVLPPQYVDDVISRIDRMFPEMSIHLSRPNGTSAMLLVTLGKVLKVIVVMRSLFIDRTIVKGYNENVYTEDGKLDIWSKSNYQVFQKVSFTFCFLLKRH

SEQ ID NO: 744440 - protein, 266 aa, Homo sapiens
ASGSCCGGGNMADVINVSVNLEAFSQAISAIQALRSSVSRVFDCLKDGMRNKETLEGREKAFIAHFQDNLHSVNRDLNELERLSNLVGKPSENHPLHNSGLLSLDPVQDKTPLYSQLLQAYKWSNKLQYHAGLASGLLNQQSLKRSANQMGVSAKRRPKAQPTTLVLPPQYVDDVISRIDRMFPEMSIHLSRPNGTSAMLLVTLGKVLKVIVVMRSLFIDRTIVKGYNENVYTEDGKFFLCVKRSFDVLVFALRTDVSVLKQLVIC

SEQ ID NO: 744441 - protein, 207 aa, Homo sapiens
ASGSCCGGGNMADVINVSVNLEAFSQAISAIQALRSSVSRVFDCLKDGMRNKETLEGREKAFIAHFQDNLHSVNRDLNELERLSNLVGKPSENHPLHNSGLLSLDPVQDKTPLYSQLLQAYKWSNKLQYHAGLASGLLNQQSLKRSANQMGVSAKRRPKAQPTTLVLPPQYVDDVISRIDRMFPEMSIHLFRGKKLNNRVDRRTKAK

SEQ ID NO: 744442 - protein, 164 aa, Homo sapiens
ASGSCCGGGNMADVINVSVNLEAFSQAISAIQALRSSVSRVFDCLKDGMRNKETLEGREKAFIAHFQDNLHSVNRDLNELERLSNLVGKPSENHPLHNSGLLSLDPVQDKTPLYSQLLQAYKWSNKPRWARLVGLWQSRPPCPGSHGMQLAAAKLSASPTTSTF

SEQ ID NO: 744443 - protein, 160 aa, Homo sapiens
LKVKNSSIDGLMLSLLFLPLEMNICNKPSNKTAPEKSVWTAPAQPSGPSPELQGQRSRRNGWSWPPHPLQIVAWLLYLFFAVIGFGILVPLLPHHWVPAGYAVSLGKRRAGVWKWGGKGWLAQRRPKAGLRALGSTVRRVEQGGPSPGDLLLPSLSPAST

SEQ ID NO: 744444 - protein, 482 aa, Homo sapiens
MNICNKPSNKTAPEKSVWTAPAQPSGPSPELQGQRSRRNGWSWPPHPLQIVAWLLYLFFAVIGFGILVPLLPHHWVPAGYACMGAIFAGHLVVHLTAVSIDPADANVRDKSYAGPLPIFNRSQHAHVIEDLHCNLCNVDVSARSKHCSACNKCVCGFDHHCKWLNNCVGERNYRLFLHSVASALLGVLLLVLVATYVFVEFFVNPMRLRTNRHFEVLKNHTDVWFVFLPAAPVETQAPAILALAALLILLGLLSTALLGHLLCFHIYLMWHKLTTYEYIVQHRPPQEAKGVHRELESCPPKMRPIQEMEFYMRTFRHMRPEPPGQAGPAAVNAKHSRPASPDPTPGRRDCAGPPVQVEWDRKKPLPWRSPLLLLAMWGPQAPPCLCRKRGRGACIKCERLRPRIRRRGLGPPAAAPARRRIPRTPALCTPLALPAPTTRRRQSPWTRFQWRRRAWAAPLWPPRGAGADSPRWRGRRVRPPFS

SEQ ID NO: 744445 - protein, 208 aa, Homo sapiens
MEFYMRTFRHMRPEPPGQAGPAAVNANPSQFLATRGQAEPPPPSSPDTLALPPRIRPQKKRKRRVYKVRTSETSDPASGERLSLSGSCSGNSREGKAEPQASRSHWAHVPFPCAGPRAPSRRSSSSTDSADASPVHAAGPAGAYHSASAESVDEIPVAQTRLGSAALAAPRGRGRQPTLARQARAPAVFVSPSSGEPRAPGGREAGLA

SEQ ID NO: 744446 - protein, 130 aa, Homo sapiens
ESASLWEAQAPGPGCCPRCTAFQVCLRSGGSGGSLLRTCVVLPETKFRLWLAHEAAAFCPLPWDTHPERARAVVWGRLDGREETGKGQHPCFALLPPDSLPGVLWQQLETPRGFHGAGCVCAGLCLPVYH

SEQ ID NO: 744447 - protein, 126 aa, Homo sapiens
PHTHWLNAWEVVGLVPGPLIQNLMPHPMLQHIPALIPCAGGAQPPCYPPPKYPTYILPWHSTRSPNSASSWSQWHTMSVEDSRKGPSGRGLLPLGIHPSTFNPVPHHQCHMLHPIHWEQPPANMGT

SEQ ID NO: 744448 - protein, 199 aa, Homo sapiens
MLLELSEEHKEHLAFLPQVDSAVVAEFGRIAVEFLRRGANPKIYEGAARKLNVSSDTVQHGVEGLTYLLTESSKLMISELDFQDSVFVLGFSEELNKLLLQLYLDNRKEIRTILSELAPSLPSYHNLEWRLDVQLASRSLRQQIKPAVTIKLHLNQNGDHNTKVLQTDPATLLHLVQQLEQALEEMKTNHCRRVVRNIK

SEQ ID NO: 744449 - protein, 199 aa, Homo sapiens; identical to SEQ ID NO: 744448

SEQ ID NO: 744450 - protein, 229 aa, Homo sapiens
MLLELSEEHKEHLAFLPQVDSAGQRAWGRCSVGWGGGQRQRLALNSLLTFIAVVAEFGRIAVEFLRRGANPKIYEGAARKLNVSSDTVQHGVEGLTYLLTESSKLMISELDFQDSVFVLGFSEELNKLLLQLYLDNRKEIRTILSELAPSLPSYHNLEWRLDVQLASRSLRQQIKPAVTIKLHLNQNGDHNTKVLQTDPATLLHLVQQLEQALEEMKTNHCRRVVRNIK

SEQ ID NO: 744451 - protein, 111 aa, Homo sapiens
LCGRCQQKLANSLRFLCVVFPPSSSTPCGARPQREEMREERAASPLSPAWEEPAGVSGGPGPLPACTTRGQQSVVAAASAGEGAGAVEGHLGVAGSMPVHFLIKLFFELES

SEQ ID NO: 744452 - protein, 75 aa, Homo sapiens
MREERAASPLSPAWEEPAGVSGGPGPLPACTTRGQQSVVAAASAGEGAGAVEGHLGVAGSMPVHFLIKLFFEPLS

SEQ ID NO: 744453 - protein, 117 aa, Homo sapiens
MVWSSLTGAGLAAIPALCVVQPDCLLKDGLSKRQTVVEQPRAWKSDLLVHANSLGDETGLEETEAQDTAGSAWECTMVGVQSQRCGPQRGVPLLLTRVQIHTQVNSSRAPVWRLLQP

SEQ ID NO: 744454 - protein, 165 aa, Homo sapiens
MVWSSLTGAGLAAIPALCVVQPDCLLKDGLSKRQTVVEQPRAWKSDLLVHANSLGDETGLEETEAQDTAGSAWECTMWSPAGCAPPADEGTDPYPGQFLPGPCLEAATALSSLEREDTPVECHLQSRAGKRPLHTRALGKQHQVLGSHPAGTGTFLPCTLHAALP

SEQ ID NO: 744455 - protein, 270 aa, Homo sapiens
HLYDKWIKDADPRVEDWLLMSSPLPQTILLGFYVYFVTSLGPKLMENRKPFELKKAMITYNFFIVLFSVYMCYEFVMSGWGIGYSFRCDIVDYSRSPTALRMARTCWLYYFSKFIELLDTIFFVLRKKNSQVTFLHVFHHTIMPWTWWFGVKFAAGGLGTFHALLNTAVHVVMYSYYGLSALGPAYQKYLWWKKYLTSLQLVQFVIVAIHISQFFFMEDCKYQFPVFACIIMSYSFMFLLLFLHFWYRAYTKGQRLPKTVKNGTCKNKDN

SEQ ID NO: 744456 - protein, 270 aa, Homo sapiens; identical to SEQ ID NO: 744455

SEQ ID NO: 744457 - protein, 270 aa, Homo sapiens; identical to SEQ ID NO: 744455

SEQ ID NO: 744458 - protein, 118 aa, Homo sapiens
VPRSTGGLRGGGGLLSLPLPLFLLVRLELRQVAPEEPADAMALCLWSRGPGSMAVSHSALRLELCDSGHEPLTGMQVDPACLQDSLVRVLQVLKQKHRVPSDPPVLLLSLYISRRCIG

SEQ ID NO: 744459 - protein, 110 aa, Homo sapiens
MIIAHCSLNLLGLNYFPLSTSQVAGTTDTCHHAWLQHPFLNSFSPLIWDFTLSWNLSETRLLEVSYCWRMVSLGKAHSQTQECRIHLSAAFLSSLLVWGTTLLNRILYFS

SEQ ID NO: 744460 - protein, 150 aa, Homo sapiens
FGPFPSSSATAACNATNRIISHFSQDDLTALVQMTEKEHGDRVFFGKNLAFSFDMHDLDHFDELPINGETQKTISLDYKKFLNEHLQEACTPELKPVEKTNGSFLWCEVEKYLNSTLKEMTEVPRVEDLCCTLYDMLASIKSGDELQDEV

SEQ ID NO: 744461 - protein, 107 aa, Homo sapiens
MQCQGYVALLGSDDQSWGWNLVDNNLLHNGEVNGSFPQCNNAPKYQIGERIRVILDMEDKTLAFERGYEFLGVAFRGLPKVCLYPAVSAVYGNTEVTLVYLGKPLDG

SEQ ID NO: 744462 - protein, 410 aa, Homo sapiens
TVTSGAERNRERAGRAPLLRALNPHGGAAGAPRRGRASRAVSAPALSRGGGAEDAPAAGASALSEAGRAADAPGQGREWWRRRRLALTGAVSEPLRSPGEAWPSEQRRREAAAAAAALGPAGEAMAAPAPGAGAASGGAGCSGGGAGAGAGSGSGAAGAGGRLPSRVLELVFSYLELSELRSCALVCKHWYRCLHGDENSEVWRSLCARSLAEEALRTDILCNLPSYKAKIRAFQHAFSTNDCSRNVYIKKNGFTLHRNPIAQSTDGARTKIGFSEGRHAWEVWWEGPLGTVAVIGIATKRAPMQCQGYVALLGSDDQSWGWNLVDNNLLHNGEVNGSFPQCNNAPKYQIGERIRVILDMEDKTLAFERGYEFLGVAFRGLPKVCLYPAVSAVYGNTEVTLVYLGKPLDG

SEQ ID NO: 744463 - protein, 410 aa, Homo sapiens; identical to SEQ ID NO: 744462

SEQ ID NO: 744464 - protein, 410 aa, Homo sapiens; identical to SEQ ID NO: 744462

SEQ ID NO: 744465 - protein, 250 aa, Homo sapiens
MVAGSDAGRALGVLSVVCLLHCFGFISCFSQQIYGVVYGNVTFHVPSNVPLKEVLWKKQKDKVAELENSEFRAFSSFKNRVYLDTVSGSLTIYNLTSSDEDEYEMESPNITDTMKFFLYVLESLPSPTLTCALTNGSIEVQCMIPEHYNSHRGLIMYSWDCPMEQCKRNSTSIYFKMENDLPQKIQCTLSNPLFNTTSSIILTTCIPSSGHSRHRYALIPIPLAVITTCIVLYMNGILKCDRKPDRTNSN

SEQ ID NO: 744466 - protein, 240 aa, Homo sapiens
MVAGSDAGRALGVLSVVCLLHCFGFISCFSQQIYGVVYGNVTFHVPSNVPLKEVLWKKQKDKVAELENSEFRAFSSFKNRVYLDTVSGSLTIYNLTSSDEDEYEMESPNITDTMKFFLYVLESLPSPTLTCALTNGSIEVQCMIPEHYNSHRGLIMYSWDCPMEQCKRNSTSIYFKMENDLPQKIQCTLSNPLFNTTSSIILTTCIPSSGHSRHRYALIPIPLAVITTCIVLYMNGMYAF

SEQ ID NO: 744467 - protein, 250 aa, Homo sapiens; identical to SEQ ID NO: 744465

SEQ ID NO: 744468 - protein, 162 aa, Homo sapiens
MVAGSDAGRALGVLSVVCLLHCFGFISCFSQQIYGVVYGNVTFHVPSNVPLKEVLWKKQKDKVAELENSEFRAFSSFKNRVYLDTVSGSLTIYNLTSSDEDEYEMESPNITDTMKFFLYVLGHSRHRYALIPIPLAVITTCIVLYMNGILKCDRKPDRTNSN

SEQ ID NO: 744469 - protein, 237 aa, Homo sapiens
MVAGSDAGRALGVLSVVCLLHCFGFISCFSQQIYGVVYGNVTFHVPSNVPLKEVLWKKQKDKVAELENSEFRAFSSFKNRVYLDTVSGSLTIYNLTSSDEDEYEMESPNITDTMKFFLYVLESLPSPTLTCALTNGSIEVQCMIPEHYNSHRGLIMYSWDCPMEQCKRNSTSIYFKMENDLPQKIQCTLSNPLFNTTSSIILTTCIPSSGHSRHRYALIPIPLAVITTCIVLYMNVL

SEQ ID NO: 744470 - protein, 240 aa, Homo sapiens; identical to SEQ ID NO: 744466

SEQ ID NO: 744471 - protein, 1464 aa, Homo sapiens
MSGMGENTSDPSRAETRKRKECPDQLGPSPKRNTEKRNREQENKYIEELAELIFANFNDIDNFNFKPDKCAILKETVKQIRQIKEQEKAAAANIDEVQKSDVSSTGQGVIDKDALGPMMLEALDGFFFVVNLEGNVVFVSENVTQYLRYNQEELMNKSVYSILHVGDHTEFVKNLLPKSIVNGGSWSGEPPRRNSHTFNCRMLVKPLPDSEEEGHDNQEAHQKYETMQCFAVSQPKSIKEEGEDLQSCLICVARRVPMKERPVLPSSESFTTRQDLQGKITSLDTSTMRAAMKPGWEDLVRRCIQKFHAQHEGESVSYAKRHHHEVLRQGLAFSQIYRFSLSDGTLVAAQTKSKLIRSQTTNEPQLVISLHMLHREQNVCVMNPDLTGQTMGKPLNPISSNSPAHQALCSGNPGQDMTLSSNINFPINGPKEQMGMPMGRFGGSGGMNHVSGMQATTPQGSNYALKMNSPSQSSPGMNPGQPTSMLSPRHRMSPGVAGSPRIPPSQFSPAGSLHSPVGVCSSTGNSHSYTNSSLNALQALSEGHGVSLGSSLASPDLKMGNLQNSPVNMNPPPLSKMGSLDSKDCFGLYGEPSEGTTGQAESSCHPGEQKETNDPNLPPAVSSERADGQSRLHDSKGQTKLLQLLTTKSDQMEPSPLASSLSDTNKDSTGSLPGSGSTHGTSLKEKHKILHRLLQDSSSPVDLAKLTAEATGKDLSQESSSTAPGSEVTIKQEPVSPKKKENALLRYLLDKDDTKDIGLPEITPKLERLDSKTDPASNTKLIAMKTEKEEMSFEPGDQPGSELDNLEEILDDLQNSQLPQLFPDTRPGAPAGSVDKQAIINDLMQLTAENSPVTPVGAQKTALRISQSTFNNPRPGQLGRLLPNQNLPLDITLQSPTGAGPFPPIRNSSPYSVIPQPGMMGNQGMIGNQGNLGNSSTGMIGNSASRPTMPSGEWAPQSSAVRVTCAATTSAMNRPVQGGMIRNPAASIPMRPSSQPGQRQTLQSQVMNIGPSELEMNMGGPQYSQQQAPPNQTAPWPESILPIDQASFASQNRQPFGSSPDDLLCPHPAAESPSDEGALLDQLYLALRNFDGLEEIDRALGIPELVSQSQAVDPEQFSSQDSNIMLEQKAPVFPQQYASQAQMAQGSYSPMQDPNFHTMGQRPSYATLRMQPRPGLRPTGLVQNQPNQLRLQLQHRLQAQQNRQPLMNQISNVSNVNLTLRPGVPTQAPINAQMLAQRQREILNQHLRQRQMHQQQQVQQRTLMMRGQGLNMTPSMVAPSGMPATMSNPRIPQANAQQFPFPPNYGISQQPDPGFTGATTPQSPLMSPRMAHTQSPMMQQSQANPAYQAPSDINGWAQGNMGGNSMFSQQSPPHFGQQANTSMYSNNMNINVSMATNTGGMSSMNQMTGQISMTSVTSVPTSGLSSMGPEQVNDPALRGGNLFPNQLPGMDMIKQEGDTTRKYC

SEQ ID NO: 744472 - protein, 1464 aa, Homo sapiens; identical to SEQ ID NO: 744471

SEQ ID NO: 744473 - protein, 1464 aa, Homo sapiens; identical to SEQ ID NO: 744471

SEQ ID NO: 744474 - protein, 1070 aa, Homo sapiens
MSGMGENTSDPSRAETRKRKECPDQLGPSPKRNTEKRNREQENKYIEELAELIFANFNDIDNFNFKPDKCAILKETVKQIRQIKEQEKAAAANIDEVQKSDVSSTGQGVIDKDALGPMMLEALDGFFFVVNLEGNVVFVSENVTQYLRYNQEELMNKSVYSILHVGDHTEFVKNLLPKSIVNGGSWSGEPPRRNSHTFNCRMLVKPLPDSEEEGHDNQEAHQKYETMQCFAVSQPKSIKEEGEDLQSCLICVARRVPMKERPVLPSSESFTTRQDLQGKITSLDTSTMRAAMKPGWEDLVRRCIQKFHAQHEGESVSYAKRHHHEVLRQGLAFSQIYRFSLSDGTLVAAQTKSKLIRSQTTNEPQLVISLHMLHREQNVCVMNPDLTGQTMGKPLNPISSNSPAHQALCSGNPGQDMTLSSNINFPINGPKEQMGMPMGRFGGSGGMNHVSGMQATTPQGSNYALKMNSPSQSSPGMNPGQPTSMLSPRHRMSPGVAGSPRIPPSQFSPAGSLHSPVGVCSSTGNSHSYTNSSLNALQALSEGHGVSLGSSLASPDLKMGNLQNSPVNMNPPPLSKMGSLDSKDCFGLYGEPSEGTTGQAESSCHPGEQKETNDPNLPPAVSSERADGQSRLHDSKGQTKLLQLLTTKSDQMEPSPLASSLSDTNKDSTGSLPGSGSTHGTSLKEKHKILHRLLQDSSSPVDLAKLTAEATGKDLSQESSSTAPGSEVTIKQEPVSPKKKENALLRYLLDKDDTKDIGLPEITPKLERLDSKTDPASNTKLIAMKTEKEEMSFEPGDQPGSELDNLEEILDDLQNSQLPQLFPDTRPGAPAGSVDKQAIINDLMQLTAENSPVTPVGAQKTALRISQSRMIGNSASRPTMPSGEWAPQSSAVRVTCAATTSAMNRPVQGGMIRNPAASIPMRPSSQPGQRQTLQSQVMNIGPSELEMNMGGPQYSQQQAPPNQTAPWPESILPIDQASFASQNRQPFGSSPDDLLCPHPAAESPSDEGALLDQLYLALRNFDGLEEIDRALGIPELVSQVCAEGQQVGAKRSHGRRGVHFLFTGTPRSAF

SEQ ID NO: 744475 - protein, 1464 aa, Homo sapiens; identical to SEQ ID NO: 744471

SEQ ID NO: 744476 - protein, 1464 aa, Homo sapiens; identical to SEQ ID NO: 744471

SEQ ID NO: 744477 - protein, 1395 aa, Homo sapiens
MSGMGENTSDPSRAETRKRKECPDQLGPSPKRNTEKRNREQENKYIEELAELIFANFNDIDNFNFKPDKCAILKETVKQIRQIKEQEKAAAANIDEVQKSDVSSTGQGVIDKDALGPMMLEALDGFFFVVNLEGNVVFVSENVTQYLRYNQEELMNKSVYSILHVGDHTEFVKNLLPKSIVNGGSWSGEPPRRNSHTFNCRMLVKPLPDSEEEGHDNQEAHQKYETMQCFAVSQPKSIKEEGEDLQSCLICVARRVPMKERPVLPSSESFTTRQDLQGKITSLDTSTMRAAMKPGWEDLVRRCIQKFHAQHEGESVSYAKRHHHEVLRQGLAFSQIYRFSLSDGTLVAAQTKSKLIRSQTTNEPQLVISLHMLHREQNVCVMNPDLTGQTMGKPLNPISSNSPAHQALCSGNPGQDMTLSSNINFPINGPKEQMGMPMGRFGGSGGMNHVSGMQATTPQGSNYALKMNSPSQSSPGMNPGQPTSMLSPRHRMSPGVAGSPRIPPSQFSPAGSLHSPVGVCSSTGNSHSYTNSSLNALQALSEGHGVSLGSSLASPDLKMGNLQNSPVNMNPPPLSKMGSLDSKDCFGLYGEPSEGTTGQAESSCHPGEQKETNDPNLPPAVSSERADGQSRLHDSKGQTKLLQLLTTKSDQMEPSPLASSLSDTNKDSTGSLPGSGSTHGTSLKEKHKILHRLLQDSSSPVDLAKLTAEATGKDLSQESSSTAPGSEVTIKQEPVSPKKKENALLRYLLDKDDTKDIGLPEITPKLERLDSKTDPASNTKLIAMKTEKEEMSFEPGDQPGSELDNLEEILDDLQNSQLPQLFPDTRPGAPAGSVDKQAIINDLMQLTAENSPVTPVGAQKTALRISQSRMIGNSASRPTMPSGEWAPQSSAVRVTCAATTSAMNRPVQGGMIRNPAASIPMRPSSQPGQRQTLQSQVMNIGPSELEMNMGGPQYSQQQAPPNQTAPWPESILPIDQASFASQNRQPFGSSPDDLLCPHPAAESPSDEGALLDQLYLALRNFDGLEEIDRALGIPELVSQSQAVDPEQFSSQDSNIMLEQKAPVFPQQYASQAQMAQGSYSPMQDPNFHTMGQRPSYATLRMQPRPGLRPTGLVQNQPNQLRLQLQHRLQAQQNRQPLMNQISNVSNVNLTLRPGVPTQAPINAQMLAQRQREILNQHLRQRQMHQQQQVQQRTLMMRGQGLNMTPSMVAPSGMPATMSNPRIPQANAQQFPFPPNYGISQQPDPGFTGATTPQSPLMSPRMAHTQSPMMQQSQANPAYQAPSDINGWAQGNMGGNSMFSQQSPPHFGQQANTSMYSNNMNINVSMATNTGGMSSMNQMTGQISMTSVTSVPTSGLSSMGPEQVNDPALRGGNLFPNQLPGMDMIKQEGDTTRKYC

SEQ ID NO: 744478 - protein, 1053 aa, Homo sapiens
MSGMGENTSDPSRAETRKRKECPDQLGPSPKRNTEKRNREQENKYIEELAELIFANFNDIDNFNFKPDKCAILKETVKQIRQIKEQEKAAAANIDEVQKSDVSSTGQGVIDKDALGPMMLEALDGFFFVVNLEGNVVFVSENVTQYLRYNQEELMNKSVYSILHVGDHTEFVKNLLPKSIVNGGSWSGEPPRRNSHTFNCRMLVKPLPDSEEEGHDNQEAHQKYETMQCFAVSQPKSIKEEGEDLQSCLICVARRVPMKERPVLPSSESFTTRQDLQGKITSLDTSTMRAAMKPGWEDLVRRCIQKFHAQHEGESVSYAKRHHHEVLRQGLAFSQIYRFSLSDGTLVAAQTKSKLIRSQTTNEPQLVISLHMLHREQNVCVMNPDLTGQTMGKPLNPISSNSPAHQALCSGNPGQDMTLSSNINFPINGPKEQMGMPMGRFGGSGGMNHVSGMQATTPQGSNYALKMNSPSQSSPGMNPGQPTSMLSPRHRMSPGVAGSPRIPPSQFSPAGSLHSPVGVCSSTGNSHSYTNSSLNALQALSEGHGVSLGSSLASPDLKMGNLQNSPVNMNPPPLSKMGSLDSKDCFGLYGEPSEGTTGQAESSCHPGEQKETNDPNLPPAVSSERADGQSRLHDSKGQTKLLQLLTTKSDQMEPSPLASSLSDTNKDSTGSLPGSGSTHGTSLKEKHKILHRLLQDSSSPVDLAKLTAEATGKDLSQESSSTAPGSEVTIKQEPVSPKKKENALLRYLLDKDDTKDIGLPEITPKLERLDSKTDPASNTKLIAMKTEKEEMSFEPGDQPGSELDNLEEILDDLQNSQLPQLFPDTRPGAPAGSVDKQAIINDLMQLTAENSPVTPVGAQKTALRISQSTFNNPRPGQLGRLLPNQNLPLDITLQSPTGAGPFPPIRNSSPYSVIPQPGMMGNQGMIGNQGNLGNSSTGMIGNSASRPTMPSGEWAPQSSAVRVTCAATTSAMNRPVQGGMIRNPAASIPMRPSSQPGQRQTLQSQVMNIGPSELEMNMGGPQYSQQQAPPNQTAPWPESILPIDQASFASQNR

SEQ ID NO: 744479 - protein, 158 aa, Homo sapiens
MPLKTGCLFHPVPSQLLAWPADAPEAVTVVTIAPDFHGVHHGHITNLKKFTAYFTSVLCFTTPGDGPPSTPQLVWTQEDKPGAVGHLSFTEILDTSLKVSWQEPLEKNGIITGYQISWEVYGRNDSRLTHTLNSTTHEYKIQGLSSLTTYTIDVAAVT

SEQ ID NO: 744480 - protein, 111 aa, Homo sapiens
MREGDDISRVLKAKKSFQLRILYPATSFFKHKKEIKTFPGKQKLKNVTNTRTIKGILQFKRKGFSSNKKSSEGIKVTGKTLFTTAKTWKQPECPSTDRIKKMWVRHGCLCL

SEQ ID NO: 744481 - protein, 170 aa, Homo sapiens
MAVLWRLSAVCGALGGRALLLRTPVVRPAHISAFLQDRPIPEWCGVQHIHLSPSHHSGSKAASLHWTSERVVSVLLLGLLPAAYLNPCSAMDYSLAAALTLHGHWGLGQVVTDYVHGDALQKAAKAGLLALSALTFAGLCYFNYHDVGICKGCCHAVEALTFCDFILVKN

SEQ ID NO: 744482 - protein, 170 aa, Homo sapiens; identical to SEQ ID NO: 744481

SEQ ID NO: 744483 - protein, 206 aa, Homo sapiens
MAVLWRLSAVCGALGGRALLLRTPVVRPAHISAFLQDRPIPEWCGVQHIHLSPSHHSGSKAASLHWTSERVVSVLLLGLLPAAYLNPCSAMDYSLAAALTLHGHWGLGQVVTDYVHGDALQKEEKAAKGRGLFGGHLFSPRPFFFLKKNPPPFFFFGGGRPPLFWGGEGKKRERQPHIIFLFTQSEDGGGAEPPLSLIKKQAVFFI

SEQ ID NO: 744484 - protein, 170 aa, Homo sapiens; identical to SEQ ID NO: 744481

SEQ ID NO: 744485 - protein, 170 aa, Homo sapiens; identical to SEQ ID NO: 744481

SEQ ID NO: 744486 - protein, 170 aa, Homo sapiens; identical to SEQ ID NO: 744481

SEQ ID NO: 744487 - protein, 202 aa, Homo sapiens
  misc_feature (100)..(100): Xaa can be any naturally occurring amino acid
MRSERGGQVRYGEPVVHYAVSLSESRWSLYLGVYGFTLAYSKLRCLVWRTRLAVVTATFSRMRCSLRVAYLVSIDATESKRTDVVRTIETMYCSSQLKQXERVVSVLLLGLLPAAYLNPCSAMDYSLAAALTLHGHWGLGQVVTDYVHGDALQKAAKAGLLALSALTFAGLCYFNYHDVGICKGCCHAVEALTFCDFILVKN

SEQ ID NO: 744488 - protein, 130 aa, Homo sapiens
MTLSPQERDGGSLEAECRLRCPRRPSSVASNSSGQTCSYLSISSGPTYPRMVWSAAHTLVTEPPLGLGQVVTDYVHGDALQKAAKAGLLALSALTFAGLCYFNYHDVGICKGCCHAVEALTFCDFILVKN

SEQ ID NO: 744489 - protein, 170 aa, Homo sapiens; identical to SEQ ID NO: 744481

SEQ ID NO: 744490 - protein, 170 aa, Homo sapiens; identical to SEQ ID NO: 744481

SEQ ID NO: 744491 - protein, 170 aa, Homo sapiens; identical to SEQ ID NO: 744481

SEQ ID NO: 744492 - protein, 170 aa, Homo sapiens; identical to SEQ ID NO: 744481

SEQ ID NO: 744493 - protein, 182 aa, Homo sapiens
MHVPAMEILYDDYAGVLEHLDDSPRGSYRMQSLDLTVHHNASPKKVMLGVSTQYEHVSTRARNFWITDAGSKAASLHWTSERVVSVLLLGLLPAAYLNPCSAMDYSLAAALTLHGHWGLGQVVTDYVHGDALQKAAKAGLLALSALTFAGLCYFNYHDVGICKGCCHAVEALTFCDFILVKN

SEQ ID NO: 744494 - protein, 213 aa, Homo sapiens
MAVLWRLSAVCGALGGRALLLRTPVVRPAHISAFLQDRPIPEWCGVQHIHLSPSHHSGSKAASLHWTSERVVSVLLLGLLPAAYLNPCSAMDYSLAAALTLHGHWLECNGAILARHDLGSARSRLTATSAFRVQAILLPQLPSSWHYRGLGQVVTDYVHGDALQKAAKAGLLALSALTFAGLCYFNYHDVGICKGCCHAVEALTFCDFILVKN

SEQ ID NO: 744495 - protein, 170 aa, Homo sapiens; identical to SEQ ID NO: 744481

SEQ ID NO: 744496 - protein, 668 aa, Homo sapiens
MLGTQGWTKQRKPCPQNASSYSAEMTEPKSVCVSVDEVVSSNMEATETDLLNGHLKKVDNNLTEAQRFSSLPRRAAVNIEFRDLSYSVPEGPWWRKKGYKTLLKGISGKFNSGELVAIMGPSGAGKSTLMNILAGYRETGMKGAVLINGLPRDLRCFRKVSCYIMQDDMLLPHLTVQEAMMVSAHLKLQEKDEGRREMVKEILTALGLLSCANTRTGSLSGGQRKRLAIALELVNNPPVMFFDEPTSGLDSASCFQVVSLMKGLAQGGRSIICTIHQPSAKLFELFDQLYVLSQGQCVYRGKVCNLVPYLRDLGLNCPTYHNPADFVMEVASGEYGDQNSRLVRAVREGMCDSDHKRDLGGDAEVNPFLWHRPSEEDSSSMEGCHSFSASCLTQFCILFKRTFLSIMRDSVLTHLRITSHIGIGLLIGLLYLGIGNEAKKVLSNSGFLFFSMLFLMFAALMPTVLTFPLEMGVFLREHLNYWYSLKAYYLAKTMADVPFQIMFPVAYCSIVYWMTSQPSDAVRFVLFAALGTMTSLVAQSLGLLIGAASTSLQVATFVGPVTAIPVLLFSGFFVSFDTIPTYLQWMSYISYVRYGFEGVILSIYGLDREDLHCDIDETCHFQKSEAILRELDVENAKLYLDFIVLGIFFISLRLIAYLVLRYKIRAER

SEQ ID NO: 744497 - protein, 727 aa, Homo sapiens
ACDCTPGDTLSRTHSGRRRRRPGETREGQARIPAGRLSARAGERDAVGTGMRISLPRAPERDGGVSASSLLDTVTNASSYSAEMTEPKSVCVSVDEVVSSNMEATETDLLNGHLKKVDNNLTEAQRFSSLPRRAAVNIEFRDLSYSVPEGPWWRKKGYKTLLKGISGKFNSGELVAIMGPSGAGKSTLMNILAGYRETGMKGAVLINGLPRDLRCFRKVSCYIMQDDMLLPHLTVQEAMMVSAHLKLQEKDEGRREMVKEILTALGLLSCANTRTGSLSGGQRKRLAIALELVNNPPVMFFDEPTSGLDSASCFQVVSLMKGLAQGGRSIICTIHQPSAKLFELFDQLYVLSQGQCVYRGKVCNLVPYLRDLGLNCPTYHNPADFVMEVASGEYGDQNSRLVRAVREGMCDSDHKRDLGGDAEVNPFLWHRPSEEDSSSMEGCHSFSASCLTQFCILFKRTFLSIMRDSVLTHLRITSHIGIGLLIGLLYLGIGNEAKKVLSNSGFLFFSMLFLMFAALMPTVLTFPLEMGVFLREHLNYWYSLKAYYLAKTMADVPFQIMFPVAYCSIVYWMTSQPSDAVRFVLFAALGTMTSLVAQSLGLLIGAASTSLQVATFVGPVTAIPVLLFSGFFVSFDTIPTYLQWMSYISYVRYGFEGVILSIYGLDREDLHCDIDETCHFQKSEAILRELDVENAKLYLDFIVLGIFFISLRLIAYLVLRYKIRAER

SEQ ID NO: 744498 - protein, 666 aa, Homo sapiens
MACLMAAFSVGTAMNASSYSAEMTEPKSVCVSVDEVVSSNMEATETDLLNGHLKKVDNNLTEAQRFSSLPRRAAVNIEFRDLSYSVPEGPWWRKKGYKTLLKGISGKFNSGELVAIMGPSGAGKSTLMNILAGYRETGMKGAVLINGLPRDLRCFRKVSCYIMQDDMLLPHLTVQEAMMVSAHLKLQEKDEGRREMVKEILTALGLLSCANTRTGSLSGGQRKRLAIALELVNNPPVMFFDEPTSGLDSASCFQVVSLMKGLAQGGRSIICTIHQPSAKLFELFDQLYVLSQGQCVYRGKVCNLVPYLRDLGLNCPTYHNPADFVMEVASGEYGDQNSRLVRAVREGMCDSDHKRDLGGDAEVNPFLWHRPSEEDSSSMEGCHSFSASCLTQFCILFKRTFLSIMRDSVLTHLRITSHIGIGLLIGLLYLGIGNEAKKVLSNSGFLFFSMLFLMFAALMPTVLTFPLEMGVFLREHLNYWYSLKAYYLAKTMADVPFQIMFPVAYCSIVYWMTSQPSDAVRFVLFAALGTMTSLVAQSLGLLIGAASTSLQVATFVGPVTAIPVLLFSGFFVSFDTIPTYLQWMSYISYVRYGFEGVILSIYGLDREDLHCDIDETCHFQKSEAILRELDVENAKLYLDFIVLGIFFISLRLIAYLVLRYKIRAER

SEQ ID NO: 744499 - protein, 689 aa, Homo sapiens
LYKGEFPCTSSLSCLPPCETCLSPSAMIMRLPQPHGTNASSYSAEMTEPKSVCVSVDEVVSSNMEATETDLLNGHLKKVDNNLTEAQRFSSLPRRAAVNIEFRDLSYSVPEGPWWRKKGYKTLLKGISGKFNSGELVAIMGPSGAGKSTLMNILAGYRETGMKGAVLINGLPRDLRCFRKVSCYIMQDDMLLPHLTVQEAMMVSAHLKLQEKDEGRREMVKEILTALGLLSCANTRTGSLSGGQRKRLAIALELVNNPPVMFFDEPTSGLDSASCFQVVSLMKGLAQGGRSIICTIHQPSAKLFELFDQLYVLSQGQCVYRGKVCNLVPYLRDLGLNCPTYHNPADFVMEVASGEYGDQNSRLVRAVREGMCDSDHKRDLGGDAEVNPFLWHRPSEEDSSSMEGCHSFSASCLTQFCILFKRTFLSIMRDSVLTHLRITSHIGIGLLIGLLYLGIGNEAKKVLSNSGFLFFSMLFLMFAALMPTVLTFPLEMGVFLREHLNYWYSLKAYYLAKTMADVPFQIMFPVAYCSIVYWMTSQPSDAVRFVLFAALGTMTSLVAQSLGLLIGAASTSLQVATFVGPVTAIPVLLFSGFFVSFDTIPTYLQWMSYISYVRYGFEGVILSIYGLDREDLHCDIDETCHFQKSEAILRELDVENAKLYLDFIVLGIFFISLRLIAYLVLRYKIRAER

SEQ ID NO: 744500 - protein, 231 aa, Homo sapiens
GIVASCTVGSCTVASGTVASCILASCTVACSAGMRLTLQWPSVLLPHCCPCPLQVSAHLKLQEKDEGRREMVKEILTALGLLSCANTRTGSLSGGQRKRLAIALELVNNPPVMFFDEPTSGLDSASCFQVVSLMKGLAQGGRSIICTIHQPSAKLFELFDQLYVLSQGQCVYRGKVCNLVPYLRDLGLNCPTYHNPADFGKRSPEQLGGQKGDFPPLWVSLLADAPNSETT

SEQ ID NO: 744501 - protein, 638 aa, Homo sapiens
MEATETDLLNGHLKKVDNNLTEAQRFSSLPRRAAVNIEFRDLSYSVPEGPWWRKKGYKTLLKGISGKFNSGELVAIMGPSGAGKSTLMNILAGYRETGMKGAVLINGLPRDLRCFRKVSCYIMQDDMLLPHLTVQEAMMVSAHLKLQEKDEGRREMVKEILTALGLLSCANTRTGSLSGGQRKRLAIALELVNNPPVMFFDEPTSGLDSASCFQVVSLMKGLAQGGRSIICTIHQPSAKLFELFDQLYVLSQGQCVYRGKVCNLVPYLRDLGLNCPTYHNPADFVMEVASGEYGDQNSRLVRAVREGMCDSDHKRDLGGDAEVNPFLWHRPSEEVKQTKRLKGLRKDSSSMEGCHSFSASCLTQFCILFKRTFLSIMRDSVLTHLRITSHIGIGLLIGLLYLGIGNEAKKVLSNSGFLFFSMLFLMFAALMPTVLTFPLEMGVFLREHLNYWYSLKAYYLAKTMADVPFQIMFPVAYCSIVYWMTSQPSDAVRFVLFAALGTMTSLVAQSLGLLIGAASTSLQVATFVGPVTAIPVLLFSGFFVSFDTIPTYLQWMSYISYVRYGFEGVILSIYGLDREDLHCDIDETCHFQKSEAILRELDVENAKLYLDFIVLGIFFISLRLIAYLVLRYKIRAER

SEQ ID NO: 744502 - protein, 638 aa, Homo sapiens; identical to SEQ ID NO: 744501

SEQ ID NO: 744503 - protein, 107 aa, Homo sapiens
MPSCTWTSSYSGFSSSPSASLPIWSSGTKSGQRGKTPECQETGRLDTVAEGTSRIEEASLCPTDDTETLLIQPLEPRWVCGCLVLSHSAQLGWIFSPFPFLALTRKM

SEQ ID NO: 744504 - protein, 105 aa, Homo sapiens
MCVDEVVSSNMEATETDLLNGHLKKVDNNLTEAQRFSSLPRRAAVNIEFRDLSYSVPEGPWWRKKGYKTLLKGISGKFNSGELVAIMGPSGAGKSTLMNILAGYR

SEQ ID NO: 744505 - protein, 69 aa, Homo sapiens
RGKLAWASLLCRRPGCRFCYICPVCPQLQVATFVGPVTAIPVLLFSGFFVSFDTIPTYLQWMSYISYVR

SEQ ID NO: 744506 - protein, 684 aa, Homo sapiens
EFRFLPKKCLMAAFSVGTAMNASSYSAEMTEPKSVCVSVDEVVSSNMEATETDLLNGHLKKVDNNLTEAQRFSSLPRRAAVNIEFRDLSYSVPEGPWWRKKGYKTLLKGISGKFNSGELVAIMGPSGAGKSTLMNILAGYRETGMKGAVLINGLPRDLRCFRKVSCYIMQDDMLLPHLTVQEAMMVSAHLKLQEKDEGRREMVKEILTALGLLSCANTRTGSLSGGQRKRLAIALELVNNPPVMFFDEPTSGLDSASCFQVVSLMKGLAQGGRSIICTIHQPSAKLFELFDQLYVLSQGQCVYRGKVCNLVPYLRDLGLNCPTYHNPADFVMEVASGEYGDQNSRLVRAVREGMCDSDHKRDLGGDAEVNPFLWHRPSEEVKQTKRLKGLRKDSSSMEGCHSFSASCLTQFCILFKRTFLSIMRDSVLTHLRITSHIGIGLLIGLLYLGIGNEAKKVLSNSGFLFFSMLFLMFAALMPTVLTFPLEMGVFLREHLNYWYSLKAYYLAKTMADVPFQIMFPVAYCSIVYWMTSQPSDAVRFVLFAALGTMTSLVAQSLGLLIGAASTSLQVATFVGPVTAIPVLLFSGFFVSFDTIPTYLQWMSYISYVRYGFEGVILSIYGLDREDLHCDIDETCHFQKSEAILRELDVENAKLYLDFIVLGIFFISLRLIAYLVLRYKIRAER

SEQ ID NO: 744507 - protein, 644 aa, Homo sapiens
MTEPKSVCVSVDEVVSSNMEATETDLLNGHLKKVDNNLTEAQRFSSLPRRAAVNIEFRDLSYSVPEGPWWRKKGYKTLLKGISGKFNSGELVAIMGPSGAGKSTLMNILAGYRETGMKGAVLINGLPRDLRCFRKVSCYIMQDDMLLPHLTVQEAMMVSAHLKLQEKDEGRREMVKEILTALGLLSCANTRTGSLSGGQRKRLAIALELVNNPPVMFFDEPTSGLDSASCFQVVSLMKGLAQGGRSIICTIHQPSAKLFELFDQLYVLSQGQCVYRGKVCNLVPYLRDLGLNCPTYHNPADFVMEVASGEYGDQNSRLVRAVREGMCDSDHKRDLGGDAEVNPFLWHRPSEEDSSSMEGCHSFSASCLTQFCILFKRTFLSIMRDSVLTHLRITSHIGIGLLIGLLYLGIGNEAKKVLSNSGFLFFSMLFLMFAALMPTVLTFPLEMGVFLREHLNYWYSLKAYYLAKTMADVPFQIMFPVAYCSIVYWMTSQPSDAVRFVLFAALGTMTSLVAQSLGLLIGAASTSLQVATFVGPVTAIPVLLFSGFFVSFDTIPTYLQWMSYISYVRYGFEGVILSIYGLDREDLHCDIDETCHFQKSEAILRELDVENAKLYLDFIVLGIFFISLRLIAYLVLRYKIRAER

SEQ ID NO: 744508 - protein, 672 aa, Homo sapiens
EFRFLPKKCLMAAFSVGTAMNASSYSAEMTEPKSVCVSVDEVVSSNMEATETDLLNGHLKKVDNNLTEAQRFSSLPRRAAVNIEFRDLSYSVPEGPWWRKKGYKTLLKGISGKFNSGELVAIMGPSGAGKSTLMNILAGYRETGMKGAVLINGLPRDLRCFRKVSCYIMQDDMLLPHLTVQEAMMVSAHLKLQEKDEGRREMVKEILTALGLLSCANTRTGSLSGGQRKRLAIALELVNNPPVMFFDEPTSGLDSASCFQVVSLMKGLAQGGRSIICTIHQPSAKLFELFDQLYVLSQGQCVYRGKVCNLVPYLRDLGLNCPTYHNPADFVMEVASGEYGDQNSRLVRAVREGMCDSDHKRDLGGDAEVNPFLWHRPSEEDSSSMEGCHSFSASCLTQFCILFKRTFLSIMRDSVLTHLRITSHIGIGLLIGLLYLGIGNEAKKVLSNSGFLFFSMLFLMFAALMPTVLTFPLEMGVFLREHLNYWYSLKAYYLAKTMADVPFQIMFPVAYCSIVYWMTSQPSDAVRFVLFAALGTMTSLVAQSLGLLIGAASTSLQVATFVGPVTAIPVLLFSGFFVSFDTIPTYLQWMSYISYVRYGFEGVILSIYGLDREDLHCDIDETCHFQKSEAILRELDVENAKLYLDFIVLGIFFISLRLIAYLVLRYKIRAER

SEQ ID NO: 744509 - protein, 93 aa, Homo sapiens
ACDCTPGDTLSRTHSGRRRRRPGETREGQARIPAGRLSARAGERDAVGTGMRISLPRAPERDGGVSASSLLDTVTVSAVSRGGQESPFLVFWH

SEQ ID NO: 744510 - protein, 638 aa, Homo sapiens; identical to SEQ ID NO: 744501

SEQ ID NO: 744511 - protein, 638 aa, Homo sapiens; identical to SEQ ID NO: 744501

SEQ ID NO: 744512 - protein, 353 aa, Homo sapiens
MEVASGEYGDQNSRLVRAVREGMCDSDHKRDLGGDAEVNPFLWHRPSEEVKQTKRLKGLRKDSSSMEGCHSFSASCLTQFCILFKRTFLSIMRDSVLTHLRITSHIGIGLLIGLLYLGIGNEAKKVLSNSGFLFFSMLFLMFAALMPTVLTFPLEMGVFLREHLNYWYSLKAYYLAKTMADVPFQIMFPVAYCSIVYWMTSQPSDAVRFVLFAALGTMTSLVAQSLGLLIGAASTSLQVATFVGPVTAIPVLLFSGFFVSFDTIPTYLQWMSYISYVRYGFEGVILSIYGLDREDLHCDIDETCHFQKSEAILRELDVENAKLYLDFIVLGIFFISLRLIAYLVLRYKIRAER

SEQ ID NO: 744513 - protein, 116 aa, Homo sapiens
EFRFLPKKCLMAAFSVGTAMNASSYSAEMTEPKSVCVSVDEVVSSNMEATETDLLNGHLKKVDNNLTEAQRFSSLPRRAAVNIEFRDLSYSVPEGPWWRKKGREGGCFVYQAGRSL

SEQ ID NO: 744514 - protein, 725 aa, Homo sapiens
MRGTRYHPSEAPTPRRPGRLPTPPQAAPAGDFPSRGRGGDPERKVRRRPAGVVRLPVAASGAVPRARRGAARPRGPGKAGPDSGLPRDAMRGGRGAPFWLWPLPKLALLPLLWVLFQRTRPQGSAGPLQCYGVGPLGDLNCSWEPLGDLGAPSELHLQSQKYRSNKTQTVAVAAGRSWVAIPREQLTMSDKLLVWGTKAGQPLWPPVFVNLETQMKPNAPRLGPDVDFSEDDPLEATVHWAPPTWPSHKVLICQFHYRRCQEAAWTLLEPELKTIPLTPVEIQDLELATGYKVYGRCRMEKEEDLWGEWSPILSFQTPPSAPKDVWVSGNLCGTPGGEEPLLLWKAPGPCVQVSYKVWFWVGGRELSPEGITCCCSLIPSGAEWARVSAVNATSWEPLTNLSLVCLDSASAPRSVAVSSIAGSTELLVTWQPGPGEPLEHVVDWARDGDPLEKLNWVRLPPGNLSALLPGNFTVGVPYRITVTAVSASGLASASSVWGFREELAPLVGPTLWRLQDAPPGTPAIAWGEVPRHQLRGHLTHYTLCAQSGTSPSVCMNVSGNTQSVTLPDLPWGPCELWVTASTIAGQGPPGPILRLHLPDNTLRWKVLPGILFLWGLFLLGCGLSLATSGRCYHLRHKVLPRWVWEKVPDPANSSSGQPHMEQVPEAQPLGDLPILEVEEMEPPPVMESSQPAQATAPLDSGYEKHFLPTPEELGLLGPPRPQVLA

SEQ ID NO: 744515 - protein, 725 aa, Homo sapiens; identical to SEQ ID NO: 744514

SEQ ID NO: 744516 - protein, 725 aa, Homo sapiens; identical to SEQ ID NO: 744514

SEQ ID NO: 744517 - protein, 421 aa, Homo sapiens
MRGTRYHPSEAPTPRRPGRLPTPPQAAPAGDFPSRGRGGDPERKVRRRPAGVVRLPVAASGAVPRARRGAARPRGPGKAGPDSGLPRDAMRGGRGAPFWLWPLPKLALLPLLWVLFQRTRPQGSAGPLQCYGVGPLGDLNCSWEPLGDLGAPSELHLQSQKYRSNKTQTVAVAAGRSWVAIPREQLTMSDKLLVWGTKAGQPLWPPVFVNLETQMKPNAPRLGPDVDFSEDDPLEATVHWAPPTWPSHKVLICQFHYRRCQEAAWTLLEPELKTIPLTPVEIQDLELATGYKVYGRCRMEKEEDLWGEWSPILSFQTPPSAPKDVWVSGNLCGTPGGEEPLLLWKAPGPCVQVSYKVWFWVGGRELSPEGITCCCSLIPSGAEWARVSAVNATSWEPLTNLSLVCLDSASAPRSSRRSGDL

SEQ ID NO: 744518 - protein, 725 aa, Homo sapiens; identical to SEQ ID NO: 744514

SEQ ID NO: 744519 - protein, 136 aa, Homo sapiens
KNDLFPTLPDNTLRWKVLPGILFLWGLFLLGCGLSLATSGRCYHLRHKVLPRWVWEKVPDPANSSSGQPHMEQVPEAQPLGDLPILEVEEMEPPPVMESSQPAQATAPLDSGYEKHFLPTPEELGLLGPPRPQVLA

SEQ ID NO: 744520 - protein, 54 aa, Homo sapiens
MGVSRWRGFGASVEINTPTPAVATGGPAAETIASCSAPVQNTELHTACSGLESP

SEQ ID NO: 744521 - protein, 109 aa, Homo sapiens
RPGIPMCAQLAHSIIVPRKLLQFIKSSGLGISLNSKRRKEETFPTRCGCDASQGPQGHCPRAHRPPLTATGAWIRSYIVQSFRPLPWSTRTRARISGRAHTHSYTRTQT

SEQ ID NO: 744522 - protein, 46 aa, Homo sapiens
MHKGESATHFQTTRSCENSLTVMRTVRGSPPHDSVMSHQAPPPTCG

SEQ ID NO: 744523 - protein, 123 aa, Homo sapiens
AAAAGLGLQREAAEGKWSAWRMTEETRIVYWIKDRQLTNRDSTILELQKVLKTCCAQSMKIFCCLWNFVYKQLEDAAQGLTMGGDVEEHEDLTADSTIFKFVEAYVSWIGKFPTYNVGSSICF

SEQ ID NO: 744524 - protein, 112 aa, Homo sapiens
AAAAGLGLQREAAEGKWSAWRMTEETRIVYWIKDRQLTNRDSTILELQKVLKTCCAQSMKIFCCLWNFVYKQLEDAAQGLTMGGDVEEHGEFDCGWWQRSLCVSGICKAAQS

SEQ ID NO: 744525 - protein, 203 aa, Homo sapiens
MTVKWKQLSAPASGAEIQRFPVPAVEPVPAPGADSPPGTALELEEAPEPSCRCPGTAQDQPSEELPDFMAPPVEPPASALELKVWLELEVAERGGQHSSSQQLPHCSQSWAQWKLWRQRPGFAIWAPLPHWRGTSLIQQSSSPAAEGPAATAAGAVCLPAGGAGEQEKEPVSRGSSRSSCSQRRPPPPGMEVCPQLGIWAICP

SEQ ID NO: 744526 - protein, 203 aa, Homo sapiens; identical to SEQ ID NO: 744525

SEQ ID NO: 744527 - protein, 374 aa, Homo sapiens
HLGWEGGLGAEAAVQGRLVQQPVSAAVPPVPPWRLRSRPRTGAINSPELGSRTLVARPRAQTWRQLAPDPLHGSPVSSLPTRLLQPRLPRTRSGGDDCVCAHLGVKRTQPVYLTHEMEETVPQKQRVHCSIDYSKSGTHMELSCDFCASGPNTHAFQEDTCVRGCMFVRPESGEQGPETLAPASGAEIQRFPVPAVEPVPAPGADSPPGTALELEEAPEPSCRCPGTAQDQPSEELPDFMAPPVEPPASALELKVWLELEVAERGGQHSSSQQLPHCSQSWAQWKLWRQRPGFAIWAPLPHWRGTSLIQQSSSPAAEGPAATAAGAVCLPAGGAGEQEKEPVSRGSSRSSCSQRRPPPPGMEVCPQLGIWAICP

SEQ ID NO: 744528 - protein, 330 aa, Homo sapiens
CFLGSSETADANRVFCGQLGAVYVFSEALNPAQIFAIHQLGPRYKSTFKFKSESDIHLAEHHKQVLYDGKLASSITFTYTAKATDAQLCLESSPKENASIFVHSQHALMLQIQVLFPLFPQLDNRQLNDSQVETTVCSCFRCRNTAISSASFEPVPAPGADSPPGTALELEEAPEPSCRCPGTAQDQPSEELPDFMAPPVEPPASALELKVWLELEVAERGGQHSSSQQLPHCSQSWAQWKLWRQRPGFAIWAPLPHWRGTSLIQQSSSPAAEGPAATAAGAVCLPAGGAGEQEKEPVSRGSSRSSCSQRRPPPPGMEVCPQLGIWAICP

SEQ ID NO: 744529 - protein, 102 aa, Homo sapiens
LSRCSQLTTFYFGRNCMSTDTLKDLLRHTSGLSKLSLETYPAPEESLNSLVRVDWEIFAPLWAELMCTLREVRQPKRIFTGPTPCPSCGSSPSEELELHLCC

SEQ ID NO: 744530 - protein, 124 aa, Homo sapiens
GVTDIVDPRRSLGFSRLLSSGCTDFAHALTGDADTRDPGRRPGGAAMLAESPSVPRLGSGTRGAGMELGCPWAPSWAGAHPGRVVTGKKPRASPRRGGRGKDRTLPKSRTRPGGTRAGVAATPS

SEQ ID NO: 744531 - protein, 212 aa, Homo sapiens
PAAPAQVCSERSCSNGAGLGSPGAWSLSGAPTWFASWAWSWASLASCRLAAPTLPTPSRETQTLGTRGGARAGPPCWQRVPASRASVPEPAARGWSWAALGRRPGLVPTLAAWSPARSPGPHPGVGAGGRTGPSRSRGPGRAAPGLGWLLPRAKLAAPHLTVPGARALRLDRRRARRPIGRLDPQSPRHRRVGAFRPGSQPSNSVTLEVSLR

SEQ ID NO: 744532 - protein, 394 aa, Homo sapiens
ASDKPESHFQSQVDFVPTIGGVAPPLHGRGQTSSSAPLLMEPHLLGLLLGLLLGGTRVLAGYPIWWSLALGQQYTSLGSQPLLCGSIPGLVPKQLRFCRNYIEIMPSVAEGVKLGIQECQHQFRGRRWNCTTIDDSLAIFGPVLDKATRESAFVHAIASAGVAFAVTRSCAEGTSTICGCDSHHKGPPGEGWKWGGCSEDADFGVLVSREFADARENRPDARSAMNKHNNEAGRTTILDHMHLKCKCHGLSGSCEVKTCWWAQPDFRAIGDFLKDKYDSASEMVVEKHRESRGWVETLRAKYSLFKPPTERDLVYYENSPNFCEPNPETGSFGTRDRTCNVTSHGIDGCDLLCCGRGHNTRTEKRKEKCHCIFHWCCYVSCQECIRIYDVHTCK

SEQ ID NO: 744533 - protein, 329 aa, Homo sapiens
MRLFSYPTLFTLSSLPGGLCGNKMAAPIPQGFSCLSRFLGWWFRQPVLVTQSAAIVPVRTKKRFTPPIYQPKFKTEKEFMQHARKAGLVIPPEKSDRSIHLACTAGIFDAYVPPEGDARISSLSKEGLIERTERMKKTMASQVSIRRIKDYDANFKIKDFPEKAKDIFIEAHLCLNNSDHDRLHTLVTEHCFPDMTWDIKYKTVRWSFVESLEPSHVVQVRCSSMMNQGNVYGQITVRMHTRQTLAIYDRFGRLMYGQEDVPKDVLEYVVFEKQLTNPYGSWRMHTKIVPPWAPPKQPILKTVMIPGPQLKPEEEYEEAQGEAQKPQLA

SEQ ID NO: 744534 - protein, 127 aa, Homo sapiens
MRLFSYPTLFTLSSLPGGLCGNKMAAPIPQGFSCLSRFLGWWFRQPVLVTQSAAIVPVRTKKRFTSPIYQPKFKTEKEFMQHARKAGLVIPPEKSDRSIHLACTAGIFDAYVPPEGDARISSLSKER

SEQ ID NO: 744535 - protein, 127 aa, Homo sapiens; identical to SEQ ID NO: 744534

SEQ ID NO: 744536 - protein, 127 aa, Homo sapiens; identical to SEQ ID NO: 744534

SEQ ID NO: 744537 - protein, 127 aa, Homo sapiens; identical to SEQ ID NO: 744534

SEQ ID NO: 744538 - protein, 213 aa, Homo sapiens
VSTQSAHYGRGLIERTERMKKTMASQVSIRRIKDYDANFKIKDFPEKAKDIFIEAHLCLNNSDHDRLHTLVTEHCFPDMTWDIKYKTVRWSFVESLEPSHVVQVRCSSMMNQGNVYGQITVRMHTRQTLAIYDRFGRLMYGQEDVPKDVLEYVVFEKQLTNPYGSWRMHTKIVPPWAPPKQPILKTVMIPGPQLKPEEEYEEAQGEAQKPQLA

SEQ ID NO: 744539 - protein, 279 aa, Homo sapiens
MRLFSYPTLFTLSSLPGGLCGNKMAAPIPQGFSCLSRFLGWWFRQPVLVTQSAAIVPVRTKKRFTPPIYQPKFKTEKEFMQHARKAGLVIPPEKSDRSIHLACTAGIFDAYVPPEGDARISSLSKEGLIERTERMKKTMASQVSIRRIKDYDANFKIKDFPEKAKDIFIEAHLCLNNSDHDRLHTLVTEHCFPTLAIYDRFGRLMYGQEDVPKDVLEYVVFEKQLTNPYGSWRMHTKIVPPWAPPKQPILKTVMIPGPQLKPEEEYEEAQGEAQKPQLA

SEQ ID NO: 744540 - protein, 202 aa, Homo sapiens
VLWMGARAAFPPPCHFAIRRIKDYDANFKIKDFPEKAKDIFIEAHLCLNNSDHDRLHTLVTEHCFPDMTWDIKYKTVRWSFVESLEPSHVVQVRCSSMMNQGNVYGQITVRMHTRQTLAIYDRFGRLMYGQEDVPKDVLEYVVFEKQLTNPYGSWRMHTKIVPPWAPPKQPILKTVMIPGPQLKPEEEYEEAQGEAQKPQLA

SEQ ID NO: 744541 - protein, 201 aa, Homo sapiens
IKLNFGPPFKNFSISGIRRIKDYDANFKIKDFPEKAKDIFIEAHLCLNNSDHDRLHTLVTEHCFPDMTWDIKYKTVRWSFVESLEPSHVVQVRCSSMMNQGNVYGQITVRMHTRQTLAIYDRFGRLMYGQEDVPKDVLEYVVFEKQLTNPYGSWRMHTKIVPPWAPPKQPILKTVMIPGPQLKPEEEYEEAQGEAQKPQLA

SEQ ID NO: 744542 - protein, 177 aa, Homo sapiens
MRLFSYPTLFTLSSLPGGLCGNKMAAPIPQGFSCLSRFLGWWFRQPVLVTQSAAIVPVRTKKRFTPPIYQPKFKTEKEFMQHARKAGLVIPPEKSDRSIHLACTAGIFDAYVPPEGDARISSLSKEGLIERTERMKKTMASQVSIRRIKDYDANFKIKDFPEKAKDIFIEAHLCLNK

SEQ ID NO: 744543 - protein, 135 aa, Homo sapiens
MTWDIKYKTVRWSFVESLEPSHVVQVRCSSMMNQGNVYGQITVRMHTRQTLAIYDRFGRLMYGQEDVPKDVLEYVVFEKQLTNPYGSWRMHTKIVPPWAPPKQPILKTVMIPGPQLKPEEEYEEAQGEAQKPQLA

SEQ ID NO: 744544 - protein, 135 aa, Homo sapiens; identical to SEQ ID NO: 744543

SEQ ID NO: 744545 - protein, 296 aa, Homo sapiens
MRLFSYPTLFTLSSLPGGLCGNKMAAPIPQGFSCLSRFLGWWFRQPVLVTQSAAIVPVRTKKRFTPPIYQPKFKTEKEFMQHARKAGLVIPPEKSDRSIHLACTAGIFDAYVPPEGDARISSLSKEGLIERTERMKKTMASQVSSDHDRLHTLVTEHCFPDMTWDIKYKTVRWSFVESLEPSHVVQVRCSSMMNQGNVYGQITVRMHTRQTLAIYDRFGRLMYGQEDVPKDVLEYVVFEKQLTNPYGSWRMHTKIVPPWAPPKQPILKTVMIPGPQLKPEEEYEEAQGEAQKPQLA

SEQ ID NO: 744546 - protein, 152 aa, Homo sapiens
MRFLGWWFRQPVLVTQSAAIVPVRTKKRFTPPIYQPKFKTEKEFMQHARKAGLVIPPEKSDRSIHLACTAGIFDAYVPPEGDARISSLSKEGLIERTERMKKTMASQVSIRRIKDYDANFKIKDFPEKAKDIFIEAHLCLNKLWPSMTGLAG

SEQ ID NO: 744547 - protein, 448 aa, Homo sapiens
PGRFPQCLAAVMAAPSWRGARLVQSVLRVWQVGPHVARERVIPFSSLLGFQRRCVSCVAGSAFSGPRLASASRSNGQGSALDHFLGFSQPDSSVTPCVPAVSMNRDEQDVLLVHHPDMPENSRVLRVVLLGAPNAGKSTLSNQLLGRKVFPVSRKVHTTRCQALGVITEKETQVILLDTPGIISPGKQKRHHLELSLLEDPWKSMESADLVVVLVDVSDKWTRNQLSPQLLRCLTKYSQIPSVLVMNKVDCLKQKSVLLELTAALTEGVVNGKKLKMRQAFHSHPGTHCPSPAVKDPNTQSVGNPQRIGWPHFKEIFMLSALSQEDVKTLKQYLLTQAQPGPWEYHSAVLTSQTPEEICANIIREKLLEHLPQEVPYNVQQKTAVWEEGPGGELVIQQKLLVPKESYVKLLIGPKGHVISQIAQEAGHDLMDIFLCDVDIRLSVKLLK

SEQ ID NO: 744548 - protein, 437 aa, Homo sapiens
MAAPSWRGARLVQSVLRVWQVGPHVARERVIPFSSLLGFQRRCVSCVAGSAFSGPRLASASRSNGQGSALDHFLGFSQPDSSVTPCVPAVSMNRDEQDVLLVHHPDMPENSRVLRVVLLGAPNAGKSTLSNQLLGRKVFPVSRKVHTTRCQALGVITEKETQVILLDTPGIISPGKQKRHHLELSLLEDPWKSMESADLVVVLVDVSDKWTRNQLSPQLLRCLTKYSQIPSVLVMNKVDCLKQKSVLLELTAALTEGVVNGKKLKMRQAFHSHPGTHCPSPAVKDPNTQSVGNPQRIGWPHFKEIFMLSALSQEDVKTLKQYLLTQAQPGPWEYHSAVLTSQTPEEICANIIREKLLEHLPQEVPYNVQQKTAVWEEGPGGELVIQQKLLVPKESYVKLLIGPKGHVISQIAQEAGHDLMDIFLCDVDIRLSVKLLK

SEQ ID NO: 744549 - protein, 434 aa, Homo sapiens
PGRFPQCLAAVMAAPSWRGARLVQSVLRVWQVGPHVARERVIPFSSLLGFQRRCVSCVAGSAFSGPRLASASRSNGQGSALDHFLGFSQPDSSVTPCVPAVSMNRDEQDVLLVHHPDMPENSRVLRVVLLGAPNAGKSTLSNQLLGRKVFPVSRKVHTTRCQALGVITEKETQVILLDTPGIISPGKQKRHHLELSLLEDPWKSMESADLVVVLVDVSDKWTRNQLSPQLLRCLTKYSQIPSVLVMNKVDCLKQKSVLLELTAALTEGVVNGKKLKMRQAFHSHPGTHCPSPAVKDPNTQSVGNPQRIGWPHFKEIFMLSALSQEDVKTLKHSAVLTSQTPEEICANIIREKLLEHLPQEVPYNVQQKTAVWEEGPGGELVIQQKLLVPKESYVKLLIGPKGHVISQIAQEAGHDLMDIFLCDVDIRLSVKLLK

SEQ ID NO: 744550 - protein, 435 aa, Homo sapiens
RLVQAGGNRPRERELVWQVGPHVARERVIPFSSLLGFQRRCVSCVAGSAFSGPRLASASRSNGQGSALDHFLGFSQPDSSVTPCVPAVSMNRDEQDVLLVHHPDMPENSRVLRVVLLGAPNAGKSTLSNQLLGRKVFPVSRKVHTTRCQALGVITEKETQVILLDTPGIISPGKQKRHHLELSLLEDPWKSMESADLVVVLVDVSDKWTRNQLSPQLLRCLTKYSQIPSVLVMNKVDCLKQKSVLLELTAALTEGVVNGKKLKMRQAFHSHPGTHCPSPAVKDPNTQSVGNPQRIGWPHFKEIFMLSALSQEDVKTLKQYLLTQAQPGPWEYHSAVLTSQTPEEICANIIREKLLEHLPQEVPYNVQQKTAVWEEGPGGELVIQQKLLVPKESYVKLLIGPKGHVISQIAQEAGHDLMDIFLCDVDIRLSVKLLK

SEQ ID NO: 744551 - protein, 483 aa, Homo sapiens
PGRFPQCLAAVMAAPSWRGARLVQSVLRVWQVGPHVARERVIPFSSLLGFQRRCVSCVAGSAFSGPRLASASRSNGQGSALDHFLGFSQPDSSVTPCVPAVSMNRDEQDVLLVHHPDMPENSRVLRVVLLGAPNAGKSTLSNQLLGRKVFPVSRKVHTTRCQALGVITEKETQVGGYLQRESLKQAEGEAKRVSLTISLEENDGHIHLCILLDTPGIISPGKQKRHHLELSLLEDPWKSMESADLVVVLVDVSDKWTRNQLSPQLLRCLTKYSQIPSVLVMNKVDCLKQKSVLLELTAALTEGVVNGKKLKMRQAFHSHPGTHCPSPAVKDPNTQSVGNPQRIGWPHFKEIFMLSALSQEDVKTLKQYLLTQAQPGPWEYHSAVLTSQTPEEICANIIREKLLEHLPQEVPYNVQQKTAVWEEGPGGELVIQQKLLVPKESYVKLLIGPKGHVISQIAQEAGHDLMDIFLCDVDIRLSVKLLK

SEQ ID NO: 744552 - protein, 295 aa, Homo sapiens
ADLGPQKCLFYIYITEKETQVILLDTPGIISPGKQKRHHLELSLLEDPWKSMESADLVVVLVDVSDKWTRNQLSPQLLRCLTKYSQIPSVLVMNKVDCLKQKSVLLELTAALTEGVVNGKKLKMRQAFHSHPGTHCPSPAVKDPNTQSVGNPQRIGWPHFKEIFMLSALSQEDVKTLKQYLLTQAQPGPWEYHSAVLTSQTPEEICANIIREKLLEHLPQEVPYNVQQKTAVWEEGPGGELVIQQKLLVPKESYVKLLIGPKGHVISQIAQEAGHDLMDIFLCDVDIRLSVKLLK

SEQ ID NO: 744553 - protein, 365 aa, Homo sapiens
PGRFPQCLAAVMAAPSWRGARLVQSVLRVWQVGPHVARERVIPFSSLLGFQRRCVSCVAGSAFSGPRLASASRSNGQGSALDHFLGFSQPDSSVTPCVPAVSMNRDEQDVLLVHHPDMPENSRVLRVVLLGAPNAGKSTLSNQLLGRKVFPVSRKVHTTRCQALGVITEKETQVILLDTPGIISPGKQKRHHLELSLLEDPWKSMESADLVVVLVDVSDKWTRNQLSPQLLRCLTKYSQIPSVLVMNKQYLLTQAQPGPWEYHSAVLTSQTPEEICANIIREKLLEHLPQEVPYNVQQKTAVWEEGPGGELVIQQKLLVPKESYVKLLIGPKGHVISQIAQEAGHDLMDIFLCDVDIRLSVKLLK

SEQ ID NO: 744554 - protein, 453 aa, Homo sapiens
QEFSRLTTIAVMSGRGKQGGKARAKAKSRSSRAGLQFPVGLSASLAALIAQLRGASGGRRALSTWLLVLEYLTCRDPGAGGLLLARDNKKTRIIPRQLQLAIRNDEELNKLLGNESAICPGVGVFAYTSRPYCSLKNDRRCHHNGKRASEADVRPKWAQPGPRLARGTCELKKALFSSHPRFRIKELLMLAKASPGSYIHKVGKILERAWNLLNLVVVLVDVSDKWTRNQLSPQLLRCLTKYSQIPSVLVMNKVDCLKQKSVLLELTAALTEGVVNGKKLKMRQAFHSHPGTHCPSPAVKDPNTQSVGNPQRIGWPHFKEIFMLSALSQEDVKTLKQYLLTQAQPGPWEYHSAVLTSQTPEEICANIIREKLLEHLPQEVPYNVQQKTAVWEEGPGGELVIQQKLLVPKESYVKLLIGPKGHVISQIAQEAGHDLMDIFLCDVDIRLSVKLLK

SEQ ID NO: 744555 - protein, 335 aa, Homo sapiens
PGRFPQCLAAVMAAPSWRGARLVQSVLRVWQVGPHVARERVIPFSSLLGFQRRCVSCVAGSAFSGPRLASASRSNGQGSALDHFLGFSQPDSSVTPCVPAVSMNRDEQDVLLVHHPDMPENSRVLRVVLLGAPNAGKSTLSNQLLGRKVFPVSRKVHTTRCQALGVITEKETQVILLDTPGIISPGKQKRHHLELSLLEDPWKSMESADLVVVLVDVSDKWTRNQLSPQLLRCLTKYSQIPSVLVMNKVDCLKQKSVLLELTAALTEGVVNGKKLKMRQAFHSHLGHGPPELGPTNWGTQDGAPQGIRVGYAGGTKNLRPGREPGSRANGSANRE

SEQ ID NO: 744556 - protein, 188 aa, Homo sapiens
PGRFPQCLAAVMAAPSWRGARLVQSVLRVWQVGPHVARERVIPFSSLLGFQRRCVSCVAGSAFSGPRLASASRSNGQGSALDHFLGFSQPDSSVTPCVPAVSMNRDEQDVLLVHHPDMPENSRVLRVVLLGAPNAGKSTLSNQLLGRKVFPVSRKVHTTRCQALGVITEKETQVGGYLQRESLKQDRG

SEQ ID NO: 744557 - protein, 437 aa, Homo sapiens; identical to SEQ ID NO: 744548

SEQ ID NO: 744558 - protein, 495 aa, Homo sapiens
PGRFPQCLAAVMAAPSWRGARLVQSVLRVWQVGPHVARERVIPFSSLLGFQRRCVSCVAGSAFSGPRLASASRSNGQGSALDHFLGFSQPDSSVTPCVPAVSMNRDEQDVLLVHHPDMPENSRVLRVVLLGAPNAGKSTLSNQLLGRKVFPVSRKVHTTRCQALGVITEKETQVILLDTPGIISPGKQKRHHLELSLLEDPWKSMESADLVVVLVDVSDKWTRNQLSPQLLRCLTKYSQIPSVLVMNKVDCLKQKSVLLELTAALTEGVVNGKKLKMRQAFHSHPGTHCPSPAVKDPNTQSVGNPQRIGWPHFKEIFMLSALSQEDVKTLKRSVSLGHSLALGFYHMKTALKFPPGSKSEEKSPGWDEDAHLFPLFPQQYLLTQAQPGPWEYHSAVLTSQTPEEICANIIREKLLEHLPQEVPYNVQQKTAVWEEGPGGELVIQQKLLVPKESYVKLLIGPKGHVISQIAQEAGHDLMDIFLCDVDIRLSVKLLK

SEQ ID NO: 744559 - protein, 287 aa, Homo sapiens
PGRFPQCLAAVMAAPSWRGARLVQSVLRVWQVGPHVARERVIPFSSLLGFQRRCVSCVAGSAFSGPRLASASRSNGQGSALDHFLGFSQPDSSVTPCVPAVSMNRDEQDVLLVHHPDMPENSRVLRVVLLGAPNAGKSTLSNQLLGRKVFPVSRKVHTTRCQALGVITEKETQVILLDTPGIISPGKQKRHHLELSLLEDPWKSMESADLVVVLVDVSDKWTRNQLSPQLLRCLTKYSQIPSVLVMNKVDCLKQKSVLLELTAALTEAIPSDTGPARALGVPQCSPH

SEQ ID NO: 744560 - protein, 472 aa, Homo sapiens
MAAPSWRGARLVQSVLRVWQVGPHVARERVIPFSSLLGFQRRCVSCVAGSAFSGPRLASASRSNGQGSALDHFLGFSQPDSSVTPCVPAVSMNRDEQDVLLVHHPDMPENSRVLRVVLLGAPNAGKSTLSNQLLGRKVFPVSRKVHTTRCQALGVITEKETQVGGYLQRESLKQAEGEAKRVSLTISLEENDGHIHLCILLDTPGIISPGKQKRHHLELSLLEDPWKSMESADLVVVLVDVSDKWTRNQLSPQLLRCLTKYSQIPSVLVMNKVDCLKQKSVLLELTAALTEGVVNGKKLKMRQAFHSHPGTHCPSPAVKDPNTQSVGNPQRIGWPHFKEIFMLSALSQEDVKTLKQYLLTQAQPGPWEYHSAVLTSQTPEEICANIIREKLLEHLPQEVPYNVQQKTAVWEEGPGGELVIQQKLLVPKESYVKLLIGPKGHVISQIAQEAGHDLMDIFLCDVDIRLSVKLLK

SEQ ID NO: 744561 - protein, 301 aa, Homo sapiens
GGTERGWGDSIIGAGKPLYHTTSLIRNALVIRPFLTDVCLSLRHHLELSLLEDPWKSMESADLVVVLVDVSDKWTRNQLSPQLLRCLTKYSQIPSVLVMNKVDCLKQKSVLLELTAALTEGVVNGKKLKMRQAFHSHPGTHCPSPAVKDPNTQSVGNPQRIGWPHFKEIFMLSALSQEDVKTLKQYLLTQAQPGPWEYHSAVLTSQTPEEICANIIREKLLEHLPQEVPYNVQQKTAVWEEGPGGELVIQQKLLVPKESYVKLLIGPKGHVISQIAQEAGHDLMDIFLCDVDIRLSVKLLK

SEQ ID NO: 744562 - protein, 320 aa, Homo sapiens
MYVCPSGITWSSLCWKIHGRAWNLLILVRFRMGTLSPVYRGHGLSFLGSLGGKSQAHTMEVFVRAGGRVTISFSFFLPCHLLVVVLVDVSDKWTRNQLSPQLLRCLTKYSQIPSVLVMNKVDCLKQKSVLLELTAALTEGVVNGKKLKMRQAFHSHPGTHCPSPAVKDPNTQSVGNPQRIGWPHFKEIFMLSALSQEDVKTLKQYLLTQAQPGPWEYHSAVLTSQTPEEICANIIREKLLEHLPQEVPYNVQQKTAVWEEGPGGELVIQQKLLVPKESYVKLLIGPKGHVISQIAQEAGHDLMDIFLCDVDIRLSVKLLK

SEQ ID NO: 744563 - protein, 152 aa, Homo sapiens
GTSSTETLRIMIGWPHFKEIFMLSALSQEDVKTLKQYLLTQAQPGPWEYHSAVLTSQTPEEICANIIREKLLEHLPQEVPYNVQQKTAVWEEGPGGELVIQQKLLVPKESYVKLLIGPKGHVISQIAQEAGHDLMDIFLCDVDIRLSVKLLK

SEQ ID NO: 744564 - protein, 226 aa, Homo sapiens
PGRFPQCLAAVMAAPSWRGARLVQSVLRVWQVGPHVARERVIPFSSLLGFQRRCVSCVAGSAFSGPRLASASRSNGQGSALDHFLGFSQPDSSVTPCVPAVSMNRDEQDVLLVHHPDMPENSRVLRVVLLGAPNAGKSTLSNQLLGRKVFPVSRKVHTTRCQALGVITEKETQVLILLGTPGTISPGPTRHHLEPSSAARPTGRAGNLLPLLRPSRTAAPWSIAPV

SEQ ID NO: 744565 - protein, 68 aa, Homo sapiens
MSATNNIAQARKLVEQLRIEAGIERIKVSKAASDLMSYCEQHARNDPLLVGVPASENPFKDKKPCIIL

SEQ ID NO: 744566 - protein, 70 aa, Homo sapiens
SSVSPCLVWLGYAAGVWSRRPNSAPPLSPACALQSPEASRRLPQSSPVPPGRFPCSALPVLMVALRRRLV

SEQ ID NO: 744567 - protein, 91 aa, Homo sapiens
VKKSESGVLKGQEAQEKKESFEDKGNNDKEKERDAEKDPNKKEKGDKNTKGDKGKDKVKGKRESEINGEKSKGSKRAKANTGRKYNKKVEE

SEQ ID NO: 744568 - protein, 481 aa, Homo sapiens
NSRRPALRAAAAGARPAGGPGSQPPEQHLGGHILQSLDGFVFALNQEGKFLYISETVSIYLGLSQVEMTGSSVFDYIHPGDHSEVLEQLGLRTPTPGPPTPPSVSSSSSSSSSLADTPEIEASLTKVPPSSLVQERSFFVRMKSTLTKRGLHVKASGYKVIHVTGRLRAHALGLVALGHTLPPAPLAELPLHGHMIVFRLSLGLTILACESRVSDHMDLGPSELVGRSCYQFVHGQDATRIRQSHVDLLDKGQVMTGYYRWLQRAGGFVWLQSVATVAGSGKSPGEHHVLWVSHVLSQAEGGQTPLDAFQLPASVACEEASSPGPEPTEPEPPTEGKQAAPAENEAPQTQGKRIKVEPGPRETKGSEDSGDEDPSSHPATPRPEFTSVIRAGVLKQDPVRPWGLAPPGDPPPTLLHAGFLPPVVRGLCTPGTIRYGPAELGLVYPHLQRLGPGPALPEAFYPPLGLPYPGPAGTRLPRKGD

SEQ ID NO: 744569 - protein, 161 aa, Homo sapiens
MKSTLTKRGLHVKASGYKVIHVTGRLRAHALGLVALGHTLPPAPLAELPLHGHMIVFRLSLGLTILACESRVSDHMDLGPSELVGRSCYQFVHGQDATRIRQSHVDCETHLQPPSLPTTPQTRASHSLVPGSPSSGLPTVPPAAPTAPGTPFSIGRAARRL

SEQ ID NO: 744570 - protein, 590 aa, Homo sapiens
MAAPYPGSGGGSEVKCVGGRGASVPWDFLPGLMVKAPSGPCLQAQRKEKSRNAARSRRGKENLEFFELAKLLPLPGAISSQLDKASIVRLSVTYLRLRRFAALGAPPWGLRAAGPPAGLAPGRRGPAALVSEVFEQHLGGHILQSLDGFVFALNQEGKFLYISETVSIYLGLSQVEMTGSSVFDYIHPGDHSEVLEQLGLRTPTPGPPTPPSVSSSSSSSSSLADTPEIEASLTKVPPSSLVQERSFFVRMKSTLTKRGLHVKASGYKVIHVTGRLRAHALGLVALGHTLPPAPLAELPLHGHMIVFRLSLGLTILACESRVSDHMDLGPSELVGRSCYQFVHGQDATRIRQSHVDLLDKGQVMTGYYRWLQRAGGFVWLQSVATVAGSGKSPGEHHVLWVSHVLSQAEGGQTPLDAFQLPASVACEEASSPGPEPTEPEPPTEGKQAAPAENEAPQTQGKRIKVEPGPRETKGSEDSGDEDPSSHPATPRPEFTSVIRAGVLKQDPVRPWGLAPPGDPPPTLLHAGFLPPVVRGLCTPGTIRYGPAELGLVYPHLQRLGPGPALPEAFYPPLGLPYPGPAGTRLPRKGD

SEQ ID NO: 744571 - protein, 591 aa, Homo sapiens
VSKSARPRWAPRAGRHSPRVPLRPARPGVYGAAPPRRPAGPTPRPEPALRPSNRTGGPAGDSGLGARLSEPPGDGGPLSRQWRRKRGQMRGRPRRQRPLGLSTRADGQGAVRTVPAGAAQGEVPERGALAAREGEPGVLRAGQASPAARRHLQPAGQGFHRAPQRHLPPPAPVRRAGGAALGAESRGAASWPRPRPPRPRSAGLRSLRAAPGRSHLAVPGWLCVRLEPGRKIPLHLRDSLHLSGSLTGGDDGQQRLRLHSPWGPLRGAGATGAADADARPPNPALRLLFLLLFLFACRYPRDRVSDHMDLGPSELVGRSCYQFVHGQDATRIRQSHVDLLDKGQVMTGYYRWLQRAGGFVWLQSVATVAGSGKSPGEHHVLWVSHVLSQAEGGQTPLDAFQLPASVACEEASSPGPEPTDGKTEGWGHTQALSIFLFQEPEPPTEGKQAAPAENEAPQTQGKRIKVEPGPRETKGSEDSGDEDPSSHPATPRPEFTSVIRAGVLKQDPVRPWGLAPPGDPPPTLLHAGFLPPVVRGLCTPGTIRYGPAELGLVYPHLQRLGPGPALPEAFYPPLGLPYPGPAGTRLPRKGD

SEQ ID NO: 744572 - protein, 414 aa, Homo sapiens
MTGSSVFDYIHPGDHSEVLEQLGLRTPTPGPPTPPSVSSSSSSSSSLADTPEIEASLTKVPPSSLVQERSFFVRMKSTLTKRGLHVKASGYKVIHVTGRLRAHALGLVALGHTLPPAPLAELPLHGHMIVFRLSLGLTILACESRVSDHMDLGPSELVGRSCYQFVHGQDATRIRQSHVDLLDKGQVMTGYYRWLQRAGGFVWLQSVATVAGSGKSPGEHHVLWVSHVLSQAEGGQTPLDAFQLPASVACEEASSPGPEPTEPEPPTEGKQAAPAENEAPQTQGKRIKVEPGPRETKGSEDSGDEDPSSHPATPRPEFTSVIRAGVLKQDPVRPWGLAPPGDPPPTLLHAGFLPPVVRGLCTPGTIRYGPAELGLVYPHLQRLGPGPALPEAFYPPLGLPYPGPAGTRLPRKGD

SEQ ID NO: 744573 - protein, 214 aa, Homo sapiens
SLLGYLSVSLTLPLCAFTFFSSPHRLPAHSPALTPPVSSCLPGSLSCPCPHPTPFPGPEPTEPEPPTEGKQAAPAENEAPQTQGKRIKVEPGPRETKGSEDSGDEDPSSHPATPRPEFTSVIRAGVLKQDPVRPWGLAPPGDPPPTLLHAGFLPPVVRGLCTPGTIRYGPAELGLVYPHLQRLGPGPALPEAFYPPLGLPYPGPAGTRLPRKGD

SEQ ID NO: 744574 - protein, 116 aa, Homo sapiens
AASSASIYCGGYLDWEGECSRSLHSLPLPRTTEAPSPPKQSTSGGDPGFRTSYHLAAGQRDTGSSPSPSLSLPALVPGWLCVRLEPGRKIPLHLRDSLHLSGSLTGKGPPVDLDWL

SEQ ID NO: 744575 - protein, 590 aa, Homo sapiens; identical to SEQ ID NO: 744570

SEQ ID NO: 744576 - protein, 259 aa, Homo sapiens
VSKSARPRWAPRAGRHSPRVPLRPARPGVYGAAPPRRPAGPTPRPEPALRPSNRTGGPAAPGRRGPAALVSEVFEQHLGGHILQSLDGFVFALNQEGKFLYISETVSIYLGLSQVEMTGSSVFDYIHPGDHSEVLEQLGLRTPTPGPPTPPSVSSSSSSSSSLADTPEIESATTWTWGPQSWWAAAATSLSTDKTPRGSARATWTVRPTSSHKPAYHPPDPSIHSLVPGSPSSGLPTVPPAAPTAPGTPFSIGRAARRL

SEQ ID NO: 744577 - protein, 572 aa, Homo sapiens
VSKSARPRWAPRAGRHSPRVPLRPARPGVYGAAPPRRPAGPTPRPEPALRPSNRTGGPAGDSGLGARLSEPPGDGGPLSRQWRRKRGQMRGRPRRQRPLGLSTRADGQGAVRTVPAGAAQGEVPERGALAAREGEPGVLRAGQASPAARRHLQPAGQGFHRAPQRHLPPPAPVRRAGGAALGAESRGAASWPRPRPPRPRSAGLRSLRAAPGRSHLAVPGWLCVRLEPGRKIPLHLRDSLHLSGSLTGGDDGQQRLRLHSPWGPLRGAGATGAADADARPPNPALRLLFLLLFLFACRYPRDRVSDHMDLGPSELVGRSCYQFVHGQDATRIRQSHVDLLDKGQVMTGYYRWLQRAGGFVWLQSVATVAGSGKSPGEHHVLWVSHVLSQAEGGQTPLDAFQLPASVACEEASSPGPEPTEPEPPTEGKQAAPAENEAPQTQGKRIKVEPGPRETKGSEDSGDEDPSSHPATPRPEFTSVIRAGVLKQDPVRPWGLAPPGDPPPTLLHAGFLPPVVRGLCTPGTIRYGPAELGLVYPHLQRLGPGPALPEAFYPPLGLPYPGPAGTRLPRKGD

SEQ ID NO: 744578 - protein, 487 aa, Homo sapiens
MPMGRTVACSTRPLGLSTRADGQGAVRTVPAGAAQGEVPERGALAAREGEPGVLRAGQASPAARRHLQPAGQGFHRAPQRHLPPPAPVRRAGGAALGAESRGAASWPRPRPPRPRSAGLRSLRAAPGRSHLAVPGWLCVRLEPGRKIPLHLRDSLHLSGSLTGGDDGQQRLRLHSPWGPLRGAGATGAADADARPPNPALRLLFLLLFLFACRYPRDRVSDHMDLGPSELVGRSCYQFVHGQDATRIRQSHVDLLDKGQVMTGYYRWLQRAGGFVWLQSVATVAGSGKSPGEHHVLWVSHVLSQAEGGQTPLDAFQLPASVACEEASSPGPEPTEPEPPTEGKQAAPAENEAPQTQGKRIKVEPGPRETKGSEDSGDEDPSSHPATPRPEFTSVIRAGVLKQDPVRPWGLAPPGDPPPTLLHAGFLPPVVRGLCTPGTIRYGPAELGLVYPHLQRLGPGPALPEAFYPPLGLPYPGPAGTRLPRKGD

SEQ ID NO: 744579 - protein, 235 aa, Homo sapiens
MAAPYPGSGGGSEVKCVGGRGASVPWDFLPGLMVKAPSGPCLQAQRKEKSRNAARSRRGKENLEFFELAKLLPLPGAISSQLDKASIVRLSVTYLRLRRFAALGAPPWGLRAAGPPAGLAPGRRGPAALVSEVFEQHLGGHILQSLDGFVFALNQEGKFLYISETVSIYLGLSQVEMTGSSVFDYIHPGDHSEVLEQLGLRTPTPGPPTPPSVSSSSSSSSSLADTPEIGNSKGS

SEQ ID NO: 744580 - protein, 127 aa, Homo sapiens
MILISAGCPGGLWPIVVLVGLFIWICFAVRVWDVRPFAPKERCVKIFQGNVHNFEKNLLRCSWSPDGSKIAAGSADRFVYVWDTTSRRILYKLPGHAGSINEVAFHPDEPIIISASSDKRLYMGEIQ

SEQ ID NO: 744581 - protein, 390 aa, Homo sapiens
AGSCGGRTNLEPIAWRLRAAARSVAALKRPVAAMIEQQKRKGPELPLVPVKRQRHELLLGAGSGPGAGQQQATPGALLQAGPPRCSSLQAPIMLLSGHEGEVYCCKFHPNGSTLASAGFDRLILLWNVYGDCDNYATLKGHSGAVMELHYNTDGSMLFSASTDKTVAVWDSETGERVKRLKGHTSFVNSCYPARRGPQLVCTGSDDGTVKLWDIRKKAAIQTFQNTYQVLAVTFNDTSDQIISGGIDNDIKVWDLRQNKLTYTMRGHADSVTGLSLSSEGSYLLSNAMDNTVRVWDVRPFAPKERCVKIFQGNVHNFEKNLLRCSWSPDGSKIAAGSADRFVYVWDTTSRRILYKLPGHAGSINEVAFHPDEPIIISASSDKRLYMGEIQ

SEQ ID NO: 744582 - protein, 390 aa, Homo sapiens; identical to SEQ ID NO: 744581

SEQ ID NO: 744583 - protein, 390 aa, Homo sapiens; identical to SEQ ID NO: 744581

SEQ ID NO: 744584 - protein, 190 aa, Homo sapiens
  misc_feature (161)..(161): Xaa can be any naturally occurring amino acid
  misc_feature (167)..(167): Xaa can be any naturally occurring amino acid
  misc_feature (179)..(179): Xaa can be any naturally occurring amino acid
AGSCGGRTNLEPIAWRLRAAARSVAALKRPVAAMIEQQKRKGPELPLVPVKRQRHELLLGAGSGPGAGQQQATPGALLQAGPPRCSSLQAPIMLLSGHEGEVYCCKFHPNGSTLASAGFDRLILLWNVYGDCDNYATLKGHSGAVMELHYNTDGSMLFLAXQINRGXWIVKQLKGGKGXLLWSCIHRGLL

SEQ ID NO: 744585 - protein, 390 aa, Homo sapiens; identical to SEQ ID NO: 744581

SEQ ID NO: 744586 - protein, 107 aa, Homo sapiens
MQPTIHLLVMEETKLGSSLVPEASFWSSVFYGSSPFHAAIMTYISSPDTSPSVGTPPSDAMEHIKATHWNHGPSESARAALQLCGITSKPYAHDKQQHFWEQASETT

SEQ ID NO: 744587 - protein, 59 aa, Homo sapiens
MAAQGQPQVQFKLVLVGDGGTGKTTFVKHHLTGEFEKKYVATLGVEVHPLVFHTNRGPV

SEQ ID NO: 744588 - protein, 2032 aa, Homo sapiens [sequence omitted]

SEQ ID NO: 744589 - protein, 1972 aa, Homo sapiens
MGDDSEWLKLPVDQKCEHKLWKARLSGYEEALKIFQKIKDEKSPEWSKFLGLIKKFVTDSNAVVQLKGLEAALVYVENAHVAGKTTGEVVSGVVSKVFNQPKAKAKELGIEICLMYIEIEKGEAVQEELLKGLDNKNPKIIVACIETLRKALSEFGSKIILLKPIIKVLPKLFESREKAVRDEAKLIAVEIYRWIRDALRPPLQNINSVQLKELEEEWVKLPTSAPRPTRFLRSQQELEAKLEQQQSAGGDAEGGGDDGDEVPQIDAYELLEAVEILSKLPKDFYDKIEAKKWQERKEALESVEVLIKNPKLEAGDYADLVKALKKVVGKDTNVMLVALAAKCLTGLAVGLRKKFGQYAGHVVPTILEKFKEKKPQVVQALQEAIDAIFLTTTLQNISEDVLAVMDNKNPTIKQQTSLFIARSFRHCTASTLPKSLLKPFCAALLKHINDSAPEVRDAAFEALGTALKVVGEKAVKPFLADVDKLKLDKIKECSEKVELIHGKKAGLAADKKEFKPLPGRTAASGAAGDKDTKDISAPKPGPLKKAPAAKAGGPPKKGKPAAPGGAGNTGTKNKKGLETKEIVEPELSIEVCEEKASAVLPPTCIQLLDSSNWKERLACMEEFQKAVELMDRTEMPCQALVRMLAKKPGWKETNFQVMQMKLHIVALIAQKGNFSKTSAQVVLDGLVDKIGDVKCGNNAKEAMTAIAEACMLPWTAEQVVSMAFSQKNPKNQSETLNWLSNAIKEFGFSGLNVKAFISNVKTALAATNPAVRTAAITLLGVMYLYVGPSLRMFFEDEKPALLSQIDAEFEKMQGQSPPAPTRGISKHSTSGTDEGEDGDEPDDGSNDVVDLLPRTEISDKITSELVSKIGDKNWKIRKEGLDEVAGIINDAKFIQPNIGELPTALKGRLNDSNKILVQQTLNILQQLAVAMGPNIKQHVKNLGIPIITVLGDSKNNVRAAALATVNAWAEQTGMKEWLEGEDLSEELKKENPFLRQELLGWLAEKLPTLRSTPTDLILCVPHLYSCLEDRNGDVRKKAQDALPFFMMHLGYEKMAKATGKLKPTSKDQVLAMLEKAKVNMPAKPAPPTKATSKPMGGSAPAKFQPASAPAEDCISSSTEPKPDPKKAKAPGLSSKAKSAQGKKMPSKTSLKEDEDKSGPIFIVVPNGKEQRMKDEKGLKVLKWNFTTPRDEYIEQLKTQMSSCVAKWLQDEMFHSDFQHHNKALAVMVDHLESEKEGVIGCLDLILKWLTLRFFDTNTSVLMKALEYLKLLFTLLSEEEYHLTENEASSFIPYLVVKVGEPKDVIRKDVRAILNRMCLVYPASKMFPFIMEGTKSKNSKQRAECLEELGCLVESYGMNVCQPTPGKALKEIAVHIGDRDNAVRNAALNTIVTVYNVHGDQVFKLIGNLSEKDMSMLEERIKRSAKRPSAAPIKQVEEKPQRAQNISSNANMLRKGPAEDMSSKLNQARSMSGHPEAAQMVRREFQLDLDEIENDNGTVRCEMPELVQHKLDDIFEPVLIPEPKIRAVSPHFDDMHSNTASTINFIISQVASGDINTSIQALTQLFQIESLAREASTGVLKDLMHGLITLMLDSRIEDLEEGQQVIRSVNLLVVKVLEKSDQTNILSALLVLLQDSLLATASSPKFSELVMKCLWRMVRLLPDTINSINLDRILLDIHIFMKVFPKEKLKQCKSEFPIRTLKTLLHTLCKLKGPKILDHLTMIDNKNESELEAHLCRMMKHSMDQTGSKSDKETEKGASRIDEKSSKAKVNDFLAEIFKKIGSKENTKEGLAELYEYKKKYSDADIEPFLKNSSQFFQSYVERGLRVIEMEREGKGRISTSTGISPQMEVTCVPTPTSTVSSIGNTNGEEVGPSVYLERLKILRQRCGLDNTKQDDRPPLTSLLSKPAVPTVASSTDMLHSKLSQLRESREQHQHSDLDSNQTHSSGTVTSSSSTANIDDLKKRLERIKSSRK

SEQ ID NO: 744590 - protein, 574 aa, Homo sapiens
MDSRVSGTTSNGETKPVYPKMEFVLSVAGEIIGLGNVWRFPYLCYKNGGGAFFIPYLVFLFTCGIPVFLLETALGQYTSQGGVTAWRKICPIFEGIGYASQMIVILLNVYYIIVLAWALFYLFSSFTIDLPWGGCYHEWNTEHCMEFQKTNGSLNGTSENATSPVIEFWERRVLKISDGIQHLGALRWELALCLLLAWVICYFCIWKGVKSTGKVVYFTATFPYLMLVVLLIRGVTLPGAAQGIQFYLYPNLTRLWDPQVWMDAGTQIFFSFAICLGCLTALGSYNKYHNNCYSGTSFVAGFAIFSILGFMSQEQGVPISEVAESGPGLAFIAYPRAVVMLPFSPLWACCFFFMVVLLGLDSQFVCVESLVTALVDMYPHVFRKKNRREVLILGVSVVSFLVGLIMLTEGGMYVFQLFDYYAASGMCLLFVAIFESLCVAWVYGAKRFYDNIEDMIGYRPWPLIKYCWLFLTPAVCTATFLFSLIKYTPLTYNKKYTYPWWGDALGWLLALSSMVCIPAWSLYRLGTLKGPFRERIRQLMCPAEDLPQRNPAGPSAPATPRTSLLRLTELESHC

SEQ ID NO: 744591 - protein, 625 aa, Homo sapiens
MDSRVSGTTSNGETKPVYPVMEKKEEDGTLERGHWNNKMEFVLSVAGEIIGLGNVWRFPYLCYKNGGGAFFIPYLVFLFTCGIPVFLLETALGQYTSQGGVTAWRKICPIFEGIGYASQMIVILLNVYYIIVLAWALFYLFSSFTIDLPWGGCYHEWNTEHCMEFQKTNGSLNGTSENATSPVIEFWERRVLKISDGIQHLGALRWELALCLLLAWVICYFCIWKGVKSTGKVVYFTATFPYLMLVVLLIRGVTLPGAAQGIQFYLYPNLTRLWDPQVWMDAGTQIFFSFAICLGCLTALGSYNKYHNNCYSGTSFVAGFAIFSILGFMSQEQGVPISEVAESGPGLAFIAYPRAVVMLPFSPLWACCFFFMVVLLGLDSQFVCVESLVTALVDMYPHVFRKKNRREVLILGVSVVSFLVGLIMLTEERQSRQVPPLAFGLDHPPPGMGEEPFGSTVSEEGGMYVFQLFDYYAASGMCLLFVAIFESLCVAWVYGAKRFYDNIEDMIGYRPWPLIKYCWLFLTPAVCTATFLFSLIKYTPLTYNKKYTYPWWGDALGWLLALSSMVCIPAWSLYRLGTLKGPFRERIRQLMCPAEDLPQRNPAGPSAPATPRTSLLRLTELESHC

SEQ ID NO: 744592 - protein, 297 aa, Homo sapiens
MSQEQGVPISEVAESGPGLAFIAYPRAVVMLPFSPLWACCFFFMVVLLGLDSQFVCVESLVTALVDMYPHVFRKKNRREVLILGVSVVSFLVGLIMLTEERQSRQVPPLAFGMDHPPPGMGEEPFGSTVSEEGGMYVFQLFDYYAASGMCLLFVAIFESLCVAWVYGAKRFYDNIEDMIGYRPWPLIKYCWLFLTPAVCTATFLFSLIKYTPLTYNKKYTYPWWGDALGWLLALSSMVCIPAWSLYRLGTLKGPFRERIRQLMCPAEDLPQRNPAGPSAPATPRTSLLRLTELESHC

SEQ ID NO: 744593 - protein, 257 aa, Homo sapiens
MDSRVSGTTSNGETKPVYPVMEKKEEDGTLERGHWNNKMEFVLSVAGEIIGLGNVWRFPYLCYKNGGGAFFIPYLVFLFTCGIPVFLLETALGQYTSQGGVTAWRKICPIFEGIGYASQMIVILLNVYYIIVLAWALFYLFSSFTIDLPWGGCYHEWNTEHCMEFQKTNGSLNGTSENATSPVIEFWERRVLKISDGIQHLGALRWELALCLLLAWVICYFCIWKGVKSTGKVRVGSSCPSHSRTPALTGGCHPGVL

SEQ ID NO: 744594 - protein, 78 aa, Homo sapiens
LWPHAGKPWVTHSLELARALARVPLLLVVGPGLAFIAYPRAVVMLPFSPLWACCFFFMVVLLGLDSQVSRGSHSEAER

SEQ ID NO: 744595 - protein, 182 aa, Homo sapiens
GAMQAEGRGTGGSTGDADGPGGPGIPDGPGGNAGGPGEAGATGGRGPRGAGAARASGPGGGAPRGPHGGAASGLNGCCRCGARGPESRLLEFYLAMPFATPMEAELARRSLAQDAPPLPVPGVLLKEFTVSGNILTIRLTAADHRQLQLSISSCLQQLSLLMWITQCFLPVFLAQPPSGQRR

SEQ ID NO: 744596 - protein, 164 aa, Homo sapiens
DSVSSPIHRQKGRKLESSSGEQQLGGHIWKWKATSPSSSTSSSSSSFSSSHPGSLPKPVGLQPLPRPEVSFLTEYLRKLKACEGGGVEIAAASFPRIYLMGMCSRQDRIQKDIDVVIQKSRAEDCLFAVLFHQMEMGHGQFLLSHADHAPELKLQNVLKHHSTS

SEQ ID NO: 744597 - protein, 164 aa, Homo sapiens; identical to SEQ ID NO: 744596

SEQ ID NO: 744598 - protein, 131 aa, Homo sapiens
DSVSSPIHRQKGRKLESSSGEQQLGGHIWKWKATSPSSSTSSSSSSFSSSHPGSLPKPVGLQPLPRPEVSFLTEYLRKLKACEGGGVEIAAASFPRIYLMGMCSRQDRIQKDIDVVIQKSRAEDCLFAAYL

SEQ ID NO: 744599 - protein, 155 aa, Homo sapiens
DSVSSPIHRQKGRKLESSSGEQQLGGHIWKWKATSPSSSTSSSSSSFSSSHPGSLPKPVGLQPLPRPEVSFLTEYLRKLKACEGGGVEIAAASFPRIYLMGMCSRQDRIQKDIDVVIQKSRAEDCLFADTVQDNLLFIFSVNFKDDWDFLPPLPP

SEQ ID NO: 744600 - protein, 155 aa, Homo sapiens; identical to SEQ ID NO: 744599

SEQ ID NO: 744601 - protein, 164 aa, Homo sapiens; identical to SEQ ID NO: 744596

SEQ ID NO: 744602 - protein, 107 aa, Homo sapiens
FETESRSVAQTGVQWRNLGSLQAPPPGFTPFSCLSLLSSWDYRCLPPRPANFFFCIFSRDGVSPGSRSSDLVIRPPRPPKVLGLQARATAPSQISLFIDKLMQSKEI

SEQ ID NO: 744603 - protein, 150 aa, Homo sapiens
SGALTWTKKFSLDYLALDFNSASPAPMQQARAFVFQVISSPGPRQEKQPPSEVCWPPGRGKREIAESQNTSFSLGLEHVTSFLLLLFCFLESRSHSVTQAGVQWHGHSSLQPRSPGLKLSSHLSLPSSWYYSCTSSPTAVFYFLIKNDLD

SEQ ID NO: 744604 - protein, 121 aa, Homo sapiens
RESKFQADCYSVSWEPANSLFEATMSTGEKESTHFVTRLFSNSSLSHEGLTFLHFGLWNSASLGTAGDQLLQGSKQGGPAAGLTAAGASEIMPQPGSHVPQIPGRLLLSENEAMTGMVPVL

SEQ ID NO: 744605 - protein, 150 aa, Homo sapiens
ALGHRRGGTQSGHTGSGEGAPGEAERGCSLVCFAIRDCLEMSLEKVFLACWEGSVFSSRCPAASMGTLPSWGLDPSRREGDHRPPPGHCGGQERPRGEGGSSSWGSGGFPPQGGRFPAPVLCLRQTLSCPPALSLSHDGNKWKWFPHTNA

SEQ ID NO: 744606 - protein, 103 aa, Homo sapiens
RALQPGEMAPGGAVCACPVMTVVGAGPSVAALQSGQWVGSSSVLCRVATGPSHLAGVTFGRATRSEKGGNCGPQQSSDRPDIPCSAIFPSAACRRKGLSVSQG

SEQ ID NO: 744607 - protein, 128 aa, Homo sapiens
MSIGRTMQASGVAKEQHIQGDPGRLGPTLYASLYNGDRQGDPGRLGPDPLRLPLQRRQAGRPWQAGPRPSTPPSTTETGRETLAGWAPTLYASLYNGDRQEARRRGPLIARPGPSKSLHFSGLLKIQA

SEQ ID NO: 744608 - protein, 131 aa, Homo sapiens
AARARQSHNGSQIQVRPFVCPRGSSRAGIPRRGWWWQAFQKGSTPGSALLASRRRRQRKLQPDELPGCGDICLLLPLTTSALVPPSKNPHSVLSPHSLPSRVSHICPSLAQGHSSALFSRRRHQQLFLRGK

SEQ ID NO: 744609 - protein, 131 aa, Homo sapiens; identical to SEQ ID NO: 744608

SEQ ID NO: 744610 - protein, 131 aa, Homo sapiens; identical to SEQ ID NO: 744608

SEQ ID NO: 744611 - protein, 113 aa, Homo sapiens
MADVEDGEETCALASHSGSSGSKSGGDKMFSLKKWNAVAMWSWDVECDTCAICRVQVMDACLRCQAENKQEDCVVVWGECNHSFHNCCMSLWVKQNNRCPLCQQDWVVQRIGK

SEQ ID NO: 744612 - protein, 159 aa, Homo sapiens
GQPGSRHHGGWRPAGGAVARRAAPQSRPSLPPSPSQRLRRRLRGAAMADVEDGEETCALASHSGSSGSKSGGDKMFSLKKWNAVAMWSWDVECDTCAICRVQVMDACLRCQAENKQEDCVVVWGECNHSFHNCCMSLWVKQNNRCPLCQQDWVVQRIGK

SEQ ID NO: 744613 - protein, 159 aa, Homo sapiens; identical to SEQ ID NO: 744612

SEQ ID NO: 744614 - protein, 154 aa, Homo sapiens
GQPGSRHHGGWRPAGGAVARRAAPQSRPSLPPSPSQRLRRRLRGAAMADVEDGEETCALASHSGSSGSKSGGDKMFSLKKWNAVAMWSWDVECDTCAICRVQVMDEGIGVRNWSEALNLINASEMGFDCRSGSTALAVPSVSLASHQPCLDDHR

SEQ ID NO: 744615 - protein, 159 aa, Homo sapiens; identical to SEQ ID NO: 744612

SEQ ID NO: 744616 - protein, 159 aa, Homo sapiens; identical to SEQ ID NO: 744612

SEQ ID NO: 744617 - protein, 163 aa, Homo sapiens
GQPGSRHHGGWRPAGGAVARRAAPQSRPSLPPSPSQRLRRRLRGAAMADVEDGEETCALASHSGSSGSKSGGDKMFSLKKWNAVAMWSWDVECDTCAICRVQVMGKRCTRVQGRPAASGSRPRGWEGTGVRQKPRKVPCLGEWVEVALPRRRRNAEPRSCCGS

SEQ ID NO: 744618 - protein, 159 aa, Homo sapiens; identical to SEQ ID NO: 744612

SEQ ID NO: 744619 - protein, 101 aa, Homo sapiens
GRWPLGPGWFRCRPAQWSFKGHLLAAFDLSPLISDVAPQSTVQEKSQNSQASPSPRQMEKGQAGFPVPIHNVQEGQGPQWLKPSPTHDLLEISSIQATPLV

SEQ ID NO: 744620 - protein, 1315 aa, Homo sapiens
DFEVGDKIRILATLEDGWLEGSLKGRTGIFPYRFVKLCPDTRVEETMALPQEGSLARIPETSLDCLENTLGVEEQRHETSDHEAEEPDCIISEAPTSPLGHLTSEYDTDRNSYQDEDTAGGPPRSPGVEWEMPLATDSPTSDPTEVVNGISSQPQVPFHPNLQKSQYYSTVGGSHPHSEQYPDLLPLEARTRDYASLPPKRMYSQLKTLQKPVLPLYRGSSVSASRVVKPRQSSPQLHNLASYTKKHHTSSVYSISERLEMKPGPQAQGLVMEAATHSQGDGSTDLDSKLTQQLIEFEKSLAGPGTEPDKILRHFSIMDFNSEKDIVRGSSKLITEQELPERRKALRPPPPRPCTPVSTSPHLLVDQNLKPAPPLVVRPSRPAPLPPSAQQRTNAVSPKLLSRHRPTCETLEKEGPGHMGRSLDQTSPCPLVLVRIEEMERDLDMYSRAQEELNLMLEEKQDESSRAETLEDLKFCESNIESLNMELQQLREMTLLSSQSSSLVAPSGSVSAENPEQRMLEKRAKVIEELLQTERDYIRDLEMCIERIMVPMQQAQVPNIDFEGLFGNMQMVIKVSKQLLAALEISDAVGPVFLGHRDELEGTYKIYCQNHDEAIALLEIYEKDEKIQKHLQDSLADLKSLYNEWGCTNYINLGSFLIKPVQRVMRYPLLLMELLNSTPESHPDKVPLTNAVLAVKEINVNINEYKRRKDLVLKYRKGDEDSLMEKISKLNIHSIIKKSNRVSSHLKHLTGFAPQIKDEVFEETEKNFRMQERLIKSFIRDLSLYLQHIRESACVKVVAAVSMWDVCMERGHRDLEQFERVHRYISDQLFTNFKERTERLVISPLNQLLSMFTGPHKLVQKRFDKLLDFYNCTERAEKLKDKKTLEELQSARNNYEALNAQLLDELPKFHQYAQGLFTNCVHGYAEAHCDFVHQALEQLKPLLSLLKVAGREGNLIAIFHEEHSRVLQQLQVFTFFPESLPATKKPFERKTIDRQSARKPLLGLPSYMLQSEELRASLLARYPPEKLFQAERNFNAAQDLDVSLLEGDLVGVIKKKDPMGSQNRWLIDNGVTKGFVYSSFLKPYNPRRSHSDASVGSHSSTESEHGSSSPRFPRQNSGSTLTFNPSSMAVSFTSGSCQKQPQDASPPPKECDQGTLSASLNPSNSESSPSRCPSDPDSTSQPRSGDSADVARDVKQPTATPRSYRNFRHPEIVGYSVPGRNGQSQDLVKGCARTAQAPEDRSTEPDGSEAEGNQVYFAVYTFKARNPNELSVSANQKLKILEFKDVTGNTEWWLAEVNGKKGYVPSNYIRKTEYT

SEQ ID NO: 744621 - protein, 998 aa, Homo sapiens
MDFNSEKDIVRGSSKLITEQELPERRKALRPPPPRPCTPVSTSPHLLVDQNLKPAPPLVVRPSRPAPLPPSAQQRTNAVSPKLLSRHRPTCETLEKEGPGHMGRSLDQTSPCPLVLVRIEEMERDLDMYSRAQEELNLMLEEKQDESSRAETLEDLKFCESNIESLNMELQQLREMTLLSSQSSSLVAPSGSVSAENPEQRMLEKRAKVIEELLQTERDYIRDLEMCIERIMVPMQQAQVPNIDFEGLFGNMQMVIKVSKQLLAALEISDAVGPVFLGHRDELEGTYKIYCQNHDEAIALLEIYEKDEKIQKHLQDSLADLKSLYNEWGCTNYINLGSFLIKPVQRVMRYPLLLMELLNSTPESHPDKVPLTNAVLAVKEINVNINEYKRRKDLVLKYRKGDEDSLMEKISKLNIHSIIKKSNRVSSHLKHLTGFAPQIKDEVFEETEKNFRMQERLIKSFIRDLSLYLQHIRESACVKVVAAVSMWDVCMERGHRDLEQFERVHRYISDQLFTNFKERTERLVISPLNQLLSMFTGPHKLVQKRFDKLLDFYNCTERAEKLKDKKTLEELQSARNNYEALNAQLLDELPKFHQYAQGLFTNCVHGYAEAHCDFVHQALEQLKPLLSLLKVAGREGNLIAIFHEEHSRVLQQLQVFTFFPESLPATKKPFERKTIDRQSARKPLLGLPSYMLQSEELRASLLARYPPEKLFQAERNFNAAQDLDVSLLEGDLVGVIKKKDPMGSQNRWLIDNGVTKGFVYSSFLKPYNPRRSHSDASVGSHSSTESEHGSSSPRFPRQNSGSTLTFNPSSMAVSFTSGSCQKQPQDASPPPKECDQGTLSASLNPSNSESSPSRCPSDPDSTSQPRSGDSADVARDVKQPTATPRSYRNFRHPEIVGYSVPGRNGQSQDLVKGCARTAQAPEDRSTEPDGSEAEGNQVYFAVYTFKARNPNELSVSANQKLKILEFKDVTGNTEWWLAEVNGKKGYVPSNYIRKTEYT

SEQ ID NO: 744622 - protein, 1315 aa, Homo sapiens; identical to SEQ ID NO: 744620

SEQ ID NO: 744623 - protein, 816 aa, Homo sapiens
DFEVGDKIRILATLEDGWLEGSLKGRTGIFPYRFVKLCPDTRVEETMALPQEGSLARIPETSLDCLENTLGVEEQRHETSDHEAEEPDCIISEAPTSPLGHLTSEYDTDRNSYQDEDTAGGPPRSPGVEWEMPLATDSPTSDPTEVVNGISSQPQVPFHPNLQKSQYYSTVGGSHPHSEQYPDLLPLEARTRDYASLPPKRMYSQLKTLQKPVLPLYRGSSVSASRVVKPRQSSPQLHNLASYTKKHHTSSVYSISERLEMKPGPQAQGLVMEAATHSQGDGSTDLDSKLTQQLIEFEKSLAGPGTEPDKILRHFSIMDFNSEKDIVRGSSKLITEQELPERRKALRPPPPRPCTPVSTSPHLLVDQNLKPAPPLVVRPSRPAPLPPSAQQRTNAVSPKLLSRHRPTCETLEKEGPGHMGRSLDQTSPCPLVLVRIEEMERDLDMYSRAQEELNLMLEEKQDESSRAETLEDLKFCESNIESLNMELQQLREMTLLSSQSSSLVAPSGSVSAENPEQRMLEKRAKVIEELLQTERDYIRDLEMCIERIMVPMQQAQVPNIDFEGLFGNMQMVIKVSKQLLAALEISDAVGPVFLGHRDELEGTYKIYCQNHDEAIALLEIYEKDEKIQKHLQDSLADLKSLYNEWGCTNYINLGSFLIKPVQRVMRYPLLLMELLNSTPESHPDKVPLTNAVLAVKEINVNINEYKRRKDLVLKYRKGDEDSLMEKISKLNIHSIIKKSNRVSSHLKHLTGFAPQIKDEVFEETEKNFRMQERLIKSFIRDLSLYLQHIRVSVNITVVRLTYDVILSPFLFISHIV

SEQ ID NO: 744624 - protein, 865 aa, Homo sapiens
MPTLFKGVWGVVEHSRALGRFCPACLPSGPHLHTQPALGTAEMTLLSSQSSSLVAPSGSVSAENPEQRMLEKRAKVIEELLQTERDYIRDLEMCIERIMVPMQQAQVPNIDFEGLFGNMQMVIKVSKQLLAALEISDAVGPVFLGHRDELEGTYKIYCQNHDEAIALLEIYEKDEKIQKHLQDSLADLKSLYNEWGCTNYINLGSFLIKPVQRVMRYPLLLMELLNSTPESHPDKVPLTNAVLAVKEINVNINEYKRRKDLVLKYRKGDEDSLMEKISKLNIHSIIKKSNRVSSHLKHLTGFAPQIKDEVFEETEKNFRMQERLIKSFIRDLSLYLQHIRESACVKVVAAVSMWDVCMERGHRDLEQFERVHRYISDQLFTNFKERTERLVISPLNQLLSMFTGPHKLVQKRFDKLLDFYNCTERAEKLKDKKTLEELQSARNNYEALNAQLLDELPKFHQYAQGLFTNCVHGYAEAHCDFVHQALEQLKPLLSLLKVAGREGNLIAIFHEEHSRVLQQLQVFTFFPESLPATKKPFERKTIDRQSARKPLLGLPSYMLQSEELRASLLARYPPEKLFQAERNFNAAQDLDVSLLEGDLVGVIKKKDPMGSQNRWLIDNGVTKGFVYSSFLKPYNPRRSHSDASVGSHSSTESEHGSSSPRFPRQNSGSTLTFNPSSMAVSFTSGSCQKQPQDASPPPKECDQGTLSASLNPSNSESSPSRCPSDPDSTSQPRSGDSADVARDVKQPTATPRSYRNFRHPEIVGYSVPGRNGQSQDLVKGCARTAQAPEDRSTEPDGSEAEGNQVYFAVYTFKARNPNELSVSANQKLKILEFKDVTGNTEWWLAEVNGKKGYVPSNYIRKTEYT

SEQ ID NO: 744625 - protein, 1033 aa, Homo sapiens
RARYPNDGPPLCSGSQGSLAGPGTEPDKILRHFSIMDFNSEKDIVRGSSKLITEQELPERRKALRPPPPRPCTPVSTSPHLLVDQNLKPAPPLVVRPSRPAPLPPSAQQRTNAVSPKLLSRHRPTCETLEKEGPGHMGRSLDQTSPCPLVLVRIEEMERDLDMYSRAQEELNLMLEEKQDESSRAETLEDLKFCESNIESLNMELQQLREMTLLSSQSSSLVAPSGSVSAENPEQRMLEKRAKVIEELLQTERDYIRDLEMCIERIMVPMQQAQVPNIDFEGLFGNMQMVIKVSKQLLAALEISDAVGPVFLGHRDELEGTYKIYCQNHDEAIALLEIYEKDEKIQKHLQDSLADLKSLYNEWGCTNYINLGSFLIKPVQRVMRYPLLLMELLNSTPESHPDKVPLTNAVLAVKEINVNINEYKRRKDLVLKYRKGDEDSLMEKISKLNIHSIIKKSNRVSSHLKHLTGFAPQIKDEVFEETEKNFRMQERLIKSFIRDLSLYLQHIRESACVKVVAAVSMWDVCMERGHRDLEQFERVHRYISDQLFTNFKERTERLVISPLNQLLSMFTGPHKLVQKRFDKLLDFYNCTERAEKLKDKKTLEELQSARNNYEALNAQLLDELPKFHQYAQGLFTNCVHGYAEAHCDFVHQALEQLKPLLSLLKVAGREGNLIAIFHEEHSRVLQQLQVFTFFPESLPATKKPFERKTIDRQSARKPLLGLPSYMLQSEELRASLLARYPPEKLFQAERNFNAAQDLDVSLLEGDLVGVIKKKDPMGSQNRWLIDNGVTKGFVYSSFLKPYNPRRSHSDASVGSHSSTESEHGSSSPRFPRQNSGSTLTFNPSSMAVSFTSGSCQKQPQDASPPPKECDQGTLSASLNPSNSESSPSRCPSDPDSTSQPRSGDSADVARDVKQPTATPRSYRNFRHPEIVGYSVPGRNGQSQDLVKGCARTAQAPEDRSTEPDGSEAEGNQVYFAVYTFKARNPNELSVSANQKLKILEFKDVTGNTEWWLAEVNGKKGYVPSNYIRKTEYT

SEQ ID NO: 744626 - protein, 1315 aa, Homo sapiens; identical to SEQ ID NO: 744620

SEQ ID NO: 744627 - protein, 1315 aa, Homo sapiens; identical to SEQ ID NO: 744620

SEQ ID NO: 744628 - protein, 563 aa, Homo sapiens
DFEVGDKIRILATLEDGWLEGSLKGRTGIFPYRFVKLCPDTRVEETMALPQEGSLARIPETSLDCLENTLGVEEQRHETSDHEAEEPDCIISEAPTSPLGHLTSEYDTDRNSYQDEDTAGGPPRSPGVEWEMPLATDSPTSDPTEVVNGISSQPQVPFHPNLQKSQYYSTVGGSHPHSEQYPDLLPLEARTRDYASLPPKRMYSQLKTLQKPVLPLYRGSSVSASRVVKPRQSSPQLHNLASYTKKHHTSSVYSISERLEMKPGPQAQGLVMEAATHSQGDGSTDLDSKLTQQLIEFEKSLAGPGTEPDKILRHFSIMDFNSEKDIVRGSSKLITEQELPERRKALRPPPPRPCTPVSTSPHLLVDQNLKPAPPLVVRPSRPAPLPPSAQQRTNAVSPKLLSRHRPTCETLEKEGPGHMGRSLDQTSPCPLVLVRIEEMERDLDMYSRAQEELNLMLEEKQDESSRAETLEDLKFCESNIESLNMELQQLREMTLLSSQSSSLVAPSGSVSAENPEQRMLEKRAKVIEELLQTERDYIRDLEMCIERIMVPMQQAQVGTGRQS

SEQ ID NO: 744629 - protein, 101 aa, Homo sapiens
LQSFLHGIRHIAVGTRSVLLVIVLLQVSRVSQLRHMNYFFLLLGGYTFNYIHSITEQFRFVKYFFSPNLFPKHTSPSRKFLGRDNLRNLKVAKKLASWPGA

SEQ ID NO: 744630 - protein, 147 aa, Homo sapiens
SSPAPPPRLSFSFGLSQPRRDAEPGAEPCSCACRAGMDGREAFCKREIAMNGIVHDVDVLGAGIRLVTLLVDRDGLYKMNRLYLTPDGFFFRVHMLALDSSSCNKPCPEFKPGSRYIVMGHIYHKRRQLPTALLQVLRGRLRPGMDC

SEQ ID NO: 744631 - protein, 114 aa, Homo sapiens
  misc_feature (7)..(8): Xaa can be any naturally occurring amino acid
  misc_feature (22)..(22): Xaa can be any naturally occurring amino acid
ALSLRAXXPVRSGRTRGFCETXFAMNGIVHDVDVLGAGIRLVTLLVDRDGLYKMNRLYLTPDGFFFRVHMLALDSSSCNKPCPEFKPGIETDLNDAAYVLYTTVCNVGCHSPGC

SEQ ID NO: 744632 - protein, 69 aa, Homo sapiens
MYIAAFQGKGHRDSSLCLPSPGATTSTRPIHTVESHLKFSGARPPMHTVLVWASHLHPHKCQGSSRLPS

SEQ ID NO: 744633 - protein, 139 aa, Homo sapiens
PKFWDYRCDPAKLGFHHVGQAGLEPLTSDDPPPLPPKVLGITGVHSEQAWDDFREVSGLLQSERNLLCGVVGIGVRGFRSFVLAYSKYEAKSPWLTPVIPAFWKAEVGGLLEARSWRPAWATQRVDHEVRRSRPSWLTR

SEQ ID NO: 744634 - protein, 115 aa, Homo sapiens
NLLLSWLLGPELPELSPRARKADLKDENLKFSCWWEPRKTAGVLTWPFLAELAEVGVLADGMYLGAVSVAQQRCRADWLSHWVLPAGSPLHWAFTQPCSWVSLPCKQSHNNTRIV

SEQ ID NO: 744635 - protein, 96 aa, Homo sapiens
QHSPLSGGLGLVALDLGRDLPPGRQLSPLGAPGFRSHFCILQLQGPKGHSTQSSGHRVAGGFSLSPKGPGRITPPLLCLHPLPLPLHSSEPASDPT

SEQ ID NO: 744636 - protein, 52 aa, Homo sapiens
MACRIIPLSRFSPRTLDNAGFSYVHHQRAYPASGVYLDSWAHGPFLHLQTSN

SEQ ID NO: 744637 - protein, 92 aa, Homo sapiens
TWPSRKACLRGAALHSWSRPSARHQERRGRGFGKETQVRELTEKSASMDGKMHLSATKEPPEVQIPTSAAPVWRKQRWISCRGFCDFESRGC

SEQ ID NO: 744638 - protein, 108 aa, Homo sapiens
ALLICFAESLQPFLEACSNSLFFRTCSVLLRAPKLDLQILEKLSIILQKLSKIKSNKKLFELFTIHLMLQEIQRTTNPEHAFLCINLNSTLFNLGLTKCNSLVSSASP

SEQ ID NO: 744639 - protein, 434 aa, Homo sapiens
MEPRVVKPPGQDLVVESLKSRYGLGGSCPDEYDFSNFYQSKYKRRTLTSPGDLDIYSGDKVGSSLKYSDESKHCRTPLGSLFKHVNVNCLDDELDSFHDLKKQETEEELIENDYRVSTSKITKQSFKEIEKVALPTNTTSSRPRTECCSDAGDSPLKPVSCPKSKASDKRSLLPHQISQIYDELFQIHLKLQCETAAQQKFAEELQKRERFLLEREQLLFRHENALSKIKGVEEEVLTRFQIIKEQHDAEVEHLTEVLKEKNKETKRLRSSFDALKELNDTLKKQLNEASEENRKIDIQAKRVQARLDNLQRKYEFMTIQRLKGSSHAVHEMKSLKQEKAPVSKTYKVPLNGQVYELLTVFMDWISDHHLSKVKHEESGMDGKKPQLKFASQRNDIQEKCVKNPCSLSWKPVATLYFFVLALCCFEPLSLIFKY

SEQ ID NO: 744640 - protein, 434 aa, Homo sapiens; identical to SEQ ID NO: 744639

SEQ ID NO: 744641 - protein, 467 aa, Homo sapiens
MEPRVVKPPGQDLVVESLKSRYGLGGSCPDEYDFSNFYQSKYKRRTLTSPGDLDIYSGDKVGSSLKYSDESKHCRTPLGSLFKHVNVNCLDDELDSFHDLKKQETEEELIENDYRVSTSKITKQSFKEIEKVALPTNTTSSRPRTECCSDAGDSPLKPVSCPKSKASDKRSLLPHQISQIYDELFQIHLKLQCETAAQQKFAEELQKRERFLLEREQLLFRHENALSKIKGVEEEVLTRFQIIKEQHDAEVEHLTEVLKEKNKETKRLRSSFDALKELNDTLKKQLNEASEENRKIDIQAKRVQARLDNLQRKYEFMTIQRLKGSSHAVHEMKSLKQEKAPVSKTYKVPLNGQVYELLTVFMDWISDHHLSKVKHEESGMDGKKPQLKFASQRNDIQEKCVKLLPLMTEQLQWMPFVNIKLHEPFVKFIYWSLRQLDAGAQHSTMTSTLRRLGEDIFKGVVTNRNSG

SEQ ID NO: 744642 - protein, 351 aa, Homo sapiens
MVNLPRMMNVGFFPVIGRKQETEEELIENDYRVSTSKITKQSFKEIEKVALPTNTTSSRPRTECCSDAGDSPLKPVSCPKSKASDKRSLLPHQISQIYDELFQIHLKLQCETAAQQKFAEELQKRERFLLEREQLLFRHENALSKIKGVEEEVLTRFQIIKEQHDAEVEHLTEVLKEKNKETKRLRSSFDALKELNDTLKKQLNEASEENRKIDIQAKRVQARLDNLQRKYEFMTIQRLKGSSHAVHEMKSLKQEKAPVSKTYKVPLNGQVYELLTVFMDWISDHHLSKVKHEESGMDGKKPQLKFASQRNDIQEKCVKNPCSLSWKPVATLYFFVLALCCFEPLSLIFKY

SEQ ID NO: 744643 - protein, 253 aa, Homo sapiens
MEPRVVKPPGQDLVVESLKSRYGLGGSCPDEYDFSNFYQSKYKRRTLTSPGDLDIYSGDKVGSSLKYSDESKHCRTPLGSLFKHVNVNCLDDELDSFHDLKKQETEEELIENDYRVSTSKITKQSFKEIEKVALPTNTTSSRPRTECCSDAGDSPLKPVSCPKSKASDKRSLLPHQISQIYDELFQIHLKLQCETAAQQKFAEELQKRERFLLEREQLLFRHENALSKIKGVEEEVLTRFQIIKSSMMQKLNT

SEQ ID NO: 744644 - protein, 108 aa, Homo sapiens; identical to SEQ ID NO: 744638

SEQ ID NO: 744645 - protein, 432 aa, Homo sapiens
RGLMNAVPGETGTVAVCYGAEGRQATGAGFSSGESQKPLRTRGQLPRRGDLDIYSGDKVGSSLKYSDESKHCRTPLGSLFKHVNVNCLDDELDSFHDLKKQETEEELIENDYRVSTSKITKQSFKEIEKVALPTNTTSSRPRTECCSDAGDSPLKPVSCPKSKASDKRSLLPHQISQIYDELFQIHLKLQCETAAQQKFAEELQKRERFLLEREQLLFRHENALSKIKGVEEEVLTRFQIIKEQHDAEVEHLTEVLKEKNKETKRLRSSFDALKELNDTLKKQLNEASEENRKIDIQAKRVQARLDNLQRKYEFMTIQRLKGSSHAVHEMKSLKQEKAPVSKTYKVPLNGQVYELLTVFMDWISDHHLSKVKHEESGMDGKKPQLKFASQRNDIQEKCVKNPCSLSWKPVATLYFFVLALCCFEPLSLIFKY

SEQ ID NO: 744646 - protein, 407 aa, Homo sapiens
MEPRVVKPPGQDLVVESLKSRYGLGGSCPDEYDFSNFYQSKYKRRTLTSPGDLDIYSGDKVGSSLKYSDESKHCRTPLGSLFKHVNVNCLDDELDSFHDLKKQETEEELIENDYRVSTSKITKQSFKEIEKVALPTNTTSSRPRTECCSDAGDSPLKPVSCPKSKASDKRSLLPHQISQIYDELFQIHLKLQCETAAQQKFAEELQKRERFLLEREQLLFRHENALSKIKGVEEEVLTRFQIIKEQHDAEVEHLTEVLKEKNKETKRLRSSFDALKELNDTLKKQLNEASEENRKIDIQAKRVQARLDNLQRKYEFMTIQRLKGSSHAVHEMKSLKQEKAPVSKTYKVPLNGQVYELLTVFMDWISDHHLSKVKHEESGMDGKKPQLKFASQRNDIQEKCVKVCFLI

SEQ ID NO: 744647 - protein, 1232 aa, Homo sapiens
MSSPRLIPLWKDLKLLLNDTINKSKQPSEDPKNCLIVLSDRSQALFKESRYPQNMPCVCYYFSDAHFFASLSWVTSNTKEIQAVAWMKSKTEDMVEKRTFSMTERLPPIQSMVHAGSFHILVVYCGDLILRLFGDHFRAFKPLGKVPCRFNISCLCYDPEMKMLLVWHPGGSGVLGIELGGTGLQIAHMVSMPGDELVQDIVLNGPSGSLLALCETVVRVLMHQGKGQLGEVKRFTSTSSGSSITCCFTCFDQGFLYAGNQAGETQVWSLQQGHPLHSFQAHQSGVICIRSRPEAHTLLTAGSDSLIKEWNLTSGSLLRRLELGEELYRLQFIDSITFFCQTAHSFSLHRLPCFYSLFNVCGSAPQQLRRVCCGNNWFRILCTTEDGLLRFVSPVTGDLLVITWPFSILDQAVDWAYDPGKEELFVATGSSEVLVFDTTRCPCPAKYLLGTSPNSQDFVQCLAYGHFNLGRGLEGLIFSGHQSGVIRVLSQHSCARLEKFMHFGAVLALSTLSGGIFGGQGNSLLCSYGMDDYVHLSEAVLDGVKVQLRPLASILSSCHLTHLILLPQSVGAITETNCLRLWKFHDFLSSGSQNGLKFIETLPLHLCAITSFDVCLSLSLFVTGSADGSVRIWDFHGRLIAILDSSLHFGPVCFANDRGDLLVTFNQSLYLVSCLKLLPPALLTRLSFMSISDEVLEVPKPFIPSFFFSFETMFVPKYIYPGQAQQKLVGLEKLVNNRAIAFDHSVPHVIEEDEEGSPVLLRSSMHYSLQDMEDWMQVSKRYQCHYVLPPQLQLTSWDGLNPYQILRYYFGHGREWLFAPDCYIPNSVIRARLWPEGTPIYLQCNLHAPQRELEWNSSQDSFSDTAGYRAISNTEYPKNKEEDEHFLEMRLSKDVTYSVLTDGANRSWLGRKMSEITINSMIETMLNIMVHASLLKYQCCVGALGQIFASYQVSPALRSETARRLLNDTTNSNPLIRGLAWEGLKRLGMITHLFAMPLAQGLMDKDERVRIKTLSLMAEIGIHSRTSLLQLTQKQETFREMQQQMIGEEPLDHLLGMRATDLQILSTQVEQRLNENLTLSHRDEKPAFSLDVSMPSELKSSLKPPTVSEESEVAIKPSKGQRRGQAGVKKHSQKWLRGLKKTKERDSKQMSTEPGLLEDESGTEAAPLRWRKHPSIPKWSSSTSVIKLSKDVDSQEKDISKDHIALTLKRLQKIRDKRDKKATAQKLKKKHK

SEQ ID NO: 744648 - protein, 135 aa, Homo sapiens
MMESSPVWVETFTGLTHFSCRGLSEGCNIPACLCRPHTSLATVGSLGKGAFRQASPPTGRMLQSLCTQTCWKHIPHAECVSSPGCSCCWPGTEEPVPWQGVLSAATCSIVGRLLGSQPLSCPLPMGCTDRCVSSL

SEQ ID NO: 744649 - protein, 98 aa, Homo sapiens
GELRVMEYPQEPADITSLQNRGLSPGCIFLQREGFRNAVPELHPRPTKSDSPGCGQGISMWKAFRKTEQNESQFKEEGIKYIIVQMIHGNGKNGDNGT

SEQ ID NO: 744650 - protein, 98 aa, Homo sapiens; identical to SEQ ID NO: 744649

SEQ ID NO: 744651 - protein, 420 aa, Homo sapiens
LNSSFPPARGAQLICFLSPSQNHRMKAVKSERERGSRRRHRDGDVVLPAGVVVKQERLSPEVAPPAHRRPDHSGGSPSPPTSEPARSGHRGNRARGVSRSPPKKKNKASGRRSKSPRSKRNRSPHHSTVKVKQEREDHPRRGREDRQHREPSEQEHRRARNSDRDRHRGHSHQRRTSNERPGSGQGQGRDRDTQNLQAQEEEREFYNARRREHRQRNDVGGGGSESQELVPRPGGNNKEKEVPAKEKPSFELSGALLEDTNTFRGVVIKYSEPPEARIPKKRWRLYPFKNDEVLPVMYIHRQSAYLLGRHRRIADIPIDHPSCSKQHAVFQYRLVEYTRADGTVGRRVKPYIIDLGSGNGTFLNNKRIEPQRYYELKEKDVLKFGFSSREYVLLHESSDTSEIDRKDDEDEEEEEEVSDS

SEQ ID NO: 744652 - protein, 420 aa, Homo sapiens; identical to SEQ ID NO: 744651

SEQ ID NO: 744653 - protein, 420 aa, Homo sapiens; identical to SEQ ID NO: 744651

SEQ ID NO: 744654 - protein, 390 aa, Homo sapiens
MKAVKSERERGSRSPPKKKNKASGRRSKSPRSKRNRSPHHSTVKVKQIRFHAVDKDIPETRRFTKERGLMDLQFHMAGEASQSWWEARRSKSHGWRQARRDKREREDHPRRGREDRQHREPSEQEHRRARNSDRDRHRGHSHQRRTSNERPGSGQGQGRDRDTQNLQAQEEEREFYNARRREHRQRNDVGGGGSESQELVPRPGGNNKEKEVPAKEKPSFELSGALLEDTNTFRGVVIKYSEPPEARIPKKRWRLYPFKNDEVLPVMYIHRQSAYLLGRHRRIADIPIDHPSCSKQHAVFQYRLVEYTRADGTVGRRVKPYIIDLGSGNGTFLNNKRIEPQRYYELKEKDVLKFGFSSREYVLLHESSDTSEIDRKDDEDEEEEEEVSDS

SEQ ID NO: 744655 - protein, 456 aa, Homo sapiens
MFLLLPFDSLIVNLLGISLTVLFTLLLVFIIVPAIFGVSFGIRKLYMKSLLKIFAWATLRMERGAKEKNHQLYKPYTNGIIAKDPTSLEEEIKEIRRSGSSKALDNTPEFELSDIFYFCRKGMETIMDDEVTKRFSAEELESWNLLSRTNYNFQYISLRLTVLWGLGVLIRYCFLLPLRIALAFTGISLLVVGTTVVGYLPNGRFKEFMSKHVHLMCYRICVRALTAIITYHDRENRPRNGGICVANHTSPIDVIILASDGYYAMVGQVHGGLMGVIQRAMVKACPHVWFERSEVKDRHLVAKRLTEHVQDKSKLPILIFPEGTCINNTSVMMFKKGSFEIGATVYPVAIKYDPQFGDAFWNSSKYGMVTYLLRMMTSWAIVCSVWYLPPMTREADEDAVQFANRVKSAIARQGGLVDLLWDGGLKREKVKDTFKEEQQKLYSKMIVGNHKDRSRS

SEQ ID NO: 744656 - protein, 456 aa, Homo sapiens; identical to SEQ ID NO: 744655

SEQ ID NO: 744657 - protein, 456 aa, Homo sapiens; identical to SEQ ID NO: 744655

SEQ ID NO: 744658 - protein, 519 aa, Homo sapiens
MFLLLPFDSLIVNLLGISLTVLFTLLLVFIIVPAIFGVSFGIRKLYMKSLLKIFAWATLRMERGAKEKNHQLYKPYTNGIIAKDPTSLEEEIKEIRRSGSSKALDNTPEFELSDIFYFCRKGMETIMDDEVTKRFSAEELESWNLLSRTNYNFQYISLRLTVLWGLGVLIRYCFLLPLRIALAFTGISLLVVGTTVVGYLPNGRFKEFMSKHVHLMCYRICVRALTAIITYHDRLRALCIDRKGDGAAGNTTHLYLAKWEDTSELLVRADEACEVRGVLHELFHTNFGCFAYIFKPRENRPRNGGICVANHTSPIDVIILASDGYYAMVGQVHGGLMGVIQRAMVKACPHVWFERSEVKDRHLVAKRLTEHVQDKSKLPILIFPEGTCINNTSVMMFKKGSFEIGATVYPVAIKYDPQFGDAFWNSSKYGMVTYLLRMMTSWAIVCSVWYLPPMTREADEDAVQFANRVKSAIARQGGLVDLLWDGGLKREKVKDTFKEEQQKLYSKMIVGNHKDRSRS

SEQ ID NO: 744659 - protein, 291 aa, Homo sapiens [sequence omitted]

SEQ ID NO: 744660 - protein, 230 aa, Homo sapiens
MFLLLPFDSLIVNLLGISLTVLFTLLLVFIIVPAIFGVSFGIRKLYMKSLLKIFAWATLRMERGAKEKNHQLYKPYTNGIIAKDPTSLEEEIKEIRRSGSSKALDNTPEFELSDIFYFCRKGMETIMDDEVTKRFSAEELESWNLLTEAVQQDDRGEPQGQEPLLSLPPAGWGHRAGCQRAQSWSCRRRPHCCVLSRLQGSPGCSGSQDSGFRRAAAGSLCTRRSLPLVV

SEQ ID NO: 744661 - protein, 125 aa, Homo sapiens [sequence omitted]

SEQ ID NO: 744662 - protein, 155 aa, Homo sapiens
ERGFHSTHARSGSSTPVPARPSGVTHSSHCGLANVVRTTHVLPPAFHCFQYDPQFGDAFWNSSKYGMVTYLLRMMTSWAIVCSVWYLPPMTREADEDAVQFANRVKSAIARQGGLVDLLWDGGLKREKVKDTFKEEQQKLYSKMIVGNHKDRSRS

SEQ ID NO: 744663 - protein, 159 aa, Homo sapiens
MFLLLPFDSLIVNLLGISLTVLFTLLLVFIIVPAIFGVSFGIRKLYMKSLLKIFAWATLRMERGAKEKNHQLYKPYTNGIIAKDPTSLEEEIKEIRRSGSSKALDNTPEFELSDIFYFCRKGMETIMDDEVTKRFSAEELESWNLLSRTNYNFQYISGR

SEQ ID NO: 744664 - protein, 456 aa, Homo sapiens; identical to SEQ ID NO: 744655

SEQ ID NO: 744665 - protein, 456 aa, Homo sapiens; identical to SEQ ID NO: 744655

SEQ ID NO: 744666 - protein, 456 aa, Homo sapiens; identical to SEQ ID NO: 744655

SEQ ID NO: 744667 - protein, 456 aa, Homo sapiens; identical to SEQ ID NO: 744655

SEQ ID NO: 744668 - protein, 448 aa, Homo sapiens
MFLLLPFDSLIVNLLGISLTVLFTLLLVFIIVPAIFGVSFGIRKLYMKSLLKIFAWATLRMERGAKEKNHQLYKPYTNGIIAKDPTSLEEEIKEIRRSGSSKALDNTPEFELSDIFYFCRKGMETIMDDEVTKRFSAEELESWNLLSRTNYNFQYISLRLTVLWGLGVLIRYCFLLPLRIALAFTGISLLVVGTTVVGYLPNGRFKEFMSKHVHLMCYRICVRALTAIITYHDRENRPRNGGICVANHTSPIDVIILASDGYYAMVGQVHGGLMGVIQRAMVKACPHVWFERSEVKDRHLVAKRLTEHVQDKSKLPILIFPEGTCINNTSVMMFKKGSFEIGATVYPVAIKYDPQFGDAFWNSSKYGMVTYLLRMMTSWAIVCSVWYLPPMTREADEDAVQFANRVKSAIARQGGLVDLLWDGGLKREKVKDTFKEEQQKLYSKMIGR

SEQ ID NO: 744669 - protein, 183 aa, Homo sapiens [sequence omitted]

SEQ ID NO: 744670 - protein, 159 aa, Homo sapiens; identical to SEQ ID NO: 744663

SEQ ID NO: 744671 - protein, 196 aa, Homo sapiens
MANPKLLGLELSEAEAIGADSARFEELLLQASKELQQAQTTRPESTQIQPQPGFCIKTNSSEGKVFINICHSPSIPPPADVTEEELLQMLEEDQAGFRIPMSLGEPHAELDAKGQGCTAYDVAVNSDFYRRMQTGILAELGSHRREGLGRYIGVNGWGCETGSRGIRGKLAEQPTKGGGPPPTRLANLHCGPPRWL

SEQ ID NO: 744672 - protein, 36 aa, Homo sapiens
MANPKLLGLELSEAEAIGADSCWSSFEACSSRNSNR

SEQ ID NO: 744673 - protein, 111 aa, Homo sapiens
MLEEDQAGFRIPMSLGEPHAELDASQCPQRTQESGPLGPFFPRTQESWAQDPPPSAPGDLAPRSDSFPYGRSLVPWTSHTRAVLVLPPGQAGTFPCPTPGPGGLGRVLFVH

SEQ ID NO: 744674 - protein, 290 aa, Homo sapiens
MANPKLLGLELSEAEAIGADSARFEELLLQASKELQQAQTTRPESTQIQPQPGFCIKTNSSEGKVFINICHSPSIPPPADVTEEELLQMLEEDQAGFRIPMSLGEPHAELDAKGQGCTAYDVAVNSDFYRRMQNSDFLRELVITIAREGLEDKYNLQLNPEWRMMKNRPFMGSISQQNIRSEQRPRIQELGDLYTPAPGRAESGPEKPHLNLWLEAPDLLLAEIDLPKLDGALGLSLEIGENRLVMGGPQQLYHLDAYIPLQINSHESKAAFHRKRKQLMVAMPLLPVPS

SEQ ID NO: 744675 - protein, 290 aa, Homo sapiens; identical to SEQ ID NO: 744674

SEQ ID NO: 744676 - protein, 240 aa, Homo sapiens [sequence omitted]

SEQ ID NO: 744677 - protein, 233 aa, Homo sapiens
MANPKLLGLELSEAEAIGADSARFEELLLQASKELQQAQTTRPESTQIQPQPGFCIKTNSSEGKVFINICHSPSIPPPADVTEEELLQMLEEDQAGFRIPMSLGEPHAELDAKGQGCTAYDVAVNSDFYRRMQNSDFLRELVITIAREGLEDKYNLQLNPEWRMMKNRPFMGSISQQNIRSEQRPRIQELGDLYTPAPGRAESGPEKPHLNLWLEAPDLLLAEIDLPKLTLQI

SEQ ID NO: 744678 - protein, 193 aa, Homo sapiens
MANPKLLGLELSEAEAIGADSARFEELLLQASKELQQAQTTRPESTQIQPQPGFCIKTNSSEGKVFINICHSPSIPPPADVTEEELLQMLEEDQAGFRIPMSLGEPHAELDAKGQGCTAYDVAVNSDFYRRMQNSDFLRELVITIAREGLEDKYNLQLNPGTSARSSVLGSRSWGTCTRPPPGELSQALKSLT

SEQ ID NO: 744679 - protein, 200 aa, Homo sapiens
MANPKLLGLELSEAEAIGADSARFEELLLQASKELQQAQTTRPESTQIQPQPGFCIKTNSSEGKVFINICHSPSIPPPADVTEEELLQMLEEDQAGFRIPMSLGEPHAELDAKGQGCTAYDVAVNSDFYRRMQNSDFLRELVITIAREGLEDKYNLQLNPELYHLDAYIPLQINSHESKAAFHRKRKQLMVAMPLLPVPS

SEQ ID NO: 744680 - protein, 166 aa, Homo sapiens
MANPKLLGLELSEAEAIGADSARFEELLLQASKELQQAQTTRPESTQIQPQPGFCIKTNSSEGKVFINICHSPSIPPPADVTEEELLQMLEEDQAGFRIPMSLGEPHAELDAKGQGCTAYDVAVNSDFYRRMQNSDFLRELVITIAREGLEDKYNLQLNPALKSLT

SEQ ID NO: 744681 - protein, 202 aa, Homo sapiens [sequence omitted]

SEQ ID NO: 744682 - protein, 193 aa, Homo sapiens; identical to SEQ ID NO: 744678

SEQ ID NO: 744683 - protein, 351 aa, Homo sapiens
MANPKLLGLELSEAEAIGADSARFEELLLQLSCIRIAPFEEQMRGLMAQTPSLEVVFLYTGLEGAPASPDNQTRIDTNPASAWFLHKDQLLGREGFHQHLPLPLYPSSRRRDRGGAASDARGGPSWVSHPHESGRASCRTGCKRPGMYRLRRSCQQRLLPEDAGWGAGLRLRPGQGSLPLPSPPPPVFSLSVTPNSDFLRELVITIAREGLEDKYNLQLNPEWRMMKNRPFMGSISQQNIRSEQRPRIQELGDLYTPAPGRAESGPEKPHLNLWLEAPDLLLAEIDLPKLDGALGLSLEIGENRLVMGGPQQLYHLDAYIPLQINSHESKAAFHRKRKQLMVAMPLLPVPS

SEQ ID NO: 744684 - protein, 159 aa, Homo sapiens
MQNSDFLRELVITIAREGLEDKYNLQLNPEWRMMKNRPFMGSISQQNIRSEQRPRIQELGDLYTPAPGRAESGPEKPHLNLWLEAPDLLLAEIDLPKLDGALGLSLEIGENRLVMGGPQQLYHLDAYIPLQINSHESKAAFHRKRKQLMVAMPLLPVPS

SEQ ID NO: 744685 - protein, 152 aa, Homo sapiens
MNWSTNPSLRSGFCIKTNSSEGKVFINICHSPSIPPPADVTEEELLQMLEEDQAGFRIPMSLGEPHAELDAKGQGCTAYDVAVNSDFYRRMQNSDFLRELVITIAREGLEDKYNLQLNPGTSARSSVLGSRSWGTCTRPPPGELSQALKSLT

SEQ ID NO: 744686 - protein, 146 aa, Homo sapiens
MANPKLLGLELSEAEAIGADSARFEELLLQASKELQQAQTTRPESTQIQPQPALDLVLLSPEKPHLNLWLEAPDLLLAEIDLPKLDGALGLSLEIGENRLVMGGPQQLYHLDAYIPLQINSHESKAAFHRKRKQLMVAMPLLPVPS

SEQ ID NO: 744687 - protein, 187 aa, Homo sapiens
MANPKLLGLELSEAEAIGADSARFEELLLQASKELQQAQTTRPESTQIQPQPGFCIKTNSSEGKVFINICHSPSIPPPADVTEEELLQMLEEDQAGFRIPMSLGEPHAELDAKGQGCTAYDVAVNSDFYRRMQNSDFLRELVMGGPQQLYHLDAYIPLQINSHESKAAFHRKRKQLMVAMPLLPVPS

SEQ ID NO: 744688 - protein, 290 aa, Homo sapiens; identical to SEQ ID NO: 744674

SEQ ID NO: 744689 - protein, 199 aa, Homo sapiens [sequence omitted]

SEQ ID NO: 744690 - protein, 112 aa, Homo sapiens
LEGEKGQHARQRPGSCAQPWTLFLLSPEKPHLNLWLEAPDLLLAEIDLPKLDGALGLSLEIGENRLVMGGPQQLYHLDAYIPLQINSHESKAAFHRKRKQLMVAMPLLPVPS

SEQ ID NO: 744691 - protein, 45 aa, Homo sapiens
MANPKLLGLELSEAEAIGADSVLKLRCSHARSCTEPRGDSLETAC

SEQ ID NO: 744692 - protein, 351 aa, Homo sapiens [sequence omitted]

SEQ ID NO: 744693 - protein, 257 aa, Homo sapiens
MANPKLLGLELSEAEAIGADSARFEELLLQASKELQQAQTTRPESTQIQPQPGFCIKTNSSEGKVFINICHSPSIPPPADVTEEELLQMLEEDQAGFRIPMSLGEPHAELDAKGQGCTAYDVAVNSDFYRRMQNSDFLRELVITIAREGLEDKYNLQLNPEWRMMKNRPFMGSISQQNIRSEQRPRIQELGDLYTPAPGRAESGPEKPHLNLWLEAPDLLLAEIDLPKLINSHESKAAFHRKRKQLMVAMPLLPVPS

SEQ ID NO: 744694 - protein, 192 aa, Homo sapiens
MANPKLLGLELSEAEAIGADSARFEELLLQASKELQQAQTTRPESTQIQPQPGFCIKTNSSEGKVFINICHSPSIPPPADVTEEELLQMLEEDQAGFRIPMSLGEPHAELDAKGQGCTAYDVAVNSDFYRRMQNSDFLRELVITIAREGLEDKYNLQLNPEWRMMKNRPFMGSISQQAVSSRRLYPAADQLS

SEQ ID NO: 744695 - protein, 290 aa, Homo sapiens; identical to SEQ ID NO: 744674

SEQ ID NO: 744696 - protein, 321 aa, Homo sapiens
MANPKLLGLELSEAEAIGADSARFEELLLQASKELQQAQTTRPESTQIQPQPGFCIKTNSSEGKVFINICHSPSIPPPADVTEEELLQMLEEDQAGFRIPMSLGEPHAELDAKGQGCTAYDVAVNSDFYRRMQVGGRGCGSGLGRGLYPYPPRHRLSFPSLSPQNSDFLRELVITIAREGLEDKYNLQLNPEWRMMKNRPFMGSISQQNIRSEQRPRIQELGDLYTPAPGRAESGPEKPHLNLWLEAPDLLLAEIDLPKLDGALGLSLEIGENRLVMGGPQQLYHLDAYIPLQINSHESKAAFHRKRKQLMVAMPLLPVPS

SEQ ID NO: 744697 - protein, 193 aa, Homo sapiens; identical to SEQ ID NO: 744678

SEQ ID NO: 744698 - protein, 126 aa, Homo sapiens
MKNRPFMGSISQQNIRSEQRPRIQELGDLYTPAPGRAESGPEKPHLNLWLEAPDLLLAEIDLPKLDGALGLSLEIGENRLVMGGPQQLYHLDAYIPLQINSHESKAAFHRKRKQLMVAMPLLPVPS

SEQ ID NO: 744699 - protein, 140 aa, Homo sapiens
MANPKLLGLELSEAEAIGADSARFEELLLQASKELQQAQTTRPESTQIQPQPGFCIKTNSSEGKVFINICHSPSIPPPADVTEEELLQMLEEDQAGFRIPMSLGEPHAELDAKGQGCTAYDVAVNSDFYRRMQVGGRGCG

SEQ ID NO: 744700 - protein, 134 aa, Homo sapiens
MRLKVMEVVVEERLGLSLELGDLYTPAPGRAESGPEKPHLNLWLEAPDLLLAEIDLPKLVSFARWPEQGNEVWKGQGLSLSVSDKGLLLDLSVASSLPGGPQATFWCCPEGAQGIVSARSLRLVIAVFCLFLGD

SEQ ID NO: 744701 - protein, 115 aa, Homo sapiens
HGQQVPPFGLHTQPLEKQKKGPPLPPLSGGQIQQLARCQLMHMLKWNKGVHTKSDRGKDTPTQGGESSTGCDDSLSLRKEVLQAQGPFLRGRVEVERPLAPDCLSSHFAVGIQTW

SEQ ID NO: 744702 - protein, 110 aa, Homo sapiens
GLCQTSEVPGGPAQSQRLRNRLAFPEALCELRRLMKCTRMLLKYVRTRLESLALDGLLLQCPPCLTFCLSLCKAALRTSCSRGTHPCVTLIPRAGHSASFCSCLSLWFRT

SEQ ID NO: 744703 - protein, 159 aa, Homo sapiens
MLQAGEKRSLTSVGIRGTPLGPLDEGCWAGEPHPQGGVKGEKGSSQAGLPRPSGFARCQGQHLILNLNFRLSTKRHPFAVCFLEGTPFLDSCPDLPCPGHENSGMVEAGCPSQMGKEAKVQSGGGASLQKHGRTRPWILAQGSFQHRRLLALVSNPPCH

SEQ ID NO: 744704 - protein, 175 aa, Homo sapiens
GAGPLVSGLGCMGCSGADLLDDGGGPVAAEAVSPWLLHAMCCVCVCPLCMALHEFSLLSLLCDACMHVTCASDGCHRRWSPIPGADSAHRCPTDGPCVPVLAAVGVLRVTHRPLLSGHAATTCPTLSMSCAVVHLTCADRHGLHHVWLGMRLAGTLAWTGHRDRGADGLWPTGIG

SEQ ID NO: 744705 - protein, 886 aa, Homo sapiens
MALLVDRVRGHWRIAAGLLFNLLVSICIVFLNKWIYVYHGFPNMSLTLVHFVVTWLGLYICQKLDIFAPKSLPPSRLLLLALSFCGFVVFTNLSLQNNTIGTYQLAKAMTTPVIIAIQTFCYQKTFSTRIQLTLIPITLGVILNSYYDVKFNFLGMVFAALGVLVTSLYQVWVGAKQHELQVNSMQLLYYQAPMSSAMLLVAVPFFEPVFGEGGIFGPWSVSALLMVLLSGVIAFMVNLSIYWIIGNTSPVTYNMFGHFKFCITLFGGYVLFKDPLSINQALGILCTLFGILAYTHFKLSEQEGSGVNWHNVLNWVFVEKRMLSQEDKKYCEVCKLLKKKKKTRDSSGEFVASGSQDTNIKLWDIRRKGCVFRYRGHSQAVRCLRFSPDGKWLASAADDHTVKLWDLTAGKMMSEFPGHTGPVNVVEFHPNEYLLASGSSDRTIRFWDLEKFQVVSCIEGEPGPVRSVLFNPDGCCLYSGCQDSLRVYGWEPERCFDVVLVNWGKVADLAICNDQLIGVAFSQSNVSSYVVDLTRVTRTGTVARDPVQDHRPLAQPLPNPSAPLRRIYERPSTTCSKPQRVKQNSESERRSPSSEDDRDERESRAEIQNAEDYNEIFQPKNSISRTPPRRSEPFPAPPEDDAATAKEAAKPSPAMDVQFPVPNLEVLPRPPVVASTPAPKAEPAIIPATRNEPIGLKASDFLPAVKIPQQAELVDEDAMSQIRKGHDTMCVVLTSRHKNLDTVRAVWTMGDIKTSVDSAVAINDLSVVVDLLNIVNQKASLWKLDLCTTVLPQIEKLLQSKYESYVQTGCTSLKLILQRFLPLITDMLAAPPSVGVDISREERLHKCRLCYKQLKSISGLVKSKSGLSGRHGSTFRELHLLMASLD

SEQ ID NO: 744706 - protein, 139 aa, Homo sapiens
MATPVVTKTAWKLQEIVAHASNVSSLVLGKASGRLLATGGDDCRVNLWSINKPNCIMSLTGHTSPVESVRLNTPEELIVAGSQSGSIRVWDLEAAKIWPSWAQASLCWFHPSELWPGPERTYLDSGRGFQGAPAGGHVL

SEQ ID NO: 744707 - protein, 256 aa, Homo sapiens
MATPVVTKTAWKLQEIVAHASNVSSLVLGKASGRLLATGGDDCRVNLWSINKPNCIMSLTGHTSPVESVRLNTPEELIVAGSQSGSIRVWDLEAAKILRTLMGHKANICSLDFHPYGEFVASGSQDTNIKLWDIRRKGCVFRYRGHSQAVRCLRFSPDGKWLASAADDHTVKLWDLTAGKMMSEFPGHTGPVNVVEFHPNEYLLASGSSDRTSVSGPWGKSQMSGWASQVNPSRTDNATFTQRICTLQQVAGTQVS

SEQ ID NO: 744708 - protein, 143 aa, Homo sapiens
TTASVRGPVSNRPRPVWTEESSGQGRSAAHRAWPQPPLLFLVHPLAHEPLPGPCCCPVAVLEEVMLVPGHLYSPELLRQLSPAIAAQLCPTVASWGSELSPGAAAVIYKANFIKFVTITKKKKKKPASFFFFFLFSFFVSFYV

SEQ ID NO: 744709 - protein, 655 aa, Homo sapiens
MATPVVTKTAWKLQEIVAHASNVSSLVLGKASGRLLATGGDDCRVNLWSINKPNCIMSLTGHTSPVESVRLNTPEELIVAGSQSGSIRVWDLEAAKILRTLMGHKANICSLDFHPYGEFVASGSQDTNIKLWDIRRKGCVFRYRGHSQAVRCLRFSPDGKWLASAADDHTVKLWDLTAGKMMSEFPGHTGPVNVVEFHPNEYLLASGSSDRTIRFWDLEKFQVVSCIEGEPGPVRSVLFNPDGCCLYSGCQDSLRVYGWEPERCFDVVLVNWGKVADLAICNDQLIGVAFSQSNVSSYVVDLTRVTRTGTVARDPVQDHRPLAQPLPNPSAPLRRIYERPSTTCSKPQRVKQNSESERRSPSSEDDRDERESRAEIQNAEDYNEIFQPKNSISRTPPRRSEPFPAPPEDDAATAKEAAKPSPAMDVQFPVPNLEVLPRPPVVASTPAPKAEPAIIPATRNEPIGLKASDFLPAVKIPQQAELVDEDAMSQIRKGHDTMCVVLTSRHKNLDTVRAVWTMGDIKTSVDSAVAINDLSVVVDLLNIVNQKASLWKLDLCTTVLPQIEKLLQSKYESYVQTGCTSLKLILQRFLPLITDMLAAPPSVGVDISREERLHKCRLCYKQLKSISGLVKSKSGLSGRHGSTFRELHLLMASLD

SEQ ID NO: 744710 - protein, 672 aa, Homo sapiens
MATPVVTKTAWKLQEIVAHASNVSSLVLGKASGRLLATGGDDCRVNLWSINKPNCIMSLTGHTSPVESVRLNTPEELIVAGSQSGSIRVWDLEAAKILRTLMGHKANICSLDFHPYGEFVASGSQDTNIKLWDIRRKGCVFRYRGHSQAVRCLRFSPDGKWLASAADDHTVKLWDLTAGKMMSEFPGHTGPVNVVEFHPNEYLLASGSSDRTIRFWDLEKFQVVSCIEGEPGPVRSVLFNPDGCCLYSGCQDSLRVYGWEPERCFDVVLVNWGKVADLAICNDQLIGVAFSQSNVSSYVVDLTRVTRTGTVARDPVQDHRPLAQPLPNPSAPLRRIYERPSTTCSKPQRVKQNSESERRSPSSEDDRDERESRAEIQNAEDYNEIFQPKNSISRTPPRRSEPFPAPPEDDAATAKEAAKPSPAMDVQFPVPNLEVLPRPPVVASTPAPKAEPAIIPATRNEPIGLKASDFLPAVKIPQQAELVDEDAMSQIRKGHDTMCVVLTSRHKNLDTVRAVWTMGDIKGHTVPHCPTPDGALFAQTSVDSAVAINDLSVVVDLLNIVNQKASLWKLDLCTTVLPQIEKLLQSKYESYVQTGCTSLKLILQRFLPLITDMLAAPPSVGVDISREERLHKCRLCYKQLKSISGLVKSKSGLSGRHGSTFRELHLLMASLD

SEQ ID NO: 744711 - protein, 655 aa, Homo sapiens; identical to SEQ ID NO: 744709

SEQ ID NO: 744712 - protein, 655 aa, Homo sapiens; identical to SEQ ID NO: 744709

SEQ ID NO: 744713 - protein, 548 aa, Homo sapiens [sequence omitted]

SEQ ID NO: 744714 - protein, 565 aa, Homo sapiens
MATPVVTKTAWKLQEIVAHASNVSSLVLGKASGRLLATGGDDCRVNLWSINKPNCIMSLTGHTSPVESVRLNTPEELIVAGSQSGSIRVWDLEAAKILRTLMGHKANICSLDFHPYGEFVASGSQDTNIKLWDIRRKGCVFRYRGHSQAVRCLRFSPDGKWLASAADDHTVKLWDLTAGKMMSEFPGHTGPVNVVEFHPNEYLLASGSSDRTIRFWDLEKFQVVSCIEGEPGPVRSVLFNPDGCCLYSGCQDSLRVYGWEPERCFDVVLVNWGKVADLAICNDQLIGVAFSQSNVSSYVVDLTRVTRTGTVARDPVQDHRPLAQPLPNPSAPLRRIYERPSTTCSKPQRVKQNSESERRSPSSEDDRDERESRAEIQNAEDYNEIFQPKNSISRTPPRRSEPFPAPPEDDAATAKEAAKPSPAMDVQFPVPNLEVLPRPPVVASTPAPKAEPAIIPATRNEPIGLKASDFLPAVKIPQQAELVDEDAMSQIRKGHDTMCVVLTSRHKNLDTVRAVWTMGDIKGHTVPHCPTPDGALFAQTSVDSAVAINDLSVVVDLLNIVNQKA

SEQ ID NO: 744715 - protein, 407 aa, Homo sapiens
MATPVVTKTAWKLQEIVAHASNVSSLVLGKASGRLLATGGDDCRVNLWSINKPNCIMSLTGHTSPVESVRLNTPEELIVAGSQSGSIRVWDLEAAKILRTLMGHKANICSLDFHPYGEFVASGSQDTNIKLWDIRRKGCVFRYRGHSQAVRCLRFSPDGKWLASAADDHTVKLWDLTAGKMMSEFPGHTGPVNVVEFHPNEYLLASGSSDRTIRFWDLEKFQVVSCIEGEPGPVRSVLFNPDGCCLYSGCQDSLRVYGWEPERCFDVVLVNWGKVADLAICNDQLIGVAFSQSNVSSYVVDLTRVTRTGTVARDPVQDHRPLAQPLPNPSAPLRRIYERPSTTCSKPQRVKQNSESERRSPSSEDDRDERESRAEIQNAEDYNEIFQPKNSISPERPTPGRSEGPFP

SEQ ID NO: 744716 - protein, 292 aa, Homo sapiens
MATPVVTKTAWKLQEIVAHASNVSSLVLGKASGRLLATGGDDCRVNLWSINKPNCIMSLTGHTSPVESVRLNTPEELIVAGSQSGSIRVWDLEAAKILRTLMGHKANICSLDFHPYGEFVASGSQDTNIKLWDIRRKGCVFRYRGHSQAVRCLRFSPDGKWLASAADDHTVKLWDLTAGKMMSEFPGHTGPVNVVEFHPNEYLLASGSSDRTIRFWDLEKFQVVSCIEGEPGPVRSVLFNPDGCCLYSGCQDSLRVYGWEPERCFDVVLVNWGKVADLAICNDQLVREPWHP

SEQ ID NO: 744717 - protein, 256 aa, Homo sapiens; identical to SEQ ID NO: 744707

SEQ ID NO: 744718 - protein, 185 aa, Homo sapiens
MATPVVTKTAWKLQEIVAHASNVSSLVLGKASGRLLATGGDDCRVNLWSINKPNCIMSLTGHTSPVESVRLNTPEELIVAGSQSGSIRVWDLEAAKILRTLMGHKANICSLDFHPYGEFVASGSQDTNIKLWDIRRKGCVFRYRGHSQAVRCLRFSPDGKWLASAADDHTVKIWISRLAIRGGSL

SEQ ID NO: 744719 - protein, 475 aa, Homo sapiens
MMSEFPGHTGPVNVVEFHPNEYLLASGSSDRTIRFWDLEKFQVVSCIEGEPGPVRSVLFNPDGCCLYSGCQDSLRVYGWEPERCFDVVLVNWGKVADLAICNDQLIGVAFSQSNVSSYVVDLTRVTRTGTVARDPVQDHRPLAQPLPNPSAPLRRIYERPSTTCSKPQRVKQNSESERRSPSSEDDRDERESRAEIQNAEDYNEIFQPKNSISRTPPRRSEPFPAPPEDDAATAKEAAKPSPAMDVQFPVPNLEVLPRPPVVASTPAPKAEPAIIPATRNEPIGLKASDFLPAVKIPQQAELVDEDAMSQIRKGHDTMCVVLTSRHKNLDTVRAVWTMGDIKTSVDSAVAINDLSVVVDLLNIVNQKASLWKLDLCTTVLPQIEKLLQSKYESYVQTGCTSLKLILQRFLPLITDMLAAPPSVGVDISREERLHKCRLCYKQLKSISGLVKSKSGLSGRHGSTFRELHLLMASLD

SEQ ID NO: 744720 - protein, 599 aa, Homo sapiens
MSLTGHTSPVESVRLNTPEELIVAGSQSGSIRVWDLEAAKILRTLMGHKANICSLDFHPYGEFVASGSQDTNIKLWDIRRKGCVFRYRGHSQAVRCLRFSPDGKWLASAADDHTVKLWDLTAGKMMSEFPGHTGPVNVVEFHPNEYLLASGSSDRTIRFWDLEKFQVVSCIEGEPGPVRSVLFNPDGCCLYSGCQDSLRVYGWEPERCFDVVLVNWGKVADLAICNDQLIGVAFSQSNVSSYVVDLTRVTRTGTVARDPVQDHRPLAQPLPNPSAPLRRIYERPSTTCSKPQRVKQNSESERRSPSSEDDRDERESRAEIQNAEDYNEIFQPKNSISRTPPRRSEPFPAPPEDDAATAKEAAKPSPAMDVQFPVPNLEVLPRPPVVASTPAPKAEPAIIPATRNEPIGLKASDFLPAVKIPQQAELVDEDAMSQIRKGHDTMCVVLTSRHKNLDTVRAVWTMGDIKTSVDSAVAINDLSVVVDLLNIVNQKASLWKLDLCTTVLPQIEKLLQSKYESYVQTGCTSLKLILQRFLPLITDMLAAPPSVGVDISREERLHKCRLCYKQLKSISGLVKSKSGLSGRHGSTFRELHLLMASLD

SEQ ID NO: 744721 - protein, 599 aa, Homo sapiens; identical to SEQ ID NO: 744720

SEQ ID NO: 744722 - protein, 652 aa, Homo sapiens
QLIGAGGKVGGALSRRFVVRVGCQAAANQGRGWRQVGDDCRVNLWSINKPNCIMSLTGHTSPVESVRLNTPEELIVAGSQSGSIRVWDLEAAKILRTLMGHKANICSLDFHPYGEFVASGSQDTNIKLWDIRRKGCVFRYRGHSQAVRCLRFSPDGKWLASAADDHTVKLWDLTAGKMMSEFPGHTGPVNVVEFHPNEYLLASGSSDRTIRFWDLEKFQVVSCIEGEPGPVRSVLFNPDGCCLYSGCQDSLRVYGWEPERCFDVVLVNWGKVADLAICNDQLIGVAFSQSNVSSYVVDLTRVTRTGTVARDPVQDHRPLAQPLPNPSAPLRRIYERPSTTCSKPQRVKQNSESERRSPSSEDDRDERESRAEIQNAEDYNEIFQPKNSISRTPPRRSEPFPAPPEDDAATAKEAAKPSPAMDVQFPVPNLEVLPRPPVVASTPAPKAEPAIIPATRNEPIGLKASDFLPAVKIPQQAELVDEDAMSQIRKGHDTMCVVLTSRHKNLDTVRAVWTMGDIKTSVDSAVAINDLSVVVDLLNIVNQKASLWKLDLCTTVLPQIEKLLQSKYESYVQTGCTSLKLILQRFLPLITDMLAAPPSVGVDISREERLHKCRLCYKQLKSISGLVKSKSGLSGRHGSTFRELHLLMASLD

SEQ ID NO: 744723 - protein, 114 aa, Homo sapiens
DVICSIIFHKRFDYKDQQFLNLMEKLNGKYESYVQTGCTSLKLILQRFLPLITDMLAAPPSVGVDISREERLHKCRLCYKQLKSISGLVKSKSGLSGRHGSTFRELHLLMASLD

SEQ ID NO: 744724 - protein, 144 aa, Homo sapiens
AAAMAVPSASCTCSWPVWTEESSGQGRSAAHRAWPQPPLLFLVHPLAHEPLPGPCCCPVAVLEEVMLVPGHLYSPELLRQLSPAIAAQLCPTVASWGSELSPGAAAVIYKANFIKFVTITRFPCGECFLLATGLPGPRSACPMV

SEQ ID NO: 744725 - protein, 296 aa, Homo sapiens
LEDPISGRDERESRAEIQNAEDYNEIFQPKNSISRTPPRRSEPFPAPPEDDAATAKEAAKPSPAMDVQFPVPNLEVLPRPPVVASTPAPKAEPAIIPATRNEPIGLKASDFLPAVKIPQQAELVDEDAMSQIRKGHDTMCVVLTSRHKNLDTVRAVWTMGDIKTSVDSAVAINDLSVVVDLLNIVNQKASLWKLDLCTTVLPQIEKLLQSKYESYVQTGCTSLKLILQRFLPLITDMLAAPPSVGVDISREERLHKCRLCYKQLKSISGLVKSKSGLSGRHGSTFRELHLLMASLD

SEQ ID NO: 744726 - protein, 65 aa, Homo sapiens
MATPVVTKTAWKLQEIVAHASNVSSLVLGKASGRLLATGGDDCRVNLWSINKPNCIMSRFGILYN

SEQ ID NO: 744727 - protein, 896 aa, Homo sapiens
MIVLLLFALLWMVEGVFSQLHYTVQEEQEHGTFVGNIAEDLGLDITKLSARGFQTVPNSRTPYLDLNLETGVLYVNEKIDREQICKQSPSCVLHLEVFLENPLELFQVEIEVLDINDNPPSFPEPDLTVEISESATPGTRFPLESAFDPDVGTNSLRDYEITPNSYFSLDVQTQGDGNRFAELVLEKPLDREQQAVHRYVLTAVDGGGGGGVGEGGGGGGGAGLPPQQQRTGTALLTIRVLDSNDNVPAFDQPVYTVSLPENSPPGTLVIQLNATDPDEGQNGEVVYSFSSHISPRARELFGLSPRTGRLEVSGELDYEESPVYQVYVQAKDLGPNAVPAHCKVLVRVLDANDNAPEISFSTVKEAVSEGAAPGTVVALFSVTDRDSEENGQVQCELLGDVPFRLKSSFKNYYTIVTEAPLDREAGDSYTLTVVARDRGEPALSTSKSIQVQVSDVNDNAPRFSQPVYDVYVTENNVPGAYIYAVSATDRDEGANAQLAYSILECQIQGMSVFTYVSINSENGYLYALRSFDYEQLKDFSFQVEARDAGSPQALAGNATVNILIVDQNDNAPAIVAPLPGRNGTPAREVLPRSAEPGYLLTRVAAVDADDGENARLTYSIVRGNEMNLFRMDWRTGELRTARRVPAKRDPQRPYELVIEVRDHGQPPLSSTATLVVQLVDGAVEPQGGGGSGGGGSGEHQRPSRSGGGETSLDLTLILIIALGSVSFIFLLAMIVLAVRCQKEKKLNIYTCLASDCCLCCCCCGGGGSTCCGRQARARKKKLSKSDIMLVQSSNVPSNPAQVPIEESGGFGSHHHNQNYCYQVCLTPESAKTDLMFLKPCSPSRSTDTEHNPCGAIVTGYTDQQPDIISNGSILSNEVRLKRKDHHLSSPPSESLL

SEQ ID NO: 744728 - protein, 1048 aa, Homo sapiens
MIVLLLFALLWMVEGVFSQLHYTVQEEQEHGTFVGNIAEDLGLDITKLSARGFQTVPNSRTPYLDLNLETGVLYVNEKIDREQICKQSPSCVLHLEVFLENPLELFQVEIEVLDINDNPPSFPEPDLTVEISESATPGTRFPLESAFDPDVGTNSLRDYEITPNSYFSLDVQTQGDGNRFAELVLEKPLDREQQAVHRYVLTAVDGGGGGGVGEGGGGGGGAGLPPQQQRTGTALLTIRVLDSNDNVPAFDQPVYTVSLPENSPPGTLVIQLNATDPDEGQNGEVVYSFSSHISPRARELFGLSPRTGRLEVSGELDYEESPVYQVYVQAKDLGPNAVPAHCKVLVRVLDANDNAPEISFSTVKEAVSEGAAPGTVVALFSVTDRDSEENGQVQCELLGDVPFRLKSSFKNYYTIVTEAPLDREAGDSYTLTVVARDRGEPALSTSKSIQVQVSDVNDNAPRFSQPVYDVYVTENNVPGAYIYAVSATDRDEGANAQLAYSILECQIQGMSVFTYVSINSENGYLYALRSFDYEQLKDFSFQVEARDAGSPQALAGNATVNILIVDQNDNAPAIVAPLPGRNGTPAREVLPRSAEPGYLLTRVAAVDADDGENARLTYSIVRGNEMNLFRMDWRTGELRTARRVPAKRDPQRPYELVIEVRDHGQPPLSSTATLVVQLVDGAVEPQGGGGSGGGGSGEHQRPSRSGGGETSLDLTLILIIALGSVSFIFLLAMIVLAVRCQKEKKLNIYTCLASDCCLCCCCCGGGGSTCCGRQARARKKKLSKSDIMLVQSSNVPSNPAQVPIEESGGFGSHHHNQNYCYQVCLTPESAKTDLMFLKPCSPSRSTDTEHNPCGAIVTGYTDQQPDIISNGSILSNETKHQRAELSYLVDRPRRVNSSAFQEADIVSSKDSGHGDSEQGDSDHDATNRAQSAGMDLFSNCTEECKALGHSDRCWMPSFVPSDGRQAADYRSNLHVPGMDSVPDTEVFETPEAQPGAERSFSTFGKEKALHSTLERKELDGLLTNTRAPYKPPYLTRKQDMLVNSTGLT

SEQ ID NO: 744729 - protein, 574 aa, Homo sapiens
MEASLGIQMDEPMAFSPQRDRFQAEGSLKKNEQNFKLAGVKKDIEKLYEAVPQLSNVFKIEDKIGEGTFSSVYLATAQLQVGPEEKIALKHLIPTSHPIRIAAELQCLTVAGGQDNVMGVKYCFRKNDHVVIAMPYLEHESFLDILNSLSFQEVREYMLNLFKALKRIHQFGIVHRDVKPSNFLYNRRLKKYALVDFGLAQGTHDTKIELLKFVQSEAQQERCSQNKSHIITGNKIPLSGPVPKELDQQSTTKASVKRPYTNAQIQIKQGKDGKEGSVGLSVQRSVFGERNFNIHSSISHESPAVKLMKQSKTVDVLSRKLATKKKAISTKVMNSAVMRKTASSCPASLTCDCYATDKVCSICLSRRQQVAPRAGTPGFRAPEVLTKCPNQTTAIDMWSAGVIFLSLLSGRYPFYKASDDLTALAQIMTIRGSRETIQAAKTFGKSILCSKEVPAQDLRKLCERLRGMDSSTPKLTSDIQGHASHQPAISEKTDHKASCLVQTPPGQYSGNSFKKGDSNSCEHCFDEYNTNLEGWNEVPDEAYDLLDKLLDLNPASRITAEEALLHPFFKDMSL

SEQ ID NO: 744730 - protein, 610 aa, Homo sapiens
RAAAGSVAQAHPIDSLLCSPCGCNPLAGILHLNWLVMEASLGIQMDEPMAFSPQRDRFQAEGSLKKNEQNFKLAGVKKDIEKLYEAVPQLSNVFKIEDKIGEGTFSSVYLATAQLQVGPEEKIALKHLIPTSHPIRIAAELQCLTVAGGQDNVMGVKYCFRKNDHVVIAMPYLEHESFLDILNSLSFQEVREYMLNLFKALKRIHQFGIVHRDVKPSNFLYNRRLKKYALVDFGLAQGTHDTKIELLKFVQSEAQQERCSQNKSHIITGNKIPLSGPVPKELDQQSTTKASVKRPYTNAQIQIKQGKDGKEGSVGLSVQRSVFGERNFNIHSSISHESPAVKLMKQSKTVDVLSRKLATKKKAISTKVMNSAVMRKTASSCPASLTCDCYATDKVCSICLSRRQQVAPRAGTPGFRAPEVLTKCPNQTTAIDMWSAGVIFLSLLSGRYPFYKASDDLTALAQIMTIRGSRETIQAAKTFGKSILCSKEVPAQDLRKLCERLRGMDSSTPKLTSDIQGHASHQPAISEKTDHKASCLVQTPPGQYSGNSFKKGDSNSCEHCFDEYNTNLEGWNEVPDEAYDLLDKLLDLNPASRITAEEALLHPFFKDMSL
